United States Patent Application Publication US 2012/0017338 A1 - sequence listing, part 6

SEQ ID NO: 19530 - DNA, 798 bp, Zea mays
  Peptide Sequence Number=SeqID_61309
atgtggcagtacaccggggacggcgactccgaccgtcattcagccgagaacctgacgaaggaggagctcagggcccgcatccttgctatcacggcgggagtcacatcagacttcctggacgagagtggcccactaccgttcaaccaatcgaggttgagcgacctgaggaaggcggagaagaagagggcgcgtctggcgcgagctgaaccgaggagaagcattaccccatccaccgacacggaggacttgacctccaccgacgctgaggccagttctaacgtccagccccagagggtgggggatgctgcggaggccgcctcgccggctgcgctcgaggaccgccgtgggagagggccggaggccgccggttcttcctcttcccccaccacgacaaccgtgcgcgacggtttgggcgagatgggctcgccacctccggtggcagctgctacggtggagcgccgtgaggaggccgagccaacggccgtgccacctcctgctccttccgctccactggttgcgatgcctcgggtgcggagggcggtggttgcccggacgcgttcttcccggtatgttgttgttgtctttccttcgcactaccatttgtcacgtgccttaacttcgttcaattccatccagcgcgtatgtgcagggcaagacggtgaaaagcgtggcccttgcggcgaaagggggcacctcgaccactcagccttccttggtggtcgctggcgtgaccgccttggcttcctcagcccccaagggaacgctgggcgcgtccgttgtcgccacgggcgcccctga

SEQ ID NO: 19531 - DNA, 1482 bp, Zea mays
  Peptide Sequence Number=SeqID_61310
atgttcgatgatatgtcatttacagaggtggtctgggatgatgaaggggcactattcgatgaaatgcattgcacggatgtcatctgggatgaggagacacatcatggctttgactcacatggcctattgcagcaccatgctgaagcaatggataaccagatgcagggcaaggagaaattggctcaaagtggagattactatgatgagaggaaagtcaatattgaaccagacatcaacaacttgctcattcatgtcaatgaccatttctctatgttggtgattggtgcggattctaggcgaagtgatgttgtgtgggacgaggacatgttatctgacctcgatactcatggtggcttattacagttactggcatgttgtaaagatgatgagctcaaccaggacagagacactccttttctcttgggccttggtatggatcaggtggatgagatgctggccagcccgtccagccttggcatgaatgaggacttgccatctgtacctgagacacatggctcgttattgcagcaagtggcatgggacaggaagcactttgcttatgaaatgtgcacgcttattgctgagatggtcctggaagatgttctcaccgatgttggcaacctcgctttcagcattgattcaagcatgcagatcagtgatcaaccttccaaatatgcgctagtcatcgatgcttatctgctgaagacgcagtacaaaaaaccatacatttctataagccaatgggatccaggaatttggtgcaaaggtactatggcccatgagcagcaacagcttgagatatataggatgtttgagaaacaatgggattcagttatccttaaatggttcaggaatccttttgtgctgctgcaatcatgcaatggggaggatctgaatgaacaaggcacagtgcctgtaaatgacattttcgatgtattggctgctggccaggagttgaattttggcaacgtcaccttgatcatttatgggggatgccaaggagcaatgggtctgcaggttctttttgcagaattacacccttggcaccacaatgtctttacctccatagaattagcaatacagtcatggagaatcaatggtttcagtccaggaagctgcaagctcaacagacaatctatacttgttgctactaacttgcagttcaattataaagcttccaagtttgtatcctttactgatacttatcagatatacaagaacacatgcatttgtatcggagaattggaacctgctagttggagagatacttgttggctacctgagatctcacatgccaatgtgtccacacttgctagtgaggaaatagataacatgcttttccaggttggtgattttcatccaggagagagtgagcagcttgagctttacatgataacattgatacagtgggatctaggtccagtagaattttacaaatcaaactgtaggtgccctgctgcagaactgatagggtggtgctga

SEQ ID NO: 19532 - DNA, 873 bp, Zea mays
  Peptide Sequence Number=SeqID_61311
atggcggaggaggtgaaccagtcgctatcgctggccggcagcaagatcccctcgggcgccttcaacgcagagcctctctgcttcgacgccctcctcgtcaacctctacagcgtcgaggccgtgcgcgcgagcctcgccctcagggaccacgtcaagcaggacctcccgcccttctgggaccccaccgccctcgccgagttcatcgacaggtacgggactcacgtcatcgtcggggtgaagatgggaggcaaggacgtggtgtgcgtgaagcagctcaagggctccagcctaatgcagagcgacgtgcaggcccggctcaagaagctcgccgacgacaggttctcggaggattccacggcaagttccacttccaccgcggaagacgcagacgtcgtgccctttatcaccaacgtgctcatggcaatgtacacacaatgcagcaacgtcgattttgggcttattgcaaatcctggtgaaaccaaggtgaaaagggaagctaccaagaagagccaaaaggagttggagaagtttggctcaaaagagccaaacttgggctggtctggcagcgccggacagtccgcggccgagtccgaccccaagagcccaggccgaggaggtccaggtctggcggcggcaatcgcgcggtggccgttgcgggagcagcaccgacaccggatgccgttggggaagggtgcgaactggtggccggacgaggcgggcagagggccccaggagtcattggcaaatcacgacatgcaaatattagttttctgtgatgattccggtgcacccgcagacagggcagttttggagcttccaaatgaagactccaacggctccaaggctccttggggctataaaagggacccctag

SEQ ID NO: 19533 - DNA, 513 bp, Zea mays
  Peptide Sequence Number=SeqID_61312
atgcagaatttgatggctggcaacaaagaggaggggccggcggctaatccgattcgaacgtacctgaggaaggagaagaggaatcaaccgccggtgggccggaagggcggcgtcgaggacacctgcggcggcccggatcgaggccgaggtcggcatggtgttgggtgctgggagagaataggagaggaggggcgagcgtggcggcggtgggcatcgtgtccggtcgtcccccgcggcaacggctttggcaacggcgagctcccgcatcgcgagcgcctcctgcggcgcgaggacggtggcgtggtagtcgacgggcctgcgccaagtctccggcgacgggacgtcggcctagacgacgtgggtcctcctccgcgtggtggttgtgacagtggcggcggtgcagtagagcggccagccgagggaggcgaggagagggaggtgtggttgacgtcgacgagggaggcgaggagagggagggtggagcggaggaaggtggggggaggagaggggtaa

SEQ ID NO: 19534 - DNA, 162 bp, Zea mays
  Peptide Sequence Number=SeqID_61313
atggagctcccggtggcggaccctggcacggagcgaggcgagggcccgctgaatcagtccccatactgcgactcggaggcgatgcacaagctggcgcagatcctgctgccgggcctcgccgccatgccgatgagatggctcagatattcaggcagcgaatag

SEQ ID NO: 19535 - DNA, 357 bp, Zea mays
  Peptide Sequence Number=SeqID_61314
atggtgttgagcaacccgcccccacgcacacgacaccgcgctgcttccacctccgccatgatctgcgccgcacaccccagttcgtacagcgctcgtccagccagttggagcagcgactccgccgccgccgagcgattccgcgcgactgcgccagccgagtttcagagcaccgccgtcgaccttctccacacctccgccgacaagcgctgccgcagcaccgcagcagagcgcctgcgcgcgtactccccgaccgagatccacagcacagccgccgagcttctccacgccgctgccgccaagcgagtccgcgcctaccgctctcgtggtcgtctccggccgagctcctccacgcagtga

SEQ ID NO: 19536 - DNA, 1329 bp, Zea mays
  Peptide Sequence Number=SeqID_61315
atggaagcaacgaaaccccacgctaagcctgaaaagcttaccaaagcagaacgaaaggaggctaaactcaatgcgattgcatgtgatgctatctttggcgcattgagtcttgatgtcttcaatagagtagggagaggaaccaagttgaccgatgctgatgtagcaagaaagatcatccaagtgcttccaaataaaatatatgcaagcatcatcacctacctcctcaacaatgaagagttcagcacaatgacgcccaccaaagttcttggcaaaattaccgcatttgagatgtaccacaagattggccaagaaccttcttcaccaaagttatgtggactcataagccatgaagaggagaagaaaaggaagggcaagagcaagaaaattgaatcaagctcaagctcaagtgaagaagaagatgatgagaaagatggtgatgaagatgatcaaaagcaaagttcctcctcctccgatgatgaagaaatgaagatgttgatcaagagattggagagaacaatgaagaagctcaactccaagggcatccccatcaccattgaagatgttcaattcaataaccaaaacggtgagaatttcgtgggtgatcaagaatacttcgacagccagcaggatcaacaggagttcagtgaccaaggcaaagtcttgaaaggcttcatagtggaccctgttgaccttccttggaagtgggtcaagaggttggctgcctcggacaaaggggtaaaccacgactcatggggaaaatgccaagtgatcagaagcccgtttgccccagtgctgctgcctaccgtgccaggtccactcctagagcacctagagtggaacctgaggtcatcgtcatctgacgatgaggagcccatgatggtggaggaggctgaggacgtagaggagatggctgccccgacgccaacacctacaccaccaattgctgcacctgctccagcaccagctccagctccagctgcaccaccatcaccagatcactcttcagccacttcaccggcacctgtggtgaatgagattagatggacctgcaagaactacttcacgcaagctccagacacggcctacttccacagcctgttggcttggatgatggatgaatactaccatgacatgtttgtctccatcaagtactactgtgcagagcacacacatcctacggaggctacctactggaaggcacatgtgatagtcaccgcttggaatgtcatcactaatgctcagaaggtggagaccactcatagacacagggctcatcgagcagatgtgttggatagcatggaggatgtcgctcaggaggcctatcactag

SEQ ID NO: 19537 - DNA, 324 bp, Zea mays
  Peptide Sequence Number=SeqID_61316
atggataaaggactgtccggtgagccagccggccaacggctcttgccagcgccaacggtcgggcgcaatcaacggcggccacgtggcgggtgcgtcgccgacgccaacggtcagcaggttgcaccggacatgtcaggtgtacaccggactgtccggtgcgccaggcgtggctcggctgccaacggtcggctcggtccagtatggaaagaaatcgacactgtggagtgtccggtggtgcaccactgcgcagaaggcaaacagaggcctttcaattggaagagcaacgactccttggccccttggggctataaaagaggaccctag

SEQ ID NO: 19538 - DNA, 339 bp, Zea mays
  Peptide Sequence Number=SeqID_61317
atgaaggaaaatcaaagcgtcctcatcgtccaatcctgtgatgcctctggtcctgctaagatctcgttctgtgtggttttccccttcggtctggcaaccggtgtagatgcactggaagatggggaagatctgcagtttgatcctgaggcttacaattatctccgaggttttggcattggctggtcttgcttgagttcgcaacgcactgtacctacctcagctactgaggaagaggaggtgaaccttgatcggcgtgttggcagaatactggaggaactcgagatggtctccattgaggaaggtcgtttgaggttcgagagcctgatgccactgttctag

SEQ ID NO: 19539 - DNA, 504 bp, Zea mays
  Peptide Sequence Number=SeqID_61318
atgaaccccgacaccaggctcctcatggacgagatcatcaagcgcttaattgagctcgatcaccgcttgaaggaacaggaacgtaagctgggcaaccgctttgccaaggtcgaccgcaagtttgccaatctagaggaccgccagaccactcgtgtggtcgctctggagaaggcctgcgagtcattcgacgaatggcgcacagggattgacggcaccatcgacgacatatgcctcaaagttaagaagcgacccaagcatgaggaacgggcggtgatggatctggctacatcttcgaacccctggtcaccgcgcgctcacctaccggactcacgatcgaatggccccgcatcgacaacaaccaccgggcggatggatttggtgtcgttacttatcaccctctatctcccgatcaagggtgcatactcacttcccgtgccccatctccaaattccgttcaccctacatagcatgctcccgccagtcatagtcatgagtacgatttag

SEQ ID NO: 19540 - DNA, 642 bp, Zea mays
  Peptide Sequence Number=SeqID_61319
atgacgccgggcgttacgacgccgatttcgacagaggcgtgcctcacgttgcggatgctcttccccctgcatggttggttcatcgtcggagatgggagcgtcctccatgcttccgtggatgaagaggatgtctgggaagtagggccgcagcgccatctcctggagtccggccgttgcccctgcaggtggggtagccggagtggtcatcggagccgccctgatgaccgcgggggcatcaggggccctcatccctttcttccgagtaatccgagtccacactcgggactcctcccctgcgtccgcgatgcggtgcaggactccttctcggtcagcgaagcaggagagggttccgaagtggaagacctccccggcattgaagatgatcgcagtgtcgaaggtgatggccatggagctgtcgtgaaacggcgtcacaccccctacctggcacgccagctgtcggtgtttggtaccgactgcgcactacggggtggccctcgcagtgcttttgggagggcggcgatgtcgatcgttgctcgatggtacgtgtggatgcacgtcggaacacgaggtttatacaggttcgggccgcaagaatgcataacaccctacgtcctgtgcgatgttgggtatgtaattgcttag

SEQ ID NO: 19541 - DNA, 429 bp, Zea mays
  Peptide Sequence Number=SeqID_61320
atgaggcacatgaaggatgttgtgatgagttcaactttgttatatattaatgatgtgacatttgattttgtgtcatgggtcatcgtgcccgggggcgtgtggacaaggcgcggggggagggtcacccgagtgggcgacgtcggatgctttgtttgcctcgacggtggacgcaagggactcgtgcacgtctcccagatgctcggtcgacgccgcgctggcgccaccttcacgctcgggcaggtgtccttcaaggtcgtcttggtggacggcgccaagctagggctgtcaatggtagacgtcgatcaggatatagggaagggtcttcagtcgatgcgacgtcggcaccctgtggaggaggacgcgctgagggcaaatccgccaactaatcgctccagactcaccgggaggaggatggcggcagatcgatga

SEQ ID NO: 19542 - DNA, 390 bp, Zea mays
  Peptide Sequence Number=SeqID_61321
atggcgctcaggggaggtcctgtctcctccggtgttggccatcacgtggcagcactgggccccttaggccagaggtccgggtggcctgtcatgagggtcagagccgttcccggaggtctggccatcgagcataggtttcgagagccctcgtcttcaagacacgtggttgacccggaccccctctactggggttctagggcgctgatcacaactaccggtcttcacccgagctcagtgggcttactggaaagagtggaaccatttccagcaacaatggagaaggacaagcaaaatgaggtgtccggaagagaaatattagggccactttggcaaggttttagcttttggaaaaacaattttgactctgacttcttcgtgcgagggagctaa

SEQ ID NO: 19543 - DNA, 648 bp, Zea mays
  Peptide Sequence Number=SeqID_61322
atgtgctatctaagccctcgtgaagtcagttatcttcatcgtgttggccgcactgcgcgggcaggaagagaaggctatgctgtgacatttgtaaccgatgatgatagatgcctcttgaaagcaattgcaaagaaggctggttcacagctgaaaagtcgcattgttgcagagaaacctgtggctgagtgtgcacgactgattgagcaactagaaggccaaatttctatcatcattcgagaagaaagggtggaaagagaagcaagaaaagctgaaatggaaatcgcaaaggcagaaaatatgatagctcataaggatgagatatactcacggccaaagagaacctggtttgctactgaaagggagaagaaacttttggcagcagcggctaaagaatctttggatcacggtaagagtacctctggagttattagtgctaagaaggccgaagaccttcgtctaaaggagaaaaggagacgagaacatgagaagaatctaccaaggaagaagcgccgaagattggaggcccagcgtgagatgttggaagatgaggatgacgagaaaacaaaggttcagttctttgagttattttgttatctgcgtctgccgattcctaattatccctatggctttgatgcaagtaactactga

SEQ ID NO: 19544 - DNA, 492 bp, Zea mays
  Peptide Sequence Number=SeqID_61323
atggctggggagcaccaggaggataaggaaggggaatgttttgtccggtttgggcatggtggcggcctgactccttctagtataatcgctaaggtaaggacgtgtaagaaaggaaagagttttggcattcggatctcacgacgagaaggagatcgatggtcggaattgctcgccagagcactctctgacctgcccggagcgccccctttgttgtccacccacctctggtccccttcctacggccaaagccccaccacagggtttgtcgggtccccttcatcggcccttgcccacttaggtgaccccagaccccctggaactcaggcccgcctcgtctccggtgacctcaccatcgcaggtgagagcgacgatgcccatagccggtcggagccgttagaccccctcggcgcccaatctcgaccaccccctctgtccaatggccttgatcctcggataccagttcgcgttggctcattgaaccagggcccttaa

SEQ ID NO: 19545 - DNA, 594 bp, Zea mays
  Peptide Sequence Number=SeqID_61324
atggccgttggccatgatctgaagaaccggcatggtcgttggtcacacactcagcgtagaggagtcctgagccgcgacagcctcacgctcagggtggcagccacagcgcgctcagctgccagggttgcaagcctgctccttggctgtggcagccatgggttcggtcgcaggggcttgcatgccctcagcctgggcagcaagggtgccgcagccaagagatgtggttcactgcttacctatgtcattgttattagtgggctgtattcagctctaagcttgaagaatctcctacaggaaaatgatagagggaagcaaccaatgaaaggccaatctctagtggatgctgcttaccgaaaggcaaaatcattgaaggcagccagcaaacgggcccctggtgcaaggaaaggaaagaaagagaagaatgaaaggcaacattctgagaaggctccgaacaggcatgaagagatgcgtgacctgttccaaaatgatatgagtgaatggaaacagggacgctcctcaaagaaaaataacaaatttgcgcccaaaaaatcaaggaactcttttaagagcaaagcaaggtacaagcggaagtag

SEQ ID NO: 19546 - DNA, 2575 bp, Zea mays
  Peptide Sequence Number=SeqID_61325
atgcccggcataccgagggatgtcgccgagcactcgctggatattcgggccggagcccgacccgtcaagcagcctctgcgccgattcgacgaggagaagcgcagagcgataggcgaggagatccacaagctaatggcggcagggttcatcaaagaggtattccatcccgaatggcttgccaaccctgtgcttgtgagaaagaaaggggggaaatggcggatgtgtgtagactacactggtctcaacaaagcatgttcgaaggttccctaccctctgcctcgcatcgatcaaatcgtggattccactgctgggtgcgaaaccctgtctttcctcgatgcctactcagggtatcatcaaatcaggatgaaagagtccgaccagctcgcgacttctttcatcacacccttcgacatgtactgctatgtcaccatgccgttcggtttgaggaatgcggatgcgacgtaccagcggtgcatgaaccatgtgttctgcgaacacattggccgcacggtcgaggcctacgtcgatgacattgtagtcaagacgaggaaggccttcgacctcctttccgaccttgaagtgacattccgatgtctcaaggcgaaaggcgtcaagctcaatcccgagaagtgtgtcttcggagtgccccggggcatgctcttggggttcatcgtctccgagcggggcatcgaagccaacccggagaagatcgcagccatcaccagcatggggcccatcaaggacttaaaaggcgtacagagggtcatgggatgtctcgcggccctgagccgcttcatctcacgcctcggcgaaagaggtctgcctctgtaccgcctcttaaggaaggccgagtgcttcgcttggacccctgaggccgaggaagctctcgggaacctgaaggcgctcctcacaaaggcgcctatctcggtgcctccagctgacggagaagccctcttggtctacatcgtcgtgaccacccaggtggttagcgccgcgattgtggtcgagaggcaagaagaggggcatgcattgcccattcagaggccagtctacttcgtcagcgaggtactgtccgaaaccaagatccgctacccacaagttcagaagctgctgtatgctgtgatcctgacgaggcggaagttgcgacactacttcgagtctcatccggtaactgtggtgtcatccttccccctgggggagatcatccagtgccgagaggcctcaggcaggatcgcaaagtgggcagtggaaatcatgggcgagacaatctcgttcgcccctcggaaggccatcaagtcccaggtcttggcggacttcgtagccgaatgggtcgacacccagctaccgatggctccgatccaaccggagctctggaccatgtttttcgacgggtcgctgatgaagacgggagccggcgcgggcctcctcttcatctcgcccctcgggaagcacctacgctacgtgctacgcctccatttcccggcgtccaacaatgtggctgagtacgaggctctggtcaacgggttgcggatcgccatcgagctaggggtccgacgcctcgacgctcgtggtgactcgcagctcgtcatcgaccaagtcatgaagaactcccactgccgcgacccgaagatggaggcctactgcgatgaggttcggcgcctggaagacaagttctacgggctcgagctcaaccacatcgctcggcgctacaacgagactgcggacgagctggcaaaaatagcctcggggcgaataacggttcccccggacgtcttctcccgggatctgcatcagccctccgtcaagatcgacgactcgcccgagcccgaggcgccctcggtccagcccgagcgccctcggcacagcccggggcaccctcggctcggcccgaggcgccctcggttcgacccgaggtaccctcgggcctccgagggcgaggcactacgcatcgagaaggagcggagcggggccacgcctgatcgaaattggcagaccccgtacctgcaatatcttcgtcaaggagagctacccctcgaccgagccgaggcttggcgggtggcacgacgcgccaagtcattcgtcttgctgggcgatgagaaggagctctaccaccgcagtccctcaggcatcctccagcgatgcatctccgtcgccgaaggtcaggaactcctccaagagatacactcgggggcttgcggccatcacgcaacgcctcgagcccttgtcgggaatgctttccggcaaggcttctactggccaacggcggtggcggacgccactagaattgtccgcacctgcgaagggtgtcaattctatgcgaagcagacccacctacctgctcaggctctgcagacgatacccatcacctggccctttgttgtgtggggtctggacctcgtcggccccttgcagaaggcgcccgggggctacacgcacctgctggtcgccatcgacaaattctccaagtgggtcgaggtccgacctctgaacagcatcaggtccgagcaggcggtggcgtccttcaccaacatcatccatcgcttcggggtcccgaactccatcatcaccgacaacg

SEQ ID NO: 19547 - DNA, 1467 bp, Zea mays
  Peptide Sequence Number=SeqID_61326
atgaggtccaagtggcggctgcgtcggagcttgtcgtacacatcggcgcatgcggccacattaaggttcccctcctctaacacgccggcgcttccccccctgccaccgcgacactcagtcgtcgccgccgtcggctctgctgccgtggccaagcgcgttggcagcgaggattgctttagcttgcaggcactttccccacccccaccgccgctgatttcgccgttatgcggtgaagcccttcgcgttgacgggctaatcggctgcctgatttctattatgatgggcgtaaggttgctgattcggatggcaccggtgggggatcatattgtggacatcagctccgatgaggaggacttgttcatcggcacttccctaaatatactcctagaacccctcgaccccgttaaatgggtggatgaggtttgcggtgtggctgattatgtggccggggaggatatcgatgacctcatgattatgagtgagatatctgctccaccggtgttgcagaagatagccaagcctgatgagctcgtggttatgggtgagttgtcctcaccacctgccccgcagcagaaggccagtgctaatggtgggtgccatgaggatgatgatgattgtgtagttctagatggtgaccctgataaggcgattacagttgctgaagaggggagcttgggagatggcagttcggatgaattgcagatagtggcggagaaaggcccggggcaacagtcagttctccaagagctggaagaggtactggcaatgctcacattgctcaaacaggcattgtctcacgcttctcagcctgttcaagttgcgcctacaaccaatgctttcactggcgcttctcaaaataaccattttcagagatctttcagtgcgccgatagcacctcaggtgcaacaaggtcaacctgcggcacgttaccaggtcgccataaatggaatgcacgccgtagggccgcaacttgcacggtccacctcacttacaactcagagaacacaatgcctcccagaaccagcaataatagatgtcagcacaacaagctggcaagacatacttgctactgtggcatctaatctgggggtagcagattacaacacgagcacccctgagtctcagcatgtaacggttgactctctagccatgcatcccactgcaaaccatgggttggatcttcagcatgagcccattgcagaatcagagaacctgacatattcgcttctgcatgattcatccaatggcgcagcaggtggcagtgttcaggcagatggtcctatgcaaacaccagagaatttggaccatctgattggccagagcaatcctgttccaaatgaagctcacctggatgactttgcgggtgcccccgctaatcaattaccaatagaagaagaagaagctcatcagcctgagatgtcaaggctggagcctacaaacattctgttcgagttcgattgggtttaa

SEQ ID NO: 19548 - DNA, 594 bp, Zea mays
  Peptide Sequence Number=SeqID_61327
atggtgtccgaccaggagatcgccagctgtgttgggtccgtcctccgaggctccgccggcgggcccggggaggtctcgctcgccgccgtgctgcagcaggcggaggacacgctcggcgtcgacctctcccacaaggcgggctttatccgcgaccagctggacctcttcttcggcccacgcctccagccgcagccactgaccacgccacagccgacgcctccctcgcctcaggccgtcgttgcccccgcggacgccgtgcctcagcctcagcatcaggttctgccgcaggcaccgccttcggctcagcagatgcagccgcagccgcagcagctcacgtcgcttcagcagcagctcatgttccagaccattcaccagctccccgccatcgctcccgtccttgtggtctcctcgccgccagccgtgccggccatggcgttctacccgccgccgccgctcgccttccgctacaccactggcctcgctggggccgccgcgggtgggaccgtctccttccagcagtcggcccctggggctgggggcaccgcttcccccaccgctgcaccgcaggtcaccggcgacaacaaggaaaggtga

SEQ ID NO: 19549 - DNA, 414 bp, Zea mays
  Peptide Sequence Number=SeqID_61328
atggtggtcaagtctcggacagagaagacgtggtcacgagagttacccaccagcacccatggtggcacgcgtaggagtgagagaagaaggctggactgtgaaaacagtgaaacacatcaaacaacttcaaaggtgttggaaaatgggcggcgttccccggcagacaaagcaaccgacagtagtagggaaaatggttggcgggcacccagcaacggtatctccttgggtgatggagcctctgagcctatggtgtcgctggcaccagcttttgagggagcgacttctgacctcaccatggcaccgccaacattgcagtcaccaatcaccattgacgcgggcacacaggctggagaggacattggatcaacgtctggtcgtctgactcgaagcgaacatgtggactcgaaccgctag

SEQ ID NO: 19550 - DNA, 1440 bp, Zea mays
  Peptide Sequence Number=SeqID_61329
atggccggtgctgtaggcgcggtggcgcgcgcgccgctggacctggtgaccgtgctcgacgtgagcggtagcatggcggggaccaagctagagctgctcaagcaggccatgggtttcgtcatcgacaacctcgggcctcgggaccgcctctgcgtcgtgtccttctcctccggcgcgaaccggctgatgcggctcgcgcgcatgtccgacgccgggaaatccctggcgaggcgcgccgtgcagtcactcgccgcgggcggcggcaccaacatcggcgaggcgctccgcagggccgccaaggtgatcgacgagagaatgcaccggaacgccgtcgctagcgtcgtgctcctctccgacggacaggacacgtacaccgtgccgaggcgcgggggctacggcggccgcggcgccaactacgacgcgctcgtgccgccctccttcgcctaccccggcgctggcagccggtgcgcgccggttcacaccttcggcttcgggacggaccacgacgccgcggcgatgcacacgatcgccgaggccacgggcgggactttctccttcatcgaggacgaagcggccatccaggacgccttcgcgcagtgcatcggcgggctcctctcggtcaccgtgcaggagctgcgccttgatatcgcgtgcgtgcacccgggcgtgcgcctccgcgcggtcaagtccggcagctacggaagccacatcgacgcggacggccgctccgcgtccgtcgacgtcggcgagctctacgcggacgaggagaggcgcttcttgctcttcctgcacgtgccgagggcacgatccgcggacgccgacacgcacacgcagctggtcagagtggcctgcgcttatcgtgacacggcgactggacggggcaagaacgctgcaggcgaggacgccaaggtgctgaggccctggggcccggtgaccttggagcgctccgtggaggtcgagcgcgagcgcgtccgggtggaggcgacgcacggcatcgcggcggcccgtgcggcggctgagcgtggcgcgcacgcggaggcggtggagatcctccggcaccggcagcggtccgtgacgcggtctgccgcggcgcgggcgggggactccacgtgcctggctctgtcgcgcgagctgcgggagatgcgcgcgcgcgtggcgagccggcaacagtacgagttgtccgggcgcgcgtatgtgctcgccgggctgagctcgcacgcccaccagcgcgccacgtcgcggcaggtgatgtccggtggcgtggcagaagcgactcggggcggcgaatcggcgcaggtgcgcagtggggcgttggagacgtcgggcatcacgatgtcgtacatgacgccggcgatgctggacatgctgggccggtcgcggaggtcgcgtgagctgctgcagcaacgccaacaacagacggagctgagaagaacgttttga

SEQ ID NO: 19551 - DNA, 726 bp, Zea mays
  Peptide Sequence Number=SeqID_61330
atggacctccccgagagctctgtcccccgcgcagacaagggcccggcccctcgccgtctttgccccgtcgaccgcgaggagctggtgcgcgccatggcacagtcgctctactcgctcgggtacaggcgggcggcggccgcgctcgaggcggagtccggcgtgccactgtacccgccggagcatgaccgcctgctgctggaagtgatggccggtcagtgggacgcgtccgcggagatcgtccgctcggtcgccggcgtcggcgaagcggaccgcacggtcgcggagttcctggtgtggaggggctactacttggagctcctggggatgcgcggtgacgctggcctgcgccgggcgagggaggtgctacggcgtcggattgcgccgctcggcgtcgacaggaggtgcgtacacttgctggcgcgcgccatggtctccagcgagggggccgttgcgccggaggccgtggttgggtggaggattgcggtgttcttggatttggtcgaggtgttgccaccatggttccatgtggctagtgggcggttagagcatttggtggagagtgcgcaggccaatgtcgactacgacaagacatttagactagttgtaaaactggccatgatcaacaccatcctcggcatcgctgcctcacacgcatggtggattcatcaagtggacatgaagaacgccttcctccatggccacctcgaggagaccgtctactcctag

SEQ ID NO: 19552 - DNA, 165 bp, Zea mays
  Peptide Sequence Number=SeqID_61331
atgtctggtgtggcaccggactgtctggtgcaacttcaggacaaaggcttccaacgatcaaccgctccaaaccccaacgagcgtgctgacgtggtatcttcggacttgaatcagaaagggagaagctcaaaagatacgaaggttgacacagtgccgaagctgtga

SEQ ID NO: 19553 - DNA, 171 bp, Zea mays
  Peptide Sequence Number=SeqID_61332
atgccccagtcaggcagaatgcagtgcaacaaggaggcaacaaccgtgggcaacctctcgtgcccagtacggaaaggtgaaccacttggaggccgacacaatctaggagaccctaggagtggcactagtggactagctttatgtggggttaagtcaagcagttgcttttag

SEQ ID NO: 19554 - DNA, 168 bp, Zea mays
  Peptide Sequence Number=SeqID_61333
atggcgccttctcagctcccatctaccaaatccatagctgcacaaggacgcaagcgcataactcattgtcgtctgccgaagcgttctctctcagatagatcgcgggatggaagatacagaaccataggctccagccacaacaatatccaattcgatttgaaagcatga

SEQ ID NO: 19555 - DNA, 474 bp, Zea mays
  Peptide Sequence Number=SeqID_61334
atggctacctatttggatctcaccttcaacagggccgtgagcacaacaatatcggtggaggagaagaattcggggcaagggaagaaaaaatgtttggacgtgaaggagccgattttcattcgtccaactactgcccctacccaaaccactcagctgggtggccctggtactcgttttctagctttacctagctcgtctaataactgcttcaactatggaaatgctaggaatttcatcaaggattgcccttatcctaagcaaaacaagcagaacttccaaaagacctttggaaatacttcttggggcatgggtaatatggtggctactacaccagaaggagaagccgtgctgatggacatcgagcagtccatggttcttgagtgtgttgctgaagatcttcctgagaaacaacctggaagagatgctggcaacatggaggactttgaggagttccaggactacggcgagttctag

SEQ ID NO: 19556 - DNA, 354 bp, Zea mays
  Peptide Sequence Number=SeqID_61335
atgagggtgctgatgtgcctgcttcagcttcaggcacctggattgaagcggggatctgacacggcagagagcgccacctcatcggactccggcgtcatgttcagaccgatcatggagggactgttggtcggggacgcaggagtggcagttgaggtggtggaggcggtggcggtgccagcaagcgggggcgggagaggcggccgcggtggcggccgcggcggggcgcgccgggggcggcgtggtcgggggcgggagaggcgagcgcggcggggccaggggcggagccggccgggcatgggagagaagggcgcacgggagaggcagccggtcgggcgtgagacagagagacgttga

SEQ ID NO: 19557 - DNA, 606 bp, Zea mays
  Peptide Sequence Number=SeqID_61336
atgaggctgacagcagctgagtccagcctcaggcgccataggaagctccacctcgcccgaccttgggcctcggcctcaggagaagtctccgcctcgcccgacctcagggctcggccccccacctcggcctcagaagatggactccgcctcgcccgaccccagggctcggccctcgcctcgacctcggaagatggactccgccttgcccgaccccagggcccgccctcaaactcgacctcgggcggaatcgcgtcctcgcccggccccggcctcggccttaggaggagtctccgcctcgcccgaccttgggctcggaccgaccacgccgcaggaggaagggccagggccctcatacgggagggtggtcgcgcgggactctctctctctctctccctcgcgaaccttgtaacccctactgcaagcgcacccactctagcgcaggataacacgaagccgcggtttcccccctttgtgttccgtctcgcgccaacccatctgggctggggcacgcagcgacaatttactcgtcggtccagggaccccccggggttgaaacgccgacaatattcttatcttagcctaaccatgaccactaacattaattga

SEQ ID NO: 19558 - DNA, 402 bp, Zea mays
  Peptide Sequence Number=SeqID_61337
atggcagacaccggcgaggggcgtggacggtccaatgaatcggcgaaggcgcaggcgacggacaggaccacggcgacgagctccgacggcaagctgagtatggcgcgcgtcgaggtcgcgacgcttcggcttcgggtccgagtccgggtagcgagcgggtcctggcgcgcgtgcggtcggcgtcgcgcggggcagctcgcgcatggcgcggggttcagttgggcgcgcagcagagagagcaggggagagggagaagcagtggcggcggccgcagggagcggcggctggctgggagcagggtgggcgcttgctccaatgcggcaaggtgatgaggcggaggcgacgcgttcctacgagcaggcgacgaacggaagaaagttagtgtgggagaagaagaggtag

SEQ ID NO: 19559 - DNA, 507 bp, Zea mays
  Peptide Sequence Number=SeqID_61338
atggcccgacccttctcttccccacacatcccgtcttcatcctgggtgactcgccgccctcctccctggacctcctcaccgtccgtctccaccacgagaactagcgcctcgtctattaccgcgtgcagaccgcgccgcagggcagtcgcgccggcggcctccctccacctcggcccgggggagatcgccgagctcgcgcgcaacaaggttttgattgcggcgacagtggcgagcgcgatcgggcagctgtccaagcccttcacctcggtcaagaatgggggcgtcggcgccggccttgacctcagaaccgtcttccgctccggagggatgccctccacccactccgcgagcgttgttgcagttgctacttcgcttgggctagaaagggggtttgcagactccatatttggaatgtcagtggtgtttgcagcaattgtaatgtatgatgctcagtcaccacttcttgtttcttaccttgatcttggtcagattaaggccttcttataa

SEQ ID NO: 19560 - DNA, 1143 bp, Zea mays
  Peptide Sequence Number=SeqID_61339
atgtcggcagcggaggagcaccggtggcgctcgctggtcttcggcgaggccgtggccgcgcagcgcagcgcgctggtgctcgcgtcgtacccgctgctgctgctcctcgtcgtcctggccgcgttcgtcaggtacctgtggatcgcgctcgccatgtactgcgcgctcctgttcgtgctctcgtgcgccgctcgcgccctcgccgcccagcctgccggcgccgccggcgcagaggcggcgcgggtcagccgcggcgggctctcggcggcggccatcgcggcggtcgcgccggcgttccgtgtctttgtgacgaactggggtctaacagacattgacagcacggctagagtgaattgcgattgcaaacaacctgtgtgtgattcagggatgaaaacgagcggtagaaaactgccggtaaaagcacctttcgatcggaacatgttcctcaccgagcagcattgcagggagtacttcggcggatcgatcgagacactcaactgttggccgcagactgcaaggagtacttcaaggccgcgatgcagttcgtcgtcagccctggaaagttcggtgtgctgcggctcgggagggcagggcggctacaacttcaacctgaggctgcccgcagtggaggactgggtgctggactctatcccatatagcgtaaagaaacacgtgcagcaggggctcggcgcgacggaatttgagggctggtacagacccgccttcgggccgtgtttttgctttaggctcctgttttcgggtcgtgctcgtgctaaaagaccgacccatattcctagcactagtgatgggtatggtaagtgcgatgatctctcccgaatcggaggcgaaatatcccagtcatccccgacgcgtctccctcgccatatcccagtcaaccgcattcaatacctccaggccacggccgcagtcaatgcacagctcgcgtccgcgtgttccccgtctccacgcgtccatcaggccatctccagcggcagccggcagcagcaccacctccgcgcgcgcgggccgcaccgagagcaggcgtccaatcggtcgacggtcgtccacgcgcagctacgctacggcttggggtggtgggcgctagaactagaagaatccaaactctcccacccgaaccagtga

SEQ ID NO: 19561 - DNA, 1257 bp, Zea mays
  Peptide Sequence Number=SeqID_61340
atgccgggagacgggggagcagctggaagcgcgaggtgggtttgcgcggtcctttcggtgttcccgcttctagcggcggcggcccagggaaggtaccgcgcggtgttcagtttcggggactcgctggtggacgccggcaacctggtcacggagggcatcccggactacctcgccaccgcgcgcccgccctacggccagacctacttcggctaccccaccggcaggtgctccgacggccgcctcgtcgtcgatttcatcggtaaatttcgccgattccaggctcccctaaccttttcgcgtgcgtgcgtgcgtgcgttcttgggagtcgcctctgttcggacggaattcgatgggtctgattctttctggccttctcctcctgcagcgcaggagttgggcctcccgctgccgccgccgtccaaggccaagaacgccagcttcgcgcagggcgccaacttcgccatcaccggcgccaccgcgctcgacaccgacttcttccggaagcgagggctcggcagcaccgtgtggaactccggctccctccgcacgcaaatccagtggctgcgagacctcaagccatcgctctgcagctccgcgcaaggcacacgatgcaaggagttcttcgccgagtgcctgttcgtcgtaggcgaattcggtgggaacgactacaacgccccgctgttcgccggcaaggacctcagggaggcatacaagctgacgtcccacgtgatccgagccatctccgatggagtcgaacaactgatcgccgagggggcaaaggatttgatcgtgcccggtgtgatgccatcagggtgctttccggtctacctgaccatgtacgctgaccccaaggaagggcatggctcgcgcaccggctgcctcaagcggttcaacactttctcttgggtgcacaatgcgatgctgaagcgcgcgctcgtgaagctccgagcgaagcaccctggcgcgaggatcatctatggcgattacttcacgccaatcatccagttcatactccagcccaagaaattcgggttttacaaacaaccaccaagggcatgttgtggcgcgcctgggaggggtccttacaatttcaacctgacagcgaagtgcggtgagcctggtgcctcggcttgcgctgatcctaagacgcactggagctgggatggtattcacttgacagaagccgcgtatctgcacattgccagaggctggcttcatggaccgttcgcagaccagcctgttgtacaagcatcttga

SEQ ID NO: 19562 - DNA, 291 bp, Zea mays
  Peptide Sequence Number=SeqID_61341
atggccatcaaggagacactactgatggaggcgccatctttggtagctgaggacaaattagagtttgtcttccggtgcagtttataccttttccaaatttactgcatcaccgtttattgcttttcaacattcgctatttcacaagatcgtcatggccctatcaggaacggagatgctcttagcgaagcaggaggacatggtagacgtgaacctgaagctaaagctgacttccagccaatccaactagcagcagcaggcggggagtggatgcgcctgctagatgagtgctag

SEQ ID NO: 19563 - DNA, 492 bp, Zea mays
  Peptide Sequence Number=SeqID_61342
atgggggtttctttggtgaatgatggccctgtgacgatgcaaatcgactcaccctcaccgcaagatgctgctcggtcatggtacattgaaatatggagtgcactgtactgtaggtgtgtcaggctttctactaaggctgttggagttcaagattattatggcttgctaaaaagtatattactgtggtatgatggcctctgtctgattgtgacaagcctatctaacccatatgtgaacataatttttggtgtcgtcgttgatgaccgttacactggtgagatacatgtgacaatcattgcgacaggatttccacagtccttccagaaatcccttttggcggatccaaagggagcacgtatagtggaatccaaagagaaagcagcaaccctcgcccataaagcagcagctgctgcagttcaaccggttggtgctatgctccaagaattagaaaaggagattgatgatgtggatgcacaaattcgaaatctttga

SEQ ID NO: 19564 - DNA, 1257 bp, Zea mays
  Peptide Sequence Number=SeqID_61343
atgcctctctcggcagcttcttccatcctcctcctccatgccctggtctccctcacccttctcctcggcgacatgacgaccacgacacctgccgccgctgtcccggccgcggtggacgtgaacacgacggcgttcaccatgcatgactctgctgcgtcggcgtctccccatggcgccgaaaactttgagatgtactactgcttcctctgcacggagcgccacccgctgctgattcactactgccccatctactgggacgagtgccacctcaactgttgggatgatgacacgccgacctccatggtcacggtgcagggcaaggagtgctacgtcatgaaactgtacatgtccggtcgctacgtcatcgtccaacgcctgagctgcgacggcgtcgcctcgtgctttcctcacctgcggcggcggggagctggccgacaaagttgctgccggtgccatgggaaccacgggcgtcggcgagcgcggtccagctccaggggaacgctctgcctttcgagctgtgcggcacacagcagccaaatttgttcaacttgcgatgttccaggtgttccctccttcatgcttgtcaagctgtaccgcgaccagcaagctgtgactgcagtgttgctgacaaggagctcatttgcatctcaagcaatcacctacgcttcgatactcctcctcctccacgcctgctccctgtccctgctcgccgccgcaagagtccccgacccggtagaacatggcgacgtgaacacggcgatgcttaccaacggctcggcctcggcgacgccgtcgtcccctgacagcagcagcaacggcaacttcgacatgtacttctgcttcctctgctcggggcgcgacccgctgctcattcaccactgccccatctactgggacgagtgccacctcatctgcgacgatgacatgtccaccgccactcctactccacctgctgttgcagtgtcgtcgtcgtcgtcgtcccgccccgtccccatggtgcaggtgcagggcgatgatgactgctacgtcatgaagctctacatgtccggccgctacgtcatcgtcgaacaccggccatgcaaatacatcgcctggtgcttcctcacctgcggcggcggggagctggcggcggccgaccggaaagccgtcacggccactgcgatccaggggacctctctgcctgccgagctatgcggcacgcaggtggtcaatgctccaccatctgctgccgctggtggtgcgcaccgacggcgctag

SEQ ID NO: 19565 - DNA, 555 bp, Zea mays
  Peptide Sequence Number=SeqID_61344
atggagttgggtctaacagtagacaggaagaaggacgacgagggtgcaccacgagcgtcgtcgtcgtcctcccctagctgcgaggccgacgacgacgatctgccgaagaagcagcagcagcgccccagcggcgacgacgacgagggaacaaggcagccgtacaagtgcaccttctgcaggagggggttcccgacggcgcaggcgctcggcggccacatgaacgtccaccgtcggcacaggggcagaccggcagctgtttctactggcgccgcagcaggaagcagtgcagccagtgtctacgactacgaccagccgtgctccaccacgacgactcctgttctggcgttcgcccggcaagctacgacgactcaacggaggccgcacgagctgcccctgttcgtcgcccgcggtgactgctgcgctgccggccgtggcagcactggcaccgccgccggagacgacgtaccacaagatcatcgctactacttgcccaaaaacggggatggaggggaggagctggacttggagctcaggcttggaggtgcgggaccatga

SEQ ID NO: 19566 - DNA, 837 bp, Zea mays
  Peptide Sequence Number=SeqID_61345
atgtcctggtgcactattgagtctgatcctggtgtgttcactgagctgattcagcaaatgcaagtgaaaggtgtacaggtcatcactaatgcatgtgctactcaagctattctctcagttctcatgaatcgccctgaaattgacattggcccagaattatctcaattgaaggaattcacaggagcttttacaccagatctgaagggcttggctattagcaacagcgaatctatccggacagctcataacagctttgcaaggccagagccatttatttctgatgagcagagggccgcaactaaggatgatgatgtttaccatttcataagctatttaccttttgaaggtgtcctgtatgagctggatggactgaaggaagggcctgtgaatcttgggcagtgcgatggtgctgatgatcttgattggctacggatggtgcagccagttattcaagaaaggattgagcgctactcacaaagcgagatcaggttcaatctcatggccatcataaagaacaggaaagaggtgtacagtgctgagcttgaggaactggagaagagaagggagcagattttgcaggagatgaataatgcttcctccacagaatccttgagcagttcgcttacggaggtgatatcggcaatcgaaactgtcacggagaaggtcatcatggaagaagagaagttcaagaagtggaagaaggagaacattcggaggaaacataactacatccctttcttgttcaacttgctgaagatgcttgcagagaagcagcagctaaaacctctggtcgagaaggccaaacagcaaaagtcagcaagcccgagcacgagttga

SEQ ID NO: 19567 - DNA, 966 bp, Zea mays
  Peptide Sequence Number=SeqID_61346
atgctcaaggagtcgtgcccctatcatcaggggcccgtcaagcacacccttgaggagtgcgccatgcttcggcgccactttcacaaggccaggccacctgcggaaggtggcagggcccacaacgacgataagaaggaggatcacaaggcaggagagtttcccgaggtccacgactgcttcatgatctacggtgggcaagtggcgaacgcctcggctcggcaccgcaagcaagagcgtcgggtggtctgctcggtgaaggtggcggcgccagtctacctagactggtccgacaagcccatcaccttcgaccagggcgaccaccccgaccacgcgccgagcccaggaaaatatccgctcgttgtctaccccgtcatcggcaacgtcaggctcaccaaggtcctcatggacggaggcagcagcctcaacatcatgtacgccgagaccctcgggctcctgcggatcgatctgtcctcggtccgggcgggcgcgacaccttttcacgggatcatcaccgggaaacgcgtccagcccctcagacaactcgatctacccgtctgctttgggactccctccaacttccgaagggagaccctcacgttcgaggtggtcgggtttcgaggaacctaccacgcagtgctggggaggccatgctacgccaagttcatggccgtccccaactacacctacctcaagctcaagatgccgggccccaacgaggtcatcaccgtcggccccacgtatcgacacgcgtacgaatgcgacatggagtgtgtggagtacgctgaggccctcaccgaatccgaggccctcatcgccgacctggagagcctctccaaggaggcgccagacgtgaagcgccatgccggcaacttcgagccagcggagacggtcaaatccgtccctctcaatcccagcaacgacgcctccaagcagatccggatcggcttcgagctcgaccccaaatag

SEQ ID NO: 19568 - DNA, 714 bp, Zea mays
  Peptide Sequence Number=SeqID_61347
atgatgaccgcgaaaggggatatttcgaaaggggtccttctccgtgaaggaagcgggccccgagccctcctactgatcaggggttcgaaggctggcccctcggaagggggttcgaaggctggcccctcggaagggttcgacagccgccccagagcacgcatagcgagggatgactctggctacgtccgttacatggtcgaggctcgggctacgctcccgaggtcaaggcttcgtctactcaagggacgtgatctcgcctcgcccgagcccagcctcagtcacttcgcccttccactgaccgaccatacaggaaaacagcgccgcccgccccgctctaactactgtgccacccaccagggtgaggctgacaacagccaagttcagcctcacgcacaacaggaagctccgcctcgcccgaccttgggcctcggcctcaggaggaggtctcccccttgcccgaccccagggctcggcccccacctcggcctcaggaggaagtctcggcctcgcccgaccctagggctcagcccccacctcggcctcggaaggtggtctccgcctcgcccgaccccagggctcggcctcaacctcgaccttgggaggaatcgcgtccttgcccgaccccgacctcggcctcaggaggagtctccgcctcgcccgaccttgggctcggaccgaccacgccacggggatacatcattactctacccctag

SEQ ID NO: 19569 - DNA, 342 bp, Zea mays
  Peptide Sequence Number=SeqID_61348
atggcgttggacgcctggaccatggccgcgactgacggggtaaggtggcagtggcaccgtggtggtggccggcggggccgtggacaaaggaagggattggtggcctgtgggcgtcagattgacagccgagttgtgactgtagaatttgattcgggccttttcgtgcctgttaatgggccatttcgtgcctgcttaaacgggccgggctcgtgccctcctgtgggccttggcctcggcccatgcacggccctaaataatttcgtgccgtgccatgcttgggtcgtgcttttttttcgtgcttcgtgccagcccattaagcccgacccaaatgtacaactatag

SEQ ID NO: 19570 - DNA, 561 bp, Zea mays
  Peptide Sequence Number=SeqID_61349
atggcgtccatgaagagagggattaatgggggaggagaaacggacacaatgaaacttcttgaatggagaggaaaaacggtagcgtgggactttggctggcgtgtggtgcaggacggctcgggcggcttggcgcggtgtgggcgcgtgaggttgcctggcgtcggttcttggcggcgtcgggcgcgtcggggcttcaggctgctcctggtgcggtgcatgggcactggctggggcgcggtcaggtgccctggcgcggcgttgctcgggtcttgggcgcagggtcggctagtcgaccagcctaggcggcgtgcatggggtggcgcggtgcaggggcagggcgcgacagggctcggtcgagtccctaggcgttggcttcctggcggcacgtgtggaagaagcagggaagagagagggaatagggaggccgggtgggaccgcttgcaagagagagaagagggggaagggggaaaagttcctggcggcggcggccagcagggaggaggcagagggcgcgcggccgatcctagctgggcctcaagtgggcttttagggttaggttag

SEQ ID NO: 19571 - DNA, 360 bp, Zea mays
  Peptide Sequence Number=SeqID_61350
atggaggtcgacgaccagggagggctcggcgggcaggggaacgggcgcgatcgtcgtgctgcacggacggagctccggcggggctccacggacagcgggacagacggcgacggcgtggacgagcaagggagcgaggagcgcggcagggcgcgacggggctcgatcgagtccctgggcgtcggcttcctggcggcgcgtgtggaagaagcagggaagagagagggaaaagggaggcctagtgggaccacttgcaagtgtgagaagagggagaagggggaaacgttcctggcagcggcggccagcagggaggagacagggggcacgcggccgatcctagctgggcctctagttggtttttag

SEQ ID NO: 19572 - DNA, 537 bp, Zea mays
  Peptide Sequence Number=SeqID_61351
atggcgagcccgtcctcctcatctttcccgtcccggaaggccctgagcaagatcgcctgcaggcgcctgcagaaggagctaacggagtggcaggtcaacccgccccgccggcttcgagcacagggtcaccgacaaccttccagaggtgccgcttccccatcgccgcacttcctatcccctttctcaccaagcagtccctgcgccggggcaccaggcacgctctacaccggcgagacctacaaactgcaggtggatttctccgagcattatcccatggaggcacctcaggttatatttctgcatccagcaccgatgcatccacacatttacagtaatggacacatctgtttagatatattgtatgactcgtggtccccagcaatgactgtcagttctatctgtatcagcatattatctatgctgtccagctcaccagcaaagcaacgcccagccgataacgatcgctatgtcaggaactgtcgcaatgggaggtcaccaaaggagaccacgtggtggttccatgacgacactgtgtga

SEQ ID NO: 19573 - DNA, 2088 bp, Zea mays
  Peptide Sequence Number=SeqID_61352
atgcggcgaaggcgccgtccgcttccgatcccagcctcggctttctcaccaagtgcgacaccgaggtcaagctaccccgcgccgatacagattacggccgagcagatcctccgggaggctagggagcggcaggagcctgagatccgcccacccaagcagaagataacagacccccaagagctctccgagtaccgcctccgcaagcggaaggagttcgaggatgtcatccgccgagtgcgctggagcgtctcggcctgggtcaagtacgcgcggtgggaggagcagcagctggacttcgcgcgcgcgcggtccgtctacgagcgcacgctcgacgtcgcccaccgtgaccacacgctctggctcaagtatgccgaattcgagatgcggaaccggtttgtcaaccacgcccggaatgtctgggaccgcgcggtgtcgctcctcccccgggtggatcagctatggtacaagtacatacacatggaggagctgcttggtgcagttgccaatgcgcgccaggtgtttgagcgctggatgtcttggcgacccgacacggctggctggaattcttacatcaagtttgagctgcggtatggggaggtcgagcgtgccagagctatctatgagcggtttgtggctgagcacccacggccagataccttcatccgatatgctaagtttgagatgaagcgcggtgaggtcgaacgggcacggcgggtgtatgagcgtgcagcagacctgcttgctgatgatgaagatgcagaagtgttgtttgtggcatttgcagagtttgaggagaggtgccgtgaggtcgagcgtgcacgtgcaatatacaagtatgctctggacagggtgcccaagggtcgtgctgaggaattgtataggaagttcctggcatttgagaagcaatttggtgaccgtgagggaattgaggatgccattgtcggcaagaggagatttcagtacgaggatgaggttaggaaaaacccactaaactatgactcatggtttgattatatcaggctggaggagagtgttgggaataacgataggatcagggaggtgtacgagagggccattgccaatgtgcccccctgcagaagtgcagaggagaagcgatattggcagaggactctttatgagaaatatattgaatggtccccagcaaactgttatgcttggaggagatatgctgaattggagaagaaccttagtgatactgatcgtgctcgatcaatatatgaacttgctattgtacagacagcccttgatatgccagagattctgtggaaggagtacttgcagtttgaaattgatgaaaatgaatttgagaggactaggcaactatatgagagactgcttgataggacaaagcatttaaaggtatggaccagttatgcggagtttgaggcctctgctggcttgggcggtgaagacagtgaaggtgaggagaaaaagaatgataaggaacagaagatggagcaagtcaaaaaatgtagagctatctttgaaagggcattcgactacttcagaaccagtgcctccgagttgaaggaggaaagagctatgcttcttgaagaatggcttaataaggaagtgatctttggtgatcttggggatgtcaccttagtgcaaaagaaggcgccaagaaaagtcaagcggaagagaccaattcctacagaagatggctccactatagcgtatgaggagtatatagattacattttccctgatgaagttgctctagcaccaaacctgaagatcctggaagcggcttacaaatggaagaagcagagaaccgacgatgacaattttggtggccgtgagtcgcttccatacgtaggttcaggctcagaacaatgggaggaggggctaatacaagccgctacggtgtatgatagtttgtattccaattgcaaaggtgcccttccagtcgctatgcttcgtctgcagttgtcctcaacttcaatcgctgtgttaactgtgtggccatgccgggtcacacaggattgctatgacttgttttatgcttgggcatctaattttaaaaagttaaatgtatcggtggctcttgaacttatccatttttag

SEQ ID NO: 19574 - DNA, 1920 bp, Zea mays
  Peptide Sequence Number=SeqID_61353
atgtcggtgccccccgccggcaagcgccaggtgtccctgcggggctcgagcgcgaaggagatcacacgcgacgcgctgctgcagaaggtttccgaggagcgccagctccgcagccacctccgccgcgccgccgcggccgccttctccatccagcccaacccaaccatgacaaggcctgcagaagcgctcataccaggactgcgcccagagcggcgaatatggagaaggtaccatgtgataagaatggtttcagaacagctccatgaagactgggaactattaatgaaccagcctaacatcgacttgactactcaatggatatccaaaaagatgcttagaccgtttcttttcttcattactcaaccttctagctggtatattggacaatggagcaagactgtggaatctatcttaacatgcttcaagattatcttgaatagtataaattcaatggatgcaaggaaaaacttctgctcctttgctgtgggtataccagaagagagatctatttggctttatcaggccaaaaagctgatttcactgtgctcttccattcttgccaggtacgaccattcctgttgcaaggatggaagcatagtcgacatgactgctattgctatgagattggctgtctctctaactgattgcaaaacatggaaaagtttgaacagtgagaacactagcgctgcagatgcttctgtacagagtttgattgaatttattgggtgtttcattcaagagttagatttctgcttatatgttgatgttattaattgtatttctgaaaacttactggaaagttttgagaaaagcaagggaacgtctcaaaatgttggtaatatcactttccatgccgacacatctgttgcagaggaagaggataccaatgacgactgcagaatgagaacattatttatggaccttctgaagccaatttaccagcaatggcaccttagaaaacttttgatgttggcaaaagaggattttccatgccgcagggcaactgattatgatccaaacttgaagaatattcactttcgaatcctaaagttgtcagatgttatatgcttctactatcacatgcttagaattttctcatcacttaacccttctatcggtgcaatgcctattctcaacatgcttgcattctcacctggatttctagttgatttatgggaggcactagaaatgcccatttttggtccacctatccagaattcacaagaaacaggacacgagaaacagttggctacaagtagttcaggtgtgcaagtatcctccatgaggcaaagaaggaatgccaaggacacagcaaacaggtggtcaaatgtgctccagaagattactggaaaatccaatgattcagaggagggcactttatctgatagtattttattttctcatgagtctaatgatgatgcattaacttcatgggatattgaagccatgagacatgcatctgagggtattggaaaggacttaatgtgcattatgtatcttttctgtgctatatatggacacctattacttgtgctagatgatatcgagttttatgaaaagcaggttccttttactttagagcagcagcggaagattgcatcagcacttaatacatttgtatacaattctttcattcaaaatagtggaagctacagcaatcctcttgtggatgtagctgtcagatgtcttaatctactctatgaaagggacagtaggcataagttttgtcctatttccttgtggttggcacctgctagaaatggccgaattccaattgctgctgctgccaggtctcatgaggcagcatttggtatttttccagggattcctcatcggagctctgtacttaccacattaccacatgtatatccatttgaagagagtggattttgtgttttcagtgtatctggttatcattag

SEQ ID NO: 19575 - DNA, 1638 bp, Zea mays
  Peptide Sequence Number=SeqID_61354
atgttcaacaagataatcaagaggggaaaccgcaagggcgcgcgcggggacagtgcggaggtcgccgcgcgccccgcagcgccctcgtcatcctccgggagcggcggcggcggcgcggggggagccgcgcccgtcaccgtcaaccacgcctcccgggccacagcgccttctccgtcgtcgcccacttctccgcacgtcacgccgtcccgcgtttgcgaccaacccggcggtggggggcggcgtcaccgcccactcctcgagcctctcccgctcctccgcgacgtcgccgccgcagaccgtccgggcctcatcctccgcaagctccgcctcgtcgcggcgctcttcgacctctcggactcgctcaagcacccgcgagagaaggaggccaaacgccaggcgctcctcgagctcgtagattacgtgcaggctccagctcaggccgcgggcgccaacgcgcccacgcgcctcccggaccacgtccaggaggcgctagtccttgccatctctgccaacatcttccgcccgctgccacccgcgctgcacgagtccgccgccgcgatcgaccccggcgccgcgcccgacgacgacgaggagccatacctggacccctcctggccacacctccagctcgtctatgagctccttctccgatacgttgtttcgcctgacacggacaccaaggtcgccaagcggtatgtggaccatgctttcgtcctccgcatcctcgacctctttgactccgaggatccgcgtgagcgggaatacctcaagaccgtgctccaccgcatctatggcaagttcatggtacaccgaccattcatccgtaaggccatcaacaatgtgttctaccggttcatctttgagactcagcgctacaatggcataggggagctccttgagatccttggaagcatcattaatggatttgccttgccaatgaaggaggagcacaagctattccttgcccgtgctctcatccccctgcacaagcccaaatctgttgtgatctaccatcagcagctatcctattgtattgttgagttcgttgagaaggactacaaattagcagatactgtgattaggggtctgctcaagtactggccagtcacaaattgccagaaggaggtgttgtttctgggggagcttgaagaagtgctcgaggcaacacagcctgcagagttccaacggtgcatggtgccactgtttaagcagattgcccgatgccttaacagttctcacttccagaaaacattctttctgacacagtggaacacaatggctgctttgaacccgcgacttggtgactcagttgctgaacgcgctttgttcttgtggaacaatgatcacattgtaagcttgatagcgcaaaatcgtggtgttatatttccaattatatttgaagcgctcgagaggaatatacatagccactggaatcaagcagttcatggtctcactgcaaatgtgcgcaagatgtttctggacatggacagtgaactatttgaagagtgccagcagcagtatatggataaacaagcaaaagccaaagagatgcaggagcaacgagaatcagcatggagacaattggaagctgttgttgctgccaaggctgctggggatgacatggttttggtcaactag

SEQ ID NO: 19576 - DNA, 1077 bp, Zea mays
  Peptide Sequence Number=SeqID_61355
atggaggggaaggaggaaggtcggatcttcgtgggcggcctgtcgtggcaaacggacgagcgcaagcttcaggacgcctttggtcgcttcggcaaggtcgtcgatgttcaggtacccgttcctccccgtccgtctccgttagtgctcatgcccgcccccggatggtctggtatgcaagaatatgccagtgggcatatctgctacattgtcctgtcatcagaatatgctgaattttttgagaagttcatggcgatcatgctggagagacacacataccgccacaggggctttggcttcgtgacattcgaagatcgaagggcagttgacagcgctatcaaagagatgcgtggccaagagttagatggtcgtaccatctcagtgaacaaggctgagcctaagatgaatacagatgacacaaggttcgacagtggcggtggacgaggagaatatcgaggtggtagaggtgatggtccaccccctggcaattgctatgagtgtggccgtcctggtcattgggtccgtgactgccctagtgctgctggtggtcgttctggcagattcccatccaagttcagtggtggtggcagaggagaccgcttttctggatcagataggtttaatgatcgttacatggatgatcgttatgatggtggtcgttatgggtaccgtgatcaagttgatgcaagggacaagtatggtgggggccgagatcgttatgccaatgatcgctaccccgctggtggcgatcactttgacggagacaggtatggaggtggcctggatcggtacgcaccgaatggttatgggagggaacgagaaagaagttacgagagagatggagttcgtggcggcggtggctatgataggagtggctcaagaggtggtggaagctatgacagggatggccctagaggcggcaagggtggtggctatgtcagggatggcccacgcggtggtgttgctgatcgttatggtggtggaggacctgcacgctatgatggtggaagttacagggagaggcctgggccatatgatcgccctagcaggggaggaggtcgttttgatgaacgccactga

SEQ ID NO: 19577 - DNA, 2874 bp, Zea mays
  Peptide Sequence Number=SeqID_61356
atgcagcagcaggccgtggaggtgacggccaagggcggggccgtggagggggcggccgaggtggcgccggcggccgtggcggtggcggccaatggcgggcccaaggcggcgcggagcttggcggtggccgaggtggagccgtcggcgcagcgcgtggcggccgcggaggtccagccgcagtggcaagtggccgcgccgccttcgacgtcgaggccgacacccgcggaagtcgaggagctgagaggcgaggtggagaggaaggcggcggtggcggtgccagacgcagaggcgcacgaggggccgtcgtcgggcaccgcgcatgagccttccgccgcgccggcgcgggtcgaagcggagcaagggacgtcgctggtggtggaggcagaccaggccgctcaggggaggctgcctccgtcgtcgagcaaggcgctggttttccccgcgcggccggggtacggcacgctcggccggaggtgccgcgtgcgcgccaaccatttcttcgttcaggtggcggacaaggagatctaccactacgacgtcgtgattagtccagaatcgcagtcaaggaaaagaaatcgttggattcttaacgaactcgttaaattgcacaagaattacttgaatgggcgactgcctgtttatgatggtagaaagggccttttcactgctggtccgctaccgttcaaaaccaaagaatttgttctggaactaaccaatcctgagagagcaaaccagggggcgaaagagtacagcgtgaccataaaagatgctgccaaattagatctttacagccttaggcagttcttggctggtaggcagagggaactgccacaggatactgtccaagccctcgatattgctatgcgagaatgcccaactgaaaagtatgtatccatctcaaggtcatttttctctcagtcatttggacatggtggtgatattggcagtggtgtggaatgctggagggggtactaccaaagtctacgtgctacacaaatgggattgtctttaaatattgatatttcagcaactgcattttacaaggctcaaccgattttggagtttgcattggagtacctcaacatacgtgacacctcaaggcgtttgtctgaccaggatcgcttaaaactgaagaaagtcctcaaaggagtacgtgttgtggcaacacatcgtcgtgatatagccatacattacaagattactgggataacctcacttcccttgaatagtttaacgtttaatcaagatggggcaagtgtttcagttgtccaatactttaaacaccaatataattacagtttgaaacacattcactggccatgccttcaatctggcaatgatagtaggccgacttatttaccaatggaggtttgcagtatacttggcggtcaacgctattctaggaagctaaatgagtaccaagtcacaagcatcctgaagaaggcatgtgagcgaccacctcaaagggagggcagcattttagaggtagttaataggaacgactatggtaatgatcattgtgccaaagaatttggtattaaggtgacaaatgaacttgccttggttgatgcacgggtgctgccagctccgacgcttaagtaccatgactctggacgagaaaaggtgtgtagtccttccgttggtcagtggaacatgaacaacaagcaaataaatgggagaccttgtgttgatgttgggcaagcacgcccagataacttagaagctgcactcagaaatactcatagacaatctgcacaaatgcttgcccaacaaggcgtgactagacagcttgatttactaattgttgtattaccagatgcaaatgcaagtgtcttttatggtaggataaagcgtctttgtgaaactgaacttggtttagtaactcaatgttgtcaaccaaagaatgtttttaaaggtggccgacaatatctccaaaacctggctcttaaaattaatgttaaggttggtggccgtaatacagttctcgaagatgctttaaataggagaatacatttgttaacagatttacctacaattatctttggagctgatgttacccacccagctccaggggaagatgcatccccgtctattgcagcggttgttgcatcaatggattggccacaagttgcaaagtacaggtgcttggtgtcttctcaaggtcatagggaagagatcataactgatcttttcacacaagtgaaggatccacaaaagggacttattaacggtggaatgatcaggcatgccgaacatcttagggaactactcgtgtcattctataaggcaaacgggagccgcaaaccaagcaggataattttctatcgagatggtgtcagtgaggggcagtttagccaggtcttgctttatgaagtggatgcaattcgaaaggcgtgtgccagcttggaagagggctaccttcctccaattacattcattgtggtgcaaaagcgccatcacacacggcttttccctgaagatcatcatgcacacggacagatggatcgaagtggaaacattttgccaggaactgttgttgacacgaagatatgccatccaagtgaattcgacttctacctttgtagccactctggcatacagtttactggtgttatcctccatgttctctatgttgttttctttctgttcatggatgaccgatccagtcgcactgtgttgttattgcataatacagttcccccggcgtactacgcacacctggcggccttccgtgcgcgccactacatggacgatgacctctccgaccaggggtcgtcttcagtggcgagttctcgcatgaaagatggcgctgttccggtgaagcagctgccgaaagtgatggagagcgtcaaacagttcatgttctactgctga

SEQ ID NO: 19578 - DNA, 159 bp, Zea mays
  Peptide Sequence Number=SeqID_61357
atggcggctaggggatattttcccaagtggaccactctattggtgtgtgggcctctcggccagaatttcggtctgcatggttattttcacgagtgggtcattttgttggtggagcgtattttggttagaaattctaacggcttcgggctagtttggtaa

SEQ ID NO: 19579 - DNA, 1749 bp, Zea mays
  Peptide Sequence Number=SeqID_61358
atgtcggcgtcggcgtcggcgggtaagctggcggcggcgctgcaccggaggacgcgcagggtcacgtccgcgctggcgtgcgcggccctggagtgggtcctcatcgcgctgctcctcgtcaacggcctgctggcctacgccgtcgccaggttcgcggactacttcggcctcagcccgccgtgcctcctctgctcccgcgtcgaccgcctcttccaggccgaaggcggtggcggcggcgacgctagcggcgccggcgcgcggtggctgcgggacgccctctgcgacgcccacgccgcggagatctccgcgctggggtactgcctccgccaccgccggctcgctgaggccggagagatgtgcgtgggctgccgcccgtcgtcgtggaaggagaggacaagcgacgcagaagcaggtgaagttgaacaggaggacgtgaccacaagcacgggattagacctccaaccaaatgaacagaacgagatcgaagaagacagagcacctgagacgccgacgaacagcgtcgccacacaacgctccgacagaatgttcttgctcgagaggaaacggtcgctgtcgctgtctctggatgggagcgtagcgagcgagatggaaggcagcgagccgtccaccgtggaccagctgaaatcagcgctgcaggccgagcggaaggcgctcggcgcgctgtacgccgagctggaggaggagcggaacgccgcggccatcgcgaccaaccagacgatggccatgatcaaccggctgcaggaagagaaggcggcgatgcagatggaggcgctgcagtaccagcggatgatggaggagcagtcggagtacgaccaggaggcgctgcagctgctgaacgagctggtcagcaagcgggcgagggagaagcaggagctggagagggagctcgagctgtacaggcagaaggtgcagcactacgaggacaaggagaggaggaggacggcgagcttcaaggccaatggggtaagccccagtggcagtggcacttccgtgtcgtccagcggcgaggacagcgacgggcactccgacgactactgcgagctcggcgactctcctgacggcggcaacgtccagagctcatcggatgctgcccttagctccatgagggaccaggacgacggcacgaagcacctagcggctctggacgattccttgacgtacttcgaggtggagagactctccatcctggaggaactcaagacgttggaggagaggctcttcacactggaagacgacgatatcaacaccagcaaagaagttactggccattcctcgagtgacatggatttaccacacgatggccttcagtcgccggagtacattctcaccggtgacaggccaagattcggaggaagggcctctatcagcagagggaagagccttctgcctctgttcgatgcagtcggcgacgaggcctgtgaccgaatgccgccatctgcaggagcaggagaggcagaccaggccgacgatgcagcaacgaagccggcatccgtgcttgtcaaagagcaggagaggctggcgatcatagaggaggtcgaccatgtctacgaaaggttgcaggcgctggaggcggacaaggaattcctgaggcactgcatcaagtccctgaagaaaggagacaagggcatggaccttctccaggagatcttgcagcaccttcgcgatctccgcagtgtggagcttcacgtcaagaatgccggtggtgccatggctgcaaattcagcctag

SEQ ID NO: 19580 - DNA, 213 bp, Zea mays
  Peptide Sequence Number=SeqID_61359
atgaatgttggcattcgttttcctgcaaatctttttggccattctactgataaaaggatagaagcgggcagtctatttcagcatacctatgtggtcatctccatgcaaaagttagtaagcagctttggaggtatcatgaaatcagaacaacagaagatcacaagtcaagcttttgggaatgggaacttggagactggaaggactccagattga

SEQ ID NO: 19581 - DNA, 1716 bp, Zea mays
  Peptide Sequence Number=SeqID_61360
atggctcgcatcttccaccgccatctcctcctcgccgtcgtcaccttagccgtggccgcttctctccttcgcccagctgccgcagtgcgcccatttgttttggttctctccggtgaggacttcctcaaggatccggccgcgcacccgtcccttccctctgccgactccgacgacgacgatgggtgggacgacttcgccgacgattcaccggccgccgacccgctactctctccgtcctcctgggcccccctcctcgacccaaccatctctctcccctctggcgatgagacggactcgccggccgacgcgctcttcgtcgcgggcacccgcgcgatgctatccgcagcgtctgatggagacgacgcggcgttcaccacggctgccgcgcagatcgaggcctcggcagaggcggggcacccgggcgcgcagtctgcgctcgcgttccttaccggcgccgggatgacgcgtccggcatcccggtcgctcgcgttcctgctgcacaagttcgccgccgacgcaggagatctccagtcaaagatggccctcgcgtactcctacttccgccaggagatgtatgaagaagctgttatactatacgctgaacttgcagaagctgccctaacaagctccttgatatcaaaggagccaccagtgattgaaccaatccgtcttcacagtgggactgaagaaaataaagaggccttgaggaagtcccgaggtgaggacgatgaagatttccaaatcacagagtatcaggcacagcgaggcaacgctgccaacatgtacaaattagggcttctgtattactatggactacgtgggctccgccgtgattatggaaaagcatttcattggttttctaaggctgttgagaaaggcgagacacgggcattggagcttctgggtgagatctatgctagaggtgctggagtggaaaggaactatactgaagcgtacaagtggttggcacttgctgccaagcagcaacattactcagcttacaatggattgggttatctatatgttaaaggctatggggtggagaagaaaaacttgacaaaagcaagggaacttttcgaacttgcagccgagaataaggaagccggtggacattataaccttgttaatgctgggcaaccaaaagctatttatcaggtggcgaagctgttccagaaaggcattggtcttaagaggaatctccatatggggtggaccctccctgtcagccatcaagcctctatagaccgcctctaccccaaaacccacccacccaacacacgattatttttcccatcagaggcaacaatgctgtacaagtctattgctgagaggggaccctggagttcactgtccagatgggctctggagtcttatttgaaaggcgatgtagggaaagcattgctcttgtattccagaatggcagatcttggatatgaggttgcacagagcaatgctgcctggattctggataggtatagtgatcaaagtatttgcatgggagaatctagtttttgcacagatatggaaagacatcttcgtgcacatgctttgtggtggcatgcatccgagcagggtaatgagcatgctgctttgttgattggcgatgcctactactatggccggggcgtcgcaagggactatgaacgtgcagcagaggcatatatgcatgctcggtcacagtctaatgctcaagctatttttaaccttggctgctaa

SEQ ID NO: 19582 - DNA, 227 bp, Zea mays
  Peptide Sequence Number=SeqID_61361
gtggtagaaagtatcaaatcaaaggatcaactggcactggtgcttttgctaaagtatacaaagccactgttgacagtaatgcggatgaaatggttgctttgaagattcagaatccctcatttactttggaattttacatgtatcgccaacttgatctacgtatatctgatgtcgagagaccaagctatcttgatctgcgtatatctgatgttggttatatattttaa

SEQ ID NO: 19583 - DNA, 468 bp, Zea mays
  Peptide Sequence Number=SeqID_61362
atggccatgctcctggccgcgccaccccgcctccaggagggccgcgccgcccttgccgtggcggtagcctggccatcaggaggcaggagcccgcgctccatggcccgcggccgccgagggccgtccatcacgcgccggtgcgcgcccgccgtgggggacttgccgcgcgagttgccggccgtctctgcccgcactggagccgggtcgggtcgcaccgtggccgaccaccggcgggcgtcgaggaaaccgcgccgggggcctccaaccagccgcgccggggtgtccttgccgggacccggccgagcccgctttggggctttgcgccgcgcgcgccgatggtgcctggccgcccctgccggagccgaggccaaggccggccgcgctcggccgtgcgcgctgagggggtggcccgctcgcccttgcgggagccgaacggtcatgcgcggcgcgccctgcaccgttggctag

SEQ ID NO: 19584 - DNA, 282 bp, Zea mays
  Peptide Sequence Number=SeqID_61363
atggggggagagggtagagcagaggacggtggggccaacctgctggggcggcaaggacgcgcggcgctaccagtctgctggtgcttggccacgtggggaataggggaccagcgcacgatgaccggtcagctggcgaagcaccgagcggagaggctgtgcgccgcgcgagtaggggaggtagccgaccgagctgggcgccgtgtgctgggcaagcaggagaggcgaccgagcgagtgggtgcggggcgccgtgcgccaggcgagcaggggtgggatggtgtga

SEQ ID NO: 19585 - DNA, 435 bp, Zea mays
  Peptide Sequence Number=SeqID_61364
atgagcacgactcttgtaaaggttggaccgtggggtggacaaggtggcaatcctcaagacatcgacgtgctgcctgatgaacgcctaacaagcatgacgatccgcagcggtgacgtcattgaagcttatgttgacactgctgggaacgactacacaacagatctttggggtggtggaaacgggagctttactaagattgaattaggtgacgatgagtatgtgagggaaatttctggcacttacggcccttacgacaatgtactgaatctggtgacgtcacttaatattattgtcaccaacgttgctagcttttcatttggaaacgcacaaggagatactttcagtatcccagtggagaacggcggccaaattgccggtttctatgggcgctcagggtggcttatcgatgcaattggcgtctatattcatccctga

SEQ ID NO: 19586 - DNA, 228 bp, Zea mays
  Peptide Sequence Number=SeqID_61365
atggagtcgaagggcaaagagcagggaccagagtcacatgatggcttgggtcagactggtggagctcggagggacctctatcagaccaaaggtgagctcggatggaggccagggcactacgggagagggagctcggggagctcacccaccagggagtgtgacggcccgggaactcaacggcgacggccgccatcgatgcagggaagggagctccgcgagctggagtag

SEQ ID NO: 19587 - DNA, 489 bp, Zea mays
  Peptide Sequence Number=SeqID_61366
atggggattaaggccgagcgagccgagagggcgtgctggcgagcaggaaaccgcgcgagcactggacagggaaaacgacgggctcgacggcacgagaagctatcaccagcgacgacacgacgatggcgacatggacgagcgtggatcggcgctagagaagccgagcgcatggtgtcaataacagaggagggcggacagatcggtgccatgggcgaccaggggaaaagcaggggctggggcaagcacagggagggaacaggcatggctgggctgggtgaccatggcgagggagcagaaacggcgcactgggcatcgagcagaggccgagcagagggacctctatcagaccagggtgagctcggatggaggccaatgcactacgggagagggagctcggccagctcacccaccagggagcgcgacggccagggaactcaacagcgatggctgccatggatgcagggaagggagctccgcgagccggagtag

SEQ ID NO: 19588 - DNA, 339 bp, Zea mays
  Peptide Sequence Number=SeqID_61367
atggcgcctcctgttgacgtggccggtctgcgccctaggttaggcgatgtggaagcacctccgaagccgaggtcgagtctgtcttctgtggccgaggtcgagtccgagccctgggtcgggcggagcggaattcgccgtcttccggggcttagcccgagtccgagccttgggtcgggcggagcagagttcgccgtcttccagggcttagcccgagtccgagccctgggtcgggcggagcagagccggtcagtggagcagcgaagtgacggcggtcacttcggctctgtcagctggggggcgcgcgtcaggataaaaggtgtcaggccacctttgcattaa

SEQ ID NO: 19589 - DNA, 180 bp, Zea mays
  Peptide Sequence Number=SeqID_61368
atggagagtcatgatctccgggcagaaagggaatcatggcttgtgggtggcaatgagattgatggttctggttatgattatggtactggtcagaggacacttgccttcaccaaacagatgctcagggtcttcaacttcgtggaactcgaagagctagatcacttggtcgccgaagcttga

SEQ ID NO: 19590 - DNA, 162 bp, Zea mays
  Peptide Sequence Number=SeqID_61369
atggagctaaggcaagactcacgaaatggcgagatggagaaaacaatcacgggtaaggtgggaaagaatcccaagggactagaaggtcatggtaaggggcatctacaaagatatcacaagcacaagagtgagatcagatctaatagattgagagaagtatag

SEQ ID NO: 19591 - DNA, 345 bp, Zea mays
  Peptide Sequence Number=SeqID_61370
atggagtgggcgtcagtggagtacacagccgcagcgctggtgtgcgccgcggcggcgagcgtggtcgcgctcgcgcacatgtaccgccacctcctccactacgccgagcccatctaccagcgattcatcgtccgcatcatattcatggtcccggtaaagctctccgcccgccgctcacacccacaacaaatcctcgcggccaagggcgccctcgcgccagatttgtcgcccgccttcgctgtagcttttccgtattgggtatatgctatgatgtcattcctttcccttatcctccctgacaacgcagtatattttaattctattcgagagatgtctgggatgtaa

SEQ ID NO: 19592 - DNA, 282 bp, Zea mays
  Peptide Sequence Number=SeqID_61371
atggcgctgccccctcgattctgcttctgtcgctctgctggaaagcgaccacccgcctccatggaccccctccccccgttgtcatctgtcgccgagaatagaagccatccactgcatcgggagtgggagcccgaggctataacccagactcctcctcgccctcgtaccttgccgttggcgaagagcgtcatcagcgatgcgcaccctaggaagcaactgcgagtgatgcacattactaaggaccgaggtggccattgtgggcttcaacccgtggtggtttga

SEQ ID NO: 19593 - DNA, 456 bp, Zea mays
  Peptide Sequence Number=SeqID_61372
atgaaggtgggtattaccgtggttgagagctgggaaggagttggccacggcgcagagcggggagacggcggtgatgtcgcaccggcaagaaattccgatggagttggcggcaatcctcgagtggcttgccacgactactttcctttggtcccgaaggagctcccgagtccaggtccaaggccagatgacggccaggatggagtctccccaacgtcggcacccacgtctctcccctcggcgccacaacttgtgatacagtggtttcaagagatctggagaagaggagggagaggggaacccgcggtcgtgggctcccatatatttgtgaagctaaccaaggcgccacaacggaccgcgaaactacggcggggcgccccaccatgcgcggaggttcggttggaacacgacggtgcgactgcgcgtccggacccacacgtcagtgcgctcaaatggtga

SEQ ID NO: 19594 - DNA, 297 bp, Zea mays
  Peptide Sequence Number=SeqID_61373
atggtgaacagcagtgggattactgaattaggggagcgcgagaaggtcttgctgctcatggagagtggtgtcaggataccctggtgtatccatatctgtatccatatctgtagtgacaagagcaccacccctttagatttcaatctgaaactacgaaagcgcattcataacaagagacttgaagatgtccatatgctcagatatgacagggtattgttccagtttttctttctctcagataaacatttcatattatccttttccaatttgggcttcgcagtaatgcacatttcataa

SEQ ID NO: 19595 - DNA, 690 bp, Zea mays
  Peptide Sequence Number=SeqID_61374
atgcagcaaaataagcaaatatgggtagttccaacagttaggatggtgaggaccaagaatgtcaccccagtaagagggggcgatgatcaggacccccctagcccattcagacgggacaagggcaaggaggtctaccctgagcagcagggaggagaaaagaagagaaaattggacggagccattagagcagcagtagctgagagagcagagcagggaggacatatgagaattggtttagatcagatagtcttccatgttcgtcgcctctcatttcgggtatgctccactccaaccagattcgacccctctgctctagtcaccactaccactccaccctccactaccacgccagcttccgccactacagtgcctacctctccacttgctacacctatagcctccaccacacctgcttccaccgctcccgctacgtctatcactccaccagtacctcccacccattttagagagcatgacgagactgaggtttggcctcttgctgcagattcaagactgttcgaccttcacagagccactgcagccaaggtctgtcgcttcaggcacgtgcatgtggacacttggcttccagctcagtgtgatccagcggctggtccattcttcagcattcaaactcaggagtccttctacagagctcaaccgacagcccagaaagccttgagagcttactga

SEQ ID NO: 19596 - DNA, 714 bp, Zea mays
  Peptide Sequence Number=SeqID_61375
atggaggcaagaagagctttgaggtaccgagtgcacaggagaaggtcaaagaggccgaggaacccaaagctaggggtgaagaagaagacttgcaaagtcaaggttgatcgagttaaggagagttatgggatcatcccaaaaaagacaaattggagtaaagaagttgcactagtctgggagcaccggactgtccggtgtgcactagacagcgtccggtgcccaggatggtcctcggtgaacaggctgctctcgagaagcagttggaggcgctgcggctataaatcaccggacggtccgagtgctgtcaagaaggttgcaagcagccacgacaatgttgtaacaaccatcaacatattggaaggctctatctgtcacgttgacaaatttgagcacatcggaggacagagcgacatccagatcatgttcctaggcatagggaactttcagtatcgccttgttttcaacctgacgctcggaggccaaaggattcaaaggtctagtatccagggcacgggcactggtgtgagcctcatccttaggtgtcgagcggtaaaatacaaacatgagtctagtagaatcaagagtggtctggaactgaggaggtttgatcagctgcgcgaagatgtggcagaggtattgagcctacgacagctgacaacgagcacaaagtccatccaagacaatgtcctctatctcatagatcagaaagcctaa

SEQ ID NO: 19597 - DNA, 321 bp, Zea mays
  Peptide Sequence Number=SeqID_61376
atgttgtgctatgaccgctccccctggctggtcctcgacttcttcctcttcgcctccatcgaggcgctctacttctcggtgtcgctgatcaagttcctggagggcgcgtgggtgcctatcctcttggccctcatcctgctcgtcatcatgttcttgtggcaccataccaccatccagaagtatgagtacggcgtgcacaacaaggtgaccctggagtggctgctgacgctaggcgacatgctaggcacaacacaatgtttacctgatgacacaaatggcttccctgaaactgttgttgcacaattctcaaatccttcataa

SEQ ID NO: 19598 - DNA, 387 bp, Zea mays
  Peptide Sequence Number=SeqID_61377
atgccgtacagaaagcccacgtacggcccctatagcgatgagctccaggaaaacgatagccacgattactatggtttggtctcgacgatggattctggtgttatccatctggatggcactgcaacggcaaaacgaaacgggttactgttattgatcggctccattccttacatcagagaaatacagtttgaaaaggatctgatccccgagaagcagccgcctggcaacggaggcgacaaaattgaggaggcctccaagggcaccaagaagccggaagtcgccgccggcgaggaccccaagaaccagccgctcggcgacgttcgtgaggatgctggtaaccccgaacaacaggcggccggcttcttggacatgtcgcgaggaggctga

SEQ ID NO: 19599 - DNA, 288 bp, Zea mays
  Peptide Sequence Number=SeqID_61378
atgccggagtcccttataaccggtgttgactggccccacagggcggcgtggatacgctcgagatcgtgcaggggtgctgacagggaccctttggcggcacgtcacttgctggtcggacatggtttgatgatgacatgtcttgtcttgtcgagccgctcggcaagggcccggtcgggcgcttcgcctcgccaagttgctcagcaagggcctggtcgggcgattaatctcatgcaatttcttgctgtaaagcttggccagtggccaccagtatatgactatgtagattaa

SEQ ID NO: 19600 - DNA, 411 bp, Zea mays
  Peptide Sequence Number=SeqID_61379
atggcccagtcaccttcatccgccggaggcgagacctttgctcccagaagccgtatcatgttcggctctctcgacttcctcgccaccgccaccggcgagctctgccatgtcggccccaacgtgtctaccgccgcaggcatgggacccacacggatcaccaggagcaaggcagagaaacgacgcctcaaggggcgcgctgccgccttaaagcggcgccttaaccggctcgtcgcagccgccaagcagcggacgaaaggagccctcccatcaaccttggtggctgtagtcggccagcagccaaactccatcctcgacctgctagaggatgaatcaagccacgcctcgacggaagctagcttcgactccgacgaggcagtgaggaggacttgtttcgtggcgacgccgccatga

SEQ ID NO: 19601 - DNA, 846 bp, Zea mays
  Peptide Sequence Number=SeqID_61380
atgggatgcctcatgatctttggcggggtcgaggtgtatggctacaggcgccaccgcaagatggcctaccgcgagatggtcggagttcccgatcgtcttcgaccgccgcgatcatccagacaggatcccacaccccgggcctaccccctcatcgccgagccaatcgtgggctcgaagcgtctctataaggtactcatggatggaggaagcgacctcaatattatgtatattgagaccttcaacggattagcgatcgcacgctccgcgctgcgacctagcccagagccatttcatggcattatccccggccaccaggcctacccactcgggcgggtcaccctgcccgtgacatttggcgacccctccaattttcgcaccgaacgactgcagttcaaggttgtggatttcccggagtcctacaacgccatactcggaaggccatgttacaccaagttcacggctattccaaactacacatatctgaagctaaagatgcctaggccacacggagtcatcactgcctctgcctcattcaaggccgtgtacacttgcgagcgggctaactacgagctcgcctcaacgttggccatggcaatggagcgaaccaagccccaaaagatcgcaactctgggagacacccaggcgccccagggcggacccaacatccccagatccgctgaagacaagggggacgctccggctaactccgacgactgccccaagcgcacacggaccaacgcggcgcccccgccaattaggcgggcggactcaccgcttcggcaaaaggaaggagcaacgaaagcaggcggcgaggaggacgcgcaagttcttagccatcagggttag

SEQ ID NO: 19602 - DNA, 1008 bp, Zea mays
  Peptide Sequence Number=SeqID_61381
atggacaacggcaccatcctctccggtgaggctgctatgaaccacgccgccgtcagccccggtacggccatctcgggcttcacgcgcctcctcaaccaaaagctcaaggacgatttggtgaagagcgagatgaagctttcgccatcgtacaagttctccgagagggagggacgggccgccatccaaatccaagccgccggcggcggccaggtcatagagttgtgccccctagatctcgccgacatcctcttctccgagctgaagcacagggcggaggctcacctgggctgtgagctctcggctgctatcatcgccatgccgcatcacctcaactacaacggaaggcaggacgtcgtcaatatggcaaggtacgatgctggcttccgccgggccgccaaggccatcgaccgacagatcgcggcggccgtggcgcatcaccgccacacggagcaaggtgacgacttcacggcgcggatcatcgactacatgggcggagctcatcaaggagccgcaccagtgggacatcaggcaggacgcggaggcgctgcgcaggctaagggtgtcctgcgagcacgccaagaaggcattgagcgaccaggaagagacgatggtgcagatacatgtcaccggtgtcgagtcatcggcgcccctcgcgggccaagctggaggagctcaaccaggacctgttcgacagggtcatgcgacttgtggatggggagtgggtggctgccccggccccacgacgagagccgcaaggacatggtcgatgagatcgtcctcgtcggtagcggcgcgaggatgcccaagctccatcagctcgtcgaggactacttccatggcaggcagccaaacagccgcaagggagtggaaccagaggacgccatcgttcgaggcaccgccattctttcccgtcctaaggcggcgtgctacctggaggagtgctttgactttctttacggcaaggacggtaggggtcttccaagctttcttttcagaacgtccgattaa

SEQ ID NO: 19603 - DNA, 480 bp, Zea mays
  Peptide Sequence Number=SeqID_61382
atggagctagggcgagcaattgccgccctttcagtcgccctcagctccaggatccgatgcgcacgcgtcagggctgttgcaacaacacgtccatgtgaggaggatgggtccgacaaggggcccacacgcaaagtgaccggcaatggaaacagtggacagtgcgggtggctgacaccgctgggcccacctgtcagtgtcgcttcttgccaccccctcggctgggctgcacgcagaatgatggggaagagttacatcaaaaaagggttttctatcgtcgttgaagatgattcaggcaattgcagctccatgactcaaaacatagtatacaaggagatttttgaacgtattgtccaacaagaatcccatcaggctgagactcttgatgctgtcctggcgactgacggctacgcgcatctggtggaaagctgccctctggtgctgactgaactagtgagggctgcgcgtggaaggaagatctga

SEQ ID NO: 19604 - DNA, 915 bp, Zea mays
  Peptide Sequence Number=SeqID_61383
atggaggaaggatgtgaggggtggagtggatgggagtggagtaacgaactagttgtgggggtagtgtggaaggaggccccggagtcaaccacccaatcggtggtggttgggggaggtggtggtggtgaagggtcggtggggagtgcacgcggcagcggcaagatcttctcacccctcgccctcctcggcaaccgcgcgctcacgccggagttcaagaagcgcatgagcacaccgcgtcgcgacgggcagcaccacggcgacaagcgcaccgtgacacgagcagcctacgtcttcgtgcagccaccagacgatccgtcgacgttgaccgtgctgtggggaccgcccggcgaggtgcccgttgccggcttcgctgcggcaccggaaaggctaccggaggcgttcactggcagcacgtcgtgcctgctgcacgcgaggcaggtcggcctgcaagcggccagcggccagcagggggcgcacaacttcgtggtgtcgccgctgtcgttccacgcggcgctcgcgctggtagccacgggcgcgcggggcgagacgcagcgggagctcctgcgcttcttacagcagaggaggggcgggtggcggctggggcgcgaccggcaggggaggagaggcggccagcagaggagggccggcggcggctggctcgggtggtgcgggcgggacagggcgcgcgcggatccggcgggtggaggagacggcgcaggtgcacgccggagttggggggcgcggccggggagaggtgggaagcggagaggatggcggccgtcgcagggaggtggagaaggcgtcggcggctgggaggcggcgcagggtagcgccggcggctgggcaggggagggcggctgggcaggaaagaaattttggctctataccatattggaaaccctaaccctagagtag

SEQ ID NO: 19605 - DNA, 522 bp, Zea mays
  Peptide Sequence Number=SeqID_61384
atgacgaaagttgatgcttcgttgaaggttgtggaagtgagtataccggagacgaaggtcatgaaggacataccttcatcatttcagcatgtaagaattaacattaatgatatttataatacaatggtaccttcggttcctcagaagggcacaactatccacgctgagataccaggggccctaatggctgagaaaggttcattgatccaagttgacaaagtctatgagctcaaacgctttcatattgctccatccagaaactatttcaaattgttgacaatgatctggtaccttcagactcgggttaaaagcatctacgatgaaaaaagcatgatcgtgacgaaggtggagttgctccgaagctacgtgcagaggagcttcgacaaaatggcagaaaaaggaaccgacttaaaggggaaaagactatctagtcctcatagaattgtctataagttaataataaatgtaaagggcatgaatgtaaattcacacaggctgcgtcctgtgcctataaataggtga

SEQ ID NO: 19606 - DNA, 441 bp, Zea mays
  Peptide Sequence Number=SeqID_61385
atggcggaaaaaggaaccgacttaaaggggaaaaggctatctagtcctcatagaattgtctataagttaataataaatgtaaagggcatgaattgtttctttacaaactacacaaatgttcttagaataatgacagaaatcagacctctacatcctgttggttttcacaactcaaacatcatcagagatatatttctcaaagatataaacaatgtctcttcaaaagttacgctttggggacaacaagcctctatcttctcagttgatgatatctgcactaaaaatgacaacaaacctgttgtcatactgtttattggatgccttgctaagcgattcaaaggccaaccatatattagtggtactgagcatgtttatggtacttcaacccagacattcctgaagcacaaatgtattacaacaggacacaatttagtgagataa

SEQ ID NO: 19607 - DNA, 450 bp, Zea mays
  Peptide Sequence Number=SeqID_61386
atggctggctggacagtggacaccgcactggcaggcggccgcactaaaagaggtggaggcggagagcgagcagtgacgcacggaaaggccagggaacttcccttgggatccgctgcggcgggagacaccgtggccagtagggagcgaaggccgcgtggtggtgggacacggagcgggatggagcacgggcacggcagcggggtgccggccaaaccctacccgcttctgctcgcgccgaccttttgggctctcacagtgagtggaaagaatccacagggctccagttggatgccagaagcatccaacatgttggcggatgaccgggaaatggcagaaaaggaggtgtcaaaggttggggcggaagagatggaagagcagcagcaggaaggggaggcagaggaggtggatgtgaagttgcaacactgccgccaccaccgttgtcgcacttaa

SEQ ID NO: 19608 - DNA, 159 bp, Zea mays
  Peptide Sequence Number=SeqID_61387
atggcgccccggacagtcccggtgcgccaccggtgtgccaacggtgcgccacccgggaaagcctctgccgcggaccagcctggccccacctggcagagggtgcaccggacagtacggtgcacaccggacagtccggtgccccaaggccagaaacactaa

SEQ ID NO: 19609 - DNA, 705 bp, Zea mays
  Peptide Sequence Number=SeqID_61388
atgcccccgccccgcgagtcatctccgtccccgaaaatctcgccgtcccagggccgctgccccaaaatcgagtgcgcggagatagctgagcgcccagatcgcgggtcggagagcgcgtgggacaggagggcgagcacgcgaaaccccctcgcgccggagaggaaagggcgaggtgctgactccggtgcttgggaggagacgcgacctcgacctcaccagcttcggtgggtcctcctctcctttgtcgccgcgtgcgccttcgtgccctctccatcgaccgttgtgcgcgcctccatagacgaggaggcgctggccacgtcggcggcactcgagctgcggcaacggggcgtcgctggtggcctgtgtgatggcgcattcgagcagtacgtggccaagcgacacagccagggcccgtcgctgccccggagctgcagcacgcgcccgaggtcgctcgctgacaccgagatccagccgcagcagctcctcgccaagttgttggaaggcacgatctttggcatcagggcatggccggatttggaattggctaatggtattgactacggatttactggggaagttacgaaaatagacgtttcacgaataagaaagaggcttgatagtgatagcatagttgttatcaataacatggggttcagttcatcaggagatgtgttaaattgcaatgtatacatcaaaattttatag

SEQ ID NO: 19610 - DNA, 1155 bp, Zea mays
  Peptide Sequence Number=SeqID_61389
atgccttcaccggcctcgactcctacacaagtgttagggtattcggccaaaacaaacttcagtgccgggagtcctgaatcgaaagattcaatgccagagttcagtatgagcaattgtcggttcttcacttatgaggaattgtatcagatcacaaatggcttctcatcacagaacctgctaggggaaggtgggttcggatcagtgtataagggttgcttggctgatggaagagaggttgcggttaagaaactgaaagatggcggcgggcagggggaacgtgagttccatgctgaggtggatattatcagtcgtgtgcatcatcgccatctagtttctcttgtggggtattgcatttcagatgaccagagattgcttgtctacgattttgtgcccaacgacacacttcactatcatcttcatggtcaacccagaataatccacagggatataaagtcctccaatatcttgctggataataactttgaagcactggttgctgattttggtcttgcaaggtaccttgctccagagtacgcgtcaagcggcaagttgactgagagatctgatgtattctcattcggtgtcgtcctcttggagcttattactggtagaaagcctgtcgacgcatcaaagccattgggtgacgagagccttgttgagtggcacagttatttgcaggctaggccattgctcacgcaggcgcttgagaccggcaacgccggggagctggtggacgcccggcttaacaagaactacaacgaagtcgagatgttccgtatgatcgaagctgctgcagcttgcattcggcattcagcatccaggagaccgaggatgagccaggtatacaaggataaaagaagagcgcgtgagcatctcatcagagtaccggacacagaccagaacctgacattttccccccctccacttgcctcctcccaggtcgtgcgggtgctcgacagtctcgctgatgtcgatctaactaacggcgtgcagccaggcaagagcgagatgttcaacgtcgcgaacacggctgagatcaggctgttccagcggatggcgttcggcagccaagatttcacgacggatttcagccagtccagctggaacaacagccagagcagaggtcttgatgcctctggttcaaggccattgtaa

SEQ ID NO: 19611 - DNA, 1353 bp, Zea mays
  Peptide Sequence Number=SeqID_61390
atggcgtcgtcgagctcggctgctactactagtggtgacagtcagggtctcaaggctcgagatgcctgcatcgtcggcgtcgcccgcacgcccatcggcgcacttctcgggtcgctgtcgtccctccccgccaccaagctcggctccatcgccatccagggtacgtacctttcgcgccactcgctcggctccgacgtttttggccgcatcagcaataacccatcaacaaattgccgcaacacgtgtggtccctcccaaatcccaggtgctctcaagagggcgaaggtcgacccggcgctcgtgcaggaggttttcatgggcaacgtcctcagcgccaaccttggccaggctccggcaaggcaggcagcccttggcgccggcttgcccaactccgtgccatgtaccaccgtcaacaaagtttgttcctcgggaatgaaggctgtcatgtttgcggctcaaagtattcagctggggatcaacgatgttgtggtcgccggtggcatggaaagcatgtcgaatgccccaaaatatgtggctgaagcaagacgaggatcacggttcggacatgatgtccttgttgatgggatgctcaaggatggcctgtgggatgtctataacgatttcccgatgggaatgtgtgctgaattgtgttcagaccagcactcaatctcaagggaggagcaggattcgtatgctatcctcagcaatgaacgtggcatagcagctcaggacagcggtgcattttcttgggagattgttcctgttgaaatttcttctggtagagggaaaccaccagttgttgttgacaaggatgagagtcttgcaaagtttgatccagtaaagctgaagaaacttgggccaacttttaagacgaatggttctgtaacggctggcaattcttctagtataagtgatggcgctgctgcaattgtccttgtcagtggagagaaagccaagaatcttggccttgaagttattgcaaggattacagggtatgctgatgctgcacaggcacctgagctgtttacgacagctccagcccttgccattccaaaggctatatcaaatgcagctcttcaaacttcacagatagattattatgaaggaaagctaaacttaagtggtggtgctgtttccctgggccatcctatcggttgcagtggtgcacggataattgtcactttgcttgggcagattcttagacagaaaaatggaaaatttggtgttgctggagtttgcaatggcggcggcggcgcttcagccctcgttttggagctcatcggctctgacatgatgcaggcaaccctcttcgcatatccattcatcattgtgaagttggtgcgagcaaattag

SEQ ID NO: 19612 - DNA, 393 bp, Zea mays
  Peptide Sequence Number=SeqID_61391
atgacctactcgtccttctccagtgaccggccggacgcggacggcggtggcgcgaaaaacccgccggggccgtcgccgtcgccgtcggtggaggacgcgatgagcttcgtgcagatggtgaaggaggcgttcaaggagcgacagccggacaagtacggcctcttcctccgcgtcatggaggacttcaggaatcagcggctcgacatcgccgaggtggcctccaccgccaaggccctgttccaggacaaccctgacctggcgctgaggttcaacgtctttctgcccaagggccaccagatccagctcgggcttgatgagctcgccgcctatctcgtcagggacataaacctgggcgccgacaacaacgacgacgacagcgatggcggccaatga

SEQ ID NO: 19613 - DNA, 387 bp, Zea mays
  Peptide Sequence Number=SeqID_61392
atggatgtttcaactgtggcaatccaacaacttcgtcgccagccagttgccccaagaggggcaagcagctggctggcccgcgcgaccaccactctggtcgacggaagggcaagcgagagtactcctccgaaagctaagatcaaggagtgtgcctttctcaccgccctaagtaatctcgaccacgactccaacgatgcagcgtcttcctcgagcgaggaggagactgacaggcgagtcgaggacaagatgaacggactctgcttcctcgtcgacaccgcaggcagcctttgcaccagcatggcctttggtgatgatgctgtgggcgacgacagtcaggacattggcgacgactctacatctgaggacggaggcctggagaacatatga

SEQ ID NO: 19614 - DNA, 303 bp, Zea mays
  Peptide Sequence Number=SeqID_61393
atggcaatggcaacaacacgcttagctgctgacgagccacaacctaaaggtgaagcaggtctcttgggtggaaccatcgatcgaactctgaggctactgctgcgatggtcgtgggattgtgagggcgatggcctgatgggtggtgctgtcggttgcagccgagcgcccgtcggccaatgcctgcctggatgtgggacatggggcaccgccaccgccagggcccacgaagcagccaagcagcggctggagcacgagagagcacatactagaccaggtattgggagcgagaggaatgagaactga

SEQ ID NO: 19615 - DNA, 342 bp, Zea mays
  Peptide Sequence Number=SeqID_61394
atggcggcgccatggccggactacacacgcccgacgaatcctacgactactctccaatccgccatatgtggggtgcgcggcgacgcagtggtggtggcaagcagttggagaaattacagaggggatagaagggatgcggcacggaagccttatacccaggtcgggcccccggtaatcaggcagagttggttcagcgtgcgtcgatctgcttctcccggcgaagctccgcggatcgtgcgcgaggtgggagatgacgtgcggcccccgcgtggaaatgacacagtgagaggagctgatcgctgggactgccgagtgggtccgtgtgccggcgagagcgcgtga

SEQ ID NO: 19616 - DNA, 1197 bp, Zea mays
  Peptide Sequence Number=SeqID_61395
atggtgatctcggtgcccgcggcccggcgctccacctccgtacgcgacgccgtgctgggcggcggcgggcggcagctgtaccagcccctccgctgcgccttctacgacggcctggccgccgcgctgtccgagtccgaggagccctccgactcggacgccgccgccccgcgtccccgctggctgcaagcggcaggcggcgaggaacgtgctgatcctgatgagcgacaccgggcggcggccaccgcgcctccgccgaggccctgcgcgacgcctttccgcatcgagttcggcgacgcctacaaggttgacgtgcttgggcttgggccgggggcgcaggtgttcgtgacggatctggggaaggagtacggcgggtggccgctgaacgacatggagcggtcgtacaagttcatgatccggcacgcgcggctctggaaggtggcgttccacggcacctccccgagatgggtgcacggcgtgtacctcgccgcgcttgcctacttgtacgccaagtacgtaggagcatcatactttgggcgccgcgccactactgttgccttgcctctgaatgaatatatatacgcatgcagcgaggtggtggctgggatcacgaagtacgagccggacatgatcatcagcgtgcacccgctgatgcagcacatcccgctatgggtgctcaagtggcagcagagcctgcgccagcaccaccccaaggcggtggtgcccttcgtcaccgtcgtcaccgacctcaacacctgccacccgacatggttccaccacggcgtgacgaggtgctactgcccctcggccgaggtggcgagccgggccctgctccggggcctcagcccgtcccaggtccgcgtcttcgggctgcccatccggccctccttctgccgcgccgtgctcgacaaggatgaggtgaggaaagagctggggctggaccctcagctgcccgctgttctgctgatgggaggcggcgaggggatcggcccggtggaggagaccgcgagggcgctcggcgaggagctctacgaccgccggagacggcgccgggtgggacaggtcgtggtcgtgtgcggcaggaaccgggcgctgcggtccaccctgcagtctctcagatggaaggtccctgtcaagatcagagggttcgagacacagatggagaagtggatggccgcctgcgactgcatcatcacaaaa

SEQ ID NO: 19617 - DNA, 1128 bp, Zea mays
  Peptide Sequence Number=SeqID_61396
atggcctccgcctccggctcccccaacccagtcgtgctagggtgcggcggcatctccgtcgactacctggccgcggtggcatccttccccaaccccgacgataagatccgcagcctcgccctcaaggtgcaggggggcggcaacactggcaacgcgctcactgcagctgcacgcctcggcctccgtcccaggatcatttccaaggtagccaacgatgctcaaggaagaagcatcctcagcgaactccaaactgatggcgtggacacatcctacatcctggtgcgaatcactatccctcaacgattcagtgacagtcactccggtgctaaaatcgttgtcctcaagaatgctgcatccatccattttttttctcaggtcgcagagaacgggaactcacccttcacctacataatagttgatgaacagacgaaaactcgtacatgtatacacactcctggttctcctcccatggtgccagaagagctcacaaaggcaaacttgtcgtccgctttagatggcgtggacatcgtctacttcgatgtacgattgcatgacattgctttgcttgttgctgaagaggcaagtcaaagaaaaatccctattttgattgatgccgaaagaaagagggagggactggacgagcttctcaactttgcatcttacgttgtatgctctgcaaagtttcctcaggcttggacaggagcctcatcaatacctgttgctttagtatccatgctttcaaggttaccaaacatcaaatttgttattgtaactctgggggagaaaggttgcttgatgcttgagagaagcagtacagatgcttctgaggcaggggaaatagatgcagaggctttattcgaatcactagagaagagcattgatcagagttctactataccaaaatgtgttgcttccaagtcaaactttgagaataagcgcggatggagtaagctcgataagtggcaggtttatgcaccagcatgccaccggagaggatgctaccttttgctgcacgagtggctggttgtggttgcagaggtctgggggctcgaaccagccttccccatcgcgcagacccacgcctggctggctattgatccgaattcagaagggctgcatcctccatga

SEQ ID NO: 19618 - DNA, 3330 bp, Zea mays
  Peptide Sequence Number=SeqID_61397
atgtcgtgcgccgccgcgctgtcgctcctcgtcgcgctcgccgcctccgtcgcgccggcggcggcgtcgcagggagccggcaacggcgacggcgacgcggccgtcctgcgtgcgttcctcgtctccctgccgccatcctcccagcgcatcctcctcccgtcgtggaacgccaccaacagcagcagcagcaccgggtcgagccactgcgcgttccgcggcgtggagtgcaccgccgcgggcgcggtcgcggcggtgaacctgtccgggctggcgctgtccggcgcgctcgcggcgtccgcgccggggctctgcgcgctgccggcgctcgcggcgctcgacctgagcctgaacagcttcacgggcgccgtccccgcggcgctcgccgcgtgctccgcgctcgccacgctcgacctcagcaacaactcgctctcgggcgccgtcccgcgcgagctcgccgcgctcccggcgctcaccgacctcaggctcagcgggaacggcctcaccgggccggtcccggagttcccggcgcgctgcgggctgcgcggcgcgctgccccgcagcctcggcaactgcgtcaacctcaccgtcctgttcctgtcctccaaccggatcgggggcgccctgcccgacgtcttcggctccctgcccatgctgcagaagctgtacctcgacagcaacctgttcgccggggcgctgccggagagcgtcggcgagctcgggagcctggagaggtttgtggcctcgacgaactgcttcaacggctccatccctgcgtccatcgggagatgcgggtctctcacgacgctgctcctgcacaacaaccagttcacggggccaattccggcgagcatcggcaacctcagcagactgcagtggctcactatcaaggacacgttcgtcaccggcgcgatcccgccggagatcgggaggtgccaggagctggtcatccttgacctgcagaacaacaacctgacagggacgataccgccggagctcgccgagctcaagaagctgcggtccctgtccctgtaccgcaacatgctgcacggaccagtgcctgcggcgctgtggcagatgccggagctggagaagctggcgctctacaacaacagcctgagcggagagatccctgaggagataaaccacatgaggaacctgagagagctgctcctggcgttcaacaacttcaccggcgagctcccgcaaggcctggggtcgaacacgacgcatggacttgtttgggtcgacgtcatggggaaccacttccacggcgcgatcccacctggtctctgcaccggaggtcagctcgccattctcgaccttgcgctgaacagattcagcgggggcattccgagtgagatcatcaagtgccagtctctgtggagggcccgtcttgcgaacaacctgttcagcgggagcttcccttcagatctggggataaacaccgggtggtcgtacgtggaactgggcggcaaccggtttgacggcaggataccaagcgtgctcggttcatggcggaacctcacggtgcttgatctatccaggaacagcttctccggtcccataccacccgagctcggcgctctcgcccatcttggcgacctgaacctgtcgtcgaacaagctgtccgggcgaataccacacgagctgggaaactgcaggggactcgtccgtttggatcttgagaacaaccttctcaacggaagcatacctgcagagatcgtatcgctcggtagcctgcagcatctggtgctcggtgggaacaagctcagcggggagatcccggacgccttcacctcaacgcagggcctcctagagctgcagctcggcggcaactccctggagggagctgtgccatggagcctaggcaagctccagttcatctcccagatcataaacatgagcagcaacatgctgagcggcacgatcccaagcagcctcggcaaccttcgcatgctggaaatgcttgacctgtcagagaactccctgtctggcccgatcccatcacagctgagcaacatggtctcgctctccgcggcgaacgtgtcgttcaatcggctctccggtccgctccccgtcggctgggccaacaagctcccagccgacgggtttctgggaaaccctcagctctgcgtacggcctgaagacgcagcttgctccaagaaccagtacaggagtcgcacaagaaggaacacgcggatcatcgtggcgctgctgctgtcgtctctggccgtcatggcttccgggctgtgcgctgttcgctacgcggtgaagacgtcgcggcggcgcctgctggcgaagcgcgtctcggtgcgcgggctggacgcgacgacgacggaggagctgccggaggacctgagctacgacgacatcatccgcgccaccgacaactggagcgagaagtacgtgatcgggaggggccgccacggcacggtgtaccggacggagctcgccccggggaggcggtgggcggtgaagacggtggacctgtcgcgggtcaagttccccatcgagatgaagatcctcaacatggtgaggcaccggaacatcgtcaagatggaggggtactgcatccgcggcaacttcggcgtgatcctctccgagtacatgccccgaggcacactgttcgagctgctgcacgggcggaagcctcaggtggtggctctcgactggaaggcccgccaccagatcgccctcggcgcggcgcagggcctgtcgtacctgcaccatgactgcgtgccgatggtggttcatcgggatgtcaagtcgagcaacattctcatggacgcggatctggtgcccaagatcgcggacttcggtatggggaagatcgtaggcgacgaggacgcagatgccacggtgtccgttgtggtcggcacccttggctacatcgctccaggtaactccagaaactgcagaattcacagccattccgatgccgtgtgtcatctgctgctatgtcagttgacttgtgttgtcggaaaacctgcagagcatggatacaacacgaggctgacggagaagagcgacgtctacagctacggcgtggtgctgctggagctcctgtgcaggaggatgcccgtcgaccctgctttcggagacggcgttgacattgtggcctggatgaggctgaacctgaagcacgctgactgctgcagcgtgatgacatttctggacgaggagatcatgtactggcctgaagacgagaaggcaaaggcgctggacgtactggacatggcgatttcctgcacccaggtggccttcgagtcgaggccttccatgagggaggtggtgggcgccttgatgaggatagatgatcagtatatataa

SEQ ID NO: 19619 - DNA, 1581 bp, Zea mays
  Peptide Sequence Number=SeqID_61398
atggagctcacttggcgtctcctcgctgctctcgtccttcctctctcctttctgctgctgtaccacgccaagaacggtggcaaggccagccgccgcctgcccccggggccagccgccgtgccggttatcgggaacttgttttgggtgaggctccaagggatcgagatcctgcatgccatccgccgcttccacgcgcgccatggcccgctgctgacgctgcgcatcggctcccacctcgaggtcaccgtctccgaccgccgcctcgcgcaccttgcgctcgtcgagcgcggcgccgctctggccgaccgcccggcgtccgcgtcccgggacctcctgggactgaacgcctccaccatctccacctcaagctacggcccgctgtggcggatgttccggcgcaacttcgtggccgaggtcgcgaacccagcgcggctccggctgtttgcgccggctcgggcggcggtgctcgccgagctcaccgacaagctacgccatcagcaggaggcggacggtaccatagtgcaaacattccagtacgccatgttccgcctcctggtggccatgtgcttcggcgagcggctcgacgagcgcgccgtgcgcgacatcgccgcggcgcagcgggacctgctgctatactcgtcgaccaagatgagagtcttcgccttcctgccggccgtcacgaggctgctcttccgcggccgccttcaggccatggtcgcgatgcgccaacggctcaaggacatgtacatgccgctgatcgacgcgcgtagggagcgcaagaataaaaacccgggagtgggagccgccgctgatcgcgatgcggtagaagacgaagcgacacaaacaacgctgccgcactcgtacgttgacgcgctgcttgacatccggctcaacgaagacgacggccgcgagctgacggacgacgagatgatcgcgctgtgctccgagttcctcaacggcggcacggacaccacgtctacggcgctgcagtggatcatggcggagctagtcaagaacccgggcatccaggacaagctccacgacgagatcaaagccaccatggcgaccagtggcggctcggatggtcatgtctccgaggaggacgtgcacaggatgccgtacctcaaagcggtggttctggaaggcctccggcggcacccgccggggcacatggtgctgccgcacgcgccggccgaggacatggagctgggtgggtacatgatccctaagggcaccatggtgaacttcttggtggtggacatgggcatggaccagcgcgcgtgggagcggccgacggagttcgcgccggagcggttcctgccgggcggcgacggcgagagcgtggacatcacgggcacgagggagatcaggatgatgccgttcggggctgggcggaggatctgcccggggctcaacgtcgcgacgctgcacctcgagttcttcgtggcgaacctggtgcgcgagttcgagtggcggcagctggagggggagacggtggacgtggagggcgagaaggccgagttcaccgttgtcatggcgaagccgctccgggcgcgcctcgtcccgagagcaagcgactaa

SEQ ID NO: 19620 - DNA, 183 bp, Zea mays
  Peptide Sequence Number=SeqID_61399
atgtcggtcggcttgtggtgtgcaggtctggagcacacgggatggtggtcgatggctgaggtgaaggtcatgggggctcgtgcagatggaccgagaatggtgaaggacaaatgcttggtcttggctgacggactagagcagccgggtgaggtgtggagcacaggggcggtaatcaacgactga

SEQ ID NO: 19621 - DNA, 399 bp, Zea mays
  Peptide Sequence Number=SeqID_61400
atggcgatggcaggcgagccgaagcagcggtcacgtcgtcagccaagctcatgtcccctcatgggacagcgggagaaccctctcccacggcgtgaagacggcgcgcccgtgttccgttcctcgaacggctcgcgcacgcgcaacggctgccccggaccgggaaaggggatactccgaaagggatccttctccgtgagggaaacgggccccgagccccccctactgatcaaaggtttgaaggctggcccctcggaggggttcaacagccgcctcagagcgctcgggctccgcgcccactactggtcagaggttcgaaggccggcccctcggaagggttcaacggccgcctcaggccactcgggctccgtgcccaatactgatcaggggttcgtaggctag

SEQ ID NO: 19622 - DNA, 909 bp, Zea mays
  Peptide Sequence Number=SeqID_61401
atgaagggagacacacacgcggtagggaggcgcgtggaccgctgtggagcgaaggacagacgtcaagggagtggtgtaaggggccgcgccaaagcagggggaggtggtggcgacatcgggagcagaaggaaaggcgcgagcagggagggacgtcgacgcgctgctagggcaggtgaattcttttcacctgattggtttgattttgtctttagcttgagggaggatgatgaagagaacgaagaagaagggggcctgagcaagtctggcaaggaactaaaaaagttgcttgggcgcgctgctggactaaatgagtcagatgcggatgaggatgaagaagacgaagatgtactaattcttttggaaattgaatattttaatatttcattctgcactaaggttgtggatcaagaagatgattcatcgccagtgcttgctccaaaacagaaggatcaagttaaagatgaacctgtggatagcagcccatctaaaccagcaccatcaggacatgctcgaggcacacctccggcatccaaatccaagcaaaagagaaaatcaggtgttgatgatgcaaaaacttctagtggtgcagcttcaaagaaagcaaaggtggaattggatgcgaaagcatcaggcctcaaagaggaggcatcatctttggcaaaacctgcatcaaagacctctgctgcatcaaaaagtgggacaagcgtatcacctgtcacagaggatgaaatcaggagtgttcttcttgcagtggctccagtcaccacacaagatctggtatccagattcaagtctaggcttcgaggtgcagaggacaagaatgcatttgctgaaattctgaagaaaatttcgaagatacagaagacgaacggccacaactacgttgtcctcagagatgacaagaagtaa

SEQ ID NO: 19623 - DNA, 435 bp, Zea mays
  Peptide Sequence Number=SeqID_61402
atggaattactcaacaagtcttacccgactaaagaaaagactctcaagggtatgctggttataagggagtcaagagcaatactaagcatagtaaaaaccttttgtaaaaacagggttttaaggaaggtaatcaagttcaaggaagtcgctgacaggttgcagaaaagtcctcgaggttctattcctttacagactcaggtcctcgacgacgtcgagcgcgaccgagctccaggagctaaagtgaatcgtggcggtgcggtggcgaggcttggacatgcggcgcaaggccgtgcgacggcggttcaccggcgagcttatctgctcaagccgcaaagcagggggaagtacggcggtgattcatcggagtggtgtccagcgcacggggtgatgatcttttacccgaagcgttatctccaagcccggtgcacgaattag

SEQ ID NO: 19624 - DNA, 156 bp, Zea mays
  Peptide Sequence Number=SeqID_61403
atggcgttcatgtcaaagaaatgcatagtggatctaaagaaaaaggagaaagaactccaggctatggaggccgagctaaacaaaagagaacgggagaagagtgtggttgaagtgactgggacctgggtaacactgccaatgctcacgctcaaatga

SEQ ID NO: 19625 - DNA, 336 bp, Zea mays
  Peptide Sequence Number=SeqID_61404
atgtgcctcgcctcgcagcagcatctcgccgcagcgctcgcacaaccgttcgtgcctcaccatcgctgtgtgctcggtgcgtctatagccgtgcttcacctggcggattgctcgcaatcgcagcgcacgccgtcgtccactgcgtttgtgacctccgtcatgcgtccatgcctcgccgtcgtttcttccggcaagtctttcaccggtgatcccctctcccgtcccctctctttccgtcccctgcgcagcgcctaccctccgcagtcggcgtccattgccagcagcgcgcgcctagctcttgctccccggccggtggccgctgcggtcgagcgctag

SEQ ID NO: 19626 - DNA, 405 bp, Zea mays
  Peptide Sequence Number=SeqID_61405
atgacgagcggggctcgcagcaggcatgagggagcggcgccgtcggtggggcacgccggcaaggaggcaactctggtagctcgccaaaacgcggcctacggcgcgacgcaacagggaggggtcaggcgtcgaggagcacgcgacgcatggccagggcggatctcacggcctagctggttggccacgccaggccgttgggggcttgccgcgtgcgcaagggagctcgacgggttagcagccagcacgacggctcgccggcggcaagacacaaacgaggaggcgaagcgcgacacggcacagggcgagcttgccggaatgaagtgggaggacgccatggagcttacctgcacggcggcgacgagcagctccggggaggcgagggcgagcaacacggtgctgatctag

SEQ ID NO: 19627 - DNA, 2019 bp, Zea mays
  Peptide Sequence Number=SeqID_61406
atggccaagctttctagggaggcaaccacattccgccgcatcttggaatgtttgtttcggtactttggtaacaatagttcatggttatcagaaaatggacttgctttgtgtgtcttgttggacatgcaacttttagtagaaagttcaggacaaaatatgcatttaatgttgtcacttttgataaaacatattgagcacaagacaatgttgaagcagccagacatgcagcttagcatcgtggaggtggcagctacccttgcagaacaatccagtgctatcgcttcaccagcaactgtaggtgccataagtgatcttgtgaggcatttgaaaaggacattccatattactcttggcagcaaagatatggaattagtaaaatggaacgaaaaattccggaagggcatagatgaatgcctagttcagctgtcaaagaaggtgtctgatgctgggccagttcttgacatgatggctgttatgctagaaaacattgcgagcactcctgttgtagctagatcaactgcagctgctgtttatcgcacagctcagataatcgcttctgtgccaaatttgcaatatcagaataaggtgtttcctgaagctctgtttcatcagttgctgttaacaatgatccaccccgaccatgaagctcgtgttgctgcacaccgcatatttgctattgtcttagtcccatcttctgtttcaccttcgattcaagccagtccctcaggccaggaatcagtgttggtgaagctgagcgcccgtcagatcacacttttgctatcatccatttgggctcaagcaacatcccctgaaaatactcctgtgaactatgaagccattgctcatacttacagtttgcttctactgttctctggatccaaggcatcaacttttgaggctcttacccagagttttcaggttgcattttctttgaggagctatgcgctcactgaagcagattcattacaaccgtctcggcgtcggtcattgtttactctgtcgacagccatgattattttctcgtcaagagcttacaatgtgttgccactcattccaatctgtaaacaaatgatcaatgatcgcgcggccgatccattccttcgtttggtggatgagagcaaacttacagctgtcaaggattgttcaaatgatccttcaaaaatatatggatcaccagaggacaacgctaatgcactgaagtccctctcagaaatagaactgtcagaaagtcaatctcgagaatgcatagtctccacaatcatgaacaacattgcaaatatgatggatgtaatgttgaccttcctggccgcatcttgttttcgttgtttgaccgagttccatgcagctgctgacgacttcccatatctgcaggcggagttgcataatgtgagaagccaactgctaagtgatttcactcccgatgacatgtgtcctacaagcactcagttctttgaaatgcatgttgataatccttcagggtttcatgagactggtcaccatgaagagggtttgctgattgacctggggaatgaccatgatgcttttggggaagcttcggaaggcgcagaagctcgcacatcttctgtacctgcatcagatcttctgagtatcgatcagctccttgaaacggttggtgcagaaccagcacctcaggctggagtagtgtcggcagacattggattcaaggatatgactagccactgcgaagccctgacgatcgggaaacagcagaaaatgtctgccttcatgagcttccagcaaagcgtgcaagctgcaggggtgccaggcagccagcccaaccagacgacggagctggaccttttccaagacctgcagttgcctcaggccggggcgcagagcacaaacccattctctgatgagagcgttcagggatacccacagtacatgaacgggcccaacggcgacaacgcacagccaggccaggacttccaacagcagtctctgaagctaccggcggcgagcccgtacgacaatttcctaagggctgctggctgttag

SEQ ID NO: 19628 - DNA, 774 bp, Zea mays
  Peptide Sequence Number=SeqID_61407
atgagtggacaaagcagacttgttaagcaggtgttggattcatcatcctcagatgacgaagaagaattctttttcaatgccgcgcatttgatcattgatgaagatcagtttgatgaagaatcgagacgccgcggttctgttcatggccgtcaaacggttcgacgtaatagagaggaaggacacgtgaggctatatcaagattatcttgcagattatcaaacctatggcccaagttattttaggcgacggtttcgaatgcggcgtacactttttatacgcattctcaatgctgtcgaacatcatgatgaatattttgttcaaaaaagaaacgcagccggaaagcttgggttatctagtttgcagaaggttactgctgctttacggatgctaacttatggaatggcagctgatgctacagatgattacattcgtattggtgagagtactgctattgagagtctacgaaggtttgtcacagctattgttcaagtttttggagatgagtacttgagagagcccgacgaatatgacactgctagattacttgcagttaatgagagtagaggttttccaggtatgcttgggtccatagactgcatgcaccggaggtggaaaaattgcccgtctgcattgcaaggggcaacaacgtccaaatcccagacccacgcgcgctatgacttctttttgtgcacgctcggtcacgcgcaggatgacttcttttactgcaccggagggagtatagtggacatgtgcatgaacccacaattatactag

SEQ ID NO: 19629 - DNA, 198 bp, Zea mays
  Peptide Sequence Number=SeqID_61408
atggcggtgcactgcccgtggctgcagctcaatatccggaggcgctcgattctccttgcccttgtgcacattcgcttcaagctcttcgccttatctccagcagcagcagcagttccagggttctctcaattagcagggtcttatgaacgcccccctccaatgctatgttgtcaggtcactaccaagcttgtctactaa

SEQ ID NO: 19630 - DNA, 498 bp, Zea mays
  Peptide Sequence Number=SeqID_61409
atgctgtggaaggtggggaggcgctctggaaggcgtgcaatggacgaggcgacgttgcaggacgttggcagagcttcaggaggcgtgtggtgggtggtcgtgccatggcggatgccgctaagggcggcggtggctttgatggagcttcgggaggcgtatggtgggtggcagcgccccgacggatggcgctacaggcggcggcggcttcagctccggcggacggatgagcccccagcgggcggacgtggcattgatgaacgagtgcgggcgcgacttctacatggcggcgagggcggcgacgacgaacagcttcggcggggcacaaagtcggggatgggccgagagagggcgcgggccgcaggcgatggcggggcagcatacggcgtgagagagagcgggcgggcactcgtggggagagaaagtgaaacggcatggtcgggtgatgtttccataaatcgacgtatgtccgacgacgtgtctggcagctctgggacataa

SEQ ID NO: 19631 - DNA, 132 bp, Zea mays
  Peptide Sequence Number=SeqID_61410
atggcgctccgccgtgggggccctggtcttccctccggccgtggtctggggggtacaacctctgcggagtgtaaaactggtatactagccgagctcacggtcatgagcagctcaggactctcgcatgattaa

SEQ ID NO: 19632 - DNA, 267 bp, Zea mays
  Peptide Sequence Number=SeqID_61411
atggccattggggaggctgtctgtcgatgggcgcaccggacagtcccgacgaccgttggcgcagtagctgttgctccgcatggcacaccggacagtccggtgctacactggacagaaaggttggggaggaagaacaagacgaaggtcgagaatacgaatgggacgtctgacgacggagaaaacgatatgaaggtgaatggatttgtttgcaaggaccccatggctgtgaacgctgacgacttctttaaggctgcaaaactggactag

SEQ ID NO: 19633 - DNA, 459 bp, Zea mays
  Peptide Sequence Number=SeqID_61412
atgacgccgtcgcgctccttcccgctgcgaggaggcgtcgggacgacctgggggctggctggctcccgggtggcgtggcctggcgcctttcacccgccgacgcgacgcctgccgtgtgggcgtccaccacggctccgcggctccgccctcgccctccctccgcaaatctcgtcgcgacatccatggcaccccagcgccgagatcgccgcgcacccgctctccgcaaatctcgcctgggacatcctctgcttcgcgcctggcctcagctcccccagcaccgagatcgtcgtcgccccctatacctcacccctagcgtcgagcgtcgcgatccccgccccctatgcctccgtcgtgtccaccgttgaaccccctctcttctcctccacctcctcccccaccaccactccacacgctcgcgtcatgctcacggtgcaggatcaagtccccatttgcctctga

SEQ ID NO: 19634 - DNA, 234 bp, Zea mays
  Peptide Sequence Number=SeqID_61413
atgcggtctagctcaccacgaccaattttcaccaagaccatggtagcaaaaacgctccatgggacgcttgataggcctcccgatcacttgcctagcaaggcctgccctcgggccgcagccaagctagatgccttgggccagatgtccgagtcatgcgttgatgcctcgggcagggagtttgagcgtaccagaagtgctagatactcagagatgactcagatgaagggtaactga

SEQ ID NO: 19635 - DNA, 726 bp, Zea mays
  Peptide Sequence Number=SeqID_61414
atggcttgggcagcgatgggtctttcagcgcgtaccacggggctacgcgcccgaacgagccactaccgcgcgacatcgggtccgattgggtctaggaaacccgttgtggcgcccggcggcgtggggcagaggcgtcctgatggtgcagagggtgtcgcaacctgccggcatggaggtggaggcggtagcggacccagatcagcgaggcctctggcgtggaagtggcctggcggggggcgcagagtgggtcgccgggctgcacgcgagggatcacgcgtcggcgctagcgggtcagctgtatgcacgttgtttgagggccggcttaaaattgcagattttggatgggcggctcgttcaaatgctaaacgccacacactctgtggcacaatcgattatctggcaccagagatggtagagaaaaaagctcatgaccatgctgtggacaactggacattaggaatcctgtgctatgagttcttatatggttcacctccttttgaagctgatgaacaggatgataccttgagaaggatagttagggtggatttggcattcccttcatctccttgtgtatcttcagaggctaaggatctcatttccaagcttctagttaaggattcaagcaagaggctttgccttgaagacatcatgaagcatccatggataaagaagaatgcagacccttcaggcagttgcattaagcaaaaagatgtcacaagatcaaag

SEQ ID NO: 19636 - DNA, 867 bp, Zea mays
  Peptide Sequence Number=SeqID_61415
atggcttgggcagcgatgggtctttcagcgcgtaccacggggctacgcgcccgaacgagccactaccgcgcgacatcgggtccgattgggtctaggaaacccgttgtggcgcccggcggcgtggggcagaggcgtcctgatggtgcagagggtgtcgcaacctgccggcatggaggtggaggcggtagcggacccagatcagcgaggcctctggcgtggaagtggcctggcggggggcgcagagtgggtcgccgggctgcacgcgagggatcacgcgtcggcgctagcgggtcagctgtatgcacgttgtttgagggccggcttaaaattgcagattttggatgggcggctcgttcaaatgctaaacgccacacactctgtggcacaatcgattatctggcaccagagatggtagagaaaaaagctcatgaccatgctgtggacaactggacattaggaatcctgtgctatgagttcttatatggttcacctccttttgaagctgatgaacaggatgataccttgagaaggatagttagggtggatttggcattcccttcatctccttgtgtatcttcagaggctaaggatctcatttccaagcttctagttaaggattcaagcaagaggctttgccttgaagacatcatgaagcatccatggataaagaagaatgcagacccttcaggcagttgcattaagcaaaaagatgtcacaagatcaaagagaatggaagtcgtattgtcttcctcaaaagttggtaccaacatcgttcaaaatctgcacactgcagctaagcctggggatattacctgttactcgaacctgaaaaatccggactcagacccgaattacacgaatctgtag

SEQ ID NO: 19637 - DNA, 375 bp, Zea mays
  Peptide Sequence Number=SeqID_61416
atggcgactcaggtatccctcgtcatgtggagggcggtcttctcagcgctaggcttgctcgtggtggccacgctggtgtacacattggccactgacggctcgctgttccatcctgagctggttacgccaggaatgtttctaactctaataatcacagggattagcatggggagaaatggagcagcaacatttggacgatccacaacctgttgcggccctacctgcaagcctgcacctgtggtctctctagctattgtggtatttcctcttgtgcctgtggaagctcgcttcagttccatcgccagttcggcagttcaggtctcagttccagtttcatctccagtgatgatatctcagcctatggaacaggactaa

SEQ ID NO: 19638 - DNA, 660 bp, Zea mays
  Peptide Sequence Number=SeqID_61417
atgtcgtcgacgagcccgcgccatggcttgggcagcgatgggtctttcagcgcataccacgggactgtcagacttggctctttgcaagggtttaggggccggcttaaaattgcagattttggatgggcggctcgttcaaatgctaaacgccacacactctgtggcacaatcgattatctggcaccagagatggtagagaaaagagctcatgaccatgctgtggacaactggacattaggaatcctgtgctatgagttcttatatggttcacctccttttgaagctgatgaacaggatgataccttgagaaggatagttagggtggatttggcattcccttcatctccttgtgtatcttcagaggctaaggatctcatttccaagcttctagttaaggattcaagcaagaggctttgccttgaagacatcatgaagcatccatggataaagaagaatgcagacccttcaggcagttgcattaagcaaaaagatgtcacaagatcaaagagaatggaagtcgtattgtcttcctcaaaagttggtaccaacatcgttcaaaatctgcacactgcagctaagcctgggcatattacctgttactcgaacctgaaaattccggactcagacccgaattccgaatttgtagcacccgatgtctag

SEQ ID NO: 19639 - DNA, 411 bp, Zea mays
  Peptide Sequence Number=SeqID_61418
atgaggtcaatgttcccaacatttgatgttggtgaccggatccttgctgagaaggtttcgtacatttttcgggagccagaaattttggacatcgtgatatttcgtgcacctccagtacttcagacattgggctacaacttaggtgatgtgttcatcaagagagttgtggctaagggcggggacatcgttgaaactgtacctgaaggctatgtctttgttctgggggataacagaaacaacaactttgattcacataactggtccatttttcctttccctgctgacaagggatatgctgagcctttagaagtagatgaacgagcatcaatgagtgataaggatgtcagttctcttgttttatgtgatgacatggtgttcgaaacttatgtaaaaaggaaatacaaaacataa

SEQ ID NO: 19640 - DNA, 459 bp, Zea mays
  Peptide Sequence Number=SeqID_61419
atggtagagaaaaaagctcatgaccatgctgtggacaactggacattaggaatcctgtgctatgagttcttatatggttcacctccttttgaagctgatgaacaggatgataccttgagaaggatagttagggtggatttggcattcccttcatctccttgtgtatcttcagaggctaaggatctcatttccaagcttctagttaaggattcaagcaagaggctttgccttgaagacatcatgaagcatccatggataaagaagaatgcagacccttcaggcagttgcattaagcaaaaagatgtcacaagatcaaagagaatggaagtcgtattgtcttcctcaaaagttggtaccaacatcgttcaaaatctgcacactgcagctaagcctggggatattacctgttactcgaacctgaaaaatccggactcagacccgaattacacgaatctgtag

SEQ ID NO: 19641 - DNA, 574 bp, Zea mays
  Peptide Sequence Number=SeqID_61420
gaaaggtaatctacgcgcggtgacgatccagagcgggtacgtggtggcgctcaaggtgatatataaggcgaaactgcagaagtaccacttccacgcgcacctgcggcgggagatcgagatccagcagagtctcgaccaccctaacgtgctccgcctcttcacctggttccacgacgaagagcgagtcgtcctcgtcctcgagtacgcggcccgtggcgagctctacaagtatgtagcgagtcttgctggtgcactggcatactgtcacaaaaagcaagtcattcatagggacatcaagcctgagaatttgctaatcgacatcgagtgcacagagggtggcgtggctagagcagagggtggcaaggccaccagatccccttgtacgaaggagagtagtcgaggtagttgctcggtcgccacagatgagggccagcgccggacagagcgatgcagaggggcgtcgtgtcttgcagcctctcgtacggtggacgatcgtcgtcgtctgtcgtggagcaaccacactctgctagacgtcgctcttggggtcaagggtagtggtgatggctgcccctga

SEQ ID NO: 19642 - DNA, 216 bp, Zea mays
  Peptide Sequence Number=SeqID_61421
atgacgtctttgtcgaatgtcagccgacaggcacttgacaaagatatctttgccgagtgtatttctgtgtcgagagtcctgctctcgacaaacgcgatcgttaccgagagcaggactttgccgagtgcggcactcgacaaaggattctttatcgagtgcccgacaaaaagcacttggcgaagcgccgagcactcggcaaagtcacagtttccgata

SEQ ID NO: 19643 - DNA, 1407 bp, Zea mays
  Peptide Sequence Number=SeqID_61422
atgccgccttccatgcgcctcatcattgtgggaatctgctgctgcgtttcggccggcttacttattagtgtatttgttctggatgcaaatctaggggcaggcccgtccatggaggggatggaggaggccaacaggacggcagtggagagctgccaccgggtgctggcgctcctctccaacccgcacggccagctcgtccccagcaaggagctcgtggccgccaccggggaggccgtcgccaagttcggctcactgacggccaagctctccaactccaacggcgatggcctactgcagggccacgctagggtcaggaaggtcaagaagcccctgcacatcttcgacagcaacctcttcctcgagagctctgcggtggccgccgccgctgctccggccaagacgcccagcccgagcccgatccttggcctccagctgttcccgaggtaccaccagtttgagggctcgtcgtctaaggatcctgtcaggatccctacccagttccccaagaggttgctgctagagaagccgactgccggtatggaggggtcgacgtcgcagtcccctccgatcgtccagatggtccagccggtgtccgttgcgccccccgcagggacgcccaccccggcattgccccccgctcaccttcatttcatccagcagcagcaaagctaccagaggtttcagctcatgcagcagatgaagatccagagcgagatgatgaagaggagcaatcttggtgatcagggtggtagcttaagtggcggcggcggcggcggtcgtaagggtgtgaatctcaagtttgacagctctaattgcacggcgtcatcgtctcgctcgttcctttcgtctctgagcatggaagggagtcttgcgagtttggatggaagccggaccagcaggccgttccagctacttagtggctctcagacagctagcacgccggagctgggcctggtgcaaaggagaaggtgcgctggcagggaggatgggactggtcggaagctaaggataaggaggtccatcaaagtccctgcaataagcaacaaggttgcagacatcccagctgatgaattctcatggaggaagtatgggcagaagccaattaagggatccccacatcctaggggttattacaagtgtagcagtgtgagaggctgccccgcgaggaagcatgtcgagaggtgcgtggacgacccctcgatgctgattgttacctatgaagggcccatcttgtggttgcagtgtgacattgagccgcagttgtatgtctgcgccagtgatgctgcgaggcatgggggttgccggctccggctctcagcgtgccgcatccgtgcagtggcatttgtactggggcgtctgccgtttgagaggccggtttgctgcggtctgcgtgtcgccactgtctga

SEQ ID NO: 19644 - DNA, 204 bp, Zea mays
  Peptide Sequence Number=SeqID_61423
atggtgtcgaaatatcctaggcacactctagcaaagtttgaaatcaagccaaaatcgtttgacacgatttggcttgaccttggtctcgagttccagctgggcaacatacccaacttcacctcctcgtatctcgccaacccgagatcaaatccactcgagcgctgcatgggaaacaaaggagaacttcaaaaattggtaacttga

SEQ ID NO: 19645 - DNA, 153 bp, Zea mays
  Peptide Sequence Number=SeqID_61424
atgaaggaagtggcgcttgatgtggaggtgctgctgtggatggcagacgatagggtgaggtttgatcacgcactgcaatggcaccaccgtgggaggcttgttatgccctcgtcgtcggcgtcaggcagggagaagaaagcctccgaccattag

SEQ ID NO: 19646 - DNA, 423 bp, Zea mays
  Peptide Sequence Number=SeqID_61425
atggtcagcgccaagagacttgtgcaaatggccaagaagtggcagaggatggccgccacggcaaggaggcggatcgcactggcgccgccggcaaaaggagccgccgagggatcgtcgccgccgtgcagcacctcgcgtgtagctgtcccgctgccgtacctcgacaccgccgtcttcggcgtgctcctcggcatgtcgcgggaggagttcgggttcgccggtggcgacggcaggatcacggtgccctgtgacgccgccgtcatggagtacgtcatgtgtttgcttcggagagacgcgtcggaagaggtggtgagggcgttcctgagctccgtggtgagccggccttgcagccactgtggaaatggctcgctggtgcagtccaccacgggagttcgccagcaagctgctgtttctagcttctga

SEQ ID NO: 19647 - DNA, 2169 bp, Zea mays
  Peptide Sequence Number=SeqID_61426
atgacgcggggcatgcagtcgcagctgacgagatgccggccagtcagctttcaggcagtcggcacgggcgcgcgtgtgggctgcgcctgcgctgcatggccgtatggccaggggttcacgcatatgcctggccagcccccggcccggccgagtgtgcctgcctcgcggccaccgggacctcctccagtcaagtcgagtccgcagtgtctgtctgtggccgttgctctggctgctgcatggctagctatgattgcagcactggctgtgcagcctgggcgctcccctcccctgctccgcccgcgcctcgtcctcttccacctggctgtagctgtaggaacactgtaccggccgcggccggtcgacgagcagccaccccgcggcaacccagaggccgcgcagcagggtagaatccaggcgtccacgccggcgacaggcgtcaatgtacggatgctgtcaccgcggccagagaaagagaaggaggacctgcgccgcgcgcaccgcgacgagccgctctccgctggcacccacgccaaaaggcgaagattctcggccgagcccccgtcccttccaccatcccccgcttccaagacggaggaggagtacgccgtgcagcactgccgggcgcgctccgagctcctggcgctggccatccgccagcgctacatgctcgccgacgcgcaccacgcctacgccgagtcgctgcgcgccgtcggcgccctgctgcacgacttcctccgcggcgtccagtcgctgccgccgccgccgcccgagcccgcgctccgcctcccgctgcagcggaagggcgacggcctccccgccgcgtcgccgccgccgcccgcaatcgcgtcctcctcctccgccgccaagcaggtccgcatcgcccccaacgacggccatatccagttctccgacgacgactccgattccgatgacggacacatcaagttccactccgacgaagagcccgacccggctcgccgccgcccggatgtcgtccactcagccggggcgcctggtcctccgccgccgcagatgggaccaccctattcctccgggtatgctccgccgccgtatggtcctggatacggctacgggtacgccaatgggcctgggccgggtcctggtcccgattatggcggtattggcatgagcagcggcggcggcggtggttacgggcaaagctatgggggcatgggtggtggtggcagcggcggcggtgccggctacaatgaccagagctatggtggcatgggcagtggcggcggcgctggcggctatgaccaaggctacggtggcatgggtggatatgggcagagcttctttaacatcaactacgcgcgcagccagccacctccaccgtcaatctcgcacgagcaacgcctgcaggccactaacgccagggtccactactattccggcaatgacgagctgcagccacccccgcgcgtctatggtggtgggtactcctacccaccacagagctcgagctcatataatcagtatgcctatggtggttactatggaggtggttctgctcctgcaccaccagcagacatcccctcctcatcccgcgagccagccgcagcaccaccgcctccatctcctcccagggtgtccacctgggacttcctgaacccgtttgaaacttatgatagctactacgagcaaccaactgctacagcagctccatactctcccagcaggagttcaaaggatgtgcgcgaggaggaggggattccggacttggaggatgaagacatggaggtagtcaaggaagcttatggtgatgagaagcacccaatgaagggttacatgggaaacgggaaggcgacaaaggaagatggtaggagcagtacgagagatgaactgccccgcaagtccaagtcatctgaggccagcagtagtgggagcagcttggagcatgacgtgcatgtagtagagaagagtgttgtcggagagcaagttcaacactcagagccacagcagcatgttgccggtctgccacccacaggatcggacaagatatacatcgatgacactgaggtggtggtggagatcaggactcaatttgagcgtgcctcacaatcagctagtgaggtatccaagatgcttgaggtcggaaaagatgccttccctaccagaagagttcaggtttcaaaaggttggtaa

SEQ ID NO: 19648 - DNA, 1572 bp, Zea mays
  Peptide Sequence Number=SeqID_61427
atggcggcgatgatgatggccacgtccgagtcaaagtcccccgcccgcgcgctgaggcggctggctggcgccgcggtcgccgccgtgctgctccgccgcaccttcagcgcctccaagtgcaagacggaggcgcggatggcgacggcgcggatgaagctgctgcggaaccggagggaggcgcaggtgcgccagatgcgccgcgacattgccgcgctcctccgcgacaaacaggaggataccgcacgcatcaggagtcatatggaggacaaatccttccttgatttctctgtcaggtcagcattgggcacacctgtgatgtttaacccttatgttgaacatgtaattagggaacagaactttatggcagccaacgagatcattgagctcttctgcgagctgattgttacacgccttcctatcatcgcaaaacagaagtttgtctttaactaccatcaccttcctaaacttatttgttctcataaggaatgtccagcagacttgaaagaaggtatctgcagtttgatatttgcagctccaaggtgctctgagctccctgaacttggtcgcatacgtgacatttttgaaaagaagtatggcaaagattttgtttctgctgcagttgacttgcgcccagatgctgctgttaacaaccttctgattgagaagctgtcgattaagaagccttccgggcaaattaagctgaaagttctaaaggatatagcaaaagagcatcagattgattgggataccgctgagagtgagcaggagcttctgaaacctcctgaagagttgattaaagggccaagtacatttcttgaagcttccaacatgcctgttaagaatattctgacaccatataccgtgcagccagatccagttaacttcagctataggtgttcggatgacgaatatgatgacaggggcactatgcaattcaaagatgcagcttcagctgctcgagcagctgcagagtctgctgagagagcaacatctgctgcaaaggctgcagctgattttgtcaataataacaataacaaccatccatttgatgaagatgaagattgcaaagcttcaactcatgaattcactcatacactcaagagacagtcaatgagcaactcgagtagatcctccttgaaagaagatgcaaatgcctttgatgaacaaaaacctcatgaagggaaaacatacagtgcaagaaggttcagtggaaagaaccatgtagaatatgacaaagacggctaccctgcagatttggacttgaagacacggagaaggaactgccgtgctgctcggaaggtgcactcagagataaagtttgatgattctgagggactgtgttcagaatccgaaggtgaaaatgatgtggagattcagtctgtggaaaggccattgcctcctaagagtgagctgttttcagaaaaccgtcactcagaagacgaagagcatgatcaagatttccctgaattgccgaagacaaaccttcattctcgtgttcatccaaatatgcctcttgactatgaaactctcactgcacgctttgaggctctcaaatctggcaagcttccgtag

SEQ ID NO: 19649 - DNA, 225 bp, Zea mays
  Peptide Sequence Number=SeqID_61428
atgccttatgctgccataccacatggagtgatggagattgggtccaaactgccagtaccagctgttatggagatgactctaagcgaccgcattaagcctgcccagcagcccagacaacttgctcgacaactttatcgaccattcgacccttcaatctccgacgcgtcttgcaacaccgcacccgccgcgctcgtggccctgtcccttgcggccttgccggactga

SEQ ID NO: 19650 - DNA, 510 bp, Zea mays
  Peptide Sequence Number=SeqID_61429
atggtccatatcgccgagcaccgtgatgagacctctgaagacttcctcatggaggaggaggccgcatcttctgcaccgcagagttccggccgcccagcgcctggtgccgcagctgtgcgcccccgtatggcagcacacaccagcgcaggtgtcccggactccattgggggttgctcccgccggggtgctctccgcggccagggagttgttgcgccacccgccaagctccacagcctcgccagggcctctatgcgttcgccctcggtgagggctgcgccgacaaaagatctacgggcggagctcgaccacagacgtgcagtagaagatgcacaagttcctccagagagaccagaagacctgcgggacgaactcaaccgcagacgtgcgggcgaggatgcccgtatctctttaggaagggtgcgtgagcgccgtcggaacctcgagggtcacaacctcgagcaagatttcgctgcggccgcaccgcaggccccaggggatgcccgattctag

SEQ ID NO: 19651 - DNA, 1497 bp, Zea mays
  Peptide Sequence Number=SeqID_61430
atggggagcacaagcacgagcgccacctcgtcttcctcctcctctgctgccagcggccccgggggcggcggcggcgcacacgtgctgctcctgccgtaccctggcgcgcagggccacacgaacccgctgctccagtttggccgccgcctcgcctaccacggcttccgccccacgctcgtcacctcccggtacgtactctccaccacgccgcccccaggggagcccttcagggtggcagccatttccgacggcttcgacggcggcggcgcggccgcgtgccccgacatcgctgagtactatcgccagctcgaggccgtgggttcggagacgctggcggagctgatccggacggaggccgccgagggccggcccgtgcgcgtggtggtttacgacccgcacctgccgtgggcgcgctgggtggcgcaggcggccggggtgccggcggtggcgttcctgtcgcagccgtgctccgttgacgtcatctacggggaggtgtgggcggggcggctgccgctgcccgtggtggacgggaaggagctgttcgcgcgcgggctgctgggtgtcgacctcgggcccgacgacgtgccgccgttcgcggccaggccagactggtgccccgtgttccttcgggcgacggtgcggcagttcgaggggctggaggacgccgacgacgtgctcgtcaactcattccgcgacatcgaacccacggtgagagaggttaccgtaccgcgcgtcaccacggccggcacggcacctgtttgctgttttgctcaagaggcagattatatgtccctaacatggcgcgcgaagacaataggcccaacgttgccatcattttaccttgatgatgaccgctttccgttgaacaaggcctacggattcaacctcttcagcagcagcgactcatgtctgccttggcttgacaagcagcgtccgcgttctgtagttctcgtatcctatggaactgtttcagattacgacgaaaatcagctagaagagcttggcaacgggctgtacagttctggcaaaccattcatttgggttgtgaggtcgaatgaagaacacaagctgtcggatgagcttcgcgacaagtgcaaggagcgcggccttgttgtctcttggtgcccacagctcgaagttcttgcacataaagctacaggctgtttcttcacgcactgtggatggaactcgacactagaagcgattgttaatggcgtgccaatggtggcagtaccacactgggctgaccagccgaccatatcgaaatacatggagagcgtgtggggcttgggtgtcaaggtgcgcaaggatgagaaaggcttggtgacgagagacgaggtggcgaggtgcatcaaggatgtcatggatggggatagaaaagatgagtacaggatgaatgccaatgtgtggatgaaaaaggccaaggaagctgcacagtacggagggagctcggacaagaatattgctgaattcgtcgccaagtattcatcaagttag

SEQ ID NO: 19652 - DNA, 915 bp, Zea mays
  Peptide Sequence Number=SeqID_61431
atggtcagctccaaggctttcctcctcctccttgccgtccttattggttgcgtctgcagcttccctagtcctgtcctagcggctcgtgagctgagcgacgatgcagccatggccgagaggcatgagagatggatggcggagtatggccgtgtctacaaggacgccgccgataaggcacggcgcttcgaggtgttcaaggataacttcgcattcgtcgagtcgttcaacgccgataagaagaacaagttctggcttggcgtcaaccagttcgccgacctgactaccgaagcgttcaaagcaaacaaaggcttcaaaccgatctcagcagaaaaggccccaacgactggattcaagtacgagaacttaagcattagcgcgcttccgacggccgtcgactggaggaccaagggagctgtcacacccatcaagaaccaaggccagtgtgagcaagaactagtagactgtgacacccacagcatggacgagggttgcgaggggggctggatggatagcgccttcgagttcgtcatcaagaacggaggcctggccaccgagtccagctacccgtacaaggccgtggacggcaagtgcaagggcgggtcaaagagcgccgcgacgatcaaaggccatgaggacgtgccgcccaacaacgaggctgcgctcatgaaggcccgtggccagactttcatgctttactccggcggtgtgatgaccggctcctgcggcactcagctggaccatggcatcgctgcgatcggctacggcgtggagagtgatggcacaaagtattggattatgaagaactcgtggggcaccacttggggagagaaggggttcctacggatggagaaggacatttctgacaagcgagggatgtgcggccttgccatgaagccttcctaccccaccgagtag

SEQ ID NO: 19653 - DNA, 255 bp, Zea mays
  Peptide Sequence Number=SeqID_61432
atggccgaggtcttaccgacgccgctgacgagccgaggtaggtccacggtacagcgcgagttcggcgaagggctccactccggcgaggaatcgatggcgatcccgacccaaacaccacccgcagaggactcgcacagtttccccgggatcaagcgcaacttcacggctagcaacaggttccgattctgggcgtggttggatttccaactgcggcggcgcagtggagttttctgcgtgttctccgattggaagtga

SEQ ID NO: 19654 - DNA, 504 bp, Zea mays
  Peptide Sequence Number=SeqID_61433
atggccgagctccgcgtgcttctcgagcgccgttccaaccaccgcgcagataccgagtccggggttcaccagcgcagggggataaagactcggtcgcgccgcagggaccaccctatcgagcccttgccgctgccgctgttccacaagcaccatcacgccgccgtgttggcacagacaacaccgctgcagcctaacctcgacttcgtcgccgttggggtcttggggaaaggtcatggggcttcgccgagtcaccaggaggacgtctctgctagtattcagcgggattggtcctcggggcggcctcaatttctcgccgcacttcatcctccgtcgcggaaccgcaccaccgcgtgggcagagaagtcaccgccccaattcgagggccgccagtggggaatccaacgtctgggagcacttgccgccttgcgagccgccggatctaatctgggcgctcgatctcagatccaacggctcatatcacatcataccgcttcggccgtgtaa

SEQ ID NO: 19655 - DNA, 462 bp, Zea mays
  Peptide Sequence Number=SeqID_61434
atggctcgtagaagatcccaaaagaacaagaaaacccaggagaacaaggaggatcagacagccagaggatcgtctccaacccgtgcccagacgcggcggcgcaggcaaccgcgtggcggcacacgccggcgagcagcgcgcaaggcgcccaggggtctaaccctaccagcactagttctacgcattccggagaacgaggcggacaagatggccgaggtcttaccgacgccgctgacgagccgaggtaggtccacggtacagcgcgagttcggcgaagggctccactccggcgaggaatcgatggcgatcccgacccaaacaccacccgcagaggactcgcacagtttccccgggatcaagcgcaacttcacggctagcaacaggttccgattctgggcgtggttggatttccaactgcggcggcgcagtggagttttctgcgtgttctccgattggaagtga

SEQ ID NO: 19656 - DNA, 2064 bp, Zea mays
  Peptide Sequence Number=SeqID_61435
atggcggcgagcggcgccgtccaaccccacgtggcgttggatgtcaatgtggaggaggacgccaacgacgacgaggcggccgaccggctctgggcgaccatcgagcaggtcgcctcccctcagcggcgcaacctcgcgatcgtcgccctcgaccccggcagtgcatcacagaagaaggaggaggtcatggacgtgcggaggctcgaccgccgcggcgcccagcgcgtgctccagagggcgctggccaccgccgactgcgataacgcgaaactcctccgcggcatcagggaccgccttgacgcggcgggactggacgtgccacgggtggaggtgaggttccgcaacctgacggtgtccacggaggtccactacggccgccgggcgttgccaacgctcctcaactacgtccatgacattgccgagaggcttttaatttgctgccatcttttacgtcctaagaagaccaagctcactattctggatgatgttagtgggcttctacagcctgggagaaagaatgacactgttgctggggccaccatcatctgggaaatcgacgctcttgttggcccttgctggacttctgcgtatgtcagccagacagacaaccatattggagaattgacagtgagggaaactttagattttgctgcaaaatgccagggtgcaagcgaaaactggcaagagtgcttgaaggagctacgcgatcttgaagggaagagaggaataagaccaaatccagaaatagatgccttcatgaagacagcatcagttggaggacagaaacacaatcttgttacggactatgttcttagagtgcttggactggatctatgtgctgatactgctgttggtactgatatggacagaggtgtctctggtgggcagaagaaacgagtcacaacagcgacaatggcttctgcatttaaacaatccgagtatggcagagctctggattctgttttatgcaactcttatgatggcacaaattctcctaaggaatttgttgaggaagttatggctttggtagagcttgatcagctgagacatgcattagtagggaaggagggttctactggattatcaacagagcaaagaaagcgcctcacaatagctgttgaactagttgcaaatccttcaattatttttttggatgaacctacttctggtttggatgctcgagcagctgccattgtgatgcggactattagaaatactgttgatactggaagaactgttgtttgcactatacaccagcccagcattgacatatttgaagcttttgatgagctcctccttctgaaacgtgggggacgcgttatatatggtggttctctgggtgtcaattcaatcgatatgattgattactttcagtccattcctggtgttaatcatatttctgaaggctacaatccagcaacctggatgcttgaaatcaccacacaagcatgtgaagagattcttggtttagattttgcagtggtgtacaaaaactccgaccagttcagagacacaacagaagatttgatgcttgtcatgggatctctttacgcggcatgcctgtttcttggtgtaaataacgcctcatccgtgcagcctgtagtatcaactgagaggactgtctactaccgggaacgtgctgctaaaatgtactcatcgttcccatatgctgcagcacagacactgatatttggcctcatcacgtacttcatgatcaactacgagaggaacataggcaagtcacatgtcatcaaggaaaaccattcttcatcaaaggacttcatgctttctacacatgatgttgtttcttgtgtgttcgctaggatccctggctggtggatctggttctattacatctgtccagtggcctggaccctgcgaggcatcattacatctcagctgggcgatgtgcaggccaggatagtcggccctggtttcgatgggaccgtgcaggagttccttgaggaaagcctggggttccaacaggggatggctggtgtcacggttgcggtgctcattggcttctcccttttcttcttcgccgtctacgcgacttctatcaag

SEQ ID NO: 19657 - DNA, 345 bp, Zea mays
  Peptide Sequence Number=SeqID_61436
atgaaccctctgacacgcgcgtgcgcgacgacgaggtggaccaggggatcatggcttcgttgcccttgccggagacagcacgggcgaaggcgcagaacagtcatcagagggcgcctcgggctcggagtcgctgatcgaacgacagcatctctggatgtggcagcgaggagaacggagtgctccagctccagggaccagggtagtggctgcccggccacgccgccgaggcacctccgctggccaagtggccagcaacgccacgctgcggctgtcagcggcgctagcggcagcgggctctctccggaattccaaggctcgctagcgaaatatgcaaatacaatttaa

SEQ ID NO: 19658 - DNA, 210 bp, Zea mays
  Peptide Sequence Number=SeqID_61437
atggtgtgtgtcgctgcacacttgccagcggtcgtcggccatcgaccccacgctcattctcgcaacctcactgcagcatcgtcgttctcccagttctgcgcgaacgtctgtgaacatctagagaagaagcggtgtctgaaaaaggagttcactccagagcctcttgatccagtggtggagttttatctaactacttacagagtagaataa

SEQ ID NO: 19659 - DNA, 210 bp, Zea mays
  Peptide Sequence Number=SeqID_61438
atggtgtgtgtcgctgcacacttgccatcggtcgtcggccatcgaccccacgctcattctcgcaacctcactgcagcatcgtcgttctcccagttctgcgtgaacgtctgtgaacatctagagaagaagcggtgtctgaaaaaggagttcactccagagcctcttgatccagtggtggagttttatctaactacttatagagtagaataa

SEQ ID NO: 19660 - DNA, 660 bp, Zea mays
  Peptide Sequence Number=SeqID_61439
atggactttatgacagcaaacctctcaaagtcagtactcagcaaggggctgtatgtgccccaatccgacgagagcagccaagggagcagcagacagcgtactcagcagcctgtaagattaaggcgacaggagtttgcatatacagatgggattcgaggagggcacaagcacggtgacggtggtgttgagcatgacgaggtagtggtggaagccaaggaggatgacttccgctgcattgcaaacaagggggacagcgtcacacgtctgtttgaccgtttgagcgagggcgtggcaggcggtggaacagccagcttgtttttgttttatttgttgcggcctcgcggcgatgggagcggcaggtgggtggagaagggttttatgatagaagctaatggcggcatagatgaggataagctcataagaacacgcgatggtggaaaccagtggtgcgggttgatttcgagtaaatgcaatttttttttaaaagtggtgctttatatgagtagagaagagcttttggaggaggatgttgctttgaagaggttcaaatcatacaaaaacagtgtgaaacaggtctccaagatcgggaatgctctcactttagctgttgtacttgcttgcagctacgagcttgctgtgttggcgactagcacaaaatga

SEQ ID NO: 19661 - DNA, 627 bp, Zea mays
  Peptide Sequence Number=SeqID_61440
atggcgacgagggcatgggtggccgcggcggtggccttgaaccctcaactgctgcctctccgctcctgctcgcccacgaagtcggtctccccagcgcagcgctcggcgtcgatggggctccggctgcgcagcggccggccgtgcctggggaagttcgtgtgccgccgcgccaagaacgcgggatacgaggactacaagttcccggaccccatcccggagttcgccgagcaggagacgagcaagttcagggagcacatggcgtggcggctggagcagaagaaagaggactacttcggggaccatgtcgaggagatcgttgacgtctgcaccgaggcacatagatacgatgagactacacctgtactgtacgtagacgagttaaactgtaccagccgtacgtccagcactaacatatggctactctcgctgtggcagcagatcatggggacattcctggagaacgattaccgtggaccagggacgctcctggttcacccgttcctggacatgaagggcgagatcaaggagagggggctccccggcgcacctcaggcggcacgggcggcgatagcatgggccgaaaagaacgtggacaaggactggaaggcctggactggggaatactag

SEQ ID NO: 19662 - DNA, 255 bp, Zea mays
  Peptide Sequence Number=SeqID_61441
atgggaacaaatgggcatctcgacctcgacacaggaggtaaatctgtagatcaaaaggtggacgaggccacctgccggccagcttctccggccaccaccgtcgaccgtgtaaaacttgcactgacgaagcctaccttcttatccggcggcggggccatggggttctcgctgtaccccaccaagtcgtcgacgcgcacgccgtggagcaccagcttcttccgccacaagttcccggccgccgcggtgtccttctga

SEQ ID NO: 19663 - DNA, 225 bp, Zea mays
  Peptide Sequence Number=SeqID_61442
atggatcgggaccgagcatggcagacgcgatttcctggcggcgaaccgagcttgggcgattgggcgagagcttcaagtgttctgcgcgtgaggaattttgatggggtagctgggccagaggacgggcggtggcaggtgatcttatgcctctacttcccgcgagaatcggtccctccacaactaaccccggcggatacggagctcggcgcggtccacgcgggctga

SEQ ID NO: 19664 - DNA, 969 bp, Zea mays
  Peptide Sequence Number=SeqID_61443
atggacatgaattcttgcttggaaggctcctcggagggtaaatataattcaaatatatccaatatttacaataatggagataacctttcaactcctgattggttaaatgagaaagtattgttcacaacaaatgaacatttagggcaacaaccagctgaatctgaagcttccaggttaaacttgcaggtttctaggaaacaatgggttttcatgctttactacactgttattaattctgaatccgatgtgattccttttttattcttttatgctggagagtacttggtgacaatgttgcctctccattctcacgtatatgaatcaatatctgtttcgggtcatactgatggatgttttaactatgacttgcgagggatggctagtgaggcaaactttatctttcccatgaaaacctgcattacagtcatatgcacttctaaggtcgaggaaaacagggacttttcatatctccttgacatacttatatgctctggtatcatagttgctgactggcagctcatctgcaaatcatggtacttgcctggttgccctgttggccctcatgtctttgataggcttgagataaagtacaacaaaatcgccacatgggcaaagcctgaaaggaggcttctgtttgacctcttgaattcaatcctttctgaggtgcttgcaccttgtgttgatgtgcacccatggatgcatcctaatagacactgtgtggctcgttggggtcctgaagggccagttgagaaggtttggcagacaattgttaatcaacgggaagattgtgtcacagggcatcatgatgagatggttcttgatacaaactggctggaagtaggcaacgacgtcaatatggtggggaagcagatggctaggatgttacatggcaacctcttggaagaagtcatagttgacttcctgggggagtgtaacacctcaacccatctcttgagaataatagagtag

SEQ ID NO: 19665 - DNA, 183 bp, Zea mays
  Peptide Sequence Number=SeqID_61444
atggacaaggggactcggctcggcttcacgcgcaggactccgggagctgggaggggcgacgtcggggagaggacggtgtgttgcaacgcacaactggattcctcgtcggagctggctggaacggcgctccgggtggccaacgcgacttgggaaaggctcggggtaaaactaggagaaaggtga

SEQ ID NO: 19666 - DNA, 192 bp, Zea mays
  Peptide Sequence Number=SeqID_61445
atggccttggctagtgttggagtctcgttgtctggtgtaggagaccactggtcgaccaaattcattggaggagggggcctgaaaaggtccagttctcctccaagggcttctcctactactccagatggtccggctcccatcccgacaggatccacagggacattcaggtgcagttgtgaatacaacacatga

SEQ ID NO: 19667 - DNA, 1446 bp, Zea mays
  Peptide Sequence Number=SeqID_61446
atgcccaaaattgtgaagcctatcatttattcgaatgtggacataacaaaagagggccatcgaaatcttagctctggcctgggtgtagtcaacgctagcatcagcggtagcaacattgtcgttgttctcgccttcgcggaagcacacgcaacaacactggactcgacaaaggcggcgttgggcggcgaccaaagcctaatcgtgatgggcgacatcggctttgagctatcactgaacggcgaccgcgatagcggcaacagtcgcccgagcctcaccagcaatagcttgggccttcggctgcaacacggcatagagacatgggagagtcgaggacctacggtatcggctaatagtcacgcgcagcagaaaggagagagcaaggacctaccgtattcagggccgttcgtggcttttcagggcccaagacgcggacaccgcgccaccccctacctcccgccgccccgccgaggcaccgacggtggccgccaactccagcacggctgcgctcccagcggatccgtccttgctcgtgctggcttggccgtcgctctccccttgcatcctcggtgctcggctgtgcagcgagaacggcgcagcgggcgctcgccgttcggcaagggcggcttccgggacagcgccagcgggtccgggggacagcacaggagcccgccgcctgctggctgctcaagcccatctaccgccgacgccgagggagttgatgaggacgtgcgcggccctcgggggaagaatgttttcgcccgagctccgggagtcttcggctcgaatgctgaggtgatggagaaggatcgtcaagacgctgcgcagaagcgatggacggtcgttaggatcgaggatcctttccgcgaggcgaagaaggagcggggggtcgcgaagtctgctgcccccggcagcagcaagccgacggcggctgtgaagccggtcgtccctaggcccaggaagtctttggcaggtgcgaaggctgctgcttctggcgcgcgtaagccacccttgggcgagtttgcgaaggagcgaaggttgccctcgccgccgtgttctgacaaggcggtgtcgcgtgttgctgacttcgacacagatatctgcgtgggggattatcttggtggtaagttttttttaaggctaggtcttaaccaagatcaatgtgtagggtcggatgtggggcaactggctgttgtcccgcctccggtggtgtccacttcgccgacggcggtggttggtgcgaagggtgcttcgcaggatccgtggtccaccatctgcgcgagcggcgcgattccgtcggccgtcgccgctaaggacgtggcgagctccgtgtcccagcagctgaggcaagcgtcacagcagctgtcacagcagctgaagcatgcgaccgacttcgtcgaccatgtcgcgtcgggtgttctgactgcggagtttgctgccgaagtgtag

SEQ ID NO: 19668 - DNA, 388 bp, Zea mays
  Peptide Sequence Number=SeqID_61447
ggtgttcggcgccccgcggcgtgcggccctacatcccggactcaagatgcgtcgagcactctgcatcacgccggcggggagggcggtgctggacaccatcgagaagaacctggggctcagcgcctggcacatggagccgtcccgcatgacgctctaccgctgggggaacacctccagcagctcgctctgggccgcgtgcgccgcggccacccgcgcgtggcagatcgccttcggctcagggttcaagtgcaacagcgccgtgtggcgggcgctgcgcaccatcgaccctgccaaggagaagcccgccggtgggaacccgtgggtggacgagatccacaacttccccgttgaggtgcccaaggtggagagcgtcgtcatgtcctcctga

SEQ ID NO: 19669 - DNA, 174 bp, Zea mays
  Peptide Sequence Number=SeqID_61448
atgggcgagcatggaggtggtggtggtggcaatgggaacccgaggtctctcgactggaagcgcgattttttatcgcttcagggtgcattgtggatgctcctatctgaagctacactgtttccctgctccttgttccgagttactttgtttcgaaacgatgccgcttatatatag

SEQ ID NO: 19670 - DNA, 450 bp, Zea mays
  Peptide Sequence Number=SeqID_61449
atgatcaccggcggcgcgcggcgggcggctgtgctcgcggcggccgccctcctgtgcgccgccgcggccgcgccggccgtggcgcagcaggcgtccaacgtgcgcgcgacgtaccacctgtacaacccggcgcagaacggctgggacctgaaccgcgtcggcgcctactgcgccacctgggacgccggcaagccgccgtcgtggcggcagcagtacggctggaccgccttctgcgggccctcggggcccaagggccaggccgcctgtggccgctgcatccgggtgacgaaccgcgggacgggcgcgtcgacgacggcgagggtcgtggaccagtgcagcaacggcggcctcgacctcgacttcgagacggtgttcaagaagatcgacaccgacggccgcggataccagatgggccacctcgacgtcgactaccagttcgtcggctgctga

SEQ ID NO: 19671 - DNA, 222 bp, Zea mays
  Peptide Sequence Number=SeqID_61450
atggggactaggttcctgatcccccatcaggtgaaggtaaccgaagggaccatgatctttgtcgacaccgacagtattgaatcggaagccgagccgaccatgccggtctcgcgcgcgtacgccatcacggccggcctcggcgaggtggagcaggtgcatgttacagcctcgtgccacaccgaggaaatgcagacctgcagtttgcggaggccgaccccgtag

SEQ ID NO: 19672 - DNA, 182 bp, Zea mays
  Peptide Sequence Number=SeqID_61451
atggtggtggtggtggactgctggcggtggtctccgcatgggcaccagggcacgggcagcgctgtgcatgcagttcagtcgtccctgcggccggcgcgcgtcgcgaaagttctcgcgccaatggcaatgcgcacgggtccgtggggtccgggctgtgacgacgacgcgacgaccgacgagta

SEQ ID NO: 19673 - DNA, 360 bp, Zea mays
  Peptide Sequence Number=SeqID_61452
atggcgcgcatggccaaagcacagccgaggcggcgccacaacttcgtcgtgaccacggactgggacgacgtctgcgccggtgacttcgactgcgtcgtcctcccgggcggccggacgccggagctgctggtgaccctcgacgacacggtggcgcttttcagggagttcgcggacaagggcaaggtggtagccagccagcatcgacaagggccacttgctcctcgccccggcggggctgctcaggggcaagaagtgcgccagcggggtgcccatgaactccatgagggtgatatcgaggctggctggtggcgccgtggccgtggaggcccaaggggcggtcacccgacaggaagctcgtga

SEQ ID NO: 19674 - DNA, 1254 bp, Zea mays
  Peptide Sequence Number=SeqID_61453
atggtggagacaggtgggatcttggccgaggtcgtcaatttcacagaggaggcgggcacttcaacaacgttggacccagcaggtttccagggggatgtagccagtttcagttcaggacaagggtacggttctgctgtcagcaaggtggagggttcatcgttggggccaccaatggcaggtccattggctgaagctcttgcacaagctgtcgccctgattaatcatgctcttgccaaacctgcacctgaaaccgctgctgatgtaaaacctgtgcctttggggtctcagtttctgtctgatgcaaagggtaagaatgttatgcaaggaaagggggatggggatcaaggagtagttggtgatctgtttggtaaaggcggcgaaaaagagaaagcgccatattgctggagggtaccaaaccagcagctcatacggctggctatgcagtggatgggctggggttctattatataccccatacttcttctaccaagcagcccacagactccagacttgaatcatatgattgagtggggggtggtgcagacgaagttcaaatctttgatgacaatagaagagaagtcgtggcctaaagagttcattgaggtggtgattggtgaatgtttatttgagctgcaatttcgggttgaagaaaacatggatagtgacagtccagttccagtggatatggatgactttagcggtggggaggacgaaaataagtcggatcaattagaggatgtggttcgtgggggtaattctctgccccctaataatagtgctccagatagtggcaaatctgtttcaaagggtgctggtaatgatggtaatactggtaaaaagggagcggcacatgatgtaattagctcggtagtccagtatgctgatctgggtttgggtatgcaaggtgttgaacatgctggtaatcccactcaagctgttgtgccagcaacctcgtcgtgtatggttgtttcggtgtcgtgtactccggatgtggtagctatggctgctgttccagaagcaactatggggctaaccgagtcaggcaggagcaaaagaagaaacaggagcgggaatggggacagcatgcaaagagcttcaaagttgaaggttgctcgcaatttagatgcggtcctctctacagatgtatttgatattggtgctattgatgaaggggagttttatgtcaagttcaaggtacacactggcttagattctggtctcagctacaaaaggatgaagctgatggagttttaa

SEQ ID NO: 19675 - DNA, 2040 bp, Zea mays
  Peptide Sequence Number=SeqID_61454
atgggcggagggggcgcgatcgtccacggcttccgccgctggttccaccgccggagcggctccacctccaatcagtcgtccatcgccggcgacggcgagggggaggcggacggcggctcgccggatctcgagatcgtcgatgacccggatctcctcggcctccgcgccatccgcgtgcccaagcgcaagatgccgctccccgtcgagagccacaggaaggactcggtggaaatggagttcttcaccgagtacggagaggcaagccagtaccagatccaagaagtcattggtaaaggcagctacggggtagttgctgcagctgtagatacccgcaccggtgagcgggttgctatcaagaagatcaacgatgtgtttgagcatgtctcggacgccacacgcatactgcgggagatcaagctccttcggttgcttcgtcacccagacatagttgagattaagcacatcatgctccctccatctcggagggagttccaagatatttatgttgtttttgagctcatggagtctgatctccatcaagtgatcaaggccaatgatgacctcacccctgaacatcaccagtttttcctgtaccaacttcttcgtgctctcaagtacatccatgctgctaatgtatttcatcgtgacctaaagcccaagaatatactggctaactcggactgcaaactgaaaatatgtgactttggtcttgcccgtgcatcatttaatgatgccccttcagctatattttggacagattatgtggcaacgaggtggtaccgggcacctgaactatgtggttcttttttctccaaatacactcctgcaattgatatttggagcattgggtgcatatttgctgaacttctcactggaaggccactatttcctgggaagaatgttgtacaccaattagatattataacagatcttcttggaactccatcatctgagaccttatctcggatccgaaatgagaaggccaggagatacttaagctgcatgcggaaaaaatatcccgtgccctttactcataaatttcgaaatgccgatcctttggctcttcgtcttttagagcgtttacttgcatttgatcctaaagatcggcctactgcagaagaggctctagctgatccatactttgcatcccttgctaatgtggaacgtgagccatcaagacacccaatttctaaacttgagtttgaatttgaaagaaggaagctggccaaagatgatgttagagaattgatctatcgagagattttggagtatcatccacagatgctggaggagcacatgcaaggtggagaacagattagcttcctctacccgagtggagttgatcggttcaaacggcagtttgcacatcttgaggagcattatagcaagggagaaagaggttctccactgcaaagaaagcatgcttctttaccaagggaaagagtggttgtatcgaaggacggtgatactgatcaacatattaatgaccaggagagaagtgcagattctgtcgcccgcaccactgtgagccctccaaggtcagaagacgacgacatgagcgatgtgaaatccacaagcttaagctctcggagctacctgaagagtgcgagcataagtgcttccaagtgtgtcgttgccacgaagaaacacccggaggtagtgcctccaccactactcacgtttggtttctctgctaggacgatggaatcgctgaggaaatggaaggcgccgtcaatggattgtctgaaaaggtctccaggatgcactcgtaagcaggactgcccctggcaacagcaaccttgttgcaaggtttctgtctctggtacactgtattccgacgacagccttggaaaggcaaacactgtatgtcacacagcagtacagcacactgtgctgcgaggttgggttttgcttgcgtacatccatccacagctagttcgactttacctgggtggaagaggaacacaccaccgcctgatggccctttcttcatcgtctgcatttccaccgtgtcatgccagcgctgcgtggcacctctag

SEQ ID NO: 19676 - DNA, 1536 bp, Zea mays
  Peptide Sequence Number=SeqID_61455
atgggtggcgctagcgtcgatgtcgatggggcggcggaggcgtcctcgcctctcctcttgccccgctccgctccacgccccgcggtgtcggcggaggtgacaaggcaggtggggctcgcggcgccgctggtggcgtgcagcctgctgcagtactgcctgcaagtggtctccgtcatgttcgccgggcacctaggggagctctccctctccggcgcctccgttgccgcgtccttcgccaacgtcaccggattcagcgtcctgctgggcatgggaagcgcgttggatacgttctgtggacaatcatacggagcaagacaatatgacatgctggggacacacacgcaaagggcgataattgttcttatgttcacgggtcttcctctggcctttgttttggccttcactggtcaaatccttatcgctcttggtcaaaaccctgagatatcattcgaagctggattgtacgctcagtggttgattcctggcctgttcgcgtatggtttgcttcagtgccttaccaggttcctgcaggcccaaaacattgtccacatattggtagcttgctctggacttaccttgctacttcatgttatgctatgctggttgctggttcaaagtttcggccttggccacaaaggcgctgctctggcaacctcagtatcttactggttcaatgtggcactgctagctgtgtatgtgaaattctctgaagctggcagaagaagttggcatggatggtcaggggaggcactaaaattgaaggatgccaaagtgtatctaaagctagcaatcccatctacatttatgacctgcctaaacacaatgtggatggtctatacaattccaagtggcctaagcagtgcaataagtattagagtgtccaatgaactaggtgctgggaacccacatgcagcacgcctatcagtttatgtttcagggatcatgtgcctagctgagggtctttttttcgctgtcatcacagtattagtgcgagatgtctggggttatttgtacagcaatgaggaagaggtcgtgaagcatgtttatgtaaaaaatgatcacatatccagcatgcacgatgctctcataagtcataagaggaaaaaatccaatgtgtttggtattgcacgctacaagagggtttcaccagtatcattaattcctttaccaaagaagagtggcacaagtattatgcacaagagtggggcggctcgaggatgcggctggcagaaagtatgctcggttatcaatctgtttgcttactatgctattggtctcccttcagctgttacttttgcatttgttctgaagattggtggtaagggcctttggttgggaatcatatgtgctatggcagtgcaaatatttgctctggtcgtcatgatgcttcaaaccaactggaatgaagagtttctactgatggaattggattgtactagttgtgagagggagcagtctgggcaagaactgtacacatggagcaggctgaaaaggcccgagctagagttcagtgttcagatggcagcattacattga

SEQ ID NO: 19677 - DNA, 1407 bp, Zea mays
  Peptide Sequence Number=SeqID_61456
atgagcaagctcgcccgcgggtgggccgacctcccgcgcgacctgctcgagtccgtgctcgcccgcctccccgtgccggacctcgtccgcttccccgccgtctgcaccgcctggcagtcggtccacgcagctgccgccgcgcggcttcggcaggccacgccgtcgtccccgtggctcatgctccccttcaatccgaccgcacgggccggcggcgtcgccaaactctcggtggcacggttcctgagcctggcggagggccgggtgtacgtgatccgccagccggcgccggccgcccgcgaccgcctctgcgtcggctcgtcggccgacggatggctcgtcaccgccgacgcccgctcggagctaagcctcctgaacccgatcacgggcgcgcagctccgcctcccgcccgccgccacgctcccgttcgtcgacgcccgccgcggcgcggacggccgcgtcgagagctacggtctgcggtcctgcttcgccgacggcggaggctgcggcgaggaggcgctggtcccgacggagacgctagggcccgacaggctccggtacgaggtatacgagaaggccatcgtcgtgtcggcgccgcgaagggtgcccccttgctcgtgctgggtcggatacgccgtgctgctcatctgccagcccctgggccgcctcgccgtcgcgcgggccggggacgcggagtgggcgctgctcgacgacgctgacgcgcccgcccgctgctgggtcgacgccgtgcgcgcgtcgttctccggcgcggacgggagccggcgtgaccatcagccggtgtacacggtggacgccgcggggcgcgtcgacgcgtgggacacggacgctgccacgacgcccagcagagcggtcgcgccgccgtgcggctgctcggcccgctcctgcgccatgtcagccgcgtgccgcaagtacctcgtggagctctcgccagggcggctgctgcaggtgcaccgcctccgcgagacggcgcacgcgcgatacgcgtgggagccccgaccggagcacatggagtacaccaccaccggcgtcgagctcttcgagtggacggccgccaccggcctgtgggcgcgggcggacggtcgggtgctgggcgggcgcgcgctgtacctcgggaagagcgcgtcgctgtgcgtccccgtggacgtggacgacgccgggtggtgtcccggggtgaggggtggctgcgtctacttcaccgacgacgggccgtggtcgcacgatcggtgccacgaggtgacgccggacgtgggcgtgctggacctcgacgacgggagctacaggccgccgcgcggcgccgcgagggacctgctctggaagtggccacccccgaaaaccgcggctcaacttgtcgttgaccttcagcaaccagtgtgcactagggttgaataa

SEQ ID NO: 19678 - DNA, 243 bp, Zea mays
  Peptide Sequence Number=SeqID_61457
atggcagcaaacacgcccgtggtgactgcacagcatggtccacttccagagttaccaaacttgtgttgcttcttcgtcggctttcacggtgtcatcattgagctgcagaaaaccacaaagaaacgtactccaagacacatgtacggcaagtgccctgcttttaggatgatagttcatcctttcctaccagatccagggcagggcgtcaagcttggagctgctgcctacagcctactgtcttga

SEQ ID NO: 19679 - DNA, 621 bp, Zea mays
  Peptide Sequence Number=SeqID_61458
atgggccacaaaagagacaccaaagaagacagagatggagagagatccttgcagaggactagaggagacacagagacgcggggaagaagacggagaggaggcagatccacggagaggcggggaagaagacagagaggagacagagacagataccgtgaccgtggagaggcgtgggcgtgcgacggagacggatccacggagacgggcggcgctacggacccacggtccacggatccacggagatgggcggcgcaacggacgcacggatccacggagaggcggggaagaagacggagaggagacagagacagataccgtgaccgtggagaggcgtgggcgtgcgacggagacggatccacggagacgggcggcgctacggacccacggtccatggatccacggagaggggcggcgcaacggacgcacggatccacggagaggggcggcgccacggagagggacggatccacggagaggcgcgcggtggagaggcgcgctggagagtggagactggagattagggttagggtttcggggaagagaaatgcggctgggggcgggggcggctggggcctggggcaacggatgtgggcaagggcatgtggcgctcgcctcgcgtag

SEQ ID NO: 19680 - DNA, 360 bp, Zea mays
  Peptide Sequence Number=SeqID_61459
atgcagttcgtcagccagttctgcgacgccaccgacacatcgctactggacgaccccaacgagccacccacgctactctctgaggtgcgcatcgactccaacctgctgctcatcgccttcgagtgctcatccaggagatcatccgccgcgtccaccaggagaacatctggcaggctgcatacaccacatggttctttttattatgaacagggtctcaataactggggtcttggactacagttgttcattgagtatgaatttgcaatgcaagaggtgagtgcaaatgttcctgcccgtgataaaccgaccatcataaacctagctgtcggtaaggtagatacgttatctcattgtgcctag

SEQ ID NO: 19681 - DNA, 237 bp, Zea mays
  Peptide Sequence Number=SeqID_61460
atggagcaaatggaagctctgttggctgtcatgtgcaccaactgtgccaccggtgagccgattgtgtgccaacagaaccttggagaggaccagcaaggacttgggaaaggcctaggtgttgaggaggagcagcaagggtgccacaacaggaaggagatcaagtccgactcggctgcaactccgtctcaggcaggaattatccctcgtggtgaggtcaatcgtgcagtgcacggttga

SEQ ID NO: 19682 - DNA, 381 bp, Zea mays
  Peptide Sequence Number=SeqID_61461
atggggacggggaaggtggtttgcgtcaccggcgcatcagggtacatcgcgtcctggattgtcaggctcctactcgaccgcggctacaccgtccgcgccaccgtgcgagacaccgctgacccaaagaaaacattgcacctgactgcgttggatggtgctaaggataggctgcacttatttaaagctagcctgctagaagagggttctttcgatgctgcagttcatggatgcgacactgtatttcatactgcctctcccttttatcacaatgtcaaggatgctaagggtcttgctactcttgcattgagccaatcccttggcttatttgttgggggcattgtacttcagtgtgtacttttattggtattccttattggatag

SEQ ID NO: 19683 - DNA, 294 bp, Zea mays
  Peptide Sequence Number=SeqID_61462
atgggtgcggccgagcagaggcaagctcgtgcggcagggaatggcagggctgcgacactggaggagggaggagtagggactggggcacgcaaccatggaggaaccttgggcgcggcgagcaaaggggaggagctaggaggaggagcgctcggctactggagatccgaggcggccgagcgagcagaggggagggagaagaagagggtctgggcactgggaaggctgggcgatcgactgaagaagaagaccaaaattacagatattttggatcctggtacacgatttcacggatga

SEQ ID NO: 19684 - DNA, 741 bp, Zea mays
  Peptide Sequence Number=SeqID_61463
atggctgctgtggacccgccgtcacacggggaggtcgtgcccatgctgaagcaaagtgccggcatcgaccaggagagatatcttggtgccctgcaagccgacgtgacggagcactgcattgttgacttcgtcggagtatgggctaaagcatgcttacgggatgcgtcggtgttcctgtgtcgaatgacatcgagattcctcgctatgcttattgaggttggaggtctgctcgggcgaggcggaagtcttcccgaggcatcggacgagccttcccgtgacgtgtgccacagccggcagagtggcctcccgtgggattcatcgcgaagctcgggcgaggtggagaattcacccgagggccgaacccgtcgtcgggcgtggtggagaaatcacccaaaggctgggcccagggtcgagcaaggcggagaattcacccgagggctgaacctatcgttgggagaggtggagaaatcgctcgaaggctgggcccggggtcgggcgaggcagagaaatcacccatgggctggactctgcttcgggcgaggcggagattttgcgcctgagggccagtctgctctgcttgtcatattagatgtcccatcggggggatggcaagcggcgccattgtcttatccgcctgagattggctcgtgcgagatagacggagtggcagtgacctcgggcgaggcggagtttttcccgaggagggagaatctcgaggagatgcctcggtttaatagatag

SEQ ID NO: 19685 - DNA, 1122 bp, Zea mays
  Peptide Sequence Number=SeqID_61464
atggaggtgggggctgcctcgggagctccagacccacctaaagtcgttgctggaggccctacggaagcttcggccggagttgtcgcggccttccaccggcggcgggtgaatggaacggtggggaaggcagattactctgttgtggtgtcgatgtgccccgagcagggccacgggctctggggcttccggactgctcgacccccggtcccagaggatgcagcggccagggaggtgcgccggctggaggccgaggagaagaagaggaagaatgacgaggagaagaagcgggcctggaagaagatgttggcctgcgattcactggagaagtgccacagagcgtatgagagggaggggcttccgctcgaggcctctcccagcactgaggatgaggaggacgatgacgatgatgtgaggatggaggtctgcatgggctttagcctcgaggtcgggcccagccgagcctacccctatccctgccttggtggaagaggtgggggtcatggagggggaagccatcccctgcccctaggaagccgacgtggtgcctgcggaagcgtaggtcgggtcccctctgcggccgtccgctatagggaacacggaggaggggcccatcactccccctcatgtggtcgttccaaggcccatagtggccctgaccgtcgttccacccccggtccctgcgccgggggttgcggaagaggtgatcactgccctgcctacgtccatggcggggcagcaggggctagagagtcagaggccgaggccttccgccatgcttgtctccgggagccatctcgggaggatgctgaggtggttgtgcctgctcctggggtgccggtcaagcccggcacggctacagtcgaggtggctcccgcgtgtcccgcgtcaccgatggaggccatcgtcgtctcctctaaggatgaggcagaggcgggtatcgctgcgccacacgtagcgtcgcccatggtctttgatatcctgcgcgccatccctaacacccccaaagttgtgtcgagctcgggggcagagcgagccgaggaggtcagttcctcggtgccgcccggaaggatagtcggtgggagtctgctctgcaacgagaccattatcaagcccctatcttag

SEQ ID NO: 19686 - DNA, 318 bp, Zea mays
  Peptide Sequence Number=SeqID_61465
atgatcctacagggcctgaagccgaggatcttcaatgatctgaacaagttcggcaagcgatggctcgttgagctccctttttcagtgatctggagcttgaggactactccaagccgagccacgggattcacaccgttcttcctggtctatggggccgcgaccgtcttacccatcgacctagagtatggttcctcgaggctgcaggcatatagcgaacgcaacaatctagtcagccgtgaagattcgctagaccagctggacgaagctcttgcgctaccacgaaaggcgcatctgaccccgagggttccaggaaggtga

SEQ ID NO: 19687 - DNA, 246 bp, Zea mays
  Peptide Sequence Number=SeqID_61466
atgacgaggaacaaaggcgcgcactgggaagtcggcgcgcaggggacggccggtgttgagatcttccgcccccatgacccagatagggatgatcacgaggaggcgaagcacgacgaggcgcgtatcgaaagagcttctgagattaaagatgatgacacgcgccatgacgaggcgacatatggtggggggaaaataggaatggacgacgacgagagaacaacacgactgcgtgggacttggcgataa

SEQ ID NO: 19688 - DNA, 165 bp, Zea mays
  Peptide Sequence Number=SeqID_61467
atggggagcggaagtgccgcgcaggcaaacttgctcagaatctcttcaaacttcacaggaaaaatcccgagaaggtggggttttgttcgggttttctcaaacgaactcaaaacaagatcaactcggatcatggccacaaatgactcaattgggtacttgcaatga

SEQ ID NO: 19689 - DNA, 387 bp, Zea mays
  Peptide Sequence Number=SeqID_61468
atgggagatggctgggcgagcacgtcagggagaaacgtcggttgcgcgcggcaaacagagagtaggacccccaggcgcgcgtgcaggttgacaggcagggcgcttgggcgctggatccgagccaggggtgacgaggaagctccacggcagccagggatcaggaaccagggcggcggcgcgtcttccatggccaagcagggagccgacatgggcgcggccgagcagaggcaagctcgcgcagcagggaatggtagggctgcagcactagaggagggaggagcagggactggggcgcgcaaccatggaggaaccttgggcgcggcgagcaaaggggaggagctgggaggaggagcgctcgactactggacacccgaggcggtcgagtga

SEQ ID NO: 19690 - DNA, 570 bp, Zea mays
  Peptide Sequence Number=SeqID_61469
atggggggaatggttgtggccagatttgttaatggtgttgcggatataagcgccgtgtggcatctgtcgcgaccaagcattacgagacagtctcctctagcgctttgcactactcctatcaagtgctcaataacactaggacagtcaagtgagctggagaaattggttgtctcaagtccaaaggcttctaccaatcctttgaacataagcttgacgacggaaggtggaagcgtgtttcctatcaatgatccaataattaccattacggacactgtatctaatcccatggcatattgcttggctgctatgaagagcgaaggtgttaacttaataaggggttacagcgtgggcaactcaagaagcaaccttccagtgaactcaaatccttcttgtgttccccctagacctgccttgggaccgaacagctacactcgtgaagctaccaagggcgcctcgccgaatggcacccaagtcaatgtcttgcaaccttctgcaagtttttcgccgaagctgcattgcaacagaaacgtcctcgtcgccgctgctctgttgttcctcctaatcctttga

SEQ ID NO: 19691 - DNA, 1149 bp, Zea mays
  Peptide Sequence Number=SeqID_61470
atgcccctgcccgcgtctacctcatcatccccgcccacccccgaaccccgcgcccctcccgagctccgccgcgtcatcccctcatttcccccagaaccccgtcgatccgtatgcgaggaggaggacgacagccccgagcccgttctcatctgcttgggaaccctagccgtcgcaggctccatccgcaactgcaccctcctgtcagtgctccgcctccaccccatctccactgccctcccagttcttgatttctttccccttcggcttgagtccgtcggccaggtcgttgatgacctctgtgccgccaccgctgggctcctcttgcatgccaacaaggccctccggtttgaggcccaggtcttggcgttgcgtgcgggaccctgctcacgtttcaccgtggagcctgaagattctgagggctttggtaaatggagtgccttgttctcaattgacgagatgaaggaacagatagagacggtgctccatgaaagccctgaattggagagctttgtggagaggcttgtgccgtcagttgtggattttactcttctgcacgtatctacagtgaagtctaccatccttgaggttggaaacatcgaactatttgaactgaatgaggtcctcgcctctcagtttttctactactgcaagactaatttcgagatcaaaaatctaatctcccatctaatccaacataaagggctaattgcagggcctaaaactcatccaaaacaagggtattatagcgcgattgccataggacaccctctgggtgcaacaggaatccagccttacctcttagtggcacaagcgacaccgtctgtcagcctaaaaatgaaaagccaattactgaaagcggagatgaaatctcttatgaaggagcaaaggcaaaacatccaatatctttattattgggactacgaaggagatcaacgaatcgtttgcaacaaggtgtcaacagggtcgaatttgcctaatttgggcgccgcctgggtcggtctatggatctgcgcagccaccgactatcgcttcatcgagcacgccccatgcgttcttcaagagctacattcgctcgatcttttcaaacaatgtcatggtttagttatttccctcctttctatttacacagaaggcttttgtttgtgctag

SEQ ID NO: 19692 - DNA, 504 bp, Zea mays
  Peptide Sequence Number=SeqID_61471
atggagaagagcaggggctcgactacgcacggcggatggcgtagctccggcgatgacgaactctggcgaactccggcggtggttctaacggcgatgagagtgagagagatgggggcgagcttgggtagggggaaaatggagagaggctttgctgccttttatagggagcaggagggagaggagaggtcgccggtggtcttcaatggccatcacatgcgtcagtttctaacgagagtaatggagagaaatgggagagggagtaacggaggatttgatgctccattaacggcgagaaatcgaacagatgcgcggggcagacgcgcggtcggctggcggctcgggtcggcctcggttgggtgcgcgtgggcgtcgcgcggctggccggatcttcacgtcggggcgggggcgtcgagccagcttggggcgtgcgcggtgcagggtgctcggcggctcggcggctcggctgctgtgcggggtagcggtgtgcgcgcctgggcgcagtag

SEQ ID NO: 19693 - DNA, 693 bp, Zea mays
  Peptide Sequence Number=SeqID_61472
atgttaagcttgcctggtgccagccagtgcaacaggttttctcgaaaaataagggagggggacaagaacgtgctgatcgacaaggtgacggtcaaggcccccggcgacagccccaatacggacggcatccacatcggcgactccagcaacgtgaccatcagcagcaccaccatcggcgtcggcgacgactgcatctccatcggccccgggagcaagatgatccgcatccatggcgtcaagtgcggcccaggccacggcatcagtgtcggcagcctggggcgctacaaggacgagaaggacgtggaagacgtgaaggtgacggggtgcacgctcgccggcaccaccaacggcctgcgcatcaagtcgtacgaggactccaagtcgtcgcccaaggccagcaagttcctatacgagggcatcaccatggacaatgtctcctaccccatcatcatcgaccagaatccggcgcctccaaggtggccgtcaacgacgtcgtcttcaagaacatccacggcacctccaacacgccggaggccatcacgctcaactgcgccaacaaacctgccatgcgagggcgtgcagctcgtcaacatcgacatcaagtacaatggatccggcaacaagaccatggccgtctgcaagaacgccatcggcaagtccatcggcttggcaaaggagctcgcctgcatctga

SEQ ID NO: 19694 - DNA, 477 bp, Zea mays
  Peptide Sequence Number=SeqID_61473
atgcctccaccagactgggtaattcggcgggagggagagaaaattcctcgccggtacagatcttccatcgtcgggccactgctctccgaggtcatgctccaccacccatgtccagccctcggggatcgactcgggaggaagcccagcgcacatggatgctcgtcgcggcttcgcctgggcgttatcgtgctcctggccaccgggattcttcaccggagcaggtgctccgccgcactgccgccgcatatccggccacgatcagagcatgtataccggttggatcttgaccctcggatcatgattgggcgcttgcggatcaacctaggcattttaaaatccaacgcgtcagttattgatccagtggctctgttgttatttactgttcatgataagatcattatgttaattggaacatggagcgaccacccaggaaaacagtgctaccacaagggtttatggacgcccttggctgattaa

SEQ ID NO: 19695 - DNA, 204 bp, Zea mays
  Peptide Sequence Number=SeqID_61474
atgaagccatcaaactggagagggaccaacaagcaattgccctcagccccatttcccacagccctactcaggagcaatagggattgcagccctgatggacttcatttcttagaatcaccccccaaaactactatagttgctctaatgaagcaatatccagtaaatgaggcaccagtcccactggacaccaaatatgaattgtag

SEQ ID NO: 19696 - DNA, 240 bp, Zea mays
  Peptide Sequence Number=SeqID_61475
atgacgaaggtgatgcttgccgaaagtgttcaagactcaaaaaatggaagaaaaatactgtctgtgccagacaagaatgcaggctctggtgtaaatactgactccggtgccacaactgaagcaccacctcaacctgttgaaaccagtgacaaggcagaaggcacaaaggttgaatctggtggagacaaagtggtagctggagaacccaacgaaggtagctgcatgccatctaaagtttag

SEQ ID NO: 19697 - DNA, 222 bp, Zea mays
  Peptide Sequence Number=SeqID_61476
atggccagtcccctcgtctccggcgagccctcgccgcgggaccgagcggcgccaccgcgtttagacaacgagcagctcgtggttcctgagtgtgttgccaaagatccctctgagcaacaacctggtgaaggctacgtagtgagaccttgccaggtcaccttggtagtgatcaatggggaggctagaaccccagacagaatgggaatcacggcttgtgggtaa

SEQ ID NO: 19698 - DNA, 330 bp, Zea mays
  Peptide Sequence Number=SeqID_61477
atggagcctggcggagggacagctgtcggagcagttgggtccttgctgacgtcctcttgcttcctcggagtggcgcaggcggcgctgtccttctatcaggccggtcagtggagcggcgaagtgacggcggtcacttcggctctgccgggggtgcgcgtcaggataaagctttatgctgatgggggttacgagctgagaattaggagtcttgagggtacccctaattatggtccccgacactcatgctttttgccttcctttgagacaaagggactccattttccttcaatgagacttactgcatataatagacttgaaaacaagtattag

SEQ ID NO: 19699 - DNA, 327 bp, Zea mays
  Peptide Sequence Number=SeqID_61478
atggtgtggcgtgatcatgtcgacgacgaactccctcatgccctgaccgtggagatggccaggaggataggttcgagctcagttttattgtccgagaaggtagaactccccagcaacgggcagcacgcgatggatagggagggtgtaaccacccacggcgggttctccagcgcatacgagggtagggaggctagcgattgggtccatggtgtctgctggcgcgagagcgtagagggatgggccgcgtggtggtgttggtcgtgggcccgcatgtcagccggcgagggaagctggaccggtttgatgggccaagcaggtgtggattag

SEQ ID NO: 19700 - DNA, 201 bp, Zea mays
  Peptide Sequence Number=SeqID_61479
atggcgcagccgcatcatcacgtggacaagggtgcacacgccgtcattcttcgattgacgaatgggtggatcggatggtgtcgttgcggggggaatttcgggccgtggatctcggatccaagggcagatcgggcagctgggaatcaaggacaccctttcagccgtgaaacaaatacaaaagagccctcggttttcttttaa

SEQ ID NO: 19701 - DNA, 438 bp, Zea mays
  Peptide Sequence Number=SeqID_61480
atggctgagggaggggcagcggggggagggaggtccggcggttggggaagccggcggctgggtggtagcccgacggctgggggaaggaggtcggcgactgtaagagttgaagggtcagttgagaaggttccagaagctgaatcagataaatatttccacagccgcccacgtggaagtcagcttggtgccatagtcagcaagcagagtactgtaattgctggaagagaagttcttcaacaggattacaagaaattggaacaaaaatattctgatgggagcttgattccaaaacctgaatattggggtggctacaaattgacaccgacactttttgagttctggcaaggacaacagtctcgactgcatgaccggttacaatactcgcagagagaagtagatgggagcacagtgtggcacatcgagaggttgtccccttga

SEQ ID NO: 19702 - DNA, 343 bp, Zea mays
  Peptide Sequence Number=SeqID_61481
atgtccggtgcaccagaggactccgacttcaaactcgtcacgttcgggaaattccagaggtgtctccgctataattcaccggactgtccggtgtacaccggacatgtccggtgctccaaggaagagcggcctccggaactcgctagcctcgggaattcattgaagctgctccgctataattcaccggactgtccgaggccaggcacgcccatgctgacgcaccggacaatctacagtacatgtccggtgcgccaccggacatccaggcgggcccagaagtcagagctccaacggtcggaacccaacggcattggtgacgtggctgtcgcaccggacatgtccg

SEQ ID NO: 19703 - DNA, 546 bp, Zea mays
  Peptide Sequence Number=SeqID_61482
atggcgctgacccgcgcgacttgccaccaacgagaatcccgcgcgacccacgcgctcgcctggtgctcggtcgctgacgcggtggggcccactggccagggaccagtgagggtcaccggatctacgcgcgggcgtgccgcgtacgtgcgtgggttagtcgtgccgtatcgtcgtccctggcgggggcaattgctcatcggcgcttgtgtcgtcgccgcggacccgctctcctccatagacagccccctgcgccgcataatactcggtatggatccctacaccgtgctcgccaagtcctcctttacgtgtagctcggtccaattcgtatttggcgttcggatacagccgattggcaacctcgccggcgtgctccgccgagcgtgcggggcggcgccgccacggtcaacaggtggattgggcgggttgctcgatgaccgtcggattgggcagcaatggctcagatttgatcggatgaaactgcttgggtcagtgcacgtgaatcgtagatcgatgatcgtgcgggtgatgggagatctgtccccataa

SEQ ID NO: 19704 - DNA, 444 bp, Zea mays
  Peptide Sequence Number=SeqID_61483
atgacggccgcaccttctctctccttcccagtcctcctgctcgcctctacctacacctttctcttacaggagggggtggagcccttacatgaggaacttattgataaagaaagcattatagggagttctggtctgtttgcgggtgatgtttgtgctaatgtagctgattcaagtttcgttttctatgcagtctctatggttttcagggagagattttgtgttccttggtattacggtttgatggtagatagtagtactatttctccaagaaagcaggtgcagagcgatctcaaggtccgcctagcgatgctaaagccggcaaaggtggagaggatggtggttgagagcatggctgacaaggttgagtgggcaaataatactaaagttattattcggagcaaaggggttctttcaagggtccaagtattgagggtggttcaatga

SEQ ID NO: 19705 - DNA, 2214 bp, Zea mays
  Peptide Sequence Number=SeqID_61484
atgagcgccggcggcggggaggaggtgttctacgagtcgcgggacggcgtgctctcctcctcctgctcctccgcctcggacgacgacgacgacgacagcgaccacccgcgacggcggcggcgggacggggccgcctctaccgccgccgcagcggcgctcgacgtgtggacgtccgagccggcgcccgtgcaggagcggcgccggaagctgctccagatgctggggctcgccggggaccccgccctggcgcgcctcgagatgggccgatcggtctcctacgacgacgggcctgtgcccgtccgcccggcgccggcctcgccgcccatctcccgatccagatcagacggcggcgccgtgccggcctcggcgaccaagccgccgctgggagggcggtcgccgggctcctccgaggccacgcccgaaggggaggaggaggaggaggaggaggccgacccgaggtgtctgatccggaacctcgacgacggcagcgagttcgtggtcaaggaagggtccgagctccgcgaggtcggcacgggccggcagctcaccatggaggagttcgttgacctctgcgtcggccgctcgcctatcgtccaggagctcatgcggcggcgcgagaacgttgcgagctccggctcgtccacccccgtccagcgctccaactccgactccagcaacggagcgacgcgccaccggcggcggcggcggcatagcagctggcttcggggcatccggaacgtcgccggctccgtggtggccagctcccgcgaccgccgcagcagcgacgacaaggacacgtgctcggagaaaggcggccgccggtccagctcggccacagacgacagccaggacagcgctggagccgtgcgccacggcccggtgcgcgttaaggtgaggcagtatgggaagtcgtacaaggagctcagtggcctgttcatgaaccaggagatccaggctcacgatggctccatctggagcatcaggtttagtccagatggccggtacctcgcgagtgctggggaagactgcgtgatccatgtctgggaagtgtcagagttcgagaggaaacgcgaggagaacggagcgtgcaatccttttgttgcgatggtgtgcaacggttcgccggagccaacattagccgtggccagcagtgtggatgggagcaatcgtgagaagaagcgtcgggcaaggttcttggagggtcgtaggtctgtgagctcagaccggctaatgctgccagagcatgtgtttgcgctgtcagaaaaaccgattcggaccttcatggggcactcagaagatgtgcttgatctctgctggtccaaatcccagttcaaccctgttgatgatagatacttcattagtggatcactagatgaaaaagtccgcatatggagcattcaaaaccgtgaaattgttgattggaaagatttgcatgaaatgatcactgctgcttgctataccccagatggacagagcgcactaattggttcccataaaggcagctgccatatttatgatacatctgggagtacttcaaaggtccttatcacatctgcagattcaagaatcagggttgttgatggccttaatcttgttcacaagtacaaaggtttccgaaacagtaacagccagatttcagccagtttagctgcaaatgggagttatgtgatctcagcaagtgaggattcccacgtgtacatatggagaatcgatgataaccttgaacagggcagaagcaaggggaatgttactgtcaccaattcctatgaatatttccactgccaggatgtgacagttgccgttgcactgccatctaacggctccccagtggtatccagagcaaactcggcgaagcacgatgagcgggattctgtatcggagcattctgcgctgcatgctgcccctgaaaaaccgcaagactcttctgatttccagcctcaaagtggctataccataagcaccggttcaaatgacagtggtgatagagcaacttggcctgaagagctcatgacgccaacaaagcagagccctcggtctagtgccagtcttcccagtggtgctgatcaagctccaggtcggtcagcctgggggaccgtaattgtcacggccggccgtggaggcgaaagtttgggtgatttgcacagcagtctgggattggattttgttgctcctaggcgcacatgcttgcgaatttcaactaacctggtactcaag

SEQ ID NO: 19706 - DNA, 1215 bp, Zea mays
  Peptide Sequence Number=SeqID_61485
atggacgcgtcgagcgagagctgtggcggtggcgcggggggcggtcgtggaggcaggaggtggaagggcaaaggcgccacgcccatccagccgcggcggcagctggcaccggtcatggaggacgcgtcggcggcactgctgcgcccgctcaagaagatcggacgggcgccggaccgcttccagcggtccgcttcgtcgctgtcgacgtcgacgtcttcgtcggccccgccttcgcctcgcgccacctcgccggcgccgcactccgccagcgtgtcacagccggcttcgccgcaggttcaagcgcctatgcagcgccagcagcagatcatatcgttcggcccgccgactcagtaccagacgccgttcttgctgccggagggcgcgcaacagcagcagcatcttctgcggtactggagcgaggcgctgaacctgagcccgcgcggcggccagcaggtcgcgggcgtgctgccttcgcggtaccagcacctgctgcgggctccgccgcctccgcttcagaagctgtaccgtggcgtgcggcaacggcactgggggaagtgggtggccgagatcaggctgccgcgggaccgcacgcggctctggctcggcacgttcgactccgccgaggacgccgccatggcgtacgatcgcgaggcgttcaagctccgcggcgagaacgcacggctcaacttcccggaccggttcttcgggaagggccacgccggggggagcggccgcaccggcgccacatccgcgtcgggctccacatcgtcgtcgtcaactccacagactcctggcgagcaaaacacgcagcaagcgccgccggacgcggaaggatcgtcggacaagcggcctcagcctccggttgcgacatcgtcgcagctacaaggcggctctggtgagacgaccttgccagactccgatcaaatgattcactcaccggaggctcctggcagcgagtggggttcggccgacgaggcatggctcaacgtgtggggcccaggaagctccttctgggactacgacattgagagcacccgcggcctctttcaccatcacgggcgcttcgacggtgatgagaccggcataaacacagcgacaactgcggcggcaaccggggcgggcatgtcatgcgatcatgtcccggtaacacctgcttcttcttcttcctcccctctgcactcacagtctcctccttcacccaccttcatggactaa

SEQ ID NO: 19707 - DNA, 807 bp, Zea mays
  Peptide Sequence Number=SeqID_61486
atgtcatcttctccatactattggttcttgatttgtggctggccggcggtgggtgtgcttggtggaggagctcgtcctccatgctctaatgcccccacagccactcgcagtcgcagccgaggccaccagggtaggggaggactcaagcagagtgcggagggccggagagtcgagggaggtgtcagggagacgagacgtgattgctgcggcggtacggccttccagttggcagccaccaaggcatcaattcccccacgacattgtgataaatatcttccactgggaagtgaacggcgaacatatggggattatgatatcaagattacaaagacaagaacagatagccaccatttacagttgcgtgatgtcaaggtgcaaaacatcgagacaggcaaggttcattctgtactccatatagaatatcctgattggcccgaccatggagtggcaactaatacagatgctgtacgggaaatctggaaacgactgcatcacattccaacggaacatcctatagttatccattgcagtgcaggaatcggaaggaccggtacttacatcacaatccatactacaattgagcgaattcttcttggagataaaagctcttacgatcttgccaaaactgtaaagaattttagatcccaacgacctgggatggtccaaacagaattaccagtagtttcaaatgaaccttttcataatgttacagtacaagtgatgttctatgatttcaaggaacaatacaagttctgctacagggcaattgctgacgagctgaaagacctgctaaattcagatcattga

SEQ ID NO: 19708 - DNA, 291 bp, Zea mays
  Peptide Sequence Number=SeqID_61487
atggcatcgattggtcaattgaagattgcggcggcacgacctgtactatcgcagacggatatagcgtgcatgggtgggaaagcgcgggggtggtacagggagggcgggagatcgggcgggagcacgggggcggaccgccactggcagacgttggagcgggtggtgtcgagcaacgcccaatccatcaccgcgttgacggccaaggcgcagctccgctataattcaccggactatccgatgcaccagcggagcaatggctatctgcgcgcaatggccgactctgacggatga

SEQ ID NO: 19709 - DNA, 897 bp, Zea mays
  Peptide Sequence Number=SeqID_61488
atggattctgggtattacacaaatctcctagttaatggtattgaagaatctcaagcaactcgtagtgatgtaagaatccagcatggtcgtgcaatagccaagagttctcagggtagaagcaaaaattttagagatgaggaggacattcttcttgtgtcagcttggctgaatgtgggcatggatcctattcaaggagttgatcaaacacatggcacactatggagaaggatacatgaatatttcaatgcaaacatgaagtttgactcaaatcgttctgaagtttctttaatgaatcgatgggttgaggctaggaatcacagtgggtggtcaattgatgacaagatcgcaaatgcatgtgtaatgttcaaggccgaagacccaaaggataagaagttttcatacctgcattgctggaaaatcttgaaggacaagcccaagtggatggataggcggaaggaaattggaaatgcaaaaaaatcagccacgaagaaaccgaagacaacgataaattcttctccaacatcagttgcaaatgcaattgccgtagatgcccctcttgggggtgctgatcatgatgaaccatcatgcacacccgacggtaagaagaaggagaaacaaaagctacgacaacgttcgtccatggaagttgtagactatctaattgcaaagaagaaagattctgaccttgaaaaggacttgaagaaagaggagaggtgcaataaagcctttgctctacaggaagaaaggatcaaattggacaaagaaaagtttgcgttccaaagacagctcaaagaggatagaataattggtttggaccttagcaccatgaactataaacaacagcagtattatgaagatcgtcagaatgagattcttgcaagacgtttcaatatctag

SEQ ID NO: 19710 - DNA, 498 bp, Zea mays
  Peptide Sequence Number=SeqID_61489
atggagttgagctcgtcctgcatcgcatatccgaggctggaatggtgccgcaagcatcgcctccataaggatgtcttgaatggccacgaagcagcatcgttatggctgccatccgcagatcttggtccttatgctcctgctggtcagcgtacccgtgaggagacgggtgcgcgagagacctgggaacagacgtcggtgacaacatcatctccgtttttggggacgagaatgttgctgggccgactaagcgcgactgagctcgacgccaatgatctgccgccacaattcgcgcctacctgggagattcgtgccgcgggaagagtagataatgtcggggtggggcgaaaatatccagtgtggggtgaatctggttgctggcggaaccggccgtcgtgtcccaccacagtcaatcgcgttggcatcaccggagttcaccgttatccgaccaggctacgtgcctcaaagccttaccacgtcgcagtagaccgccttaggtag

SEQ ID NO: 19711 - DNA, 690 bp, Zea mays
  Peptide Sequence Number=SeqID_61490
atggacaggggcgctggtggtgctttctacgccgcgctgtcgtgcaggctaccatggctatcgctggacagcagtgcagtggttaatgccagggcaagctccggccacgcgagatccaatgtttcgccccgcccagacttctcctcaccgtgtcgtcgtggtcttcctccccatgctgtcgccgaccccgccaccagcgttgccgctggaggccgaagcggagaacaccctcgtggccaccgccagcctcgccattgtccccttctcatcggcggattcggcctcaacccctctgagttgttgccagaggggtcgggagtgcgctggatgtgtgagcgcattgctcggggtggtgatggggaggtggggggatcgtgggctggggcggcggcggcgacgcgcgcgatcgatggggtggtgagagaatgggcgcctcgaggtccacgagccagcgaccaggcttgggacgacccaagtggaggtcgcccacggcatcgcgacattcacggcggcttgaaggaggagcgaggaagaaagctaggaggatgggacaacggcgagcgtcgcggtcaggaggtagaacgacatcagggcatggcgtgggacgcgagggagaggaaatcgctcgggtggtgggagacggaggatgttctgctagttcaagggcgaggatcgaagggatatagatag

SEQ ID NO: 19712 - DNA, 141 bp, Zea mays
  Peptide Sequence Number=SeqID_61491
atggagagtcatgatctcaagacagaaggggaatcacgacttgtgggtaaagtgtgcaacctctgcagagtgttagaaactggaggagatgcaggcaacatggaggactttgaggtgttcaaggactacgacaagttctag

SEQ ID NO: 19713 - DNA, 447 bp, Zea mays
  Peptide Sequence Number=SeqID_61492
atgccccccggcggctcggccttctgcgtcgtgtccctgcgcgccggcggctcggcccccccgtgtcgcacccgcgcgtcccggccccgcgctcccgcgcccggcctcgcgccccactccccttcgcgcccggcggcggcggcctcgcggcctcgcgcccccgcgcccggtggcggcggctcggccccgtgcccgtcgcaccccctgcccccgtcgcgccccgccccggcggccccgtggccccacgtgcccgcgcgccctgtgtgctcggccttgcgtcacgtctcgcatgaccctgcgcctcgcgtcccggcagccgtgtgccctgtcagtcctatcgtgtgccccggcgtggcctctcgtgtccccggcgtgtgcgcagcgtgtggtgacaaggatgatggttatgattatgcttatggtactgggcggatgcgcttgcagtag

SEQ ID NO: 19714 - DNA, 375 bp, Zea mays
  Peptide Sequence Number=SeqID_61493
atgggcagcgaaccgcgccaaggcttcgccagtcagcgcgccacggccacaccgggctgtggccgcgccggggcaggggctgcacagggtcaccggggaggcctgcacgcggggagagggaaggagaagagggagagaagagaggagaggggaagctcacctcagggctcgacgatcggcagcaaccgctcaccaggatccaacctagggcaaggagaggtggaagagagggaggttgctgcgcatgaaagaaagaatgaggaggaggggtggggcgcgcataggggagggggcgccagggcgcgcgcgcctaggccaggtggtcgcgccatgggccgggccgactacctactgctcgatctcgcctggttctaa

SEQ ID NO: 19715 - DNA, 186 bp, Zea mays
  Peptide Sequence Number=SeqID_61494
atggccggcgaaggcccgggttacgatgaacgaatgggagaccctactcactggatttggtggcgaagagaccccgaccatggcgaggtgcagaccgcagcaaacttgggctccggtgagcaattcacgggacaccatcgactccggcgaccaagggccaggctgtacatgatcaacgctcaataa

SEQ ID NO: 19716 - DNA, 405 bp, Zea mays
  Peptide Sequence Number=SeqID_61495
atgaacgtatgtgagctcacccttgctgtactcacattccccctaggtcaagaacagatttcggtgcccctgaaatccaggtgtgacactgcggtggtgaccagtgcagctagggtgatagtggttgcggcgaccgccaagccccaggctctatcgtcgccgccacttgctgcttcctcctcctccctcgcactgccaacgcttccccttcccactcctagaggggagctcagaaatcttcccctattcatccttgagggctcgaagggggagaaaatagagccagatgagtgtcattttattgaggcagcttccgaccaggccgataggagcttagaggcggtggagcgtttccttcgcaattttggagaggcagttgtgattacacgttcgttgatgacgtag

SEQ ID NO: 19717 - DNA, 708 bp, Zea mays
  Peptide Sequence Number=SeqID_61496
atggctcgtgcggcggctgcaagaccatgtggcgaggcacaggggcctcctgcacgggagcgtggagccgccggtgtccaggggggagcactaccgcgggtgaggcagcggccgtgggggaagttcgcggcggggaggacgatggcttgtgcggcggctgcaagaccatgtggcgaggcacaggggcctcctgcacgggagcgtggagccgccggtgtccaggggggagcactaccgccgggtgaggcagcggccgtgggggaagttcgcggcggagaccatacagggaaacacggcaccctccccgacggcaccatacacggaaacacggaactaattagggaagaggaaggaggaggcatcaccttgctgtggcgccgccggcgaatcgagggaaaccgctggcgaaatcggacctatgcgagggaaaccgctggcgctggcgaatcggaccctatgcgaatcgagggaaaaacacggaaactaattagggaagaggaaggactcgggaaaccgctgtctcctcccccacatagaccaccggttggttataaaatggagcatatccttgcgcaattgagcgtatccttgtctgttgggcaaaccgcggaacaggtaccgctgaacacgcaattgaggcttgctgaaccgcggaacaggattaggtgttgtcacggtttaggcccaccagcagctgaggcttgctga

SEQ ID NO: 19718 - DNA, 195 bp, Zea mays
  Peptide Sequence Number=SeqID_61497
atgccgagaagctcggcggcagctacgccaaccgtgtgcgaagaagtcggggatgacaagcgggtcccgcgactcagtgaagggttgagcagcgtgagagggagggctggccagtgggccctaggtgtcggcgccaggttctgggtggtgcgcgattggggtaaccagtcgtataaggtgaatatccaagggtaa

SEQ ID NO: 19719 - DNA, 441 bp, Zea mays
  Peptide Sequence Number=SeqID_61498
atgccgagaagctcggcggcagctacgccaaccgtgcgcgaagaagtcggggatgacaagcgggtcccacgactcagtgaagggttgagcagcgcgagagggagggctggccagtgggccctaggtgtcggcgccaggttctgggtggtgcgcggcggaccgtccgcctataattcagggactgacccgaagcctccttcctctggtcaggactgcggacggtccggccctaaggcccggacggtccgcagtgcaaaagaatacagagtcaacacaaatggtcaaacctcggaccctctggaggatcgcggacagtccgcccccaagggccggacagtccgcgcgaccaagacttctcaaatttcaaacatgcttttgaatgaacttttaactcacgaaatgagaagcgctgttagtccttatgcaaatgcaactacttga

SEQ ID NO: 19720 - DNA, 486 bp, Zea mays
  Peptide Sequence Number=SeqID_61499
atggccgaagctctggcggcaatggcgggcggaattgagctcgccggagctaaggaaagtggctggccggtgaggccgccacttctccagccgccgccgtccgccggtttccctcgccacgacgccagacgccagtacgccagtacgccacttctccagccgccagacgccaacttctccagccgccagacgccacttctcttctccagccgacgccacttctcttctccagccaacaaccgacgccacttctcttcttctgagtcggcttttagtttatgtggcaggttgatcgaggaacgacgacgaagtctaacaccagaacatgtggagatgctgtccctggccaaggattgggagcaagcagctgttcgacagcaacactgtgttgagaacaaagatcttgaagagctaatggaaaacatgtatcttgatgcacaagaaggatcgacttgtgttggtggtggagatggacatgatcactaa

SEQ ID NO: 19721 - DNA, 465 bp, Zea mays
  Peptide Sequence Number=SeqID_61500
atggttcggtgcgctaggaaccacagggaggtgctcgacggctgcacctgcaggggggcgccgagtggaggaagtccggacttggggctgctgctgtctagccgtgaggggagagctaagagggggcgagcaccaccattcctgttgcgtgtggctacggcggtggaggagctgctccctgcaccatgtgcagaggagggagatggtatgggagagaaggagaaggggctggtggctgggggcgaggagagggaggacgaggtgtgtgggagaagggagagggtggctaccatttatagagccaagctctggacatgtcagactgcaccagcaggtggcaggtgctacagtgacgaccttgggtggcgtgttttagcattttctgcttgtttttggatctttgtcactgcacaaaatatcttccttgatctacactctacaattgttgtacaaaacttgaggtga

SEQ ID NO: 19722 - DNA, 372 bp, Zea mays
  Peptide Sequence Number=SeqID_61501
atggcactcggccgtccctactccccgttcgacttcgtccccatctccctcaagctcgcccatggcgctcggccgcatctccatctcccagcaagcgccctgccgaaccccctgtgtcgcgctcctgggctctcccatggctgccgagcgtccctgtccctgctcgccgtcccgagcttggccccgcgcgggaaagctttgcgagtttgcgcgccgtcgctcagctcgctcaaatcctggccatggttcccgtcacgctctgtgtcgaggaaagaaattcctaggaaccgggtaatgaagcaagattcgtgcaacgtttgccaagtgttcgacgtattacttgacctcggattcgttgtcatccgcgtgtag

SEQ ID NO: 19723 - DNA, 159 bp, Zea mays
  Peptide Sequence Number=SeqID_61502
atgaacaatgaagaacgtgtggttgttagagatgacatgtgggtcccactggcgagggacaacgggaacaagtgcgaggaagaaggcaaggtgtttgttgctccgaatggagtccttttggagaaagagtttctctcaaaaggagttagtgggataaag

SEQ ID NO: 19724 - DNA, 1140 bp, Zea mays
  Peptide Sequence Number=SeqID_61503
atggcaagccttgtgctgttgttgctcatcttactcgtgcctaccttatcgttgccagctgctcattgcaatgacaacgtcggattccagctcaagctgacccacgtcgacgcgggcacgtcctacaccaagctgcagctcctcagccgcgccattgcccggagcaaggcccgcgtggccgcgctgcagtccgccgccgtgttgccgcccgtggtggacccgatcacggcggcgcgcgtccttgtgacggccagcagtggcgagtacctggtggacctggccatcggcacgccgccgctgtactacacggccatcatggacaccggaagcgacctcatctggacgcagtgcgcgccctgcctgctctgcgccgaccagcccacgccctacttcgacgtgaagaagtccgccacgtaccgcgccctcccgtgccggtcgtcgcggtgtgcctcgctctccagcccctcctgcttcaagaagatgtgcgtgtaccagtactactacggagacaccgcgtccaccgccggcgtcctcgccaacgagacgttcacgttcggcgcggccaactcgaccaaggtcagggcaactaacatcgctttcgggtgtggcagtctcaacgcgggcgacctcgccaacagctccggtatggtcggcttcggccgtgggccgctgtcgctggtgagccagctcgggccgtccaggttctcgtactgcctgacgtcgtacctctcggcgacgccgagtaggctctacttcggcgtgtatgcgaacctcagcagcaccaacaccagctccgggtctccggtgcagtccacgccgttcgtcatcaacccggcgctgccgaacatgtacttcctgtcgctcaaggccatcagcctgggaaccaaactcctgcccatcgacccgctggtgttcgccatcaacgacgatggcacgggcggcgtcatcatcgactcgggcacgtccatcacgtggctgcagcaggacgcctacgaggccgtgaggcgagggctggtgtcggccatcccgctaacggcgatgaacgacacagacattggcctggacacgtgtttccagtggccgccgccgcctaatgtgaccgtgacagtgcccgactttaggaccgggcataaaaactga

SEQ ID NO: 19725 - DNA, 201 bp, Zea mays
  Peptide Sequence Number=SeqID_61504
atggcgaacgacgaggtcgacgacgcgattgggaatcaaagccgagcgagaaaattcgcgcgcgcgactagaaggaactgggaagctatggcgctggaggaacatcacggaaaatcctcccaaaagttgaagtcaaatggagaaagaatggaggaaaaagcacttagtgtgctgttagctggtgcacaggacagtgaatag

SEQ ID NO: 19726 - DNA, 393 bp, Zea mays
  Peptide Sequence Number=SeqID_61505
atggcgcatctatggcgggcggcaaccagagagggagaattgtgtgtcaccgccgcggtgcttgcttgtggctcgcggtgttcgtcggctttaagggaaagtgtgcgtgaggaaattagtgcacgggttgccttgggtggcatggcaatacctcaccggagcccttgtcccgccgctgggccgctgtgcatcgtggacagggatcgtcgggacttaatcaccggtatcgtcgcccccatgacgttcgccctctcctccacaccatgtagcatctctttgattgggttttggggaaggggggagccagggggactgcacgccggtgatagtaccgccaccgtagggagggtggcgccgccgtcgggtgtgatagtgagaggtttagttgtgtga

SEQ ID NO: 19727 - DNA, 1083 bp, Zea mays
  Peptide Sequence Number=SeqID_61506
atggtggaggtcttcacttgtggggagccccctggtgggcttctgccttcgcaagctgttggaaattacaggagcgaggaccccgttgggacaaactcgaatgctgccctcgatcatcaggtgaacagcctgggggttgaaataactgttggaagcgacatgcccccatggcaaaagtccaggaagaagtggttcccgcaaaagcggagtgtgcggaggccaagaggagacttgctccgaagaaaactgaggccgagcagtagaaaaaaagggcaaagtctactgaggctgaggttaagttcctacgtaaggaggtggctgaattataggcacagaaggactccgccttggcggagctgtccgtgcagcggctttcgttcggagggctttgagcagagtgtgcagactaatgctcgagcggtctttgaggatttctgccgggtgtatgagttgctgggggcggccaaccatccgttggaattcgagggcgacaacctctttgaccgttggataaagtggttgcgtactgagatgcatgggcttcctgatgttatcggtctgctgatgaccttctctacccttgttactcaggagagcagttttgagtcattgatccgtgaggggtgcaaccacatggcgtgcctgtcctcggaggacttagttgtaaatttcagtgtttacagcgaggagaggacctcatacatcacggagactggggacacctctgacgcagtggtgacggaaccagcggaggccgcccctgcagaactacatgtgaatgctgctgctgcaatggagggtgttctgcatgctgccgggattgtggtaaatgtggtgcaagtggaggctgcctctatgcgtggtgagactgtccggagagccagttgtgcctgcgccaatgatcgactgcgcaatcagcgggcgacgcgtggcccgtgccaacaatcaccaggccgcaccggactgtccggtgtgctaagaggggcgtggctgcaacagtcgacttcaccagaaaaggaaggagattgcgcactattcactatccggtgtgcccacggacagaaggcaactattgccttctaa

SEQ ID NO: 19728 - DNA, 249 bp, Zea mays
  Peptide Sequence Number=SeqID_61507
atggaggtgcctgtccttcttcatcgtctctctacgaccagccgatcactagcttcacaggaggatgggaggtggtatgcaacccaggaggacgggagtggcctacaaccctacttctccaagtttgtcggcttcgtgacatcacatgcgttcatggtctacctgactaggcaatggtatgcattcctatgggtacctcttcaggctcttctctatgcatctctacaaatgcaaggttttgacttctag

SEQ ID NO: 19729 - DNA, 626 bp, Zea mays
  Peptide Sequence Number=SeqID_61508
gctatgtggttagcttcgtctcgttccacgagtgggggaccagagtgtcggtgagtcgtttcatgcgggcgcttccgcactactatgggaggctccgtgactgggggcttaacacgatcagggtcatcgttgccttccaccataggagggtgctgccgctggtggagcggtgcttgcgcctggacgagatgacgcccgaggcctccatggagagttcccgtatggcgttggccgccctttccaccaacgagctcctcaagcgaatcaaggggggcgatggggaaggcggattataccatccctgtcgtaatgcgccccgagcagggctatgtatccccgagttcccgtatggtgtgactaccctttccaccgacgagctcctcaagcggatcaagggggcgatggggaaggcggattataccatccctgtcgtgatgcgccccgagcaaggctatgtatccccgatgagtcctgaaccttttgcttctgcctttgcccttatttctttgtctcaatctgtccttctgtccatccgtaagggctatgggggtaccgaaccaacctgcctccgatcctacaagacgcggctgaccgggcagcgtcggttggctatagagcagcagtag

SEQ ID NO: 19730 - DNA, 303 bp, Zea mays
  Peptide Sequence Number=SeqID_61509
atgaagaggaagacgtggcgaactcactggtggggatttgactacgaggccggggtcagagaggggagaacggtggaggaaaggctctgggtgggtcggggcaactccagtgaggaattccagccgtggggagggggtctgaggcacgctagggcctggactggcttcagcagagcgaggggaacaccagagaccaacgcgggggcactagaccgggccaattcagccggtcaccgcgcgggcgcggcggaccgccacggtcgaactccggcgaagccgaaattgcccggcgacaaggcataa

SEQ ID NO: 19731 - DNA, 264 bp, Zea mays
  Peptide Sequence Number=SeqID_61510
atgcacgacctcctcctcgcgctggagctgcttggttgttctggttgtttgctggggcaggatggcggggtgcctggttgctctgacgcaaatattgatttcctccctgctggttgttctggtggtactgctgctgctgctgaggaaactgccactggtactactgctgctggttctgacgctgatgctggtgctagtgctgtcatgattgctctgtcgttcaagtgctggaaggtagggaaggtgtggttcatcagctggtag

SEQ ID NO: 19732 - DNA, 597 bp, Zea mays
  Peptide Sequence Number=SeqID_61511
atgaagacacccatgggaatcaatgggcatctcgacctcgacacggaaggtaaatccgtagatcaaaagcccagtggggctgggctgtcggcgccagttgccctcaccagcgcgctcctctccctctctgcctcgcgggcccacctcgtcagctcgctgaaccgtttgccccgcgttccagtttcctctcgctgcaccgtgggacccccctgtcagatccgccttccccgcgcctcgccgtggaccagcacacgcgcacacacgccgagatccccggccatgacgctcgcccacgcgccccagctcctttttgagcaccgcctgcacccacactcactcccccgtgccatttcgcacaacctcgctctctctcgcgctctgccgtcgccgctcggcctcgccggagatctgcgcccgccgtgccggtcatctagctcaccagacgccgcgccaagcaaccccgagcttcgccccaaggccgaaaagggatcacgacttgtcggtaaagtgtacaacctctgcagattgttagaaactggaggagatgctggcaacatggaggactttgagcagttccaggactatgacgagttctag

SEQ ID NO: 19733 - DNA, 660 bp, Zea mays
  Peptide Sequence Number=SeqID_61512
atggaaaccagtcagacgtccaacttggggattcatcaggagctgggaccagagatcagtcaaaatcccatgggaaatcatattaacccagaaaaggaaactaatgaaactccaggatctgaggttaaccaagagcttgtggaaatatgccagggcgcagtggtggaaactgatatgagccaagaaaatcaagctgttccagaggcaggcttagaggttaatgaagagactatggaaacatgtcaggaaacagctgcagaatctgatgttaatccagagaagcaaacttctgatccaggtgttatttaccgctgcagaaaatgccggagaatgcttgcaacacaagaatttgttgttacccatgaagtaggtgcaggtggcaaaagcttcagagcaggcaaacggtctaatgtgcatgaggatgatgagaaaccagaatgtccatgcatctttgtggagcccatgaagtggatgcaaactgtggaagaaggatatgttgcgaacaagctcttttgcatgggatgcaaagctcatctgggacagttcaactgggctggtaacatactgctatactgctatcagtaccttactgctatcagtaccactctcatagtgtccacttgggctcactttatttgcttgcacattgtatacgcttaa

SEQ ID NO: 19734 - DNA, 409 bp, Zea mays
  Peptide Sequence Number=SeqID_61513
gttctttgcaaagaagaccctctacacatgtgcggaccgtctgacccatagcgtggatcctgcagcgaggtcgcggaccgtctgcactcccatagagagcaccgtgagctggtttgttctagtgtttggtgcgagatcggcaccaacacacattttggcgacttctcttggacaagggtgtttagatctactaaaaattggtcaccatatggccatttctaaagatcacaccgatgtctccgccaccaacatcatcaagccaaccatgggcgcactcctggctaatgaccaacaaccctttgacgaccttgtgaggcgcaaggaggaagaggtgctacgacaactcgccgagtggcgcgagaagaccaaggaaaaatacctaccatacttcatggtggatcgccactag

SEQ ID NO: 19735 - DNA, 525 bp, Zea mays
  Peptide Sequence Number=SeqID_61514
atggatgtcctagtgcccgtggttcacgtgttcgacagcggcaggcacgtgttccaccgacaagctctcggtcgggaacggggaataggtcgcgacggctcagcctttatggtcgtgagatggtgcgctaggtttaagcaacagagcttcgagttccgcgaggcaattcctccatggacgggcaaggtggttggagcagcgactgacggctcgggcccaacacgcagtggctccatagaagagaacgcgcgtgccagagggctaccgcgacggtcccacgctacggtgactcaagcgagtgtggcgtgtcccggggagaccgacgttgcggggccacatgtcggcaccatgcggagggcgtgcagccgaaatggccagctgggccaaattggtgatgttaggtattacacgcttacacgcacccaagaatttggtcctctgcaaaagcctccatgcaactccaaggtgttacacgaaggctcggaggctgctctcgtgtacctgggaacctggtacccgaaatag

SEQ ID NO: 19736 - DNA, 603 bp, Zea mays
  Peptide Sequence Number=SeqID_61515
atggccctgatctctggaggtggttcctcttctaacccctcacctgctatatttgctttgtcttatttgttgtctatcacaatggagcaggtagagagcctcagggatgaggagttggtgcttgtggccagtcggttcacgcagttccacaacaatcaccagaaccggtggcatggcaggtcgaaggatggatgcttcaatatgatgaccccaaccactccattgctagtagccccaaaaagggcaagcaggaggtcaaggggaggattcgtcaaggaggcgatcaaggacaagtacctccagaaggctaagatcaaggtgtgtgccttcatcacctccctcagcgacctcgaccacaactctgatgatgaagcgtcttcctcgagcgacgaggagactgataggcgggtcgaggacaagctaaacaggttgtgcttcatcgcttacaccacagggggcctttgcaccatggcccttggtaatgaagccgtggggggcaacgaccaggacatcggcaactgctctgcttctgaggtatcacattccaccgatgatctcattgctgagataaacgtgctgacctactttggtgagttcggataa

SEQ ID NO: 19737 - DNA, 180 bp, Zea mays
  Peptide Sequence Number=SeqID_61516
atggacttgctacaggagctagagggttgcaagggcagcaccaagatctatgtggtccaccacgatgatcatcagtcaagccccgtggcatatgaggttgccattgtcggccaccagccaagctccaccctcgacacctacgaggatggcccaagtcactgcctaactgaagaagtctaa

SEQ ID NO: 19738 - DNA, 396 bp, Zea mays
  Peptide Sequence Number=SeqID_61517
atggacaacaagagcgtcgccaccgcccgcggcgtcaaggtgacctacatcgagacgcagttcgtcacctccgacgccgccggcttcaaggacctcgtgcagcggctcaccgggaggtccgctactccgccggtgccgcacaggccgcgcccgtgccgacgagactacgactacggccgccggggcacggccgccgccggagctgatgctgggcaaggctaccgttacgcggtggcgcagacgcgcccgccggccgttattaccagccgcacgccatcgtacctgcacgaggacggtatgggcggcctgctgcacgacatcgacatgtgcgacttctccgacttcttctacgtcggtgccagccatcggagcgacggcggcggtttcccatattga

SEQ ID NO: 19739 - DNA, 603 bp, Zea mays
  Peptide Sequence Number=SeqID_61518
atggaaaccagtcagacggccaacttggggattcatcaggagctgggaccagagatcagtcaaaatcccatgggaaatcatgttaacccagaaaaggaaactaatgaaattccaggatctgaggttaaccaagagcttgtggaaatatgccagggcgcagtggtggaaactgatacgatccaagaaaatcaagctgttccagaggcaggcttagaggttaatgaagagactgtggaaacatgccaggaaacagctgcagaatctgatgttaacctagagaagcaaacttctgatccaggtgttatttaccgctgcagaaaatgccggagaatgcttgcaacacaagaatttgttgttacccatgaagtaggtgcaggtggcaaaagcttcagagcaggcaaacggtctaatgtgcatgaggatgatgagaaaccagaatgtccatgcatcttcgtggagcccatgaagtggatgcaaactgtggaagaaggatatgttgcgaaaaagctcttttgcatgggatgtaaagctcgtctgggacagttcaattgggctgatgttctagaagtgacacaccctaaaggtgaatgtcctagtgcaaat

SEQ ID NO: 19740 - DNA, 1272 bp, Zea mays
  Peptide Sequence Number=SeqID_61519
atggcggcgtggctcgccgtgctcttctacctgctcgccgacacggtcgcggtctacttctgctccagcctcgagggcctcgcgcgcctgctccgtctcccgccggccatcgccggggccacgctcctctcgctcgggaacgggacggccgccgccgtggggctcagcggcgtgctcggtggcgccatgttcgtctcctcggccgtgctcggggtcatcgccatccgcctcggcggccaggaggtcgccgtccaccgcgccagcttcttccgggacgcagccttcctcttcctggcgctcgtcgccgtggccgtcgtcgtcgccgcgggccaggtcacaatctgggccgccgccgggttcgcctcgctctacctcgtctacgtcctcgccgtcgccttcaccccggaccgctggaccagacgccacgacgcgcacgcggtggatgaccccgcctccgccgctgccgtctcggagctccacaacgtcacggagaccaagttctacaccgaccaggaagcccgagatccactgctccccgacaccgcaccgctacttcaatactacgccggcgaagcaaacagcaacagcaacgacggctccactggcaacaagagcgtcttctggaccgtccttcgcctgctagagcttcccctgagtctccccgcggcggctgacgattccggacgcgagcaaagagcggtggagcaagacggccgcggtgaccgcggccacgctcgcccccatcttcctgtccttgctctggagccaccgcgccacggggggcccgttcgttaccgtcctcctcggcggccttgctggtctcgcgctgggcctcattgccttcctcaccacggatcccttcgccccaccaacccgattcctcggcgcgtggctcgccggcgggttcgccatgagcgtggcgtgggcgtacgtgatcgccaacgaggtcctgtcgctgctggtctcggcgggaatcatcctttccgtggactcggcggcgctgggggtgaccgtgctcgcctggggaaactccatcagcgacctaatagcgaacgtggcggtggcatctcgcggcggcggcgcgcaggtggccgtgtccggctgctacggcgggccggtgttcaacgttctcgtgggcctgggcctgtccatgctgttagcgtgctggagcgggtacccgcagccagtggagatacccagggagcgtgggctttaccgaactctggcttttgttgtcgctgggcttttgtgggccgttgtgatgctacctag

SEQ ID NO: 19741 - DNA, 372 bp, Zea mays
  Peptide Sequence Number=SeqID_61520
atggcccccctaagggaggaatattctagggataatgacacgctgaacaacactgttgccctaatccgttgtgttgctaaacatcaaagcattcctattttctattgcttggtcccacctgaccacgtgttagtcgggctcaacatttggcacccaccgttcgtgcttcgacaaaccattcccgcgatggctcccaagaaagcaaatttgaaggctaccacctccctggacgacgcggcaaaggcggtccttcttgctgagaagaagggcaaagcaacccttgttggtgatgtccctcatgaggccctcgaggatggagcagtccacaccgaaggcaccgtttgcacgtgcagctccgaaggactaccatag

SEQ ID NO: 19742 - DNA, 555 bp, Zea mays
  Peptide Sequence Number=SeqID_61521
atggccccatcgaccccgcttgcgcctcgtgcggccccgtcgaccacgcctgagccacacacgtctctatcgaaccttcccacgccatgcgcagccccgtcgataagtgcggcccacttcggcgaccccgccctcatctaccaccgccgcaagcgggccactccctcggctcatgctgaccaagcctcgtcaacgagcatgactcgcttcaccaaccccaaccttgtctaccattgccgtgagcgggccactcccgtgtctcccgacacctcgtcgatccgcatcgaggctcccgtttaccaaccgatcgccatcgaccgtaattccgggcatgtctacctgatggtgactctttgcacagcaggcgttctccaccctgtcgaccgactgatccttgcaactaacaagacaaccactccttcgaatgcctactcggtcctctccttcgtttgtgcctcattggcatcatgctatggagaaggagtacgcggccctgttggccaaccacacttcggacctagtgccgcgtctactcagcaccaacatagtcactag

SEQ ID NO: 19743 - DNA, 216 bp, Zea mays
  Peptide Sequence Number=SeqID_61522
atgcctcggtgggaattacatgctccaccacctccacctcagggatccggggttatgagccacaacatgccaccaccggtgataccaacactacgaggagcttctggaggggaaggagctactacaggagagactccaaaccagataaacgacttcgttaacgacttcttcgcttctggaggtagtggtcacaactcaaatgacccctatatgtga

SEQ ID NO: 19744 - DNA, 1569 bp, Zea mays
  Peptide Sequence Number=SeqID_61523
atggaggattctgtacaagttgcatgtgtaatatcaaatgctacagatgctgcatttcagatttactccttgaggcgatcggcgtatgctgctgtgctgagagcattctgtgctcagtcagacgttctctcaatggtcaagattctatctgaactaaaaaatgaacttagaatatcgcatggtgaatataaagaaattcttatgaaagccagtgtaaatgagcatatcaagtctttgaggaaatttagtttggcaaagctatctgttgttacaaagaacgatcctgcttttgatgtgcatgctatgcttcatgacaagattggctcaactggtgaggtttgcacttcatccacaagctgcctcagtttgatacagcaatcaccaatatcagagaattcaatgtcctccacaagagacattgggttatcagatagctctaatggagccaaagaaggacctaattttgaatcccgcacagtggtgtctgctaaaaggttgaaaactgtgaatgggcatgcaccagcgtacttaaaatgtggcccttccaatcagttacctgtggaagtttgtgcgatgatggtgaacggttgcactgctgatacacttgattgtgagacgttatgctgtcaagtgaagtctggatgcgtttcatctcccatttttcaagaaaagcacagccgattgaatgctggtcaaagttctttaagtgttgaccatgctaggaaagaatcagagaaaatgaaatctgaagcgcctgagatgagtgtatctgagagtctgggtgttgtggacaggaagtatgagattgagtaccagaaggctaagaataaggactcagatttagaacatggttctgaaataattaagctttgcctaactgctagccttctaaataaggttgaaaggatatttaaagaaaatccagattcagctaatttagagaaagcaaaactgacacttaaagaccaagaaaaggaccttttggatgcacttgctaagctttctgaagtagcatatgatgttgtttatttcggtgctgaccacaaccatcggccggtcaacctcaaaaagcacgacgatggcaagagcaccgaggcggtgctgccgaagcttgtgagttcaagcgacgagacgtcgcctgagactagactgggagactgtggaacagaaaacaaggtaaagatcctaatggccgtggggccggcctccgcgccgctggcggcgccacgcaagaagcgggtctggaccaaactcacggcagaacagaaggagcggatgctggagttcgcgcagcgttttaggtggcgcgtccataaggccggcgcggaagctgtcgacgccttctgcgcccaaatcggcgtcacccagcgcgtctttaagaactggattaacaacaacaggcacctcgccaagatcccaccctcggccctgccgtcgcaccaccaagaccacccggccgccacagcgcaggggtcgatgactgaagaaggcaagtctcttgaagctgaagttgatgtatctgctgatggcggtaaggatggcgagaatgaagtttctgatccgatctga

SEQ ID NO: 19745 - DNA, 357 bp, Zea mays
  Peptide Sequence Number=SeqID_61524
atgggtcactggagaagatctcttcccggatgggtccgctatgcggtgcaagatgccttcctgatctgcaatgcaagagatggatccgaagcggaaggtctctccagcatcgaaggtgatcaaggtgttgaagatgatggccatagagtcgttgtagatcaacatcggacccccttcctggcgcgccagctgaaggttacaagtgagctttgcgactgctcagttgctatcgatgaggacgggcttgcagccctacatattcggggtcttgatcgccttctcgtccgagttatcgccgaatgcttagctcctcgggtgcttacaactgcaccacccgagatatcagtgcttcggtag

SEQ ID NO: 19746 - DNA, 258 bp, Zea mays
  Peptide Sequence Number=SeqID_61525
atggggagaggagtaggacgactcacctgtgcctacacacgactcgagctcttctggtcgtggatcgagggggttgtggctggtgcggagccgcatggttgttgttccctcgcatcgtgccgggggatgtggcggatgtggatctggagccgctcggtcatggctcccgagcataacgccgaggccgaagaaggcggggggtgcggcgtcaatgatgggtctggggaggcgctgaggacgcgagaagggcggcagtag

SEQ ID NO: 19747 - DNA, 219 bp, Zea mays
  Peptide Sequence Number=SeqID_61526
atgtcgaggcgcgcaaccctcgttgtgcagacacttccctacatcgtgaccttggtgctcacctccaactctagcaccaggccagtcctccgtggcctcttcgtgcaccgtgacgcgctaccgctgctcaactacgacaacgaccaaagcatctttgacttcaatatgctcctgcttatctgcggcgatggtggcagagggtgggatggttctgggtga

SEQ ID NO: 19748 - DNA, 543 bp, Zea mays
  Peptide Sequence Number=SeqID_61527
atggaggaagtggacaccctcctgtgtaaccacgtcgccttcatcgcggagattcacaagcgtctttttcaggcctaccaccgggcctgtcaatgccccgcggcggcggcgacgacgtggccgccgcgctttagctatgccgacgtgggtcgtctgggtggaagggagctgggtgaccgctcgcttttgactgtgacgggatctctttcctctcaggctcaggctcaagacgcgctcgctcgccgcgccttatcgggcagcagcaaatccacttgggcgggcggcacatgcgtcggcgtcgtgcgggggaagctcacgctcatggagccacctgccatcgactgcaaagagctaaagacaaggcatgggcgcgtggcctcacaaaagagcatccaatgcaacgcacacgcacttacgaggccgagagctgctgctggtggttttgccgatgcgggtcttcaagttgtgcgcacgtgcatgctggtagctaccatcggtcactcggaagcaagtgcagaggtcgttgagggcttgaggcaataa

SEQ ID NO: 19749 - DNA, 999 bp, Zea mays
  Peptide Sequence Number=SeqID_61528
aaggagaaggaaaataaactagggtttagccggggccacacggcaggctccacggcgtggttatgtccgcctttattctccccccactcgtctgcttcgcctccacctatccgccgcctcccaatcatcctgcccccaaactcccaccccgcagcatccccacgccaccacacctcgtcgcgtcgcgtcgtcaccggcgtgaagatggtcgggccaggcctctacaccgagatcggcaagaagaccagggatctgctgtacaaggactaccagactgaccacaagttcaccctcactacctacacctccaatggcgtcgctgtaactgcttctagcacaaagaaagctgacctgatccttggcgagatccaatcacagataaagaacaagaacatgaccatagatgtgaaagcaaactcggagtcaaatatcattacgacaattactgttgatgagattgcaacaccagggctgaagaccatcttaagctttgctgttcctgatcagagatctggaaaggttgagctccagtatttgcatgattatgctggagttaatgcaagcatcggtctgacagccaatcctgtagtcaacctctctgctgcctttggtactaaggctgttgcagttggtgccgatatctcacttgatactgcaactgggaacttgactaaatacaatgctgcactgaggaacaacaagggagacagccttactggagcctactatcacaaggtgagcgaattgaccaacacagctgttggggcagagcttacccacagcttctcgaccaatgaaaacaccctcacctttggcgggcagcacgccctggacccactaaccgtcttgaaggcccgcattaacaactctggcaaggccagtgccctgatccagcacgagtggaggccaaagtcgctggtcaccatctcggccgaggtcgacacaaagaccatcgagaagagctcgaaggttgggattgctgtggccctcaagccctga

SEQ ID NO: 19750 - DNA, 345 bp, Zea mays
  Peptide Sequence Number=SeqID_61529
atgcccaaccccaagctcggtgctgcgagtcaccctcaatttccctttctctttggcctcttccttgaacacaccttctgccgggtgcccgggtcggccgatggatcttgggccgctaggatgtcgtgctccatgggccatgagccgagttgtggggctgagctagagaagttgcatcatcgcctgggccatcttctggactacgtcagggctcgcgacacctccctaattgagcacgtagacaacgctccataccgtattcgagacaccgccgacttctgcgtttatcggggagccatagtggcgctgcttatgggggatatatgctctggctgtcgcctctag

SEQ ID NO: 19751 - DNA, 684 bp, Zea mays
  Peptide Sequence Number=SeqID_61530
atggccgggaagaagcgcaaggcggaggcggcacgcctggaggagacggaccgggcgctctacggggccttccggggcgccgccaactcgctctcgcagctctacacgctcggcatgggcgcgcagaaggcctccttccacgccggcgaacgtcacgccatgccttttcctttctgggtggaagcggctgtgggcgtctcactttgtgctttgcaacttgcaaggctcagattagccttggttaggttcagagggatggaaaaactttatgaatggatcctgaggcagcacgaaaatggtttgaggctaacagttgctgatgtagcctcccatatccagcatgagattcagtatggaggtgacaatgcatcagcctctccaaggtcacaataccctagccaaagcactgcaccgacaatgcacattcccaacacaagcaaccagcaaccatcgccaagcttatttgcttcaggaaaccctgggttgacacagtccaagaattccatggtcttttcaagcgcattatccagccccatccggcggagcctgcaaccttaccacctagagcaggacggggatgcagggtacttcgcgaacggtgcaagccgcgatgtgaaccccacggcttcgaatgattcgtccatggacatgcactcggacagcccagctcatgactcctactga

SEQ ID NO: 19752 - DNA, 612 bp, Zea mays
  Peptide Sequence Number=SeqID_61531
atggacccagcccctgccgctgtgcccgcggaccgcggatgcacccagctcccgccgacggatctcgcccacaaccgcgcacgcacgcgcatgaacccagcccccgccgccgtgcctgcggaaatcgcctccctcaaccgcgcatggacccaaccaccgaggcacgcccacagcgccctcgcgctacgcgacgccggttctccgcgcgcgctgtcgaggttctcgacctcctcgctaggtgccgggaggggcggcaggagctgtgcagggtccccagcgtcgtatccgtgcgcgtgcaatcgagcgggccctcctcgtcctcaacttgatttgttgggtgttggccttattgtacgaagggtccatcacctcagccagaagcttcccagaactgaatcgggcacagctattgtacctgaaagagattacaaatctgccagtttaaaaaagagagaggagtttgtggcgcactcatccaatgttaactgcctcaagatctctagggacgtcggctgctacaaggtcatcctcgactgcacccctgagctgggtgcctactatgccaagtgcggattcgtggagaagggtgtccagatggttgtctacttctga

SEQ ID NO: 19753 - DNA, 648 bp, Zea mays
  Peptide Sequence Number=SeqID_61532
atggggcctatcaaagttttgaaaggagtacaaagggtcatgggatgccttgtggctctgagccgcttcatctcgcgcctcggcgacaaaggcctacccttgtaccgcctcttaaggaagaccgagtgcctcacttggaccctcgaggctgaggaagccctcagaaacttaaaggcgctccttacaaacgcgcccatcttggtgccccccgctgcgggagaagccctcttgatctacgtagccgcaaccactcaggtggtcagcgccgcgatcgtagtcgagagacgagaagaagggcatgcactactcgtccagaggccggtctacttcatgagtgaagtggtatctgagaccaagatccgctacccgcaaattcagaagctactgtacatagtaattctgacgcggcgaaagttgcgacactacttcgagtctcatccggtgactgtggtgtcatccttccccctgggggagatcatccagtgccgagaggcctcgggtaggatagcaaagtgggcggtggagatcatgggcgagacaatctcgttcgctcctcggaaggccatcaagtcccaagtcttggcggacttcgtggctgaatgggtcgacacccaactgccaacgactccgatccaaccggaactctag

SEQ ID NO: 19754 - DNA, 261 bp, Zea mays
  Peptide Sequence Number=SeqID_61533
atgaaggtgcacttgatgtatcactgtgggcctaatgctaaacgcacagaagctcaggctaagcagcagagcaagaggaagtgggacagcagcaaggaaaaggtgaaggagaagaggagggttcataagaagggtgatgaggcgaataaggattttcaggaattggctgatgaactgggcagacagttaaggggccaatctcctctgcattctatgcggtgggagcgtgttatcctggatgaggttgtttctgctgcttag

SEQ ID NO: 19755 - DNA, 234 bp, Zea mays
  Peptide Sequence Number=SeqID_61534
atgtcatacttcaagaccctcaagcattctagttttttctccaaaaataaatcgcactctcccatgctgaaccagcggccattagaatcaaaagtctctgtaaaagactgcaacttcgtcagcaagttctggagccagtatattcccttgtctagaaaatccttaggccctatcagacgctacgtcggcctggacatcacaaataacatgaaattcacatttggtagcgaatag

SEQ ID NO: 19756 - DNA, 438 bp, Zea mays
  Peptide Sequence Number=SeqID_61535
atgtaccctatcgcgcggatgcgcagctcccgcaccttcgtgtacgcctctcatcgcttggcttggaccgccgtgtcgtacacccctgccggacaccgcatcgtccgctcctcgaggacccgccgcgcgtcgccgcgggcgccgagcttgaggtacagcctgtatgagcgcggcctgctcctccggctcgagttgttcggcgctgcctcgtttgagcatttggtcgagcaagctaacggcaccctccgggttgcaatgaaaactgaggccatgacatggacgacaggggcacgggatgctccgatgctccagagcggcggggccggctctggggacgatggcagccaggccgggccggtggtggctgggggcgggggtggcgctggtgtctggttgactggagaaagttggaaccggagagagcacggggcaaaatag

SEQ ID NO: 19757 - DNA, 1080 bp, Zea mays
  Peptide Sequence Number=SeqID_61536
atgataggcatccacccgttgcaatccggggtagcatccgcgcgcggccccaacaacggcgacgggctcttggaaggcgagagaggaaggaagaagtacatggagcgcggtttcaattcccctaaaggcctaaacaaagcgacagcacatgccagcgcgacgcgggcggctgcaatgggaggtagcggaacgctgatctcggtgtaccccgatgagctcaccttcctgtttgagctggagaagccgtgctattgcaatctcaaggtggtgaacaacagcgagcaccacgtcgcattcaaggtcaaaacgacatcaccgaggaagtattttgtccggccgaacgcgagcatcgtccagccatgggattcttgcacaataacgatgtttgtgcgtctccacgccttcctatctgggggtacagttacgctgcaggcacagaaagagtacccaccagatatgcaatgcaaggacaagttcttgattcagagcaccaaggtggctgccagcaccgacatggatgagatcccccctgatacgttcaacaaggaaaccgacaaggtaatcgaggaaatgaagctcagggttgtttacacgttacctagtggtggaggttcagatgactctagcgtatcgtctttaggaagccggagcttcaaagcagcgtctgacgatctgatgatgctgaagaatgcaagcatcgaagagatccagacaattcagcgggtgaaggaagaaagagataacatgcttcagcaaaaccagcaaatgcaacgtgaattggtattcccagattttactcggatcgtattgacgtttgtacttgggctcatcttcttttttatgaacatctactgtttcaggatgtgcttcggaggcgtaggagccgcaaagatctttgatctttccacccgtgcttggttcatcctccatttgtatttgcccctcgttttcttattctttctgtataagttcaagagttggtctgacccccttattaggcgtcctccaacaacttacacaaatttagagaggcaccctggagctgaagctgatgcagtcgagtccaaggtcgaggaataa

SEQ ID NO: 19758 - DNA, 399 bp, Zea mays
  Peptide Sequence Number=SeqID_61537
atggaccggtggaccggcgtcgtctacgtcccactctccagaggcggacccctcttccgcgtcgctgcctcgctcctcctctcgccagccaaaacgctcgccgttccacgagtcaacgcgatccttttcacgggcgaccgcgtccgcggcacgggcgatccggtgatcgagcggctctctgacgccgcccacctggctggggtcctcgccgggaagctccctggggaggccaacgcgtgggtggtcgacgccgcgcgctttgctgggccgtttgcggtgtaccgagagctcgttccgaccgtcgacgccgctggagaccccaaggggtatgaccccactggcttccccgccgccgccggtgttgccaacatccttgcacgcagcattggtgaggtatag

SEQ ID NO: 19759 - DNA, 438 bp, Zea mays
  Peptide Sequence Number=SeqID_61538
atgggcaagagcaagaaaggtagcagttcttcacaccattctggcgacaaacgcaagcgcgagccgactcctccatcagaggacttcggcgactcagagtactcggaggaggagttctcctccgagtctgagggatctccagctccggtccctcccccggcgtcgtctgatgattcagacgactcccaggggattgccgcggaggtctggacctatatccgggccgtcgagtgcgccgggctcgagggctcggatgagtcggagtactcctcggactcgtccgaggagggcagcggcggtgatggtggtgatgacgacgacggaggcgacggcgatggtggcggcgatagcggcaggggcggtgacggcggcagcaagggcggcaacggcggcggcagcaagggcagcagcaagggcagcaacaaggccagtggctag

SEQ ID NO: 19760 - DNA, 804 bp, Zea mays
  Peptide Sequence Number=SeqID_61539
atggggaagcggtggatcccgctggaggccaacccggacgtcctgaaccagggtttcgtttcgctctcgctgattgctgccgcggagttggggtatatacagttcatatgggggctgggagtccacgaggaggatgtgcagttctgcgacgtctacggccttgacgatgagctgctcgctatggtgccccagcccgttctcgccgtcctcttcctctacccgctcacctccctggacgaggagaaagaagaatcaagtgtttctgctgccacatcgacctcagcgggcaaggaattgagcaagaaagtatactttacgaagcagactgttggtaatgcttgtggaacagttggtgttattcatgcaataggaaatgcaacatctcaaatcaagctagttgaggggtcctattttgagaagttctataagcaaacggctgatatggatccagctcagcgtgctgcctttctcgaggaagatgatgagatggaagatgcacattctgttgctgcatctgctggtgacactgatgttaatgtggatgttaatgaacattttgtatgtttctcctgtgttgatggtgaactttatgagcttgatggacgaaaatcacaacccacatcccatggcccttcatcacctgaaaccttgttgcagtattggagagctgctggagattctcttgcttccaatatggtagtttttataggatatgggaaggatgctgcaaaagtcatcaaagctagaattgcagagaaccctaactcgatgaacttcaacgtcatggctctttcaaagaagtga

SEQ ID NO: 19761 - DNA, 639 bp, Zea mays
  Peptide Sequence Number=SeqID_61540
atggacaccaagccttttcttttgtgcctcctgcgcttctcgtgtgccggcggtgccgtcgcttgcctccccgcgtggaccgtcctaagagaagagacgctgccgtgtctccgtcgcaccgaagcaaacgcggggccaacggccaccaaggcctccgcgagggcgaggacagcgatgacccacgcgggacgcgcacgcggctttcgctccgcagctctcgacgactaccttttcaaacttctgcttattggtgattctggtgttgggaaatcatgcttgcttctcagatttgcagacgattcttatttggacagctatatcagcacaattggggttgatttcaaaattctcacagtggagcaagatgggaagaccataaaacttcaaatttgggatactgctgggcaagagcgcttcaggacaatcactagcagctactaccgcggagctcatggaatcattattgtatatgacgtgacagaccaagaaagcttcaataatgtgaagcaatggttgaacgagatagaccgttatgcaagtgataatgttaacaagctccttgttgggaacaagagtgaccttactgccaacaaagttgtggcaactgagacagcaaagctaactcatccgattccatga

SEQ ID NO: 19762 - DNA, 1206 bp, Zea mays
  Peptide Sequence Number=SeqID_61541
atggagccgcccgccgccgccgccgccgactcctcgcccgatccgacgccgcaggaccagtttcctgccccgtccccttctccctccgcctccccggccaagcgctccgcctggaagcacccctcccccaacggccccgccgtcatggatgccaaccactggcccgcgctctccgacgccgccaagggcatcaagctcccagactcctcgtcttcctcgcctgcgcccgtcgccgccccatcggccgttgccaattcctccagttcgcaaaagcacggcgcccatcacgtccgccacaagtccgccaggcgtggcggcggcggggagcactctccacgagaccatcctgaccggaccacagccacgggttgggaccacgccggcggcggtgggggtaggggtgcccagaggaaccataataacggaggcggcaggagaggcaacgccgccgctgcctctgccgccggaccttctcaccatggtgccggtggcagcggcggaggtggaggctttggtgccaggcgaagaggggcctacgagccgcccttctatcgtggccctccaccaccagtgggcatgggccactacatgcgaggtgccccaccaccaccacctcctccgccgcccatgaccgtcgctccaccgttcatgggcccgccaccgccgccagtctcacccatgcgccccttcgctggaccaatggtgttccatgacatgtcatctcctgtatcccccatatacttttatgggccaccaccaccagaggctcttaggggactggctattgcgcctcctatggttggtccacctgcttatccttacttccaagcgcagcctgagccacagcctgagcctcagcctgatgctgagcctgacgtagaagaggaacgtgtcaagctgctcaagcagatagagttctacttcagcaaggagaacctgtgctcagatgtttacttgaggcagcagatggatgatcaaggctgggttgatatatctcttatagctggcttcaaaaagatatttgttcttttgaattatgaaccagcacagcctatgatgtatagagtgtttgcattgcttgatttggttttcttgtgtgtagaaaaggtccaagggctaaagaaggacctgcaatatataaaagagacggtgcagtcctcatctattctggaaatgaaggccgcggtgtctgttaatgcaggataa

SEQ ID NO: 19763 - DNA, 1515 bp, Zea mays
  Peptide Sequence Number=SeqID_61542
atggcgaactgtggaagaactggactcggtgattggctggctagtccgctggtagcacagccagggcagggcatatggcggatggatatggtcgcatggcaaccccacgtggcactcgtctccaaacttcaggagcagtgcttccgtctcctcctccccatccccatcccgcaccacagatactattgtccctgggcactggcagagctcatccgctaccatctggcagcagttccaatgatacatgacaccagcagcagcagagcatccacggcgtgccactactcgccgtcgcttgtggcagaggagcagcttcacggctccaaagacaccttgaccttgaagggcgagaaggctttgctcgagttgcttctaggcatggctctggaccagcacgttgacggcaggaagctcattacccaacaggaggctgaggatagtgatttcgagagctatttgagagaagcaacaagccgagtgctttaccagccaacattcattgaagaggatgatgatgatgattctgtttcggagagctcttcagcatcattggccaaaccagctggaacattggatcttggcaagctgacagaggaaccacagttggatgtaccacagcctcaccgccgaagtatatacatatattttgcacagaatcttatgaagctggagggggctcagcgtaacctgcaagctcagtgtggtcgtgaaccaacagttgaagagtgggctcaagccgtaggaatgagctgcagggagctgcaatcctgtgtgcgcaccggaagacggtgccgagagaagatggcccgctccaacttccgccttgtgatacatgttgctaggaaatatgaaggatgtggccttgacattcaggacctggttcaggatggatgctgtgggttgatgaaaacctttgagaagttcaacccgagcaagggatgcagattcccgacctacgcgtactggtggatacgccagtcgatcaaaaagtccatcttcaagaattcaagactaatccggttgccggagagtgtgtatgcacttttgaggaaggtgggcaaagcgaggatggaatgcataatggacggggagcagccgacgaacgaggtggtggcaaggcgtgctggcatcacgattgaaaagctggcgaaactgagagcgaaaaccaggaaagtacggtccatgcaggatcgagtctggtcagacgacggtgtgacataccaggagatcaccgaggaccccaacattgaaggtcctgaggtgagcgtggacaggctgatgatgcggcagcaggtgcgcagcttcctgacggggatcctgagcccccgggagaaggagatcatcgagcaccggttcggcatccacgacggccagcccaagaccctgcatgtcatcggcgacatgtacggcctgtccaaggagaggatccgccaggtgcagaacaaggccctggacaagctcagaaacagcatctcagcacagggcttccacgtctactttgatttgctaacttaa

SEQ ID NO: 19764 - DNA, 219 bp, Zea mays
  Peptide Sequence Number=SeqID_61543
atggcttcgcccacgcgccgtgcatgtagaaccaggttggtggtgtacggtttggttgatctcaaggttaaaggagatggcaactgccagtttcgagcgctgtcagatcaattttaccgaactcctgaacatcacagatttgtccggcagcaagtggtgaagcagagttgccggttttggagtttgacaacaaaaggaaaagggtggtggcccttctag

SEQ ID NO: 19765 - DNA, 1173 bp, Zea mays
  Peptide Sequence Number=SeqID_61544
atggacagtgtttacagtggaccagggggatatctgtcccccacaccctcggctcagcccgaggcaccctcggcccccgagggtgaggcactgcgcgtcgaggaagagcggaatgggtcccgcctaatcgagactggcagaccccgtacctgcaatatctccatcgaggagagttgcccctcgaccgagccgaagctcggcgactggcgcggcgcgccaagtcgttcgtcttgctgggggacgagaaggagctctaccaccgcagcccctcaggcatcctccagcaatgcatatccatcaccgaagggtttttactggccaaccgcggtggccgatgccactaggatcgtacgcacctgccaagggtgtcaattctacgcgaagcagacccacctgcccgctcaggctctgcagacaatacccatcacctggtcgtttgttgtgtggggtctggacctcatcggtcccttgcagaaggcacccgggggctacacgcacctgttggtcgccatcgacaaattctccaagtggatcgaggtccgacccctaaacagcatcaggtccgaacatgcggtggcgttcttcaccaacatcatccatcgcttcggggtcccgaactccatcatcaccgacaatggcacccagttcaccggtagaaagttcctggacttctgcgaggatcaccacatccgggtggactgggccgccgtagctcaccccatgacgaatgggcaagtagagcgtgccaacggcatgattctgcaagggctcaagtcgcggatctacaacgacctcaacaagttcggcaagcgatggatgaaggaactcccctcggtggtctggagtctgaggacaacgccgagccgagccacgggcttcacgccgttctttctagtctatggggccgaggccatcttgcccacagacttagaatacggttccccgaggacgggggcgtacgacgaccaaagcaatcgaaccaaccgagaagactcactggaccagctggaaaaggctcgggacatggccctactacactcggcacggtatcagcagtccctgcgacgctaccacgcccgaggggttcggtcccgagacctccaggtgggcgacttggtgcttcggctgcgacaagacgcccgagggcgccacaagctcacgcctccctggtaa

SEQ ID NO: 19766 - DNA, 138 bp, Zea mays
  Peptide Sequence Number=SeqID_61545
atgggccctcaagcaggaaactttggtgccttagcgactgccaagatcagtgcagatgcctctctcgccggtggcataatcggcaaggacggggatctcatcacgaccatcagtggagaggttgaggcggtggtctag

SEQ ID NO: 19767 - DNA, 282 bp, Zea mays
  Peptide Sequence Number=SeqID_61546
atggacgctctaaaatttgagtaccctaactatgagcggatcaacaagggtgccaaaggggcaaaaagaaagaggattgttagcgttctaagcagacaagctgtcgggatggtaaaggaggatgagaaggttttaaagaagagaaaatccactcctgagccaaaggtagcggctttgaagaaaagaaaagctgcaactccagagccgaaggtgactgaggttgaagaggaaactccttcaacacctcctgctgccgaagtagaagagattttaaaggtgtag

SEQ ID NO: 19768 - DNA, 297 bp, Zea mays
  Peptide Sequence Number=SeqID_61547
atgggcgactgcgagctcggaccagagaaggctcgcgccatggctggagccgagggcaggggcgctggccttagtgctccttgcacgcaggggaaacagcagggaaagagaagctcggctagggagggagcatggagggggagccggctgaagcaggggtggcgctgggaagaaagggaggacgccgtggctgctggccgatcctccctgctgttggcaatttgtctgtacacagaacagagcgaaagaggtttcggcgaacggacgattgagcaattaattcagccgagagtctaa

SEQ ID NO: 19769 - DNA, 231 bp, Zea mays
  Peptide Sequence Number=SeqID_61548
atggagagtcatgatctccgggcagaatgggaatcacgacttgtgggtaaagtgtgcaacctctgcagagtgttagaaactggtatatcagccgagctcacacttaagagcggccttgggatcctctctgattacaagaactttggatacttttatgatgatggaggagatgctggcaacatggaggactttgaggagttccaggactatgacgagttccagttatcttag

SEQ ID NO: 19770 - DNA, 411 bp, Zea mays
  Peptide Sequence Number=SeqID_61549
atgggggagggggtgagggcgagtggggttcggggctcaagtggccaggggcgaggtgttcgagtgcagcacttaatattacataactgggaggcaaaataccctctaaccaacaaacttggtgatcttcctcctgctttagcaccaccttggagcagaaacaacaaaactcggttgtttcatcacctacaacaacatgggttcaaaaaccctgagtacagagtgtactttcgcaagtcttacccatctaaggaaaaatactctcaaggatatgctggcttttgggaatcaaggtggttccgggtccgttccacaaatgtcaaagtagatgttgttctcaaccggtggattctcaacttgcgggacaacttcttcttcaactacagtctcttcctcgttttctatacataa

SEQ ID NO: 19771 - DNA, 216 bp, Zea mays
  Peptide Sequence Number=SeqID_61550
atggagactttgttgagtatcacggtggcactcggcaaagtctttgtcaccgtcacttggcaccatgacggcgacttttctctgtcgactgcccgacaaaaagtactcagcaaagaattcattgccgatgtacagttcgctgagacttctttgctgagtggttttgaggctttgccgagtgcttcaggcactcgccaaatcagttgtgtccggtag

SEQ ID NO: 19772 - DNA, 246 bp, Zea mays
  Peptide Sequence Number=SeqID_61551
atggcgcggctgtggcgcgcgacccggcctcggcccctgcccagcgcggcgcgccctcccctgcgcagcgcgacctcgcccgcccgtgcagccccggtccccggcgtggccacgacggtggcaatgggactgatggttcttggttctgactctggtaatggttgtccgcattgcaaccactgctcaggagaagatgaagccgtggaaggagacttccaggagttccaagactacgacgagttctag

SEQ ID NO: 19773 - DNA, 510 bp, Zea mays
  Peptide Sequence Number=SeqID_61552
atggcgcggcgtcccggtgctgcccccgccccgcccgacgaactccccccctcgcccccgcccagcggcgctcgacccggccgtggcagcgtcccggcgcggcccggccttgcccccgcctggcgcgctccgctccccgcgaccggcggcgctcggcccccggcgaggcccggcctcgcccgcccatggcgaacccggcctttggcttgccggcctcaccccacccgtccccgctccctccccggcttgggcgtggcccagccatggctgcccgcccgcggctcgccggccaaggcgcggctgtggcgcgcgacccggcctcggcccctgcccagcgcggcgcgccctcccctgcgcaacgcgacctcgcccgcccgcgcagccccggtccccggcgtggccacgacggtggcaatgggactgatggttcttggttgtgactctggtaatggagaagatgaagccgtggaaggagacttccaggagttccaagactacgacgagttctag

SEQ ID NO: 19774 - DNA, 816 bp, Zea mays
  Peptide Sequence Number=SeqID_61553
atggagttcatcaattggagtcctccacaaatctgggggattgacgcgaacgtaccctgggctcggacggcgcatctgcgtgggcgtcctctggtcgctgtcgacaacgggcggacggggagccccccgcacccaacggttgtggtgacggtggatgtcatcgccggccggtgcccgcccgccgatcttgaagaaggcggtggtggtcccagtgatttgggcggaagggaacggagcgagggggagctggagaccgttcgatcgcgcttcgacggtcccgtgcagctctccaatccgctatgcaacgagaagtttccagatgagagcaatctcgcgccgaccgcccacatcttctcggcaatactctctaccacgtcctttcaaactccatcctttaacacggcgggcgccttctctacgagctccttggcctccttcagacccagatccttgaacggaggaggtaggcgcgctcttggacgaggacgtggcgaggtatgccacggcgggcctggttgccatgagcatatggtcgacgccgaggcagccgctcaggcatctagggaagaggcctcaaggacgtacggtgagcccgcaggtctcgtcaacaagcatagagccgtgtgggatcgggttgatggcggtggaggaggaagcatcatcctttatgtggaggaggtaggcgctgctggcggtggcggcacgtctgcacgcgccgtggctcttggcggattcgtgggcgttggcgtgtgcctggacgaggacacggcgaggtgtgtggcgacgacgcaggtcgtcgggaacagcagcacctaa

SEQ ID NO: 19775 - DNA, 342 bp, Zea mays
  Peptide Sequence Number=SeqID_61554
atgacatccaccgtcaccacaaccgttgggtgcggggggctccccgtccgcccgttgtcgacagcgaccagaggacgcccacgcagatgcgccgtccgagcccaggccgcgggagcggatgcctccaatgataagtcagtggaggtcatgcgcaagttctccgagcagtacgcccgccgctccaacactttcttctgcgccgacaagacagtcactgccgtcgtcatcaagcattgtgggtatgacctacaccttgtttgcagggacttgctgatcacagggatactcttggagctcctctatgcccttgtaggcattatgatgacaaagctgcggaggtag

SEQ ID NO: 19776 - DNA, 366 bp, Zea mays
  Peptide Sequence Number=SeqID_61555
atggcggcggtcgggaagaggaggagcgacaacttcttcatagaggaggaggcggaggaagaggtgctgaccgttacctcctcggttgggtcgtcgtcgggctcgtcgtcggaggccgctggtcatctacttccatggcggcggctacgtcctgttccgcgcggcctccgcgccgttccacaacgctatttacgccaaaaactgtacgattttatgcttaaacacggagttcgtatatcagtttactgcatgtacattggaaagtatatgtcggggaccataattaggggtaccctcaagacgcctaattctcagctggtaacccccatcagcataaagctgcaaaggcctgatgggtacgattaa

SEQ ID NO: 19777 - DNA, 324 bp, Zea mays
  Peptide Sequence Number=SeqID_61556
atggagaaccgccaatgcctcgaagccgcccccacgcccacaacgagggctgcagacgagaactacctcgacggcggacgcacgcttcttcactcctatctgctccctctccggcggtggccgaattctgggctagtggttagggcaaaattggcacagaactacaacggcagcgaggtccacacccttatacccgcagggaagtcagcgcacgattcagctggagccggtatcctcggtcgcggtcgttgcagatcgcccgccatgcgcgcggagcaaggggagagcggggctaaccgccagggcccacagagcaacgactga

SEQ ID NO: 19778 - DNA, 741 bp, Zea mays
  Peptide Sequence Number=SeqID_61557
atgcacatcttcatctcaaagccgaagcttcctgagacgatatattatactggaaaacatgttagttatgtttttgaggaccttcggaagaggaaggcccccaacattgatggtgctaagtgccggtggcttgaattgcttatagattactggcgactgttcggcgagcatggtaggaagtggacggactttggggactcggagtactcggaggaagcctcctccgagtctgaccgctcacctgctccggcttctcccccagcgtcatccgaggactctgatgacttcatggggctctccagcacggcccgggcgtactggcgctccatcgagtgcgccgggcttggtggttcgaatgagtcgggggtctactcggatgaggcagactcctccgactctttcgaggagtggagcggcggcgacggtgacgacgagggcgacgacagcggtgatgacagcggcgagggtgacggtggcgaaagcggcagtgatggcagagagggcgacagtggcaatggcagcggcgacggtggcgacgacggcagcaagggcgacggtggcgacggcggcagcgacggcggcaagggcgacgatggtggcagtggcgacggcggcaagggtgacggtagcagcaacaagggcgacggcaacggcggcatggccagtgggcatactggcactggtaatgtccgagtgatgactgaggcttttgcttttccgagtggtgatctggcactttag

SEQ ID NO: 19779 - DNA, 267 bp, Zea mays
  Peptide Sequence Number=SeqID_61558
atgcggaggggatctggggctgctgctacaggcttgctgcggcattatgtcgagcacgccaagggcgcgacgcaaaggagatccacgtggctgcgcgaattagcgtcgcggctgctgcgcgaggtacgccagggaggcagccatgggagtcctggacgcgacgtgaccaaatcacagagtgtccggcacggctggaaaaagcgacctgtggggagggtgctcgactggagcagggtgtgcgcgtcgggcgcgcagccctcagaatga

SEQ ID NO: 19780 - DNA, 120 bp, Zea mays
  Peptide Sequence Number=SeqID_61559
atggccaaagcgtttcaggtctgcgccgaagtagagcaccgatcgttgcgtgaatcggccggtgtaggctcaccggagctcggccctgcgctgttcgccatcgtggacttcgggctgtga

SEQ ID NO: 19781 - DNA, 393 bp, Zea mays
  Peptide Sequence Number=SeqID_61560
atggtgaggggcgcggtcaccagggctccatggacgagcaggagcaaagggaggaagatggccggagaggagcttgaagctgatgccccgatggctgtgaaggcacgagcaagggcgcgcgccgaccatgggaagctcctgtgtcgaagggaggaggggcacagcgaaggaagggcacctgctcgcgttcggaccagaggaggtccctgcgagaaggaggtggaagaagggcgccggtggtctgctgctagcgtgagggagcagtggaagagctgtcctggatggagctcggtagagggaggaagaagacagggagatgccaggaaatgcttctgcgctaaggaacacttctgctctaaggaacgctggctgctggttgatttaatgtggtaa

SEQ ID NO: 19782 - DNA, 471 bp, Zea mays
  Peptide Sequence Number=SeqID_61561
atgcggcagcccagcctagattcggtgccgacaggtgggcctatggccccagtcccactcccgcccgtgctcactattgccaccgacaaatgggccctggaggccagtcgcctctccccttcgcaatcacttgcgcgccgggtcattgcttcactgactgctcgtgcccggcttgccagtgccccaccctgcacgctcggactcggacgtttctccgccatgtgggcccgcacggtcggggtcgtctcctaccctgtgtccaggatgcaacaaaccctgagtcgggctctgaacaacctctgcgagatctttggggccgacgtggccaacttgccagcgtctccgggctacaaaaaatgtggggagttccgccgtcatggatttggtgccattgtcgccgacagacctcagatggcaatcctggttaatggcggtccgtgcgggtggtccgcgacgtcacggaggcgatga

SEQ ID NO: 19783 - DNA, 369 bp, Zea mays
  Peptide Sequence Number=SeqID_61562
atgcggcagcccaacctagattcggtgccgacaggtgggcctatggccccagtcccactcccgcccgtgctcactattgccaccgacaaatgggccctggaggccagtcgcctctccccttcgcaatcacttgcgcgccgggtcattgcttcactgactgctcgtgcccggcttgccagtgccccaccctgcacgctcggactcggacgtttctccgccatgtgggcccgcacggtcggggtcatctcctaccctgtgtccaggatgcaacaaaccccgagtcgggctctgaacaacctctgcgagatctttggggccgacgtggccaacttgccagcgtctccgggctacaaaagcgagcccccgtga

SEQ ID NO: 19784 - DNA, 745 bp, Zea mays
  Peptide Sequence Number=SeqID_61563
cgactcagcgagcacggcacaccgcccgcccatcctgtcgttgggccgcaccggccggtttctacagcgttggtggagctcaagcgcgctggcgtcgcacgaaagtgaaaacgcccacatgctgccagtgatcctggccaaagccgcctcagccaatggcctcgcactatcatccaagacgtggatcaccaccactagcagcgccatccgcaccgtccatatccatccaacggacagcgtcccttccccaccggcgcctcccaaaatttttggcatcccgcgcttccaccaccatccgtctgtagactgctcactcctctacgctccgctccgaatggcccgcacgaagcagacggcgcgcaagtcgaccggcggcaaggcgccgcggaagcagctggccaccaaggcggcgcgcaagtcggccccggccacgggcggcgtgaagaagccgcaccgcttccgccccggcaccgtcgcgctccgcgagatccgcaagtaccagaagagcactgagctgctcatccgcaagctccccttccagcgcctggtccgcgagatcgcgcaggacttcaagacggacctgcggttccagtcgtcggcggtggcggcgctgcaggaggccgcggaggcgtacctggtggggctcttcgaggacaccaacctctgcgccatccacgccaagagggtcaccatcatgcccaaggacatccagctcgcccgccgcatcaggggcgagagggcttga

SEQ ID NO: 19785 - DNA, 660 bp, Zea mays
  Peptide Sequence Number=SeqID_61564
atggagaagttcatcaaagcctccccgccgccgctctcctgccgaggcttcctggcgggcgcgagctcagcttgtggttgtggctcaggcctgccggctggacctggtactggtgcgcggtgggtttcctttgagggctctggtcctctgccggtggtgggattgggaaccggggtgctccggttgtcgttgtcgtcgccggtgtgctggactgctggtggtggtggtggtggtggtggcagagggccgaggctcgtcgtcgccgccgcccgcatgcagctccgagaagaaatctgggatgaagctatctgccagggcaggcgcggcgggactggcttcgtcgacgatggggatggggtagtggatccacggcacggtgtcgtcgaggtgaaggtgaagggcgggaaggcggcctgctggggcgggtgtttcctcgtccgcgcgtgcaccaccgcctggccgttctcccatagcagctcggcgaagtcgctgctgtcggacctgctaggcagcggtctgggagaggacagaggacacacgcttggcttgatgaagagtgctacaggagggaaggtcgtcgggacgggagctctcgcggcgagcgggggcaggaggggcacagttgttgttgataaggtgggggacctgggcaagcgctag

SEQ ID NO: 19786 - DNA, 1275 bp, Zea mays
  Peptide Sequence Number=SeqID_61565
atggcgcgtgccagcctgcggcagaggccgccacagacaggcaccgacaaggcgtccaatgccaccacgagcacccgcgtggagtcgacggtgctacagtcggccagtgccagtgggccgagaactgcagctgcccccgccgtgttcgtggaccagaggacggcgtggccgtcgcagcagcccaaggaggtgcggtttccatgcgcagcagcagcgccaccgccgacgccgacggctggtaacctgcagcaagaaagacctagcaacaacaacatgactcctccgcagaaagaagtagagaccaggaaggcgtcagaggctgcgggcgccaccgccacctcatcggtctgctccggcaatggtgctgggacaggaaaggacgacgagtcctggcgccaacagaagaggaagaccctgcaggccgagtgttccgcgagtcaagatgatgatcctgacgatgagtccggtgggatgagaagatcgtgcagcagaggtgcgaagcgcagccgcaccgcggaggtgcacaacctgtccgaaaggaggagaagggacaggatcaatgaaaaaatgcgtgccctgcaagagctcatccccaactgcaacaagattgacaaggcctccatgctggacgaagcgatcgagtacctcaaaaccctccagcttcaagtgcagatgatgtccatgggaagtgggctgtgcattcctcccatgctgctgccaccagccatgcagcacctgcagattcctccggctgctgctcacttccctcatctcggcatgggattgggttacgggatgggtgtcctcgatatgaacagcgcggcggcggcggcggcggcggttccatttccgcacatgcccggtgctcacttcccttgcccgatgatcccaggcgcgccactaccacggggtctcggaatcggaatgcctgccagaaacacgatgccggtgttcggagtccctcctgggcaaccaatccagccaccattcccatctttggcgggccttcctgtcaggccaaacctggcacctcctcacgcctcctcagccgccatggctaacatggtgcaggagcaacagcagcagcagcagcatcagagcctgaataatggagcatcaacagcagcagcaacagcatcagatcctcagactatcgtgcaggctgagagacagcattttagtgtgccctcttcagcacaaaccgagagcgatcagtttttggatggtggtggcaacagggctatttgtacaggaagaaatgaggctgaaacatga

SEQ ID NO: 19787 - DNA, 375 bp, Zea mays
  Peptide Sequence Number=SeqID_61566
atggggtgggggaagggaaggggaacgacggcgcagcagaggacctcgagcaccgggagcatctccagggcgccctccagaggacctcgagcaccaggagcatctccagggcgccctccagtctggggttcgtctgaagcgtccgcagcagcacaggctgtaccagtccacgcccccacggccggcggcggcgcaacagaggacctcgagcaccaggagcatctccagggcgccctccagtctggggttcgtctgaagcgtccgcagcagcacaggctgtaccagtccacgcccccacggtcggcggcggcgcagcagaggacctcgagcaccgggagcatctccagggcgccctccagcctggggttcgtctaa

SEQ ID NO: 19788 - DNA, 1482 bp, Zea mays
  Peptide Sequence Number=SeqID_61567
atggcgcaggcggtggtgccggcgatgcagtgccgggtcggagtgaaggcggcggcggggagggtgtggagcgccggcaggactaggaccggccgcggcggcgcctcgccggggttcaaggtcatggccgtcagcacgggcagcaccggggtggtgccgcgcctcgagcagctgctcaacatggacaccacgccctacaccgacaaggtcatcgccgagtacatctgggtcggaggatctggaatcgacatccgaagcaaatcaaggacgatttcgaaacccgtggaggatccctcggaactaccaaaatggaactacgatggatctagcacaggacaagccccgggagaagacagtgaagtcattctatacccccaggctatcttcaaggacccattccgaggtggcaacaacgttttggttatctgtgacacctacacgccacagggggaaccccttccaactaacaaacgccacagggctgcgcaaattttcagtgacccaaaggtcgctgaacaagtgccatggtttggcatagagcaagagtacactttgctccagaaagatgtaaattggcctcttggttggcctgttggaggcttccctggtccccagggtccatactactgtgccgtaggagccgacaaatcatttggccgtgacatatcagatgctcactacaaggcatgcctctacgctggaatcaacattagtggaacaaacggggaggtcatgcctggtcagtgggagtaccaagttggacctagtgttggtattgaagcaggagatcacatatggatttcgagatacattctcgagagaatcacagagcaagctggggttgtccttacccttgatccaaaaccaattcagggtgactggaacggagctggctgccacacaaattacagcacaaagaccatgcgcgaagacggcgggtttgaagagatcaagagagcaatcctgaacctttctctgcgccatgatctgcatattagtgcatacggagaaggaaatgaaagaagactgactgggaaacatgagactgcgagcatcggaacgttctcatgggtatggatggagcacctttcattattttctttccgcgagtccactgagtgttgtttgtctggtgtggcaaaccgcggctgctctatccgtgtggggcgggataccgaggcaaaagggaaaggttacctggaagaccgtcggccggcatcaaacatggacccgtacattgtgacggggctactggccgagaccacgatcctctggcagccatccctcgaggcggaggctcttgccgccaagaagctggcgctgaagcgagaagcaatcatgcagggcagaggcggagagcaagagcaacagaagcaaggcctagcttatttacagagacggccggcagcgctgcttgtacaatccaacggtacaaactacacagcaagtcgacaacacaaggacaaggctggcatagactga

SEQ ID NO: 19789 - DNA, 399 bp, Zea mays
  Peptide Sequence Number=SeqID_61568
atgccggcggggtcgaccacacccgtgcgccgcttccgcccaggttgcgtctaccgcagacgcagcagatcggcgccgcgccaggagctgcaagcggcaacgtctttcatcgacagcatctccgcccctgtcgcccaacctatattgcgcccgcaagatcaggggtatgagctccccaagaagacacaaaaaagtttcaagggaagtgcaggaacttctacccgcaggagcgcgaggctggcgaccatcgcttggccgcgtggagacattcagagccgcgcgcgccaagtgctcatgaagcggcttggaatcttccagagtcggactctgatcagatgcagaaccgggcaactgacgaggagctcaagcgctacttcagcctgttcaatggcccgctga

SEQ ID NO: 19790 - DNA, 407 bp, Zea mays
  Peptide Sequence Number=SeqID_61569
cttgccggccgcccggcgccccgcgtccccatccatcgatcgcccgccaccagccgccgccgccgccgctgctgctgtgcgctgcgcctggcggcgcgtcggcgcctgcccgcagcatgagaagcaggcggtggtcccgcgccgcggtgctcgcgtggctagtgctggtcgcggccgccgcgtgcgtcgccgacgagtcgcgcgcggtgcccgccgccaggaaccggaccgggaccgggaccgcggccgtcagtgtcaggcagcagcagcagcagcggggcgcgttcgacgtcgtggtcgccggcctcgtcagcatcgggctcggccgccggtggcgcgccggcggcatggtggacgaggacaagcgccgcgtgcccacggggcccaacccgctgcacaaccgatga

SEQ ID NO: 19791 - DNA, 327 bp, Zea mays
  Peptide Sequence Number=SeqID_61570
atgtcggacaggaaatctgagcatggggtgtcgaggctgcacttcctggagaagagggacgaggagacgctgccaagaagaagtccactggcgaatgcaatgaggatatttgagttcatgaaggcgaaaggaatggcgacagggcacacgtataccatgatactcaaggctgttgcgagcaatcagggttatgtttctgcattggaaatgttcaataagattgaggaggaggaagagtcaaagaaaatcattgacgtccgagcgatgctgggattgcctaaagcttttccatggaatcaaaggcaagcatccggcactcttaaatga

SEQ ID NO: 19792 - DNA, 141 bp, Zea mays
  Peptide Sequence Number=SeqID_61571
atggggaagtacacctacaacatgggtaaaagggggagaatatgtgcattaaagcttatatctcaacctgagaggaaagcttatcctaaagggatgttggagctaagaaatgtcaatctagatcaagtcaagccaacttga

SEQ ID NO: 19793 - DNA, 288 bp, Zea mays
  Peptide Sequence Number=SeqID_61572
atggcgcctccgcggagcaagcagagaacagcaagtgcagaggccgagagcgacaaggcatctgctgcggcggcacagcaatgcatggacggacgccccgccctaaacccgtgctctgctccctgcctctcgtgccccaccgaccagtacctccgagtctccaacatgtcgggtgtggcttccaacgtcgtgcagcgacccacgaaccaacagcttggtgcacgcggtacggaggcgctgttcctcgtccggtctcgttggttggactggacgaagcagctaagctag

SEQ ID NO: 19794 - DNA, 645 bp, Zea mays
  Peptide Sequence Number=SeqID_61573
atgtccgtgcccctaggtagcagtcacaactcacaacaacccatagttgttaaggcggcaaggaaccctttcccgcagttgtcgccaacactgagctatgaaccctttcccgcagctgtcgccaacactgagctatgggcgtgtgctcccctctcctcttccctcctccctcccctctcctcttcccccctccctcccctctacctcgtcgccaaatctgctctggaggtgcgccacgagccttccaggccgccagcgcagccgctcaagtgcctcctcacgatcgcgaaggggaggggcttgccagcgcagcctggacagcttgcggtcgtggaggagaggggccaccgcggaagtgacggggtcaagggacctcgccggcgtagcctagacagctcagcagctcgcagtcgcggaggggaggggccaacgccgccgccgctagcacttcaaggcgtcctcttcccatcgccttatgcctctccaaggcgtcggggcgacgccctaacggtcgaagcgaacgccttacaaacccagggtggactgagcagttgccacatcgacaggaggcctgaaggacggagagagcctgaggtagatcacgcgaacggtgggagcagcgccgagggtagcaccagtgcctag

SEQ ID NO: 19795 - DNA, 1530 bp, Zea mays
  Peptide Sequence Number=SeqID_61574
atggcgccggagtgcagccgccgcgacgctccccccagcgcgacgcttctgatcgtttgcgttgcactctacaccgtcgtcctcgccgttgcctccagtccgaaggcgttggcgtcctcttcggcgctgtcctctcgcgctcgcgcagcgccggaacagcagctgctcctgtccgctgatctcaccacgaggaaagaaaccgttaagagcctagctaagcggagctatgtgtgccaggaggagagcgcaagaaggccgggggagacgcggagaccgccgagcgtggagcaggagctcgacgtggcgcgagctgcgatccggcgcacggcgcagcggcacggcgatgccggccgagcaggcgacggcaatgtcagctccgcgaacacctggttcgacgctggagtggagtatgctctcttggccagcgtctaccgcaatccggccgcgttccaccggagctacgcggagatggagaagctgttcagagtgtacgtgtacgaggaaggcgagccgccgatcctgcacgccggcccgtgcaagaacatctacaccatcgagggccgcttcatcgagcagctcgagctcatggcgccgtcgccagcctcgtcgtcgaggcggggaacccggcgtcggtctgccagtgacgtccggacgtcggaacccgcgcgagcccacgccttcttcctgccgttcagcgtctctcagatggtgcagttcgcgtaccggcccaacacctacgacaaaacccctctccgcgccatcgtcgccgactacgtccgcgtcgtcgcgtcccgacacccctactggaatcgctccgccggcgccgatcacttcatgctcgcctgccacgattggggtccggaggcgtcgacgggacacccggagctgcacgcgaacggcatccgcgcgctctgcaacgctaactcctccgagggcttccggccgtggcaggacgtgagcgtgccggacatcaacctctacgacggagacatgccgcggcagctcctggcgccggcgccaggggtgacttcgcgtccgttcctcgccttctttgccggcggccggcacgggcacatccgcgacctcctgctgcggcactggaagggccgtgacccggacttcttcccggtgtacgagcacaggcatgaggacggattcgactactactcgttcatgcggcgggcgcgcttctgcctctgcccgagcgggtaccaggtggcgagcccgcgcgtggtggagtccatccacgccgagtgcgtgccggtgatcctgtccgacgggtacgtgctgcccttcgctgacgtgctgcggtgggaggcgttttcggtggcggtgccggttgccgacatccccaggctgagggaggtgctggagcggataccggcgccggaggtggagaagctccagcaaggagtgcgcctggtgaagcgccacttcatgctgaaccagccgccacagaggctggacatgtttaacatgatcctgcattccgtatggctaaggaggcttaacctcaggctagatcactga

SEQ ID NO: 19796 - DNA, 159 bp, Zea mays
  Peptide Sequence Number=SeqID_61575
atgacccttggttgggctgccaaacgaagtgcaccccgggctcatcagcgaggtgatgatgagctggacggtgtgacggcacggaatgtcggatgcggtgcccagaacaacccaagagtcgccggcattggtgacgaccatgagggtccccctgtttga

SEQ ID NO: 19797 - DNA, 1044 bp, Zea mays
  Peptide Sequence Number=SeqID_61576
atgggcatccccaaggctttgcttcttgccatcctcggctgcggcgtctgcttgtgcagcgctgctgtccttgcagctcgcgagctggggggcgacgacgagctggccatggtggcgaggcacgagcagtggatggtccagcacgggcgcgtctacaaggatgaaaccgacaaggcacaccggttcctagtgttcaaggccaacgtcaagttcatcgagtcgttcaacgctgccgccgccgccggcaaccgcaagttctggctgggtgtgaaccagttcgccgacctcaccaacgacgaattcagagcaaccaagaccaacaagggatttaacccaaatgtggtgaaggttcccacgggattccggtaccagaatcttagcatcgatgcacttccgcaaaccgtggactggaggaccaagggtgctgtcacgcccatcaaggaccaaggccagtgcggctgctgttgggcgttctcagcggtggctgccacggagggcatcgtcaagataagcaccggcaagctaacctcactctcggagcaagaactagtggactgtgacgtccacggtgaggaccagggctgcaacggcggcgagatggacgacgccttcaagttcatcatcaagaacggtggccttaccaccgagtcgaactacccttacaccgcgcaagacggccagtgcaagtccggatccaacggcgccgcaaccatcaaggggtacgaggatgtgcctgccaacgacgaggccgccctcatgaaggcggtagctagccagccagtctctgtggcggtggacggcggcgacatgacatttcagttctactctggaggcgtgatgacgggatcttgcggcactgacctcgaccatggtattgcagctattggttatggaaagaccagtgatggcaccaagtactggctgatgaagaactcgtggggcacaacttggggagagaatggatttctgagaatggagaaggatattgctgacaagaaggggatgtgtggccttgccatgcaaccatcctaccctactgcgtag

SEQ ID NO: 19798 - DNA, 399 bp, Zea mays
  Peptide Sequence Number=SeqID_61577
atgggatacttgtacactagagctgttgatgattctgtttgtatgcagacttacaaggaggacgatgataagatgcgaactacagctgcaaatgttgctgcacgagttgcagcggggggagatgacatgctgtcaaagtggcaattactagctgaacggaataagcagagaagtgagggaggtgatggttcttctggctctgtaccaggtaacatgttgcaacacaggccatcactgaaatctgggaaagacttaagggaagaacatgaagttgaaaagagaggatactccacaatgcttggatctggtggtaccatgatattagtagttgagacatttctcaatgataagatgcctattctgctatttgttcatacagactgtatttcaaacttatag

SEQ ID NO: 19799 - DNA, 222 bp, Zea mays
  Peptide Sequence Number=SeqID_61578
atgtgtgttgaggagaggttacgggggtttataagaagtataataaggttctctaaacagagggttgaggttgaaaagtcaagacatcatttttatccattatcctcagatgttcgcagtcatattatgagagtgaatcgagaagcaagagaacagtgggagaaaaagcaggctgaagatgctgagagaattaggaaacaaaatgatgttagttctgcatga

SEQ ID NO: 19800 - DNA, 876 bp, Zea mays
  Peptide Sequence Number=SeqID_61579
atggccgcctcaggctactcgggctccgcgcccattactgatcaggggttcgaaggctggcccccgaagggccttgccaagggcgccacgacgaactccgctccacccgaccccagggctcggactcgggcaaagacccggaagacggcgaactccgctccgcccgaccccagggctcggactcgggctaagacccggaagacggcgaactccgctccgcccgaccccagggctcggactcgggcaaagacccggaagacggcgaactccgctccgcccgaccccagggctcggactcgggctaagacccggaagacggcgaactctgctccgcccgaccccagggctcggactcgggcaaagacccggaagacggcgaactccgctccgcccgaccccagggctcggactcgggctaagacccggaagacggcgaactccgctccgcccgaccccagggctcggactcgggctaagacccagaagacggcgaactccgctccgcccgaccccagggctcggactcgggctaagacccggaagacggcgaactccgctccgcccgaccccagggctcggactcgggctaagacccggaagacggcgaactccgctccgcccgaccccagggctcggactccgccctggcctcggccgaacgacctccgcctcgcccgaccccttggctcgggctcggccacggcaactgaaggcaagactcaacctcggcttcggaggaaaccccacttcgccctgcctagagcacagaccgccacgtcaacaggaaacgtcatcatcatcctaccccgaatcgactcgggtcacggagaacaagaccggcgtctcgtccggccagctccgccagaggggcaatga

SEQ ID NO: 19801 - DNA, 471 bp, Zea mays
  Peptide Sequence Number=SeqID_61580
atggatgagcatgcatctgctttctctagaggacctgctgaagcttttcagtggattgggcacccaatgagggctaccttgtgccgtatgaagagtggtttaattttaactggagttggagataagattctctgcctttggtctgctgaaagctgcaaattcatgaatgagtacaatgtgccaaattctaaaacattagtcgactttgattttgatgaaaataagcggagagtcgtgctcaacactcgcctagtgaagctcttgaggcggcgtgtggcggagttgtcattgtccttagctagacgactgtggaagcaagatcgtggcctgcggaggcgacgacagttgcgcagtaacctccccttcaccggtgggcacatgtcttcctgcttgggatccggtcacaccaagggcctccctacgtcggtgtttgaggagttttggtacagtctcaacatttcacgtgactag

SEQ ID NO: 19802 - DNA, 405 bp, Zea mays
  Peptide Sequence Number=SeqID_61581
atggctcttttgcctcttgccttagtaaactacccaggagtccgctcctcccaggcacaagcaaagcagccgctcgtggagcttcccggtgaccctcccgacagtgtgctctctgctagtggctccagctccttcaccctctccttcactccatgggataattcaaagaacctgcataaaatagatgttaccgtcaactcttatttcgccgttcttgatggtaaaaaggtgtacaatcggggcagaacaataaatttggttgtgaatccagaacactatacacttattgatttagagaaagatgtggattcatatttcaaatggggtagctgccaaaagccaattttctgggttgttgaaaagggtgacaaatggcaatttatttatgacaatgggaagatgtaa

SEQ ID NO: 19803 - DNA, 831 bp, Zea mays
  Peptide Sequence Number=SeqID_61582
atggagcattggagcgggtggcgtccattaggacgttgccctaacggctgctcaaaggcttgcttggtccatcattaccaattatttgaagttatgtttgaaattgggagttatgtatgtaatgtcatttcctggtgtagttttgctgatccggaggttgtaattggttgtgaggatggtcgagcctttgtatatgatatgtacagcaggagttgctcacgtatttatcggcttcactcctctcctgtgacatgtttgatgataacggatgaccagctgattgttggtggatcaacttttggaaatgtagctattgcagatcaaacctcagggcagaagttaggtgttctaaaatcagatcatggaccattggcaataagatccttatcttcctgcacaaattcacacatgatatttgctggttcgtcagctggttatgcacattgctgggacttaaggactttgaggcctctctgggaaaaaagagtcagcccaaatgtcatctacagcacacgtcatttgcccggtgacacggcaacgctggcagttggaggcattgacggcgtgctccgcgttatatgccaaaggactggtgacatcattcgcagtcttgtcgttgacgcagatctcccagcagaagccacatctagatcccggcagcaaatagagaagaaacgtgttcgaaggattgaccctgatgcacagttggacggtatcccgaggcgtttgcgccctcagattaccagcctatcggttgggatgaagaagattgtgaccacgcatggtgaaaactacattagggtttggaagtttcgcatgaaaagttcgtaa

SEQ ID NO: 19804 - DNA, 1743 bp, Zea mays
  Peptide Sequence Number=SeqID_61583
atgctccgccgcggcgtgcttcttctcgcggccatcctcatcgccgtcgcacactcgcccctcgcgtacgcctcggaggccgagcacaagtataaaacagaagaacctgttaagctatgggtaaacaaggttgggccttacaataaccctcaagaaacttacaactattacagtctcccgttttgtcaaccatctgaaaaccctgcacataaatggggtggtctcggagaggtccttggtggaaatgagctgattgatagtcagatcgatataaagttcataaaaaatgtggacaagggggccatttgcacaattgaacttgatgttcaaaaggttcagcaatttgctaatgccattgaaaactcatattggtttgagcttttcataggttttgttggggagactgacaaaaacaatgagaaaaagcactacctttacactcacaagaacattgttgttaaatacaatggtaacaggataattcatgtgaatctaacacaagagtcacctaagcttcttgaagctggcaaaaagttggatatgacttattcagtgaagtgggtgcaaacaaatgtggcatttgcacggcgctttgaggtttacttagactacccgttctttgaacaccagattcattggttctccatcttcaattcattcatgatggttattttcttgactggtttagtgtcaatgatattgatgaggacactaagaaatgattatgcaaaatatgctcgtgaagatgatgatctggaatcacttgagcgagatgttaatgaagaatccgggtggaagcttgtccatggtgatgtgttccggcctcctcgtggccaggtgtttctttctgccctagttggtattggcactcagctggcggctcttatcctgcttgtgattgtgttggccattgttgtcatgttatatgttgggcgaggagctatcatcacaaccttcattgtgtgctacgctcttacatctttcatctctggatatgttagtggtggtctctattcaaggaatggtggaaaaaactggataaaggctatgatccttacagcatcactttttccattcttgtgtttctcgattggattgttgttaaacactattgctatcttctaccgatcattagcagctataccatttggcacaatggttgtcatgtttattctttgggctttcatctccttcccgttggttctattggggactgtagttggtagaaattggagtggtgctcccaacaacccgtgtcgtgtgaaaacgatcccgcgcccaattcctgaaaagaagtggtaccttacaccttctgttatttcactgatgggtggacttctccccttcggcagcatcttcattgagatgtacttcgtattcacttccttctggaactacaaggtgtactacgtctatggtttcatgttgctggtgtttgtcatcctcataatagtcaccatatgtgtcactattgtgggtacttatttcttgttgaatgctgagaactatcattggcaatggacatcattcttctctgctgcttctaccgccttgtatgtgtatctatactctatatactattatcatgtgaagacaaagatgtcaggatttttccagacaagcttctactttggttacaccttgatgttctgtcttggattgggaatactttgcggtgctgttggatatttgggctccaccctatttgtgaggaggatctacagaaatatcaaatgcgactaa

SEQ ID NO: 19805 - DNA, 375 bp, Zea mays
  Peptide Sequence Number=SeqID_61584
atggagcagggcgagcagcagggcgagcagcagcaccaccaggcgcgattgagcaagcacaaaggattgcaagcagctagcacgggacgaggctgcgctcgacatgaggatggtgagcgagctgcaaggcgctcgacgagcagagacgagggactggcgaacatggagaaatcgagggcacttgatttatatagggagagagagaggaagaaacgggcgctagaagaggaactagagcgccggctattaatggtgttaatggagatgaatttagtgaagaagaaactgtcagaggaagtcgagcgggcgaggagaggatgggtggtgtgttccgcagaaggggaaaagttgttggttctcagaggaggaagctga

SEQ ID NO: 19806 - DNA, 363 bp, Zea mays
  Peptide Sequence Number=SeqID_61585
atggccgcgcccacgtccgtgcaaaacccgaccaccacccactcgcccaacccctactcaagcccctcccatctgctctgccattcccccactcgcagacaccctagctcgccttcgcttgtgcattgtctcttctcagagctctcggaagaccgtcgccgctcgccgtgcccgcacgcccgttccgccgccaccgttggggctttatcagctttccacgcgcagccggagagccgtcgcccgtcgacccaagcccttatcgtgtccatgccgtcgttcaagggtcctagagtcttctctcgaggaggagatgctggcaacatggaggactttgaggagttccaggactacgacgagttctag

SEQ ID NO: 19807 - DNA, 378 bp, Zea mays
  Peptide Sequence Number=SeqID_61586
atgccggtgcacgcacaccttccctgggtcctggtgacgctatccgaccgaaatcccggggcggggcgcgagcacagtaggggtctcaccgttggcggccacgaaaattggtctagcggaggcgtggattcgacggcgacgaaatcccgggatccccggtcaccaccgcacccaaggacagctgcgcccgcacccgagaaggttttggggagccttagcacacaatcccgcagcaccccggtgtcaatcggaaacgacggcgatagatggctatggcggctcccggctcgactcagcgctcccctatctctcaccctgtgcttgatgtgccacaaaggttttctggtgacgagcagggacgagggctgggttttatag

SEQ ID NO: 19808 - DNA, 408 bp, Zea mays
  Peptide Sequence Number=SeqID_61587
atgcgcatagagaaaagaaagcggggtcgccgcaggggagtcctcctgctacgcgtcgatgtggagcttcgtctggggcctcggccatgtggccatggcggacacagtgcctggctctcgtgccgggcggaatctgcaagcgatggccgaggaattgctcgccgtccttcttcatgcgccgtggagcacagcgcgtcgtggattggccccctgcgccgcataatactcggtatggatccctgcaccgtgctcgccaagtcgtcttttacgtgtagctcggtccaatttggatttggcgtttgggttcagccgattggaggcctcgtcggcgtgctccgccgagcgtgcggggcggcgccaccgtgcgtgcgtgccctgttggggcgaagatcgtggaccgttggatga

SEQ ID NO: 19809 - DNA, 453 bp, Zea mays
  Peptide Sequence Number=SeqID_61588
atggtgaaggtaggagtggagttctcacctgcgtttctggatcgcgtaaacgtgaccacgatcgcccccaacccgatgccggtgcacgcacaccttccctgggtcctagcaacgctatccgaccgaaatcccggggcggggcgcgagcacagtaggggtctcaccgttgggggccgcgaaaattgttctggcggaggcgtggattcgacggcgacgaaatcccgggatccccggtcaccaccgcacccaaggacagctgcgcccgcacccgagaaggttctggggagccttagcacacaatcccgcagcaccccggtgtcaatcggaaacgacggcgatagatggctatggcggctcccggctcgactcagcgctcccctatctctcaccctgtgcttgatgtgcctcgaaggttttctggtgacgagcagggacggcggctgggttttatag

SEQ ID NO: 19810 - DNA, 480 bp, Zea mays
  Peptide Sequence Number=SeqID_61589
atggagaaccacccgggaaaacagtgctaccacaagggtgcacacagcagtgcggccaccatcacaaaggttgtgtcgtcatcgtctctgggcccctatcgttgcctttgccacagtgacctccgcctaaccgtctccatcgttctaagccaccgtcgtgtcgttactgcctccgaggagatcccgagtctcgccttgagccgtccgagccccgcgccctcggccgaggcagagaatctggtagtcatccgagcccgcctcgtgccttcggccgaggcggagaatccgtcagtcatccgagcccacctccatggccatggtgtccaccctcagcgcgctgtgcccaccctcggcatggcggtgtcggccctcagcgagctatgtccgccctcgacgtggccttgtgcccgtgtctacccttggtgcactgtgcccaccctcgacgcgttgtgcccgtcccagcgcggccgagccacctag

SEQ ID NO: 19811 - DNA, 768 bp, Zea mays
  Peptide Sequence Number=SeqID_61590
atggcgccctgcgcgtccccgtccgccctcgcgctctccgccagcacgcgggtcagcatcctccggctcccgctggcgctgcggcagcgggcggaggcgcgcgtgcccggcgcccagttccgcccgtcgaccgcgtgctcctgggcgcgccccttgctgcccgagctcgcgggggcggtccctcgtgccggcgcccgcggcactggcaggaggacgcagccgctgttccggcctcgcgcattgacgacgacgtctcagattgccagctgcgccttcaccctgggcacggtcgccgtcctccccttctacaccctcatggtcgtcgcccccaacgccgacatcaccaaacgcaccgtggagagcggcgctccctacgtcgccctgggcctcctctacgcctacctgctctacctgtcctggacccccgacaccctgcgcgccatgttcgctagcaagtactggctccctgagagatgggatgggacgacttggcagttggcgggcatcgtgaggatgttcgcgagcgagatgaccgtcgcctccgcgtggatccacctcctagcagtcgacctcttcgcggcaaggcaggtgtaccacgacggcctcaggaacaacgtcgagaccaggcactctgtctcgctgtgcctgctcttctgcccggttgggatcctggctcatgtgctgaccaaggattcttccattgttaccatgtggagatgtggattgagcggaattgatagggtttaccgtttgattcaccaaatgtaa

SEQ ID NO: 19812 - DNA, 492 bp, Zea mays
  Peptide Sequence Number=SeqID_61591
atggggctggccgtggcttgtggctcagtcatagggctagacgaaatgctcgtggctcgttggctcgctcgtttcatgagcgagacgggcagcaacgatgagagaagaaagggcagggggcggaggctggccaaggaagtccttcggcagccagaactcctccccgaggtcagcgcactaccgtcgaagaagcctgaaagtctaccaccgagcggtggaatgagcacagcggacgggaccctggcgaaccagcggcagcaaccattgtgtgtggctccctctccaaagcagagagaaaagcggcgagtggatggatggatggagtgggggagtagcggcgatggcttctcatcgtcgtcggtggcgttcgtggcatcctccacggcgtcgtgggccagtggctccacggtgatggactgggccagccccgaggtggtcgagatgcagcgtggtgatggcttctcgctgctgatctacgcctggaagagctaa

SEQ ID NO: 19813 - DNA, 567 bp, Zea mays
  Peptide Sequence Number=SeqID_61592
atggcgcctcctgttgacgtggctggtccacgccctaggttgggcgatgtggaggctcctccgaggtcgaggtcgagtccgtcttccgtggccgaggccgagtccgagcctctaggtcaggcgaggcggaggccgttggctgaggccagggcggaatttgagtcctggggtcgggcgaagcggagttcgtcgtcttctggggctgagccccaacccaagtccgagccctgtgtcgggcggagcagagttcatcgtcttccggggctttgcccgagtccgagccctgggtcgggcggagcggagttcgccgtcttccggagcttagcccgagtccgagccctgggtcgggcggagcggagttcgccgtcttccggggctttgcccgagtccgagccctgggtcgggcggagcggagtttcctatggtgtgcggccgggcctgactgcttgtcagcctcattctgtcaagtggcaccgcagtcggagcagcgcaggcggcgctgtctttctgtcagaccggtcagtggagtggcgaagtgacggcggccacttcggctcgatcagctga

SEQ ID NO: 19814 - DNA, 411 bp, Zea mays
  Peptide Sequence Number=SeqID_61593
atggcgctcgcatccacctccgccaccgcgcccgctgtcgtgctcaagacccgttcctcggcgccaggcgcgcgctcgccaatgccatcgcgcccaagcccgcgccacacgctcctcgccatcgccgtagccgccgccaagaagttgtggacccgccgagttcatcaacccgccctggctcgacagatcgtaagtctttgcagagacgaggaggggggatggagctcgaagctggccgtgacgccgccgccgcgactttgcaggctccctggcgacttcgggttcgatccgctagggctgggcaaggacccggcgttcctcaagtggtaccgggaggcggagctgatccacgggcggtgggcgatggccgccgtgctgggcatcttcatgggccagccgcgagcggagtag

SEQ ID NO: 19815 - DNA, 420 bp, Zea mays
  Peptide Sequence Number=SeqID_61594
atgtcgtcctccgctgccgccccacgccgagctctctcgtccgccgtcgccgccctccaagccaccccaacgccgagcccctcgtccccaccaccgcgacgtccttcggccgttgtcgttcccccgcctgtcgttgccatcctcaccacggtgtcattccgacttgaccttcgccaccgttggcttgactcgtacgcgatctcagttggaccatctatagctagacagagctcctcgcgatcgacgcgggatacgtttgcagatgtgcacgacgacgataacgatgatgacgacgacgatgacgacgatgacgacgacgacactggcgctgcaggcaccgacgctcttggggccaagggtaaggaactatgttatgtggacattatggactatgttatgtggacatttgagagcacctag

SEQ ID NO: 19816 - DNA, 321 bp, Zea mays
  Peptide Sequence Number=SeqID_61595
atggcgctggtagggaggggcaccagcactggggctttgatgggggcatgggatctggctatgttggagtggcccagaggcccaggtgagagcggtggcctaggtgatgacaacgacctggtcgtcggaggagaaggcgacccaaggagcgggggcaacttagttggtgtggccaacccgacttctgaaggaagccgaggcgggctagtcgacgaggtcatagttaggacgagtgacaggggaagtgttggtaaagggaaaggaggactcatcaaagaccacatgacgagagatgatgacacaatttgtggagaggtctag

SEQ ID NO: 19817 - DNA, 255 bp, Zea mays
  Peptide Sequence Number=SeqID_61596
atggagcttgatggggaacgagaaggtgagagtataccggagctggaggccatgtttgttgtagcgctagagtccatgtaccactcactgttgttgaggggtgagagtcatggtgttgaacactctagcgaggcccattggggtgatgcggcccaagaggcgtcctgctggggcatactgggcatgctggcccaaggggaagggggagacgctatccccgcccaaggcgatgaggggaccgtgggcctaacctag

SEQ ID NO: 19818 - DNA, 180 bp, Zea mays
  Peptide Sequence Number=SeqID_61597
atggagaagggtggaaccagcttcgatgccgatttttcagatggtccgtgcgaggcgtggtggcctactcgtatctggattcaggcgtcacggggaaatagaggaacgagcgacaggagggagcaaatgccacgccgatgcccggacagagcatgcaagcgcggctcggcgaccggctga

SEQ ID NO: 19819 - DNA, 372 bp, Zea mays
  Peptide Sequence Number=SeqID_61598
atggagagggcggtgccggttcggaagccgcacaccagcacggccgaccttctctcctggtcggccacggcccctgacgcatctgcctcgccggccgcgtcctcccgccccagcctcaagccggccgccgggattacgcctgcgatgttcggcgcgccggtcaccgagcaggaggccgaggatctgagcaagagtgaaaggaaattttgctccggatcgaagttgaaagagatgagtgggagtgggattttcgctgagaagagtgaaaatggtgactcagaggcttcaaatcctgataacaagacttccttgaggatgtaccagcattactgtgctgatccatctatcggggaaatgatccccggaccctag

SEQ ID NO: 19820 - DNA, 310 bp, Zea mays
  Peptide Sequence Number=SeqID_61599
atgacctacaggcccctaagcttgcggcccactcatgacctatcgagcctaggcctcagtacacttgccgcctacagaacccacaacacgacgagccgcgccgagacccaggctatgacgaccatgggtcgtcgcggcacagagacggtaatgctggtgtcgaagcttttcgccgcctgtcataaagagcacgaccagggaagcccagacgaccgagatacagactcagcgttggagatagatcgtaacaccgacccatctcatacatctctcatgtccaacggtggaatgacagtcgctgttcgattat

SEQ ID NO: 19821 - DNA, 702 bp, Zea mays
  Peptide Sequence Number=SeqID_61600
caaactgtgactggaataagccagatttcatttagtgctgatggaagtgtttcaccgaagaagccgtcgtcaatacctgaggtggctaagcagcgagagcttagtggtaccctggaagatgctgatgctaaaatcaataagcagctttctgaagccaagaccaaggagcttagtgggagtgacatctttggtccgcctcctgagattcctgccaggccattggctgctcgtaacatggagctacaaggaaatgtcgatttttcacttccacagcgaagcgtccacacatcagttaaagtatcaaattttcctatttactcatgtcccactttcaccaactaccagtacatcgtccgcaaaaagaatacgtcgatagatattcccttacatgtttcttgtgacctcacccatcactcacgcaaaaaaggtaagcctgctggaggtccgagcaacatctcattcagtgaagagcccgtagtgaagacagcaaagaaaatccacaaccagaagttccaggagctgacaggtaacaacatcttcaaggaggacgtcccttcctcagccgagaagtctctgagctctgcgaagctgaaggagatgagtggcagtgacatcttcgccgatggaacgccagctccccgagaatacctcggcggcatccggaagccccctggtggcgagagcagcatcgcgctgatctga

SEQ ID NO: 19822 - DNA, 673 bp, Zea mays
  Peptide Sequence Number=SeqID_61601
agggtcggggatactctgcaagcccgctctgatcaacgcgatgacagcgtcatcaagccagctcgcgaactccgaacctgagcattcacccagggtcaaggctccgtccactcaagggacacaatctcgcctcgcccgagcccagcctcgggcaggaacagtagacccaggcgccataggaagctccgcctcgcccgaccctagggcctgggctcaacctcgacctcggaagatggtctccgcctcgcccgaccccagggctcggactcaacctcgacctcggaagacggtctccgcctcgcccgaccccagggctcggactcaacctcgacctcggaagacggtctccgcctcgcccgaccctagggctcggcccccgcctcgacctcggaagacggtctccgcctcgcccgaccccagggctcggcctcaacctcgacctcggaggagtcactgcctcgcccgaccttgggctcgggctgaccacgccacaggggggagggggacgaataggatggccggaggcgtcatagttccgagcgatggtcctgccgccgaccacggcgggagcctgacgctgtcggtgttcatgacctgccttgtggctgcctcgggcggcctcatcttcggctacgacatcggcatctcaggtctgccactccttgcgctttag

SEQ ID NO: 19823 - DNA, 384 bp, Zea mays
  Peptide Sequence Number=SeqID_61602
atgctcctagcgaccctaaacccaccccagttccgccgtcgcgttactcccccatcccgcgaccagccgcccctgcccccggcgagacattttggtggccagcacgagttggccttcttctccgactccagcgacgccgccggctcccgccaccccattcccatgctcatcttcctggtgggtacgctggcccaaaacctcgtccagctcaaggagaagcccgctgcctccacccctgatgggcgcgtgcgcactgcggccctagcggaggcgttgcagatcctgcaggagcaggcggcgctcgcctacctctgcgccccgtccgaatcggatagcgtcgtggatttgttcgtcgggcagtgcctcagtggagatggtggatga

SEQ ID NO: 19824 - DNA, 387 bp, Zea mays
  Peptide Sequence Number=SeqID_61603
atggacggcaagaaaggatctatggaacgagttcacgacgtcagacttagcgagaacgatgcaggcggagatgttggtgctcttctaatcccccacgaggttcgccctattcaaggatatatggaaggagtttacggcgttggacacgacgagaaagatggaagtggtgtccctcctggaactgtgcctaaaatatgtaaacatgtcaaggatctggtatgggagatttacaacaacaacataagtgagataatacctcctaaactggggaacctgactaacctgtataagacagcatgggctctctcgaatattgtctctgcggaggacgccattgtcagttgtaaatattggtggtatattaggaaacaaattatccctatttga

SEQ ID NO: 19825 - DNA, 666 bp, Zea mays
  Peptide Sequence Number=SeqID_61604
atggcagccgccttccttgcgcatctcttctgtcgcgccaccaccacctctacctccacggtggcggcctccctccggcacctcctcacggccacctccaccgccctcatcctcacgtacccgtccctatctgctccgcccaccaacaaccgcccgtcccatccaccgcctgtcgtgcccgccgactcccaggggagtaggggacaaggcactagaggatgtagttgcgaatccgaaattctggatagcgttggtgaagtagatgatggcgatgctgacgaacttctcgagcacggggctgtagtcaagcaggtggtcgatgtccctatcgtggatgatggtagcacagagtccaatctcctagaggcaggggaacatggcggcgcagccccgcgagagcgcgacggtgtctggaaagcgccagaagtcgaggtagagggtgcagagggaggcaaggtggaggatgtctacgaggaggcgaggttgacggaggtcgatggtcgacatagtggacatactatacatgttatgtctgcagttgagactgaatcccctaacggtgataatggagacatctcgcgcacgccctcgtcgctcccggccgcaccatctgccgatgatgacgagagcccaaccggcccggaatccgccgcaccacccccatga

SEQ ID NO: 19826 - DNA, 471 bp, Zea mays
  Peptide Sequence Number=SeqID_61605
atggaggctcctccgaagccgaggccgagtctgtcttccatggccgaggccgagtccgagcccctgggtcgggcgaggcggaggtcgtcggcagaggccagggcggtgtccgagccctggggtcgggcgaagcggacccgagtccgagccctgggtcgggcggagcggagttcgccgtcttccggggctgagcccgagtccgagccctgggtcgggcggagcggagttcgccgtcttccggggctgagcccgagtccgagccctgggtcgggcggagcttcctatggtgcctttggcagggcctggcttcctgtcagcatcactctatcaagtggcgctgcagtcggagtggcgcaggcggcgctgtccttctgtcagaccggtcaatggagcggcgaagtgacggcggtcacttcggctctgccggagggcgcgcgtcaggataaaggtgtcaggccacctttgcgttaa

SEQ ID NO: 19827 - DNA, 366 bp, Zea mays
  Peptide Sequence Number=SeqID_61606
atggcagtccatgaatcaagagatcacatgctacaagtaagggcaagcatcagtgctaacgaagttgggatttgggctggtgaccttgtaggtcgcatgtatcagagatattatgagcacaacaaatggaagtttaagtcaatttcttgctcatacgctgatgaagttgatgtggttattgatccaaaagatatcgaccttaaaataacaatatctgtggagaagggcatcttcggcatttatgaggatgtcgagaagttgttgcaggcactgtccaaggaggaggaggtcgtgcctggtcaccttctgcgccaacgtccttatcaacttctacgtgaagctcgatcctcaagccaccacgtgtag

SEQ ID NO: 19828 - DNA, 264 bp, Zea mays
  Peptide Sequence Number=SeqID_61607
atggaggagaagggccatgggtcatggggagcaaggacattgagcttctcagccatgccaaaggagggaggcggcaaagaagaggtgtgcgggcttcttttcgctccccttgtctcagtgcgtgactcttggctgcagccaaaaaaggcagaggcgactagggctaggaaggcaaaagcaaaggcaagaggctcaaaggctgcccttgcacccatgtcgcggcagaattgttggaagcaccagcaacccaatgcagagaattag

SEQ ID NO: 19829 - DNA, 750 bp, Zea mays
  Peptide Sequence Number=SeqID_61608
atgggaagagagggagactgccccgtctgcaggaaccggatgtgccattgggaggggaggggacgggaggcagggcggcggttgcgggtggaagctggcaagcggcgagcgggaagatggaggccgcgggtcgggtggcggctgcttccgggtaaaacaaaaaaccctggtgtacacagaagcaatgcatgctatgctgcctgggtcagggagagggagcaaaagaaagcagaggaaatagaaatgcaagcggcggcggcgcggcggcctcgcgtgctcaccgagatcgacccgcacagcgagtgggtgcacgggcgcgcgctcgacgcgatcatgctggacgtcacagggttcagcaaggaccagctgaaggtgcaggtggagccgtgggggagcctcaaggtcagcggcgaccagggcgccgtcgacgggggtggcggcatgcagcggcgcctcttcaccaagcggttcgacctccccgcaggctgcgacgtcgccgcgatcacggtccatctcgacaagggcatgctctacatccaggtgccgcgcccagcgggcgccgccgccgcctggtggggcacccttcagcagcatcttctgtcggcggaggaggatgtgtacgaggacgcgtttcggggagtggacgagaccggcgactacgcccacggcggcggcggcctggcaccgcggcgagacggtgggcgtcacccgctgaggctgctcgcgaggggcctcatcaggcaccgtcag

SEQ ID NO: 19830 - DNA, 1356 bp, Zea mays
  Peptide Sequence Number=SeqID_61609
atggcggtggaggagggccgacgagggcggcggcgccacggagcacccggtcgaggtgatcggccgcatccggaacctcacctcgggtgtctcatccgcgctggagttcgcgtggggcgggacggccgtgccgtgcgcggcgacgccgacgggtgtcgcgacttcaccctcgacggcgtctctgtgtcggaggaggaggacctcgaggggttctaccgccgagctgtctatagatgttcttacatgtttgcaatttgcgtgctagctgtgttgagcatattgattaagcttggcatccgagctccccttcgtttcaccctggtcctctgcttggcatccgagctcacaccgcagcatttcggtgggtccacggggtacgaccacgacgacggtggcggccgggaagcgttggactccgtcttcgccgacattgttggcgcagaggctgccattgtgcgcccgcagttcttctccggtacccacgccattgcctgtgcgttgtttgcgcttctgaggcctgggcatgagctcctggcagtcgctgggcccccgtacgacactttggaggaggtgattgggatcagggggtcggccaatgtagggtcactcaaggatttcggagtgacgtaccgagaagttccgatgcaaaatccaaactgcatggtgatggttgataattgctatggtgaatttgttgagatatcggaacctgcaatggtgggagcagacttgattgctggaagtttgataaagaatccaggtggaactattgcgccttgtggtggttatgttgctgggaaggagcatttagtcgaagcagctgcagcccgtctatctgcacctggccttggggtggaatttgggtcaacacctggccatgttatgcgtgcgctgtttcaaggcctgtttcttggtccgcaaatggttggagaagcagtaaaaggaggtttgctcattgcggaagtcatgtcagccaagggatacaaagttgaaccacttccgagggttcctcgtcatgatattgtgcagattgagatgacaataacaaaagcgaaaattggagtagatccctcaggatgtgtcgaactagcaaagcatgtcagattgaacaaccctaaccttgtgttgtctggtttgatgataattgggatgcttgattactcctcaactccgaagaatttcaaggcactagccaactgtcgggaagatgtgtgcaaggagcttggaataccggaagagcagctcgaactatttgtggacatgtcatctgactttgaacaaacaattgaaatgggaagcacaaatgtaagagttgggtcaaccatatttggtgcaagagaatacccaaagaactag

SEQ ID NO: 19831 - DNA, 825 bp, Zea mays
  Peptide Sequence Number=SeqID_61610
atggcttccggcgagcgcgtgtacgaggacttcaagcctccgcacaagatggagcgcgagccggccacccacacgctcaccgtcgacctctctgcccaaggcaagcaacgccgacgcgcgcgtactatgaacaagcacttcatttccctcgtgcaaaagtacgggtacaggaaggagcacatcagggtgcagatggtccacagccaccggtgcctcatcgtgcgcggggagcgccccgtcgacggcaaccgctggagccgcttccgcctcgatctccccgtccccgacggctgcgacgccaaggccgtccacgctaggttcgacaacggcgtcgtccgcgtcaccatgcctggcgtccagcagccggagcccgtcctcccggtcgtcgccggcaccgccgaccagcagcagcagcagcaggagacgccgctgccgaagcatgctggtacggccgctgccgctggcgacgacgacgtgcaagggcggaaaggcgtcgtcggcgctgcggggcaagacggcggtgatcgtgatcgtgccgcgggagggcaggatgaggtggacaagcacgagacgccgcggaagcaagaagcgaggcagcgcgtggtgagctcagcgaaacacgccggcggcagtagcggtaggggcgacgacacagctgcaggtggggtagggcaggaggtgatggccgccgcttctcccacgtcgtcacgccaaggctacggcttcctccataaccggaagaaggtgaccttcaccgtgctcggcggcgtggcgctcgtcctcatcagcctcggcatctatgccaagtacagcctctcgccataa

SEQ ID NO: 19832 - DNA, 1062 bp, Zea mays
  Peptide Sequence Number=SeqID_61611
accagaggcatctccaaagagctgcaaaatatccataaccatctgaatgtcctgggctctaggccgcagggccgtggcccgatagatgatttcaggtacctggatttgcctggtcattacatggatcagttcaaactttatgatccattcggaggtgatcatctaaacatttttgcagctggtattagagctgctgatcgtttgcttaccgttagtcatggttatgcatgggagctcaaaacacctgatggcggctggggccttcatagtatcattaatgaaaacgattggaaattccagggtattgtaaatggtattgatactgctgattggaatcctaggcatgatgtccatctacaatctgatgggtacaccaactattctctagaaaccgttcagactggtaaagcacagtgcaaggaagcactacagaaagagcttggactccctgttcgtggcgatgttccggtcattgcttttattggacggctggaccatcaaaaaggtgtagatctgatagcagaggcaatgccgtggattgctggtcaggatgtacaattaattatgttgggtactggaagacaagaccttgaagatacattgaggaggcttgagagccagcattatgacagggtccggggctgggttgggttctctgtccggttggctcatcggatgacagcaggggctgatatactattgatgccatcaaggtttgagccatgtgggctgaaccagctatatgccatgatgtacgggactgttcctgtagttcatgctgttggtggtctccgcgacacagtccaacattataatccctatgaggaggttggagttggatggacttttgagaaagcagaggcaaacagaatgatcgatgccctagggcactgcttgaacacatacagaaattactggagcagttgggaaggtatccaacgtagagggatgatgcaggacctaagctgggataacgctgctaaactctacgaggaagttcttcttgccgccaaatatcagtgggagagctcatttagacgctttggtacaggagggtggtag

SEQ ID NO: 19833 - DNA, 3351 bp, Zea mays
  Peptide Sequence Number=SeqID_61612
atggagtgcaacaaggaagaagcttcaagagctaaggatttagctttggtaaagctgcaagaagcagactatgctggtgctaaaaggattgccctcaaggctcaaaagcttttctctggccttgaaaatatttctcagctgttaactgtttgtgaagttcactgctgtgctgctattaagatcaacggggagactgactggtatagtgtccttcaagtagaaacaactgcagatgacatattactcaaaaaacagtaccgcaaacttgctctcttactccatccagataagaacaagtttgtgggtgctgaagctgcctttaagctaattggagaagctcacatgatactgacagacaaagtaaaacgttcacgtcatgactcaaaaaggaacccagttattccaaaatctgcaccaaagaagcgtggacgaccatcaaaggaaactgattatgttgctaagagggccaataaggaaaatactgatgctgtatattcaactttctggaccatttgcaccacttgtggaaccaaataccagtacccatatagtttgttgatgaaagttctcttgtgccaggtctgctcaaagagtttctttgcttatgatttgtctaagaaaccgtttgtcagagtggatgcatcaaatccatggagtggaattgggatgcgacacaaaatgtttcccaaccaacaacacaattaccagagtgttcctactcagcaaaatcctgtcactggtcgtcaaactcctgtccccgaccagaaacagcaacctcggaatgtctctggtaagcaaactccaggcattaaccagcaacaacgatcacagaaattccctttcagttcaaggccaaagaatgtggtaaattctcatccatggggtggatttggtaggcaacaggaaatgtgtcctctgagtcaacccacacatgtatctgaccaaaaaccctactatcaaagggcccctggccagcaaaaccctgtcaatggtcatcaaactcttgtcactgaccatcaacagcattctctgaatacccagcaacaatctacaaaccccccttgcaatccaggatcaaagaatgtagtgaattctcaaggggcagccttccagaatagtaatgcaactgcaaacagtaaccttacggatgaagctggggcttgtaatagagaaaagattacaaggccatcattcaatgatgaagatagaactaaatcacaggttgcaaattctgataaagttcatctagtaaacaagcaaatgaagggaaacaaggtagctacaggatccagtcatcctgttgccataaatggtagccaagttgctaggaaagatgttcttactgccgcatgtgcagataaaacatctgggcagcatccttgtatagcaagccagcagagaaatagtgtcattgttgaagatgggtctgatggttgtggaaaggttagtgatcatcttcctaactcttcgacaaagaaaaggataagaaaagaccattcttcctatactgctggcaaaagtgatcatacaacagaaaatgaagttgctgaagcaaacagccaacacaaatatagtattccaagcaaagagaagataacaaatgaaaaagaagtgatcagtggattaaatcttgatgtgttgcaaggaacaaaaagaaaacaacaaacaagttctggaagtggaagtgatgctgctgctaaatctgtaaaccatagtattccctgcaatgttacagtttcatgtccagatccagacttctacgactttgagaaaaatagggatgcagatcgattcacagttgatcagatatgggcagtttatgatgatcttgaaggcatgccaagatactatgctcgaattaagcaggtctactctccaaacttcatgttgcagttcacatggctagagtatgatcctttgtgtgatgctgagaaggaatggtcttctaaggagctgcctgttgcttgtggaaatttcagagttggaagaacactcttgactgaagacactaagatgttttctcatgttgtctcttggacaaaaggaaggaagaggaacagatatgagatttatcctaagaaaggcgaagtctgggcacttttcaggggatgggacatcaactgggtttcagattccgacgatcataggcaccatgattatgatattgttgaaatcacctcagactttgctatgggtttaggcacttatgtgattcccttggtaaagatcaaaggttttgtcagcttatttgttcgatcaagcagtgaagcaccatttctgatacctagtggcaacacccttagtttctcgcacagcatccctttccacaggttggtggaaaatggcaggcaacatatcccaaccggtgctcttgagctggacactgcatcactaccttctgatttggagaaagcgtttactcctgtgaacctcgacaacagttttatgagcaccggaagtggtagcactccatgcaatgtttcatctactagctcctgcgaagtgccggttggaaagaccgaacagactcaggatggtactggtacaggtgtgaaggatggagtcgagaagctgaatcagaatacaaaggtcgaacaagacaacggctcagaagcttcaacgattgatgactgtggcgatgggtggaacgacagctctccgccaggatctccagctgggtttcattaccctgacacggagttttgcagcttcactagcctgagatcattcgacaagttcaagaaagggcaagtttgggcactgtactgcgacaccgacaagttcccaaagtactacggtttggtaaagagcgtcgattcagaagactgcacagtccacataaggtggctggagcactgtccgcgcgaacaagtggaggagcacctggcacaagacggcctgtccattggctgtgggttattcgaagtcagcaggcagagtgagacctacgactgcacagaagtcttctctcacagtgtggaggtgacgggtaaagggaaaagatatgagatccttccgtgtgctggccaggtgtgggctgtatacaaggactggagccgcacatggagcttcgaagattacagtagatgcgagtatcttctggtcgaggtcatggaggtttctgatggtgatataacagtgtcgtgccttactaaagcggagggctttagcactgtgttcatgcaagagcagaacggtaaatccaggagaatagcaaggagtgacttgactatgttctctcatcaggttcctgcctaccgcttgacagacgaaactggcgatctttgtggttactgggagcttgatcctgcgtctttaccggaagttttgctggtcaggaagaccaagtga

SEQ ID NO: 19834 - DNA, 210 bp, Zea mays
  Peptide Sequence Number=SeqID_61613
atgacaaatccttcaatcaaggatggtgtgagatacagcaagtatggtggcaagtcaaatggaaggaaaaccttgaatttgatcatggatgctcttggaaaagctggtcgaattctccactcaaccttccccaaggttgtgtacagctttttgaaaaccagctcagccagttttggcttcggtccacccacctactcagtcggccactga

SEQ ID NO: 19835 - DNA, 408 bp, Zea mays
  Peptide Sequence Number=SeqID_61614
atggtggccggagtagggctggccgcgtgcgcaggcggtcgggctcgtcggcgacgcgtactccagcctgctcacggtggtagagctcaatcaaatcgctcggggagcttcactggaggtcaaaggtgctttaggcgcaaggaatcaaagagtggctcaccgtgcagctcggtctacatgcgacagcggtcgaataaagtccggcggcgtcaatccggcacctccggtgatgtggtgctcggtctgagggctcgaggagcttcactgagatctagggaggctagccaagggattggaccgggtggaggtgggccggagtggccgatccacggtggtcagggctccggcagccgctggcacgccgtgcgcagagcgaactccggcgatcttgcgcttgggcgaggctga

SEQ ID NO: 19836 - DNA, 309 bp, Zea mays
  Peptide Sequence Number=SeqID_61615
atggggaaaggagaaaatggacgccttgaactccataacgtagggagaataacggtcgcgcttgaagctccattaatgccgtgggtgaacggacgcgtggcttcgggcatcggcacggcgtcgggcttgctcgggcagttggggcgcgctcggcagcatcctggcggggtcgggtcgcgtcagggaagggctcctggcgcgctgtgcttgggcgcctgggccggggtggctcagctgcgggattttcctttgagaagaaatgctattaaacgtctaataatcaatcatgcgcagtcaaaaacgatttaa

SEQ ID NO: 19837 - DNA, 243 bp, Zea mays
  Peptide Sequence Number=SeqID_61616
atggcgctgccgtttcctgctcgtaatgggaagaggaggaatggggaaaggagaaacgaacgccttggactccataacgcagggagaataacggtcgcgcttgaagctccattaatgccgtgggtgaacggacgcgcggcttcaggcatcggcacgacgtcgggcttgctcgggcggttggggcgcgctcggcagcgtcctggcggggtcaggtcgcgtcggggaagggatcctagcgcgtag

SEQ ID NO: 19838 - DNA, 183 bp, Zea mays
  Peptide Sequence Number=SeqID_61617
atgcgcaacgtgaaggctctcgaggcggcgctctgctacggccatgggctagaaagtggctatgagggagcatcggtggccagccctgctggcgcgaatgggtacgcgagcgtggatgaaaatgatgacagtgggtccccttggtccggcaacagggtgggtgacagcggcgagagaagtcgg

SEQ ID NO: 19839 - DNA, 504 bp, Zea mays
  Peptide Sequence Number=SeqID_61618
atgattgatcaatggttgctggccttcttctacccccacggcgtccagacccagctgtctgtgcaccatggcgggactgccagcgcttgcggcagatccccctcccaaagtaccggtgacccccagggctccgcccgcgccttaccccgcccactactgatttgcagagtaacaagattatccctagaatgcttcgcagggaaagggaaactgagctcaccggagggcggcgccaggatcagggagtctgggcgttgcccacttatacgaacgcaagggagaccatatgagagggcggcgaagtcaaagccctacccggtatcacgcaggtccgttggggacgtgaagtatgcggctcggtttgttatggagacgattctgacagcaagggcccgcatgcaagagacacatggattcacgcgtagaggagagcagtcgctggcacagggacccacctgccagccataccgtgcggttcctgcgacaaaagtcagcaccggctag

SEQ ID NO: 19840 - DNA, 657 bp, Zea mays
  Peptide Sequence Number=SeqID_61619
atggtggatagggccatatggggtgagcatgagatagcatgccaccaacggaagcggatctcgggagatctcacctctattgaccgccagcccgtcaccttggttggtctgtggttagggatgaaaacaaatgcaaacggacgaacaaacccctctcttgtttctattcccgcattttatcaccggaaacgggattggtctggaatagtcgggaatgggaacgggtatttgacgttgttatttatactgattaatgattgtaaccgtgtctacatgtggagattggaaggagctcggaaggctgggacgctgacccactttacgacgaggagcgtgggatggttcaaggtggccatgttcgcagaccagctttacgacgaggatgcgtggacggactggtgccccgcgcaggacgccacgtccgaccgcgttatggccgtcgtcctcgacgccgagaacctagataaaaagtatcttactagagtgaaaaggggccgagtgttaattggtgaatttctccaccatcacagcaacagtcgagagactactcagttagctgctgtaaccacaaggatagcgaatgtgcacggagatgaactcattatcacaaccacaagtccatatgagcaacaagcattcgcatcgaagactgattga

SEQ ID NO: 19841 - DNA, 204 bp, Zea mays
  Peptide Sequence Number=SeqID_61620
atgccaacgacaaaattggataattggcatggctttaccagtgtacccaagctggtcaagtttaatccagggacgcagaaagatttagtgactaccgagaactatggtgttcgcacaaacttggacaaagactaccggagacaacctgtcgatgagagccatgtccgcggcgacgttcctagacaataccgcagcgttctctaa

SEQ ID NO: 19842 - DNA, 723 bp, Zea mays
  Peptide Sequence Number=SeqID_61621
atggagaaagagaaagaggacctcgaccgtcggctagttgatgagaaggaagatgcggagaaagcccgcgaggaggctcaagccacccgcgcggaggcccaagctgcatgtaagcgcaccgccgacatggagttggagctaaagaatatatgcggccatcacgaaaggacggagtcctccactcgcgcgggggtcgaacaggcgcacacgcttttcgtggatgcgtaccgtgaccttggcatgcaaaccgctccctttgatgaatcgagggaggatgtggggcttcgctttctggggtggttgcaagacaagctggagtccctcccgtccattgtgatgggtctcatgtcctacgcgtctctcgttacctgtgagggggctattaatgctttgtcccgagagggatgcaggcatttcgaagtcttcgaccgagcgaacgaggacttcgttcgtggagtattccagattgaagatggcatgttaaagcactctataggggcgctttatgataggatgtggggcccccacggccgttgcatcgttcgggaaagggcagaccgagcgctggcgcatgtgatgaacaaggaaggcatggaggacctcgctggccttgaatgctcggtgtcccagaggagtgcttcggtggaggcgggagccgaagagcaaacgacgcttctaggcgatgctgatgagggtctcgcggcagcagacacttcggcatag

SEQ ID NO: 19843 - DNA, 324 bp, Zea mays
  Peptide Sequence Number=SeqID_61622
atgggtgctgaaacgagggtgaggagggcgagagcggacctagagacggcggtccacgacgcggtgactcacggcggcgcggagaaccgatttggtggaaattgcgattgctcgggctatgtccttagcgacagaggggctatctacaatgatctactgcgacgtggtaacaaggccagtagcgtggcatgcccaggggtaacagcgatcatcacgacgatggtcgcgcagccatgccgccgggcaagtgggtacgacaaagctggttctatccattcccctgctgatcttttcactcccgcggtgatatccgctacacactga

SEQ ID NO: 19844 - DNA, 333 bp, Zea mays
  Peptide Sequence Number=SeqID_61623
atgttgacagtggtgctgcccacgcgtaagaggaaggccctaagccatcgtccagcccacacccatccatttcgggagcttcttattatgctctcgggccatgatatgatcggcatcgcgttaacagggttgggaagatgctggtattcgtggcttcgtgctgcatcgattgtgctggacgtcagtgatgaggaagcgtttgtcgataagatgattgatgcaatctctgttcttaagctcgcttatgccaaggtgagggatatactggatctggagtatgtgcatatgtgttatattactaatgcagttgacatgcgaaatgatagcctatga

SEQ ID NO: 19845 - DNA, 483 bp, Zea mays
  Peptide Sequence Number=SeqID_61624
atggcgcagcggacgccgtgggcgcgggcccacgcatcggagagaggggggctgactgcatggaacggtgacgggggagagggagccgactttgggtcgaccgccggtgaaatcccgcggcggttctccgccgggagtccagttttgcgacgagggagtggtggcgaggcacgggcgagggtaggggatcttggaggtggggtcaatttgaccggtggaggcctagggtggccggtccacggcgggtggcgggcgctcgcggtggtgaagtcgctggcgaggccaccgggcgcaataggcgacgagcaggcgcccgggggaggggggaagggaggaggggacgacaagcgccgacgagctcgccatgatggtgggcgggcggtggtcggcggcgaacgcgccggtgaagacatgggcgagacgaggggtctgacgagcgggcctgggctaccagcgaaagagcgacgcgagagggagaggtga

SEQ ID NO: 19846 - DNA, 183 bp, Zea mays
  Peptide Sequence Number=SeqID_61625
atggaggcgacgactgggttaattttggcgaacgacggcttcctcccggtggtcggatggcggcacgcggcccagcggtacgatgtagcggcttgcccggtgaagcccagcactcccttcccgaggtactcagtaacacccttggacacggccctaaggcttaggagattaatcatgatatag

SEQ ID NO: 19847 - DNA, 156 bp, Zea mays
  Peptide Sequence Number=SeqID_61626
atggctaacatgacttgtggccttgtgggtaaagatgtgcaacctctgcagagtgtaaaactgccttacacttcacatgagctcccacctttggtgtcaaaggttcacaacaagccaattaaaaagaccaaagttgggttcaaaatagagagctaa

SEQ ID NO: 19848 - DNA, 576 bp, Zea mays
  Peptide Sequence Number=SeqID_61627
atgaagacggcggcggctatctgccttcactggagctgtgagaaggctatggtgcaaattgttcagcagataaatcatgatggagaggtcaatcgagctcgctatatgccccaaaattcatttgtaattgctactaagacagttagcgcagaagtatatgttttcgactatagcaagcacccatctaagcctccactagatggtgcatgcaaccctgatttacggctgaagggacataattctgaaggatatggcttatcatggagtatttttaaagagggacatttgttaagtgggtctgacgatgctcaaatttgcttgtgggacattaaagcaaatagtagaaacaaaagtcttgacgccttgcagatttttaagcatcatgatggtgttgttgaagatgttgcttggcacttgaggcatgagtacttatttgggtcagttggtgacgattatcatcttttgatttgggacctgcggtctccagcccctactaaacctgttcagtcagtggtggcgcaccagggtgagggcataggaaacctttgtcctgatttctttgggtgtacaaactag

SEQ ID NO: 19849 - DNA, 435 bp, Zea mays
  Peptide Sequence Number=SeqID_61628
atgccgaaggcagtcggcggggcggcggacgaagaggagttccgcgccgaggtggaggagcgcctcatcaacgaggagtacaagatctggaagaagaacacacccttcctctacgacctcgtcatcacccacgcgctcgaatggccctcccttaccgtgcagtggctccccgaccgcaccgagccgccggggaaggaccactccgtccagaagatgatcctcggcacgcacacctctgacaacgagcccaactacctcatgctcgcgcaggtccagctgcccctcgatgacgccgaggccgacgcccgccactacgacgatgaccacgccgacatcggtgggtttggcgccgcctccggcaaggtggaatttccgcccccacccttaccacaaactcttctccgggttttactcgatctctctggcgtgaactga

SEQ ID NO: 19850 - DNA, 297 bp, Zea mays
  Peptide Sequence Number=SeqID_61629
atggcaggcgggggcatggtggggggcgctttctgggcgacgcgggcgctggaggtggtcaagcggaacgattccccgggcctattgtggaagcgcatcaagctcaccaccacccgcaagaacaacgccaagaagcgcctcaagcggctctggcagcaagttagtgtagatgctctcgagcttgacgctgccgcctatgagcatggcgatgatgccaaggaggaagttgatgatgtccttgcctgcccctgtgatgatcgaaccaccatctggacctctttggcgatgagcagttga

SEQ ID NO: 19851 - DNA, 465 bp, Zea mays
  Peptide Sequence Number=SeqID_61630
atgtgggccccgctctccaactctcccttgtgcgtcggtgtcgctgtggggtgggcctgcgccgtcagggttttcttcatccgcgcaacagccgcgcatcgcgcgcacagaccgtatgccgcggactccgtgggcgcgagctcaacggagcttgcgccaacaaccaccgcggacgtcgcgggattcgggcattgtgactcgtgcgcgcgcgttggatggcttgggccctctcgtcaggctcctttccgtctccggctgcaacaaacaccgagttcttcacatgtcgttcgccccaatccgcgcacggtgatttcgctgggtgttgttcatctcctgctggcccctgcggagtataagaccaagctgtgcgcgggctctcccttcaaccctccagtgccccgagctccctccccagtagcctccgctcggcgcgccccatctctgctcccttctccatgccgctga

SEQ ID NO: 19852 - DNA, 1590 bp, Zea mays
  Peptide Sequence Number=SeqID_61631
atgcccccgcggccgtcgctccactctctgctcctcatggccgcctccgccgccgcggccagcggggactcgggcccgctcctcgctgcgcgccgccgtctagctgcgacggccgccgcaggggggcaccgcatccggctgctccactccttctcgccgggacgcgtccccaggcggcctgaggtgtatataaaaagaactttgagtggctttggcttaggagctaagcacccggggaagtatgttctttcggcaaaaaactactcaactgcttctgaggagaggcttgggaagatcattcagaagttgaaaaacgaaggtattaatcccaagcagtggagacttggaaattttcagcgcatgttgtgtccacagtgcaatggtggatctagtgaggaattgagtctcagtgtctacatccgaaaggatggcataaatgcaacatggaactgttttaggtctaagtgtggctggagaggttttgtccaggctgatggagttaccaacatatcccaaggaaagagtggcatagaaagtgaaactgaccaagaggttgaagctaagaaggcagcaaataaggtttatagaaaaatcagtgacgaggacctcaatcttgagccactctgtgatgagcttgtagagtactttgctacgagaatgatttcggcggaaacacttcggaggaataaagtcatgcaacgtaactggaataataagatatccattgcttttacctatagacgtgatggagctcttgttggctgcaaatacagggcagtcgataagacattttcacaggaggcaaacacggagaaaattttttatggtctggacgatataaagcgtgcacatgatgttatcattgtggagggtgaaattgataagctgtccatggatgaagctggttatcgtaattgtgtcagtgtgccagatggtgcaccacccaaagtgtccagtaagattccagaccaagaacaggcatctaggataatattagcaaccgataatgatcgtccaggtcaggctctggctgaggaacttgctcgtcggcttggtaaagaaagatgttggagagtcaattggccgaagaagaatgatacagatacttgcaaagatgcaaatgaggttctaatgtttttaggtccacaagcattgagaaaggttatagaagatgcagaactgtatcctataagaggccttttttcattcgaacagttcttcccagagattgacaattactttcttggaatacatggtgatgagcttggtattcatactggatggaaatctatggatgatctttacaaggtaaaggagcatgctaggaaactcttagagaagcacattcagaagccattctttaatgctaggtatggtgggtctgcacagcggatgactcctgatgaatttgaagcaggaaaacaatggttaaataaaactttccatcttatccggtgtgaagatgatagccttccatctattaattgggttcttgaccttgcgaaagctgcagttctaagacatggagtgcgtggtctggtgatagatccttataatgaacttgaccatcagcgcccctcaaaccagtaa

SEQ ID NO: 19853 - DNA, 444 bp, Zea mays
  Peptide Sequence Number=SeqID_61632
atggagtctggccttttcccacacagttgcccccggggttggcttcaaaactggaatggaggcccaccaaatatatacgacataagtggaagcgcacattttataaacaaatgtgataatggaattgtcatccacagaaacagggacccaaatgctggcccccttgataccgtgcaggtttgtgtgaggaaggtgcggaataaagtggttgggcaaataggagatgctttcctgacatatgaccgggttactggtgaattcaaggatgctggtaaggccactacagcacccagtgcaaaagcggcaaaacagtcacgcaaagaggcatataagatgccatttcaacatgctgctgaagacggaaccaatgcctttaatgtggccgtattttttaaaaaagatgcctttaatgtgacccaactgcgaattcagctggaacaatga

SEQ ID NO: 19854 - DNA, 234 bp, Zea mays
  Peptide Sequence Number=SeqID_61633
atggcgaagtctttcatcatcgccctagagggcccagctctcacctggttcaccagattgcctcctgtgatacccgattgcagggtttattttgaggaccgtttagagtttcgtcgcgatcttatggtccgaccgtaccgctacaatgagcatcatatgtttccccgagaaggggctcctgatcattggctttgggaagcaagggatgtagcagcacggccaccacacttttaa

SEQ ID NO: 19855 - DNA, 258 bp, Zea mays
  Peptide Sequence Number=SeqID_61634
atggagattgtataccggttcggtgatcgccaaattagatcggggcgttcgtttctaatccaacggcccatgaccctcggtaccccttcgcagattattattgtgtattttatttatatgtttggtgtgatgttaatttttgctatactatgtatgtttgtgttgatgcgagtagacgagcaagctactgaggatcctggtgcccagcagatagaagttgctgagcaggagctcattgaaggcaagttgtgcccttga

SEQ ID NO: 19856 - DNA, 159 bp, Zea mays
  Peptide Sequence Number=SeqID_61635
atggcgaagaggtggaggctgaaatcaccttggttcacggcggttaagacccgatccacggcacaaggcggtgcagcagccagctgggagctccgcttattaaaagcaatgctcagccttaaccattttccttggttatgtacttcatttatccgttga

SEQ ID NO: 19857 - DNA, 357 bp, Zea mays
  Peptide Sequence Number=SeqID_61636
atgccattgatggcattcaaggagcttgaatggaggaagagaaacggacgagttgaatctccattaacgaaggagaaacagacggtcgtggcgcggggctactctgtcggggtcttggcgcgtcggtgcttggggcagggcgtcgggtggcttggcgcgtcgggcactcgggctgtgcggtcgcggccgtgggagctgcgcgcagtgttacaacatggttcaccttggctcttccaaatgtgtgttggctccttgtcagtgcagcacggttggctccagttggctgttttggtccattcaccgagttggaaaagaccgatggtgctagctggttcttgtatgggcagttggcaatga

SEQ ID NO: 19858 - DNA, 4350 bp, Zea mays
  Peptide Sequence Number=SeqID_61637
atgaggctggtggtacgcgtcatcgaggcgcggggcctcccgcccacggacgcagacgggacgcgggacccctacgccaaggcgcagctcgggaagcagcgggccaagaccaaggtgatgcgcaagacgctctgccccgcctgggacgaggagttcgccttccgggtcggggacctcagggacaacctcctcgtctccgtgttccacgaggaccgctacttcgccgccgacgtcctcggccaggtcaagttgcccctcaccgccgtgctcgacgccgacaaccgcacgctcggaacgcagtggtaccaactgcagcccaagagcaagaagtccaagctcaaggattgcggagaaattcgtctcaacgtttctctggctcaaaactactctgaagaagagacgacggcacctgcacattgggcctcagatgaccttgcatcaaattcagacaaatcaactgaattggtgaaaggatcttctttgctgaatgttcctattgaagtatccacagcagtaccagagatctatgagatagaagctgccgaggaggataaatcaaacgctgctccatcatttgtcaacaagctatatcaaatgtttaatagtaaaccaaaagatacagaagcttctgccccacttccctccaagctgaacgacccttcagatattgccgaagaaacactgtcaaccagctctgaagctcctgagaagcaggatcatgatgtcagtgcaactatgacctttgatgagctactaaaggccttcggttctcagcatgaagggaaagaaatgcctgaaaatttgtctggtggagttgttcttgatcaagtttatgctgttgcaccgagtgacctgaacacacttcttttctctccaagttcagactttctgcagtcacttgcggagattcaaggaactacaggtcttgaaattcaacaatggcgacttgaaaatgacggtgaaatcctgaggagggtggtaagctacacaaaagctcctaccaaactagttaaggccgtgaaagcaacagaggacatgacatatttgaaggcagatggagagatgtttgcagtttttgcagatgttagtactcctgaagttccttttggcaatactttcagagtggaggttttgacctgtataatgccaggacctgaactacgaggtgacgaaaaatcttcacgtcttatggtctcttggcacataaattttgtccaaagtaccatgatgaagagcatgattgaaaatggagccaaacaaggcttgaaggataactatgttcagttctctgagctgctggctaaacattgtaggccagttgatacaaaagatacaactagcagtaatgaagtgctttcttctgtgcaaccagagcaagaatctgactggaagctagcttttcgaatatttggaaatttcgcacttttgtcctcagtttttgcatttttttatgtttctgcacacatcatccttgcaagccctagtataattcaaggtcttgagttcccgggcctggacctgccagattctgctggtgaagttgtagtttgtggagttcttgttctacaaggacagcgtgtgctaaatatgattgcacgatttatccaggcgaagaggcagagaggtgatcatggagtcaaagcacaaggggatggctggttgctgactgttgctctgatggagggaaccaacttggcagcaaccaaatcatctggttactctgatccatatgttgtatttacatgcaatgggaagacaaagacaagttcgattaactttcacacccttgaccctcagtggaatgaaatttttgaatttgacgccatggaagatcctccatcagtgatgaaaatacatgtgtatgatttcgatggaccctttgacgaagttgcatcccttggtcatgctgaagtgaatttcttgaaatataataatatatccgagcttgctgacatttggattcctttgaaaggaaagctggctcaagcatgccagtcaaaattgcatctaagaatcttcttaaacaatacaaggggtactgaagtcgtgaaggattacctggataaagtggagaaagaagttggcaaaaagattgctatgaggtctcctcacacaaacttagcattccagaaaatcttttctttgccaccagaagaatttcttatcaatgattttacttgtcacttaaagaggaaaatgctaacacagggtcgtatttttctatctccaagaatatttgggttttacacaaatctttttggccacaaaacaaaattcttctttctttgggaagatattgaagacatcctactggtccctgcaaccctgtcttccatgggaagtccgtctctggttattattcttcgaaaggacagaggaatggatgcaaagcatggagcaaagcaactggacagtcaagggagactaaagttccatttccagtcttttgtttcattcaatgtggcacataaaacaattacagcactgtggaaggcaaggtccttaacccctgaacaaaaggtatcaacactaatgggcatatttgagggtggtcctttggagtgccgggtgatggagaaagttggctgtatggactactctgttacagcatgggaacctgtcagagctgatatttaccagaggcaagttcattataagtttgacaagaaatcagcacggcacggaggagaagcaatgagcacccagcaaaagtcccctttgtctaataagaatggctggcttgttgaagaagtgatgacacttgaaggtatccctgttggcgaatgtttcaatctccatatccgataccaactggagagcaatgcatccaagcacaagacatgcacaatccagattttagggatcgacagagggtggttcgtcaaggggccattccgcacaggggccgcactttcaactttgaagcatggactgagcgaagacgggcacacccgtcgtcgggagcgcactaggacttctgatttgtgggcttggagtatcaacccaagtggtattgctaaggaagtgtggctaaccattactgacccagatgaatttccttcgtctgatttccaagtgcaccactcagcgcctgcgaggcttaagtttggtctttcatataagttgctaattcacgttgatgtggtggaggacctatctttcattgaagggcgtaacattcaggatcgcagaaggcggcgcgagttcgagtggaattatgggggaggaagggaagataccaccgaagggatgatgaggatagggaggatccgggccgtggaggtcgccatcttcggagcaggtcttggtgggatgggagaggctctcattgtcggggggctgttgatgactgctattccaacaacaacaagcatcattttaggggcagttcctcctatcgcagccgtggtctttcccaaaattcttggggggcatggctcttggctttccaaccaggtggctgttgtggaactgcagcacaagggtacctacccgttaaagcctccaagcatcggcaaaaacgtctcttttgcctcccccatcgcaactgttctaggtgcgacaatcactggtgacctgagggggccttctgtttttatttctaactcccctagtactgtctcttgtgcttttcatgacccaatgttggatgaagcatttctctattctggtgttgtaggggggcacaactcttcggtgatgtgcgaggagcggcagaattctgttgctcgggtggggagtgcggcgtcccccccaaccatgatggaggtggatggctcaaatttgtcggccaacactgctgctcttgaaccatctctgcttctttctgaggtacaaccttctccatgcctagtggattttattagttcgataacaagaccagtttcccctcccctgattgcgcaaacacctctcacaaaccctgatagaactggtctgaaccggtttcctcatgaaagcaatcactctgctcctcaccttattatccctacagacagcttgaaccatataccctctgatattgctgttgaaccagccttaccacaacctcatgtacatgaaacaaatgggtacagtcctttgcatattatgggagcagcctcagaaccaacctcaaccccccaagatcagctgccaaaaacagttccattttctggaccttccacctccacacaaatgccaattaaaacagttgcctacgctcttgtgcagcattttgatcaaccactgtccaaaggaaagattgaggccatcaagaacctgctggaaaatgggaagcagttgaagaagaaggccaggggcaccaaagtcgcgccagctgttctggcttgcccatctgcgctgggctaa

SEQ ID NO: 19859 - DNA, 2109 bp, Zea mays
  Peptide Sequence Number=SeqID_61638
atggccacttccaagctcatcactataactatgactatcctcctcttcctaatcgtagggtttataccagaactctgcgtcgccgctagtagtgaccatgaacagttcgtcttcaatggcttcaccggcagcaacctgagcttagatggcgcagccagaatcacgtcgactggcctcatcgagctgactaatgattcggcccggatcaagggtcatgcgtttcacccatctccgctgcgcttccgccggtcctccgatggcacggtccagtccttttccgtctcctttgtgtttggcatcctctcttcattcggggacatcaggggccatggctttgccttcttcgttagcccaagcaaagacttcaccgccgcttacccaatacagttcctgggccttttcaactccacgaacaacggcagcctgagcaaccacatctttgcagttgagctcgacaccatccaaaacaccgagttcggggacataaacgacaaccatgtcggcatagacatcaacagcctcaactccttgaaatcctacgcggcaggcttctacaacgatcagaacagtggcaggttcacgaacctacccctgattggaagccagcagccaatccaagcatgggtggagtatgacggcaacaagacgcggatcgatgtgaccatagcccctctaggcctcgcaaaacctctgacgccactgctgtctctagccttcaacctttccacagtactcacggaggaagaagcgtacattggcttctcatcttccacaggcctgagcacggggcatcacattattcttggctggagcttcgggatgaatcgccctgctccagccatcgactccaccaagctacccaagctaccctaccttgggccaagagccccctctaaactcctagagatcgtccttccgatcgcgtccgcccttttcgtgttagtggttggcactacggctgtgattctcgtcaggagacatctcaggtataaggaggatgtacgtgaagattgggaggtcgagtatggcccccagaggttcacgtacaaagacctgtcccacgccaccaaaggcttcagttccaagcacttggtcggcgtaggaggctttgggagggtgtacaggggagtgctcccaaagtcgagatcgcaagtggcggtaaagacggtaccatacaactcgaagcaaggcgtaaagcagttcaccgccgaagttgccagcatggggcacctccagcacagcaacatcgtgcagctgcacgggtactgcaggaggaagggcgagtttttcctagtgtacgactacatggtgaacggaagcctcgacaggtacctgtacggctacggcggcgaagagggcaggccgccgggggccacagccacagtagtactagactgggcgcagaggttcaagatcgtcagagacatcgcgtcgggtctgctctacctccacgaggagtgggacaaagtcgtcgtccatcgggacgtcaagcccagcaatgttctcctcgacaacaacatgaatggccgcctgggagatttcggccttgccaggttgtatgaccatggcactgacccacacaccacgcacgtggttgggacgatagggtacctggctccggagcttgcgcacagaggcaaggcaagcactcgcaccgacgttttcgcctttggcgtcttcgttcttgaggtcacctgcggaaggaagcccgttgtcgtcagtgaagacacagacaccccaggcagaggcacgcagctgatgctggtcgattgggttattcagaactggcacaaagggtcactcgttgatgccatagatatcaaactgcagggtagatatgacgtcgaccaggcatgcctcgcgttgaagttgggactgctgtgctcacacccgtctcctgatgcaaggccaagcatgaggcaagttctgcagtatctcgatggtgatctgccgctaccggagctgctaccggcgcacttcagttttcatatgctcgccttgctgcagagtgaaacacggcttaacacatcaacggtgtcattgtatccatcaccagcgatgaccatgatggactatggttcagtatcattttcactagatggaagatag

SEQ ID NO: 19860 - DNA, 351 bp, Zea mays
  Peptide Sequence Number=SeqID_61639
atgacagttacactccgtacggctcagcatggtccaccgggggacacgctcggaggtccacctgtcagcgtaacacgcggtgcccaacatttggcgcccaccattcatgcgacgatgataacacccatgatgcctccaaagaaaaacaccctccctagctcaccatcaaacaacgaatacgccagggtcgccctcgtcgccaagaaaggtaaggttgtcctcacctctgaccactccccagcacctaaactaaaggcctctgtcgatccacagggtgaaggcctcatcgcaaagcaaaagcagaaggaagtctccaccgagcagaaggtgaagtccacaccaccagcttag

SEQ ID NO: 19861 - DNA, 348 bp, Zea mays
  Peptide Sequence Number=SeqID_61640
atggcccgccgcccagttcctgcggtgcctccctggttactagcacccgcctcccaggtccagcagtttaggcatgaacgccttccactgctcccttcggtgacaacgtctgcagttgtcgaatccaattgtgcaatccaaggaagcgaccatttgggcatgtgttgcctaacaaaagcctgccaatgccctatgcacagcagtcagcagggcatgcttcagccactcacattgaatgcggatggcaaggttgcttctagccgaaggcttgtgccacgcgccaatgggccacgtggcggcttcggacctctgcccgagcgtaaagtgggagccaagagcgcatactag

SEQ ID NO: 19862 - DNA, 585 bp, Zea mays
  Peptide Sequence Number=SeqID_61641
atgagcaattccgtcatctccgatcccccatggtttgattgtgctgcagaactcctccacgtacaaacgcgaacacaacaggctgcacttggtgatcccattgacagcattggtgcgagacgattacgacagacctctccttatctctctcgctgctctcttggtggtgcccatggcagtactgccatcacggctttggtgcttggttcggcgttgatgtccaggggtggagaggcaggggtcacggcgacgaagactccaacgaggaatggagtttatatggccaggggagcggcgcgcgtgcaggtattcgtggccggaacttcgggttcaagggatccgcagcaaccggatatatatgggcaggcgctgctgttgtcgattccgagcatggcggctaaattcagggagatgtcggaggaatttgttgggattccagccgatgctcgcgaacacagagaaggagatgaagtccgaccaggggggaaaacggcagatccaatcgcctgggcctgcgatgcggagtctgttcgggagtcaaaccgggttttgaattttacatacacacgcaaacctccagcatga

SEQ ID NO: 19863 - DNA, 189 bp, Zea mays
  Peptide Sequence Number=SeqID_61642
atgggtgaggctagcgctgcgcgcgcgatgctgagtgggccgagcttcacggtggaacgaagacggaatcgagcccggaaatctcgagagttttgttacggagattttgggccttacatggaggccctatggaagctttgggatcgtggtctcatcgcggccggagttgtcgcgaccttccacctttga

SEQ ID NO: 19864 - DNA, 531 bp, Zea mays
  Peptide Sequence Number=SeqID_61643
atgccccactcgccagactcaatatcacagcagcgtgggtcaggcccgtctgctagtactaacgccgcgcgcgcagtctctgaaggcgggctccactggacagattctttccccttccttcgtcaacgtccgacgcggaaatccggatcacaacgagctgcgcggaatccgcgggaagctagccatgaaccccacgatcgactcagccataagacctacgttcctcgacttctttgccctttcgccctcggttgtgattgcttaggtagccacgggattgccagggcggggaatttggagccgtcgccatcgaccgtcgtggggagctctgatttcggccggggttgcactggcgtcgccgcattggactgcagggcatgtgcgcactgcatctccgaggctcggacacctggcgtgcgcccaattatcgcgccggtgagttttgccgcggctctgctccgttcgtgttcggcgcctcagctcgtcaccataggtaagccccccaaaccgttgcttacgtttgcgcaatag

SEQ ID NO: 19865 - DNA, 1890 bp, Zea mays
  Peptide Sequence Number=SeqID_61644
atgaaggagtccgaccaactcgcgacttctttcatcacgcccttcggcatgtactactatgtcaccatgctgttcggcttgaggaatgcgggtgcgacgtaccagcggtgcatgaaccatgtgttcagccaacacattggccggacggtcgaggcctacgtcgatgacatcgtagtcaatacgaggaaagcctccgacctcctttccgaccttgaagtgacattccgatgtctcaaggcgaaaggcgtgaagctcaatcccgaaaagtgtgtcttcggggtgccccggggcatgctcttggggttcatcgtctccgagcggggcatcgaagccaacccggagaagatcgcagccatcaccaacatggggcccatcaaggacttgaaaagcgtacagagagtcatgggatgtcttgcggctctgagccgcttcatctcacgcctcggcgaaagaggcctgcctctgtaccgcctcttaaggaaggtcgagtgtttcacttggacccctgaggctgaggaagccctcgagaacctgaaggcgctcctcacgaatgcacccatcttggtgccccccgctgccggagaagccctcttgatctacgtcgccgcgaccactcaggtgcttagcgtcgcgattgtggttgagagacgagaagaggggcatgcattgcccgtccagaggccagtctacttcaccagcgaggtattgtccaagaccaagatccgctacccacaagttaagaagctgctatacgcggtgatcctgacgcggcggaagttgcgacactacttcgagtctcatccggtaactctggtgtcatccttccccctgggggagatcatccagtgccaagaggcctcgggtagaatcgcaaagtgggcggtggaaatcatgggtgaaacaatctcgttcgccccttggaaggccatcaagtcccaggtcttggcggacttcgtggctgaatgggtcgacacccagctcccaacagctccgatccaaccggagctctggaccatgttcttcgacgggtcgctgatgaagacaggagccggcgcaggcctactcttcatctcgcccctcggaaagcatctacgctacgtgctacgcctccatttcccggcgtccaacaatgtggctgagtacgaggctctggtcaacgggttgcggatcgccatcgagctaggggtccgacgcctcgacgctcgcggtgactcgcagctcgtcatcgaccaagtcatgaagaactcccagtgccgcgacccgaagatggaggcctactgcgatgaggttcggtgcctggaagacaagttctacgggctcgagctcaaccacatcgcccggcgctacaacgagactgcggacgagctggctaaaatagcctcggggcgaacagcggttcccccggacgtcttctcccgagacctgcatcaaccctccgtcaagatcgacgacacgcccgagcccgaggcaccctcggcccagcccgaggtacccttggctcagtccgaggcaccctcggctcggcccgaggcatcctcggttcagcccgagaaggcacccgggggctacacgcacctgttggtcgccatcgacaaattctccaagtggattgaggtccgacccctaaacagcatcaggtccgagcaggcggtggcgttcttcaccaacatgatccatcgttttggggtcccgaactccatcatcaccgacaatggcacccagttcaccggcagaaagttcctggacttctgcgaggatcaccacatccgggtggactgggccaccgtggctcaccccatgacgaatgggcaagtagagcgtgccaatggcatgattctacaagggctcaagcctcggatctacaacgacctcaacaagttcggcaagtga

SEQ ID NO: 19866 - DNA, 585 bp, Zea mays
  Peptide Sequence Number=SeqID_61645
atgagcaattccgtcatctccgatcccccatggtttgattgtgctgcagaactcctccacgtacaaacgcgaacacaacaggctgcacttggtgatcccattgacagcattggtgcgagacgattacgacagacctctccttatctctctcgctgctctcttggtggtgcccatggcagtactgccatcacggctttggtgcttggttcgacgttgatgtccaggggtggagaggcaggggtcacggcgacgaagactccaacgaggaacggagtttatatggccaggggagcggcgcgcgtgcaggtattcatggctggaacttcgggttcaagggatccgcagcaaccggatatatatgggcaggcgctgctgttgtcgattccgagcatggcggctaaattcagggagatgtcggaggaatttgttgggattccagccgatgctcgcgaacacagagaaggagatgaagtccgaccaggggggaaaacggctgatccaatcgcctgggcctgcgatgcggagtctgttcgggagtcaaaccgggttttgaattttacatacacacgcaaacctccagcatga

SEQ ID NO: 19867 - DNA, 461 bp, Zea mays
  Peptide Sequence Number=SeqID_61646
atggtggaggagcgggacagtggacggcgacggcgaggaacggagcaggaggcggggagctgttgtggatcgacggcggcggctaccgtggcagcgaggaacatagcaggaggcggggagctactacggtggaggagaaggacaatggagagccgcgacggcgaagaatggagtaggaggcggggagctgctgtggatcgacgtcgactactgccacagcggcgaggaacggagcaagagctgaggagctgctgtggattggcgcctgctgctgccgcggcggcgtggagcggaggacgtgtggaatcggcggcggcgtggatcaacgagcagagcgctggaagactggatcgagatagtaaatgggaaaggggacatatctgcaggtcccttcggaaaaatggcgagaacgatgtagggaacacgatcaagttggatcagacggacaagaaggcggttag

SEQ ID NO: 19868 - DNA, 384 bp, Zea mays
  Peptide Sequence Number=SeqID_61647
atggcgcctcctgttgacgtggtcggtccgagccctcggttgggcgaggtggaggctcctccgaggtcgaggtcgagtctgtcttccgaggccgaggtcgagtccgagcccccgggtcgggcgaggcggagaccgtcggctgatgccagggttgagctcgagtctgagccctggggttgggcgaagcggagttcgtcgtctttcggggctaagcccgagtccgacccgagttcgtcgtctttcggggctaagcccgagtccgagccctggggtcgggcaaagcggagttcgtcgtcttccggggctgagcccgagtccgagccctggggtcgggcgaagcggagttcgtcgtcttccggggctgagcccgagtctgagccctag

SEQ ID NO: 19869 - DNA, 323 bp, Zea mays
  Peptide Sequence Number=SeqID_61648
atgcccaacctcaccacacttgaagcaggtggtgcccgtagtggtgttctggccagcaagtcttgccggggtgccagtgggggcagcctgacaaggtcccagagtctgagtggtggcctgaggtgtctgctgagcaggacactggtaagactaccgccctcctccagaacaagctggtgtacccttgggtggagcaaagcgaggacgaatgctgctgctcccctggccctgcgtgatagccttcctcttcatctcgccaagcagaacacgtttgggtttcaagtgcgatggccttgtctagaagcttctagaaagatgggaag

SEQ ID NO: 19870 - DNA, 249 bp, Zea mays
  Peptide Sequence Number=SeqID_61649
atggtgaagccgactatacctcaagttcctctaattaatcagggaaccgagggtttcttttacaaaaaaaccaaacgaaggggtatcgggttccctcggccgttggatcttggatcaacagttgagattagaccagcagggcaggcgcgcgaggtgtgggtggatgacagggaggcccaggggcagtggcgcattgagggcgcggggctctggccgctggatggggaatcaagggccctggttcaatga

SEQ ID NO: 19871 - DNA, 378 bp, Zea mays
  Peptide Sequence Number=SeqID_61650
atgctccagctccgattgttatggcggatcccaactgactggcgtttgttacaacaaccgctcggcgctttgttcgataggagtatctgtagccgagccccacacttccaggaaaaccgtgctcaacgcggggtcgcaatcgaccgacgggagtccgctgtcgggggtcaggttggaacgaccaatcctgtcggagctcgacggggaggggcggacccggccatcggcatgagaggaagggagctcgggaatgcgatccgggattctatgtgcgattacaagaaaagggagaagaaggagctgtgcagtgggacccacgaggatttggatttgaattcaactatgaatatgaattttgtactcaaactaaaggtttaa

SEQ ID NO: 19872 - DNA, 585 bp, Zea mays
  Peptide Sequence Number=SeqID_61651
atggcacaacgagcagtaaggaaggagctttggcaggggaaaaaggccgcttcggaaatctggagaggagagagaacgcgccgggtcttcacgggcgacggtgcccacgggttcttatacccggaactgagtccgatttgggggggattgggtcaacggagcgcgccatgcgcgcgagcatccagcggagaggataagtccgtcgcatgctccagctccgattgttatggcggatcccaactgaccggcgtttgttacaacaaccgctgcgccgctttgttcgataggagtatctgtagccgagccccacacgtccagggaaaccgtgctcagcgcggggtcacaatcgaccgacaggagtccgctgtcgcgggtcaggttggaacgaccaatcctgtcggagctcgatggggaggggcggacccggccatcggcatgagaggaagggagctcgggaatgcgatccgggattctgtgtgcgattacaagaaaagggagaagaaggagctgcgcagtgggacccacgaggttttggatttgaattcaactatgaatatgaattttgtactcaaactaaaggtttaa

SEQ ID NO: 19873 - DNA, 612 bp, Zea mays
  Peptide Sequence Number=SeqID_61652
atgcctcgtccatggcaatttgacaacatcgtcctttgcatcagctacttcctctacgactacctcgactgcgtcgccgtctttgtctatggcaccctccttctacgccactgtcaccctggcgcctcttggtgcgccacaggccttcccgtgtgctttgcctacatccgcgacttatgcagctcgtcttcttctgcatcctcgacagctacattgaccatagctacccaatgcacgacacctcaacaatggctcgacgcccttgcactcggctatctcgacattatcggcacaaagggctatcatttgtatgggttagtccaatcacagtattgggggccttcatcttccgaaggtgcgcacggtatgaaaggcgtggtctggaagaaggatgaatcagttccgaagctatgggtggagaagcttcggcttagcgcaaagacgcatttgagaacgagtgaccaacattggcgcccacctccggtgaactcatttgaccaccttcggcaagctatgaccttcgtcatgccgctgaagaagtcttcagggctagaggctgcactacagccactggacgtcaatcaggacacattacgcgaagctaggagctaa

SEQ ID NO: 19874 - DNA, 267 bp, Zea mays
  Peptide Sequence Number=SeqID_61653
atggctggtgcagagatgaaggtacaagatgtaccagaaaagactacaggctcttctccgtcttcctttgtcgatgtttcagaaatactaaagcctactgcagtcgaaaggagaagggatttgaacaaggctcaggaggaaaggagactgttgcggctaccggggaaaatgtcggggtcagaagaaatagcaaatgatggacgtaatgcaagtcgtccaaaagatcacgccctcaacttcggcggaaaaaattggtgtgcatgctaa

SEQ ID NO: 19875 - DNA, 261 bp, Zea mays
  Peptide Sequence Number=SeqID_61654
atggcacgggctcgacttggcgcgatgtggggcgcgtggggtctggcgtcgggcgtgctctggcgaggagcatcgtcagaaatgaaggttcacgatgggggtcttcttctccgccgaaggtctttaagacgaagatatagcctaaaaatgacaacgatgaatgccaaagctatagccgaagagcaacaacttcggcttaaagtagtgtcgaagataaagcatgatgctgagccgaagaggaaaagactagctagggcctaa

SEQ ID NO: 19876 - DNA, 2391 bp, Zea mays
  Peptide Sequence Number=SeqID_61655
atggcagctccccttctcttgcctttgatcctgctgctgtcgtctactcctcctcttcaagcccaacagaacatcacccaaggttcctccttgacgccccaagggcctaccacctcttggcactctccatctggcgactttgcgtttggcttccagcccatcgacggtaacacctctgtctacttgctggccatctggttcaacaagataggcaaccttacggtgacttggtatgccaagaccagcgatcaggatccagtgccggtgcaagtttcatccggctcacgcctccagctcaactccaatggggcgctctcgctgcaggactccaccggcacagaggtatggagtccccaagttgtgggcgcatcctacgctgccatgctcgattctggaaactttgtactggctgctgcagatggctctaccagatgggagagcttcaaataccctacagataccatcctgcccactcaggtgcttacccctggaatgagcctccgcagtcggatcatccccacagactattccaatggccggttcctccttgacctgcaaagtactggtgtgtctctttataccgttgctgtgccctctggttacaaatatgatccgtattggtccatggatgtgaacaccacagatttggtgttcaatgcgactggtgcgatatatatcggcaacaatactgaaatcacatcttgggtgatcagctccatagcagactactaccttcgtgccacactagacccagatggcgttttccgacaatatatgtacccaaagaaggacaacaaccagagtaatcaggcatggtcagcagtggacttcaagcccccaaatatctgcggagcacagctgacaaagattggaagcggtatttgcggttttaacagttattgcttatggaacggcgcaaacaaccagagtacctgcaagtgcccagatcagtactcatttattgatggcgagaggaagtataaaggctgcaaaccagacttccagccacaaagttgcgacttggatgaagcggcaatcatgacgcagtttatgttgatgccgacgagccttgttgattggccactatctgactatgagcagtatacctccataactaaggatcagtgtcagaaactctgtctgacagattgtttctgtgccgttgctgtgttccatagcgaagacaatacatgttggaagaagaagatgccgttgtcaaacggcaatatggcggataatgtgcagaggacagtttatatcaaggtacgaaagaacaatggcacacagtctgagatcactgatcccaacaaatggaagaaagacaagaagaattggatcattggaagttcattgtttttgggaagctctgtcttggtgaacattctgctgatttctataatactccttggtagttactgtaccatcacgataaagcaagtcccagctatgcagtcatcaaacaatataggattgcccctcaaagccttcacttatactgagcttgagaaggcaaccggtggtttccagaaagtgattggcactggtgcttctggtattgtgtacaagggccagctacaagatgatctcagcacccacattgctgtcaaaaaaatcgacaagcttgcgcatgaaacagaaaaggagttcaccagtgaagtccaaactattggacggacacaccacaagaacttagtcaggttgctaggattctgcaatgaaggaaaagaaagactattagtgtatgaattcatgaccaatggatcactcaacagatttctatttggtgatgccaagcttcagtggagtattcgagctcagcttgttctcggggtggcaagggggctggtatatttacatgaggaatgcagcacacagattatccattgtgacataaagtcccaaaacatccttctcgatgacaatttcacagcaaagatctcagactttggcttagccaaactgctccgaaccaaccagacacaaacaaatacaggcattcggggtacccgaggatatgttgctcctgagtggtttaagaacatcggtatcactgccaaggtggatgtttatagctttggggtcatcctgttggagcttgtctgttgtcgacggaatgttgaattggaggccgcagaggaggatcaaaaaatactgactgactgggcaaacgactgttatagatatggcagaattgattttctggtgaagggtgatgaagaagcaatttctgatttgaagaacgtggaaaggtttgttgcagtggcattgtggtgtctacaggaggacccaactatgagacctacaatgctgaaggtgacacaaatgcttggtgaagcagctgtagtccccagccctcctgatcctacttcctttgtcagtacacttgcatag

SEQ ID NO: 19877 - DNA, 507 bp, Zea mays
  Peptide Sequence Number=SeqID_61656
atggccgccgcgagggcagacggggagcgcaggatcggggtggccatcgactactcggagagcgccaagaaggcgctggactgggccatcgacaacctgctccaccacggggacaccctcgtcgtcgtccacgtcctgcaccacggcgcggaggagaccaagcacacgctctgggccaagtccggatcccgtaagctccccccactcaagctctcgccgcatccatctctaccctacccttacccaaatgctcacccgctgcccgctgcgctgatcccactctccgagttccgggagcccgaggtgatgcagggctacggcgtgcgccccgacgcccgaggtgctcgacgcgatcgacacggcagcgcgccagaagcaggactggaatgcgctgttcagcctctgatagattctcctgggaagcgtgacaaactacgtgctgtcaaacgcatcgtgcccggtgacagtcgtcaaggggaagtagtggcctgggcagcgtgccagtga

SEQ ID NO: 19878 - DNA, 390 bp, Zea mays
  Peptide Sequence Number=SeqID_61657
atgggagacggcacacggtcaaacaaggtcactgaaatgacagaagagatttcacaggaatttgaagaatttgcaaagggtggaagaaagtgcatactgaagcacagcagggaactgagagggagtgagaacagagggaggctcaccgaggggagggaagaggagggagacgaagtcgccggagcccagtcgaggacggtggccgccggtggagggagttcgccggtgggggagcagagaatcgccaagaacagagagcagctggcggtggaggaaaagagtgagcctctggctcggatgcgggctggaggcctttttttaaaacgacgatatgggcgcaccggacagtctacagtgcctgtccggtgcacaccggacagcgcacagtag

SEQ ID NO: 19879 - DNA, 1125 bp, Zea mays
  Peptide Sequence Number=SeqID_61658
atgtcgaccacggagtgcgcggacctcggggaggagttctggctgccggaggactttttggacgacgacttcttctccgaggaggagaaggcggccgtggcggcccggagcgagagcgacgaggaggacagcctggcggggctctcgcgccgcctcgcgggcctcctcggcgacgggggagagcttagtggcgcgtgcgtgcgtgccggagtttctgatggtgcgtttcttgtgcggcaggcggaggtgacggttgggtcgccgcagtcgacgctgtgcgggctgcccaagtcggggcaggagagccccagcggcggggcgtccaagggcacctcgccgccgtcatcgcccctggaccagaggcccgccgacccgtgggatctgctctacgaggcggccggacaggttgcgcgcatgcgcgccgccaacagcgtgccggtgccggccgccaacggtttccacggccggagcgggttcgcgccgccgccacgcaagccctcgccaccgccaatcgcacctccctccaccaaagtccctgccggtgggcactactacgacccgttcgcgcgcttggtctcgcagcgccagatgcaggctgctcagttccatctcctgaagcaacagcaactgctcaagctacagagggagcgccaccagcttgccgctgccgcggcgtggagcgcgcgccagggcgcatgcgccaagcccgtcggctgcgttcgcggcgacgcgctgcttggtctgaacccggcggcgtgcctcccgcctcagaagccgcagcaccaccaccacccccaccatgcgccggcggctccggcctctggcatgcgtgccgtgttcctcaccccgtccggccccaagcgcgagcgtaacggcactggcgtgtttcttcccaggccggctggcgccccggcagagccgaagaaaaagacagggtgttcgacggttcttgtccctgctcgcgtcgtccaggctctcaatctcaacctcgacgacctcggcgcgcagcctcgttacccaggcggctttgttcttgatcacgaggccttgattagtaggagcaacgccatgcttgcgagccagaagcgccgggctgcctcgcaggcactgtgccacagttcttga

SEQ ID NO: 19880 - DNA, 789 bp, Zea mays
  Peptide Sequence Number=SeqID_61659
atgtacatagcgcgggagacttccaaggtgtggaggaaggtggccacggaggtatcggtggagctgcagctcctgcgcgagaagtgggggctccttctcgccggtctgatctttcagtatattcatggattagctgctcgaggagtgcattatttgcatcgacctggaccactgctccaggacttgggatttatggcccttccagagctcgggcaagacaaaggttatcttagtgagactatattttcttccatcttcatctcctttgtgttgtggacattccatccttttatttatcacagcaaacgtttctatactgtcctaatctggcgcagggtgcttgcttttttagttggctcaaaactggcaactcttccaccacccaatagtgtacttgaagtgctcctgattaactttcctcgtggggtactttttggttgtggtgatttgatattttcatctcacatgattttcactctggttttcgttcgaacttaccaaaaatatggttcgaaaaggtttattaagttccttgcttggttcatggctataattcagagtctccttataattgcttctcgcaagcactactcggtcgatgttgttgttgcgtggtacactgtaaacttagtagtattctttgtcgacaacaagctgccaggtgctggtttgtgtcatattaggacttgtgatttatgtgtcaccttgcgacagcgggcacagatgaacgggaggcacgacgaagacatcaatcacgcgctctccgaggccactgccaacggcacgtaa

SEQ ID NO: 19881 - DNA, 354 bp, Zea mays
  Peptide Sequence Number=SeqID_61660
atggctaggcctgttattgctaaggtaaagttgctctggcaatggttgatgttgccaaggaagttgatgcagattgttgcttgtggatgcaccgagaaaggcaatgatcaggtatcagaagattggcatcgtcgcaggtgttcctgtttgcatcaacggataagacgtgtcgcccacatccgtctcctcgctgagctcaatgaaattggtgggaagcatgggaggagacttcctcgtttgatgacggggaaatctataaccaggctgacgccgagggggggtcatcaggctctggtctcccgaccggggtccgggcgatgctggagaagggtatctgaatctttctttgtttga

SEQ ID NO: 19882 - DNA, 168 bp, Zea mays
  Peptide Sequence Number=SeqID_61661
atggccattaatcttgctattgctgttgctatccagtacctggaatcgtcacatctttatcgtactggcgatgatgcagccgggcgtgccgagccgagaatacctcatgtcgaatcatatcgagctcagaagcccgatgggaagcagatgcttgacgcgccaatttga

SEQ ID NO: 19883 - DNA, 819 bp, Zea mays
  Peptide Sequence Number=SeqID_61662
atggtgggcggcggagggcattcgtcgatggaccacactggcgccaaggaccttgagcgcggcgagcttcgccgtggtgcgcctgagtttgcggacggcgacgatggagacggggaagaaagccagtacttctcggacgcggaggaccggtcgtggccgtctcactcgcgccacgactccaccgcctacgaggactacgtctcgccgtgcgtgtccgcccgcgcgagctccgtcgacgccgacgccgacgccgacggcgaggccgtgagacaacactgcaggaagtcgtcgtgcgtgtcagagggctcgctggacgacgttgacctggaggccggactgagcgagatcatcaaggccagccctgagaagaccgaacagaactgtcgcatttgccaccttggcctggagagcgcggcggccgagtccggtgccggcatcacgctcggctgctcctgcaagggggacttatcctacgcccacaagcagtgcgccgacacctggttcaagattagaggcaacaaaatgcaattggacttggacagtgtatatggactaaaaatgcctctcttgttcttcactgccagggtctgtgagatatgtagctcgactgcatccaacgtggtagtcttgggggatcccgagttcagcgaccagtggagcgaaacaaacagcgccgccgccgccgccgcgcaggcgccgccgccaccagccgaaccccggaggttctggcaggggcatcggttcctcaacttcctcctcgcctgcatggtgttcgccttcgtcatctcttggctcttccacttcaacgtccccggctaa

SEQ ID NO: 19884 - DNA, 525 bp, Zea mays
  Peptide Sequence Number=SeqID_61663
atggcttcctccaccgctctcgccgccattctcctcgtcctcgccgtcgccgtgcaatccgcccgtggcgggcagctggcgtgcgaggagctgccgccggacgcgtgcgccttcgcggtgtcgtcgggcgggaggcggtgcgtgctggagcgcacgcccgagggcgcgcaccggtgccagacgtcggcggtgcgcggcgcgcggggcctggccgggtgggtcgagaccggcgcctgcgtgcgcgcctgcggcgtcgaccgcgccgcgctcggcctccccgtcgccagcgccgcggccgaggaccgccgctccttcggggcgctctgctcgccggcgtgccgcgacgcctgccccaacgtcgtcgacctctacgccaccctcgccgccgctgaaggtatgtcgctgccggcgctgtgcgaggcgcagaacaaggctgggaaccgacgcatgatggctgggatggccccagtcgccgctcccgtggccgctccggtggctgctgcgccagctccatgtgaagactga

SEQ ID NO: 19885 - DNA, 189 bp, Zea mays
  Peptide Sequence Number=SeqID_61664
atgacgaggcttattggtttcagctgtcgacttgggtctggaccaggtgctttcacacttattgttgattcaatagtggggcatggcaatcagacatgttctgtgcttaaagttcacttaattggtcatagtgatttttcgtttgagtggaaacgaaaatatcatccaaaatttatgcgcatgcaatga

SEQ ID NO: 19886 - DNA, 1110 bp, Zea mays
  Peptide Sequence Number=SeqID_61665
atggcgctgccgctggacaggacctttaatgtcgtagccgactgcgaacggtttgaggagtacattggtgagctgcgagaggcagtgagggaccctaccgaaccgccgccattagcggcgactcatccgaacctctaccggctccggcagaccacgagacgggagcccaggcagtggctccaccttcggatggtggccaggaacgccgagatcattgtgtggatccgcacggacaacctctacgtcgtcggcttcgagcaggtgcgaggggcacggtacgagttcggtgttgaccccgccaatgacgccaaagagaagaacaagaagaagaaggataaagagaagaaagccaagaagaagaacaagaaagaggaccaggagcaacaggaacggcggccactgatatcgggcgcaacgttcctcgggtttaatggcggctacggcgatctccgtcagctgcagacgggtccggacccggaaaggcggacggtaccggacctcggacgggagccgctggtggaagccatccaaggcttggccgcgtacacgccggcggcgccagggttggtccgggactggcttcgaaccatcgtcgtcaccgtcagcgagtccctcaggctacacaacgtttgccggcatatcgcccggctcctcctcggtgagtacacgagagggtggctggaccaaagcctagtcgactgcatccgtgactggggcgacgtctcggcgtgtgtgcttgctagcgccgcccaccccgaaggcgacgctcatgggcggtacagtcagctgagtcacatctgcgagaacaccgatcaggcttgtgaggtggtggccatcctcaacgctggcgctgtccccgacgagccaggcccgagccgccgtcccaagcgtgaggccgcggtcggtgacggagacgacgacggctccgtcccgccgctggggctgaccttcgtcgaggtcttctcggcggtcgtcgagggcggcggcggcacggggaggaacaggagcctgctgtacgggcacatcgccatcgacgacgggctcagctcgggctcttcccagctgctcttcatgcgtgggccgctccaacgcgctgccggcgagtcttga

SEQ ID NO: 19887 - DNA, 225 bp, Zea mays
  Peptide Sequence Number=SeqID_61666
atgaacatcaatcatgaggcaaaaccgaggacggtttgctgtcaacaaggggagaatgatgagaacataacccgctcagatatgaccatgttaaaggctcctgcaacgaaggtgaaactcttccatattgtaactacattcgatattgaagaattgatattgtgttgtaaagtgtgtgtttgggaggtgaacgatcttggagtggagaaggcaacaaggcaataa

SEQ ID NO: 19888 - DNA, 192 bp, Zea mays
  Peptide Sequence Number=SeqID_61667
atgggaggcggtgcaccacaagttgttcctggaaccgcctgtgtagaggctaactggaccgcctgtgtagaggtttactgtagtagtgccatcacggacaacggctacgatctatgtagccgaagtccccctaccctcgggatcactgcccttgataggtcatggggcccacatgcaagagagggagaatag

SEQ ID NO: 19889 - DNA, 552 bp, Zea mays
  Peptide Sequence Number=SeqID_61668
atggacggattcacgcctcgcccgaggacctcctcaggcagtaggcgcacccccggctcgcccgaggccaagctcaagaaaactttgtcgtacagcaacctcagccaaatcggcttacctaccgaccgaaaaaaggacactattcaccccgttctgactactgtgccaaccaccaggggagctccgcctcgcccgacctcaggcctcggcctcagcctcggcctcgggagaaggtctccgcctcgccagaccctaggccttggcctcagcctcggcctcgggagaaggtcttcgcctcgcccgaccctaggcctcggcctcagcctcggcctcaggagaaggtctccacctcgcccgacctcgggcctcggcctcagcctcggcctcgggaggagtcacaacctcacccaatctcagccttggcctcgggagaagtctccgcctcgcccgacctcggcctcggaccgactgtgccacaggggatacatcattaccctacccctagctagctgccttaggctacgaaggaacaaagactggtgtcccatctag

SEQ ID NO: 19890 - DNA, 489 bp, Zea mays
  Peptide Sequence Number=SeqID_61669
atggcttctatagataaaataatcaaggacttagagcctaagaaaatgagtgaggagatagtagagcttcggcgttctgcattgttgctccttctcgaggtctttgtcttaagaaccttcggcataaggagggcgaacttcttgtggcactttgctgaagagccaaagctttctgcattacgctttcgaacaagtgcttcgtcgctcgatcagcttcgtcttaaggagactgaaaactcaaatggccagaaagaaactactaccgaaggtgctactgccgaaactgaacagactgtggccgaagacggaagtgacagtgaaagtgaggaagacaacaacattctgagcccgacgaagcctagtcatattgagtttgggagatccacagtaacagcaggggatttggttttgatgaagaagctgggctatttggggataactgaaagggaaatgtgcccttgggccatttctaagtattttggtgattga

SEQ ID NO: 19891 - DNA, 1044 bp, Zea mays
  Peptide Sequence Number=SeqID_61670
atgtttttcgacaggtcgctgatgaaaacaggagcgggcgcaggcctgctcttcatctcacccctcgggaagcacctccgctacgtgctacgcctccatttcccggcgtcaaacaacatggccgagtacgaggctctggttaacgggttgcgcatcgccatcgagctaggggttcggcgcctcgacgctcgtggcaactcgcagcttgtcatcgaccaagtcatgaagaactcccattgccgtgacccgaagatggaagcctactgcgacgaggttcggcgcttggaagacaagttctacgggctcgagctcaaccacgtcgctcgacgatacaacgagactgcggacgagctggctaagataacctcgaggcagacaacggttcccccggacgtcttctcccgagacctacatcaaccctctgtcaagaccgacgacacgcccgagcccgaggaggcctcggcccagcccgaggcaccctcgactcagcccgaggcacctcagcccccgaggaaggcacccgggggctacacgcacctgctggtcgctatcgacaaattctccaagtggattgaggtccgacccctaaacaacatcaggtccgagcaggcggtggcgttcttcaccaacatcatccatcgctttggggtcccgaactccattatcaccgacaacggcacccagttcactggcatgaagttcctggatttctgcgaggaccaccacatccgggtggactgggccgccgtagctcaccccatgacgaatgggcaggtagagcgtgccaacggcatgattctgcagggacttaagccgagaatctacaacgacctcaacaagttcggcaagcgatggatgaaggaactccccttggtggtttggagtctgaggacgacgccaagccgagccacgggcttcacgtcgttttttctagtctatggggctgaggctatcttgcctacagacttagaatacggctccccgaggacaagggcgtacgacgaccgaagcaaccagaccaaccgagaagactcactggactag

SEQ ID NO: 19892 - DNA, 357 bp, Zea mays
  Peptide Sequence Number=SeqID_61671
atgacgagctgcagtttggaacatgcactccggcggggtgggatgggcgcgcggcggtggatgggtgaggagtatggcgcgtggccagatgaggctgtgaggagcaagggcgcactggtggcttggaatcgggagtggtggtgtcttggcggctgcgagctcgggagcgggacgccggcaggtgaggagcacagcgcgccgggggctgaggtgtggggagcgctggcgggtgggcagcagggtacgccggcggattggaatcgggagcggaggtggagttaccgtaagggcataatcggggaagtcttcacggacccacttgccgggtgccccaaatgtatccgtgaccccttctag

SEQ ID NO: 19893 - DNA, 303 bp, Zea mays
  Peptide Sequence Number=SeqID_61672
atggcggaggaggtgaactggtcgctgtcgttgcccgccagcaagatcccctctggcgccttcaacgccatgttcgacgccacgcgcagcctctgcttcgacgcccgcctcgtcgagctctacagcgtcgaggccgtgcgcgccagccctcagccctcagggactgctgtcgaccgtcccagcagcagcggtgactggttcatcgacaagtacgggactcacgtcgtcgtcgcggtgaagatgggaggcaaggacgtgtttgattgtggcagcagtatcatgggacccatgaaagtacagtga

SEQ ID NO: 19894 - DNA, 393 bp, Zea mays
  Peptide Sequence Number=SeqID_61673
atgggggccaccctcttcggcgggctcacggagtcccggttcgcgaagcgccggccgggcttcgccgaccgccggaagagggccagcttgcgcgccgaaggcccaccctaccgggtgaagtgcgagcctgacgagcccgtaccagctagccagccaaaccaagggagcgtgcgagtgcgagggaggaaggacaggaagcggatcaagcagcgggacgacttcatcacggctgagaaggagaagcgcagagcacagtattctgccgctgttaagagaaaggaggcagaacggacagaaagggagatggctgctgtggcaagagatcgggcatgggcagaaaggttggtagagctaaaacagcttgaggaagaaaagaacactgcaatggcataa

SEQ ID NO: 19895 - DNA, 5199 bp, Zea mays
  Peptide Sequence Number=SeqID_61674
atgcgatttgcggcggcggccggaggctggcacagccgccgctggggcgacgacgacaacggcgccgtggatgcctccgccgccgccggatcgaagggactatttgtaccgggagggccgcaggcacgacggcggcgggggcgacccgctcctgccgcccgccccaacgccgccgcgctggcgggactcgccgtaccacccgtcgccaccaccacctctgcgggaccatgcgcggccctcgccgcgccgggcgccgacgtcggcctcctcaggggcggcggcgcgtacgaccgctcctaccctgacgacccgccgcctgtctacacgccgtcgcgctcggaccgatactggccggaggacgacggcgggcaatacaagggtttcggtcggtatggcggcggtggccgcagggacggccgtgacatgaggggttcgtaccggaggtccccatacaggggtggctacggaagcgacttctcccgaaaccatccagagcagccccctcccccaccacccagaaggtctccgttgaggtcagtcgctgttccgatctgctatgactcaccgggcaatagagttgacaggggggatagggacaacctcccacgggtgacaccatggcggagaagggaaagcagatctgagccagcagacgctgttggacttctctctgttggccaaaccacccggctctctgcctcagggaaggaggcttcagctcagcctctgtccgtgtctggtcctcatgggaccgaggacgaggcaccaaggaagaaggcacgccttggatgggggcaaggtttggccaagtatgagaagcagaaggtccaagggcctgtggatcctgctgaagctgttgctgatggaagtccagctgatggcgaactgaagaccacctctcctgtgcctgtgcctgtgcaccctgtgcctgtgcctgtgccttatgttgcacctgcacctcctgctgcaccagtgcttgcgcctgcgccagcaccttctgctgctcctgcacttttgtctgcccctatgcaatgctcatctccagttaccgggccaccatattgttcctcagcacctgaagataaatcttgtgaaatgatgccaaatgcggtcactaactctactaaagatgtcttggaggctgatgacacaactttcaataatgaatttctgatcaagttagatcagctcggtgatgatcctgttatttcccttggaaacatgcttgttgaacttatccagcacgaggattcttgttctggggattcaaatggcccgaccagtacatataagctgctcctactgaaggaaagcatttccaaggagattgaaaagactgaactcgagattgattcattggaaggcgaacttaaatctgtgaatactgaggctgcaactactcttgaaggttctcccacaggggtgacacatacagaaaatctttcaccctctagtgggacatccaaggttcctggaagtgtggagatctgtgatacatctgatatgataaaagaaccaggggagctcattggttctcctaaggtacctgtggtgcagtatgatgatgtcaaaagtgctgatatgatggaaattgaaacagctccagttcataatgcaaaaacagttccttcagaagctggtgctatatctcctgtagtcgctgagggtaaggcctgtgcagctgctgatcttagctcattgaaagcttctgaagaagctgggtctcaaaatgatattgacaatggcaggctggaaacttcttcacgccaagctaatgctgattccatgaaaatagaaattagtgatgacctaccagtgaagaaatggacataccatgatcataagtctgatttgctcagttctgtcacatctgcaaatagtgctatagccaaagaaattaatgaagtgctatttaaatcattgcctgctgatacacctcgccttgatttgtttgcatcaagtcatcttctgagccaaaggaagagcgatttgattgtcaaagaaaggcttggagtatgtaaaaccaggctgaggttgaaagagcagatgcttacaatgaagttcaaggcatattgtcacttgtggaaagatgtccaactattttctgcaaataaacagcgttcaaagtctaataagcgcactgatcagagcaaccgaacatcacaaattggatctcagaggcaacgctcctctaaccgctcgcgattaaccatgcctgctggtaatttaagtacattctcaactccagaaatgtcagatgttgcaatgaggttgttttcagagttcaaaattaagcggtgcagaaattacttgaaaatgcctgcactgattattgatgagaaagagaaggagtggttgaagcttatgaacaagaatggtctagttgaggatcctgttttagttgagaaggaacgggtgatgataaatccgtggactcaagaagaaaagaaaatttttatggagttgcttgctaaatttggcaaggatttctccaaaatcgccagtttcattacacataaatctactgcagactgtgtggagttctactataagcatcataaatcagatagcttccgagaagtgaagaaactattggaccttcgtcaacagcaacccaccagcaattttcttggagcgaaatctggacataaatggaatcctgagtcaaatgctgcttctcttgatatgcttggggtagcatcagtagtagcagcccatggccttgaatatgcaaaacaagtggagaaaatttctgcgaaatccctcatccggactgcatatgggcccaatgtgacttccgtggctaataaatcttctgataaggagtgcattgaccatgtgcctttgcacgagagagaatctgtagcagctgatgtactagcaggcatatgtggcactctctctcctgatggaatgggctcatgcattactagttctgctgatcctggacagaagattagcatgaaaagagtggagcatgtcttgtcccaagaaaatgacaaaaccgttgaggaggaagacacactctctgatcaagagtgtgaagttgacccagttgattggaatgacgacgagaagtcaattttcattgaggctatgaataactacggaaaggattttgctcggatctcgtcatgtgtgaagagcaagtcatatgaacaatgcaaagtgttctttagtaaggctcggaaatcactcggtttggatttgatccatcaaggggcagccgatgttagtatgccagctagtgataccaatggagggaagagtgatactgatgaggcctgcgctgtggaaatggattcagctatctgtagcacacagtcatgttcaaagattgcgatggatgtttgtcctactgaaggagccattggagggcctaactctgttataatctctaagcaggcagaagcatatatatcaaatgggtgcaatgctgatgttaaaattgaggaagatgagaagaggtccagtgatgctactcacgaagctggtcctattgacatcaattgcccaggaagcacagataagctgcaaggaactgatgatgtcgttgacctagtaaacatgcatagtaatagtggcatcagctcttcagctaagcatgcagtggccattcactcggaaatgagatccactttacattctgtagaggtccttcaaacagacaaaggtgaaggtactggtactgatttgtcctgggtggaagaatgttcacaccatgctctggataacacaccaatgaaaaatggaaattctggtgccccggctttcttggcttcagatagtggtatcaaggacaatgttcgcatctcaaacataactgctgcttccaccgttagtcctgcattcacttcaagttatcagcattctgtacctggagatatgcccctgccaaaaccaaagccacttgttaccccgcttaccccaaaggatttaatgcctgtgcagttcagttcagtgcttcctgaccccactgcaattcgtttcgagggcatagcctcaataactacgcccaacttcgaggacactggcaacagagtcagtggtgctctaggggctaaagagatgagcaagtacccagcttttagagacccatctggtaatcagcaaagcaccttgttttgtaatattgatggttatatgaatcatcgtctgacaactgaattaccatttttttctgaaagaactgcgagtggcactgtgaatacttcacaggcggatcggttgacccaaacaaaattgcagaatggcaggtccagcagcttgtgccttcaaaacaattccgatggcattcaatggcccagagaccacgaaggaggactggaaggctctttgaggccttgctctcgcaatacaagctccgagggtgatgagcaacaaaagcggcctggtgatgtcaagttgtttggacagattctcagccatcagtcaaccctgcagagttctggcttgtcttgcaatggtaacaagagcaagcctccctcaccaaagatcgacacatctgtgagatccatgaacaatccaatggaccgtgtggtttgttcttccaggcctggcaccactccacatctgggtctggaggaaagattggcaaggtgctatggtcatctggatggtagcacggcacagcccgagccactgctcgtgatggcaaagcgccagcggtccttggccggcgtacagttttactcggctaagaacggcacgcttggtgtgttaccagattaccaacaaccttcgacgcagccacagcaatcagatcccaagcgtgtggaaaggttgtctgatccgcagaagaggaacgtgctggaactcatctcgggtttccagcagcccggcagagtcgcccgtttcgggggtgctggcatcctcgtaagcggcaacgtctcggaccctgtggctgctgctctcaaggctcagtatggtcccggttctaagattatgggcagcgacgtggatccttggacggacataggaagcagatggcatcggcacgtcgttctggacttgtcgcttttgagttttgacttcgttgcacgtgagtttctggctggaggtggatttccttgggcggcgcctgcggaccgggatcgcttttcggtttcacgagcttcttttggcgtcggctcggctctttccgtagcgtgtagggctgtggtggtccttctccagcagcagcagctacgccagccatga

SEQ ID NO: 19896 - DNA, 957 bp, Zea mays
  Peptide Sequence Number=SeqID_61675
atgtacccataccgcatgagcaacgtgatgatcgggtacctgaacctggccacgctcctggcctcgctccccatcatcggggcggggctgtggctggcaaggggtagctcctcctcctcctccaccacgtgctcgtcgatcctgcagacgccgctcctcgccgtgggcttcgcggcgctgctggtctcgctcgccggcttcgtgggcgcctgcttccacgtggcctgggcgctgcggctgtacctcgccgccgtcgcactgctcgtcgccttcctcctcggcctcaccgcgttcggcttcgcggtcaccgcgggcggcggcggcgcgcaggtgtacggccggccgtaccgggagtaccgcgtcacggactactcggcgtggctccagaagcgcatgcaggacgacaggtactggcgccccgccctcgcctgcgtcgtcgggtccaaggcctgccccaagatccagaactggacgcccatggactacctccagcacgatctcacgccaatacagtccggctgctgcaagccgccgacggcgtgccagtacagcggaggcatgccagtcggggcgcaggacgaggactgctaccggtggaacaacgccccggacatcctctgctaccggtgcgactcgtgcagggccggcgtgatggagcaggtgcgccaggactggcacaagatctttgtgctcgacgtcgccgtgctcgccgctctcgtctgcatctgctcatgcgggtgctgcgccttcaggaacgctcgccgctcccggtcccagtacccatacggggtaaaccaaacgtccaagataaacccacgctgggactactggtactctaagagagagagttctgttgtttactctctctgctttctgcctcttattgtttgtagagtaaaatttaaaataggagatgtgattagtacgaccgctgaagataaccttattgggcagtaa

SEQ ID NO: 19897 - DNA, 903 bp, Zea mays
  Peptide Sequence Number=SeqID_61676
atggaagagggaggagacccgcagcttccgagcatctccgtggcacgcaccacgtccgaaggcgcgggggccgtcgacttggatctccttgagcagctactgtccggcgacaacggttggctcgaggtggtctcgcgctcgcccaactcggtagcgtttcctccaccctcggccttcttctcggctgacgcgacggccaccacagtgacgacgacggcggcgccggccgcgaacgccagctggttgattcagacgggcggcgcgagcaccccctccgtgcgggagcggttcagccaggccctgtcctacatccgtgatacgcagagcgacggcgacgtcctcgtgcagctctgggtgccggtcaaccgcgatgacgggaagctggtgctgaccaccagcggtcagccgttcacgctcgaccaccgctccgacagcctcatccggttcagggaggtgtccaccaagtaccagttcccagccgacgttaggtcaggggagtcaccagggttgccagggagggtcttcatcggcaggctccctgagtggtcgccggacatcaggtgcttcaccagctacgagtacgccagggtgacagatgcaaagtacctcgatgtccacggcaccatggggctgccagtgttcgagaaaagaagttacagttgcctgggcgttatcgagctgatcatgacaaagcagaagctcaacttcacctctgagctcaacaccatctgcagtgctctacagtttagcactgcttcctacaaagatgctttaccagagatactggaggtcctgagggcagcctgcttgacccacaagctgccattagctcagacatgggtcacatgtactcaacaagggaaacgaggcagccgacattctgacgagaactacagattgtga

SEQ ID NO: 19898 - DNA, 540 bp, Zea mays
  Peptide Sequence Number=SeqID_61677
atggcggtggcgggcaggcaggagcagcggtcacgtcgtcagccaagcttacgtcccatcctggggcagcgagagaaccctctctcacggcgtgaagacggcgcgcccgtgttccattccgcgaatggctcgcgcacacacaacggccgccccgcgagctactcgccccgtcgcattaactacgcggcgggacaggcggcgcctctggcaggcgtcttttttctccacttcgccttcgccataacgaccgcgtccaaaaagggaccgagaaagggggataccccgaaaaggatccttctccgtgaaggaaacaggctccgagcctccctactgatcaggggttcgaaggctggcccctcggaggggttcaacagccgcctcagaacgcgtgggctccacacccactactggtcagaggttcgaaggccggcccctcggaagggttcaacggctgcctcaggccactcgggctccgcgcccactactgatcaggggttcgaaggctggccctcgaagggttcacagccgcctcagacatag

SEQ ID NO: 19899 - DNA, 462 bp, Zea mays
  Peptide Sequence Number=SeqID_61678
atgatgctcgccggggctgctgccgcttcgcaggccaccatgccaccgtccgagaaggactactggtctctgctcgccctgcactaccagcagcagcaggagcagcagttccctgcttctgcttacgaggcttacggctccggcggcgtgaacgtggacttcacgatgggcaccagcaacggcagctatctgaaatcaggtggtgccaaaggttcacaatatgccaataaaaagaccaagaaagggttcaaacaaagagagctaaagagatcccaaaggcaccctggtctggcgcagcggactgtccggtgcaccaccggacagtgtccgatgcaccagggcactcaaagcagaactcgctaccttcaggaaaatcagagggcgctccgctataattcactggactgtccggtgtgccagtggagcaacggctacttcacgcgcaacggtgagagcacctag

SEQ ID NO: 19900 - DNA, 408 bp, Zea mays
  Peptide Sequence Number=SeqID_61679
atggccatgaaacatgttattatctgttgtcttctcttagccctcatgctgcagtcagatcaaacatctgctgctgacatatgcagctatgcagattttagggccatgttttgcaagaattggatgtgcaagagccagtgctggtttcaatcgcagctaataacgcctccgaatgtagtgaaggaacacagaactctatctcgcaaccaccttacattagaggcttttgtggaggaccagatttcacaaaatacatgcgaagatgttttgaccttcattttttggaatgaggtagctaagaaaggtaaatatggagaggccattttgatgtataatttatcaagactagatccatcatacataatcgaggtccatagatttattgatggtaataagaaccatgcttag

SEQ ID NO: 19901 - DNA, 349 bp, Zea mays
  Peptide Sequence Number=SeqID_61680
atgacttggcccggcccatccagtagaagactagaagaggacggtgggaaagaggggtccaagaagcagggcacggcaccagacgcgcccatggaccccaccggcgtcgacggcgattccgcggcggcgagggggagcggaggcggaggcggaggggggacaggggccggccggtgggcggttggcgcggtgtgtggggggctggtctactaccactgcgcggtacggcgagccagcgcggtgtcccttgcagcagacgtgctcctcgtcctcctctgctcgctctccatcctcggcctcctcttccgccacctccacatctcggatctttttgggaacatgcttactg

SEQ ID NO: 19902 - DNA, 351 bp, Zea mays
  Peptide Sequence Number=SeqID_61681
atggctggccctagcgcccctcctgagtcgacatcccaaggaggccccgccgtcatcccaaggaggccccgccgtcatccgccccgccaccggctcctgcccttcagccgctgggcgcggtccctgtgccgggttcacggcttcacgctacagcccccgttgccgcctccccggtcttcatcccgtcggacgacgtggacatctcggacgctggcttcagctccattaccgccccggccctcagactccacagcactctcccctcaggcgcgggcagcgggcttcctcccccggggcgcggcggcagcagctttttttttcaaactccagtatgcaatgggcctcctataa

SEQ ID NO: 19903 - DNA, 897 bp, Zea mays
  Peptide Sequence Number=SeqID_61682
atgaagggtactgcagttcctcgcacaagagcaagtccaagaagacgcatatggatatcagttgtcgtagtatttgtcgccattactgtgctgtgggcttatctctaccctccccaggattacacctaccctgtcagggactggtttccctcggaacctacgcgggaacttactgatgcagagactgctgcacgtgttgttttcagacagatactctccacgcctcctttcatatcaaggaacccaaagattgcctttatgttcctgaccccgggcaagcttccattcgaaaaattgtgggagttgttctttaagccattcacattcttgtgtatttattggatagttttcacgaccctggggccacatggagtttacagatactcaaagaatatgttacctgaggttcgagagtcggagttcaggaaaggttctcagtggttctcaatgaagcgacaacatgcaatggtggtgattgcagacagtctttattactcaaaattcaggctttactgcaggcccggaatggaagaaggtcgcaattgctatgcagatgagcattatctgccgaccctattccacatgatggaccctgctggcattgcaaactggtcagtcacctacgttgactggtctgaaggaaagtggcatcccagatcttttcgtgctaaggatgtcacttatgaacgcctgaagaatatgacttcgattgatgtgagctaccacatcaccagtgatgacaagaaagatctattgcagaggccttgcatgtggaatggactgaagagaccatgctacttgtttgcaaggaaattttaccctgaagcattagacaatcttattgctggaggggcagatatattgacactaactcagtatatgcatgatagtgaacaa

SEQ ID NO: 19904 - DNA, 297 bp, Zea mays
  Peptide Sequence Number=SeqID_61683
atggtggtggcggtgggagctgaggccaggaagcttgtgaatggcttgccgaagcaacagaagctgcaggttgatttcccacatattctgaatcagagaaaagagaaaaaggaaaagacttggctggagcagccaagactcagcgcagtctggcacaccggactgcccggtggtgcaccggacagtgtctggtgcgccaggctggcttctggcgaactggccactcttgggaattcgtcggcggcatacggctataattcaccggactgtccggtggtgcatcggactgtccggtga

SEQ ID NO: 19905 - DNA, 1076 bp, Zea mays
  Peptide Sequence Number=SeqID_61684
atgccactgacggtgtgggcggatccaatcgccggtgacgcgcggcaacaaggcgcgcacatgctggaggtcataaggtacagtactctccacaggcgcaggggcgtcggcaccggcggccgcaggtgcgtcgagtccgtcggcttcaccgtcggtgggtaccagtgggcaatcctcttctaccccgacggcgacgacgcgcccggcagctcggggtacgtctccgtctccctcgcgctcctcacccgtcccgcccgggtgagggcgtccttcaacctgggcctggtcaaccgcgccacggggctgccgtcgttccagcccaaggacacgacggcggtgttcgacaacgccgcctgctgctgccgcatgtaccccattcccacctgccgccacgaacggaagcgctcctgccacggcatgccgaggctcgtgaaacggtgcgatctggaggcgtacctccgcgacgacgccgtcaccgtcgcgtgcgtcgtgacggccgtcaccgggacggcgctgacgtcccgtggcgcgccggagatccgggtgcccgggggcaacctgcacctgcacatcggcgagctgctcgtgtccaaggaaggcgcggacgtgaccttcggtgtggatggcgaggcatttgcagctcacaggatcatcctcgccgcacggtcgccggtctttgaggcggagctctacagctccacttgcactgcggagacgacagacgcgcgcactgtcgtggtaggtgacatgcggcctgacactttcagggcgttgctccatttcatctacaccgactccttgccggccatgagccatatgggcatggacgagacgagagagttggtccagcatttgctagcggccgcggatcgatatgccattgacaggctcaaggcgatgtgcgagcacatccttgcaaggacactccatgtggacaacgcggctagcacattggttctagccgatcggcatggctgcgacacgcttaaacatgcttccatctatttcatagcatcttccgataatagtgaaatgggtcatgatgatgtgtccgtagaagcattggagaagacagt

SEQ ID NO: 19906 - DNA, 420 bp, Zea mays
  Peptide Sequence Number=SeqID_61685
atggccggcgggaagaggagtaagctgctgcagggtgctccgccgccgccgccgccgccgcaatggtctgacgtccgtggcctgctccacatgcggttgacggacgccgccgcggagctcaacgtctcaatcacctacctcaggcgcctctgccgccagaacggcttcgctcagtggccaggaaagaagatccggtacatgaacagtacagggaagaaggtgatgctggaggcagatgatgcgctgctggacgcctcgccgtctgctggtctcgctggtacttccgggctccggcaggccatgagcgcggaaacccggaacgaggaagaggacgacgaaccagttgcgaatcaggaactcaccactttaaacttgatagacaagctttgttggttaataagtcacttgcgttgcaactga

SEQ ID NO: 19907 - DNA, 1389 bp, Zea mays
  Peptide Sequence Number=SeqID_61686
atgggtggcaagctgttgctgggcgcgagccagagccgccacgcgcacgcggtggcgtcgcctcccctgtcaaaggtggccacttccggcctccacggcgaggactcgccctacttcgccgggtggaaagcctacgacgagaacccctacgacgccgtctccaaccccggcggcgtcattcagatgggcctcgccgagaaccaggtgtccttcgacctcctcgaggggtacctcagggaccacccggaggccgcgggctggggcggctccggctccggcgtcgccagcttcagggacaacgcgctgttccaggactaccacggcctcaaggccttcagaaaggcgatggccaacttcatggagaaggttaggggcggcaaggcccggtttgaccccgaccgcatcgtgctcaccgccggcgccacggcagctaacgagctgctcacgttcgtcctggccaacccgggagacgcgctgctgatccctactccttactatcctggtttcgacagagacctgcggtggaggacgggggtgaacatcgtgccggtgcactgcgacagcgccaacgggttccaggtcacggccgccgcgctccaggcggcgtacgaggaggccgaggcagcggggacgcgcgtccgcgccgtcctgctcaccaacccgtccaacccgctgggcaccaccgtgacgcggccggccctcgaggacgtgctcgacttcgtggcccgcaacaacatccacctcatctccgacgagatatactccggctcggtcttcgcggcgccggacctggtcagcgtggcggagctggtcgagtcccgcggcgaccccggcgtcgcggagcgcgtccacatcgtgtacagcctgtccaaggacctgggcctcccggggttccgcgtcggcgtcgtgtactcgtacaacgacgccgtggtcaccgcggcgcgccgcatgtccagcttcacgctcgtgtcgtcgcagacgcagaagacgctcgccgccatgctctcggacgccgggttcgcggacgcctacgtccgcaccaaccgccagcgcctccgggcgcggcacgaccacgtcgtcgccgggctggcccgcgcgggcgtgccgtgcctccgcggcaacgccgggctgttcgtgtggatggacatgaggcggctgctcggcgaggccaccaccgtcgccggcgagctccgcctgtgggaccggatgctgcgggaggcgaagctcaacatctcgccgggctcgtcgtgccattgctcggagcctggctggttcagggtgtgcttcgccaacatgagcctggacacgctggatgttgcactcgctaggatgagccgcttcgtagacacgtggaacaaggaaacgacagcgtcgacgcagcagcactag

SEQ ID NO: 19908 - DNA, 726 bp, Zea mays
  Peptide Sequence Number=SeqID_61687
atggacgccgcgcccacagtcccgcctggcctagctgcgatctcccctggcggctgcagcgcgcgcaacccagtgccccaaaccctagcgccgccgcttgcccagccacctgcgtgcgccctccctgtcgcgcagcccagcgcgtcgcacccgcccagaccttgccgcgcgcctagcgccgccacagggccatctctgcagctagttcacgaacacggccttcgcggtggacgcccacgtacctgctcttctcggcctacctcgtctttgccatgcagttcggcttcgccttcggcatgccgtccaacgacttcatcggcaggattttcgtcgtgctctatcgttgagtggatccagttcgtcgcctacctcatctactccgtgttcttgacggcgttcatgtaccccatggcgtcccactggttctggtccgccgatgggtgggacgccactcgccgcacgtccggcccgctgctcttcgggtccggcaccatcgactttgctggctacggcgtggtccacatggtcggcggcatcgcggggttctggggcgcgctcgttgagggcccccgcaccgggcgtttcgaccatgtcggctgtgaaccactcgccctggatcgtggttatgagattgatggttttggttatgactatggtgctggtaaagaagaaggcgtcgaggcggatctccaggaattacaggatgtcgatgagttcgaggattag

SEQ ID NO: 19909 - DNA, 294 bp, Zea mays
  Peptide Sequence Number=SeqID_61688
atggaggaatggtcaggcatgatgatcctgctatgttatggctgcggcgtggtggtaggcgaggggtatgcaggggagagtggaggaggagagcggcttgagaacaagaacgcagaacgtagcgcggagttttccataacaacagtgggagcacacataagggaatctgtccaccaaacaaccctctaccaactagtcataaggattatagctttatacctcatggatcagtcacaaaatagctccaaaaatttggaaaatcacactggaccaaagctagagttaactgaataa

SEQ ID NO: 19910 - DNA, 948 bp, Zea mays
  Peptide Sequence Number=SeqID_61689
atggatccaaagatgacagaggtgacccagatgttcgcccgcttcaaggcggcctacgcccgcaacgacctcaacacctgcgtcaccctcctctcgcagctcaaggtccatctcacccaattccccagccttccgcccttgtttcagcagacaccgaacattgtggaggagctcaaacttgcaaagtcgcagatatgcagtaaactgttcttaacttatgttttcgtccttatgactaagctatctagtgatttagtagcagaaaagatcaagaggtccttgaactgttatgctgttcttttagttacccttccttcaacagagcaagttttgaactcagcccaaaacatttcaggggacatttatgagcatgctgttgttttgagtgtgaaacttgaggaccaagatgcgtttgaacgcgatttctgccagctgaagccttattacatggatacatgtggcataattcccgcctcgccagaggagtacccaattttgggactcaatcttctgaggctgttggttcagaatagaattgccgaattccacactgagctggagcttttacctgccaaggcactcgagcatccttgcatcaagcatgctgtagagcttgagcaatccttcatggagggtgcctacaaccgagtgttaagcgctcggcaggctgtgccacatgagacctacgtttacttcatcgaccttctcgccaaaacagttagcgaaaaggggtatgattctctatctgtgagtgatgcaaagcaaatgcttatgttcagttctgaccaagatctgcacgagtacatcactgaggagcacccggaatgggagattaagaacggtgctgtcttcttccagaaggcgaaggaatcacagccctgcaaggagatcccatccttgcagcttatcaaccagacgctcagctacgccagggagctggagcgtatt

SEQ ID NO: 19911 - DNA, 2325 bp, Zea mays
  Peptide Sequence Number=SeqID_61690
atgaagaacacgcacatccccaacgacgacacacttgcggacaaactggaggtcaagctcgacatgcttcgtgcgttggtgctgtacgagcttggtggagagctgacaaagccatgttgccttggctatgccgttagccacaacacggtactcggcctcggcgttggagcgggagacgactggctgcctcttcaacgaccacgagacaagactgtcgccgaggaacatggtgaaactggaggtggatcgacgtgtgtcaggatagccggcccggtcggcgtcgatgtagatggcgaggtcgttggtcgcagatcatcgaaggagcccgaagtcggaagtgccttggaggtaccgcaggatccgcttcatagcagtgagatgtggctcctgcggggcgtgcatatggtggcacacatgttggacgacgtatgcgatgtcgggccggatgaagatgaggtactgcagtgccccaacaagactctggatgtcgacgatgtactggtgctggtggagaaacaagccctgggaccggctctccatggtgatccccaggaagtggtgcaactcactcaggtccttcatcgcgaactcctgctagagggaggagatgatacgccacaggagttcgtgcgaggaggccgtggggacgatgttatcgacatagaggaggctcccacaggacccaacgagccttgtgccgatccaaggagccatccaccttcagcttctgttgaagatccatttcccggtgacccctttggcttgtctgtgaaggatcttgctaccaggatccttcacacgcggtgtgacagctccgagccgctgtacactattcgcctgcttgcctccaattccccgacctccacgctgcatgccttgaccgctgctacctcatctatcacttggcgccaccgccttggccaccccaggcctgattttggactcaccatccgggctgtccagtgtgacactgggcgagagtttgataactccgcgtcctgtgacttcttcctttcacacgacgttcagtggaggatgttgcctcccttcccgctcgctactggactggccactgctacctatctgctcaatcgcctccccaccaaggcggttcatcaccccaccccctactttgctctctttggtacctctccctcctatgatcaccttcgcgtgttcggcgtcttccttgggtactctcctgctcataaggggtaccggtgccttgacctctccacctacagagtcctcgtctccgactttcccttctccgtctccccttccgctgcctcctcctttgagtacgacaacctccttgaggcactctgtggttccccctcttgctcccttgcttcccacacccctgtgtgcgatgtgctgtcaaggagtctcccgtgccgccatggtcatagtgttcaatgcactgaatccttcatgcgtgagaatgttatggacgagcttaagcagatgcaacctgaggatgaatcaaagaaaaagatgctagatatcctcaagcggctccacttggaagaagagatggcatcagatggtgaagatggggaagagataaagctggaagacctctctgattgtgaaatcaaacgattccgtcaagctctggcctcagaagacactgctgtaccatatccagatccaaatactgaccaagaggctagcatcaacgaaatccctgaagggccagaatctcctctcccgtcattgaaacagttaacaaggacagagccatctcctttgcttgctgtccacttggttgacattctgtacagttactgcttcacacttcggctctacaacggtgattggcactcagatcctttgggtgcttgcactgtcgccctgtcgatgtcgaaagtcatgggccaggatgctaaacctgagactgtacctgaagcactcgcagcctgcatcgaggagacatgctcaccagcttacaggcatactggtggtttcaggtttgctattggactcgtggacgatatcatcgccattctctccttgggacagaacgcacttatttgtgccttatgcgacttccatcgactcattgaagttggtaagagcatgctcaaggtggagaaagtgggcaagacggagagggcacagaactctccgaagcttcgtagtgcagctaggaagctattcttcatgacttgttgggtccatgagcagccagatgaggcgtggccatctttagctcacatcgtccaggtgcagaaagcatctatggaggagttggagaccgggaattggaaggcggatagaaagagcaaaccacaatccgcggttcttatcgaggagctgtag

SEQ ID NO: 19912 - DNA, 483 bp, Zea mays
  Peptide Sequence Number=SeqID_61691
gcttaccatctatttcacacttcctgccttttacactggactattctgtgccaatacgagatgctgaacgatgaaatagctaggaaggggaagagcaaccgaggaaggaaggcaaagaatgcacctaagagaagcaaaataacgtccatagtttgcccagaatgtcagggtactggaattcacgtcaacggagatgaacttgagaagccaagcatttctttatcagagatgtttcgcttcaagatgaaagcaatcgaagctcacaaagcatggctgaagagacctgaagtgcttgaaaactgttccactgggcttcatttcccctcagaacatgtggagaaccctgagggtggaatcagagggcacactgttcgcaaatgttctgttaacacagtgttgttagatgctcacctacgtgcattatctcagttaacctgtgtccgccagatgataactaagacatttaaactggcaactggctga

SEQ ID NO: 19913 - DNA, 276 bp, Zea mays
  Peptide Sequence Number=SeqID_61692
atggcgctaacagcaaaccctagcagggggttcgcacaatcaaaccgagagtgcacagagcagagctctctggacgggacggagaggagactggggagagaggagctcgagggggagggagagctcctggttcctgctgtcggggcgagaggagctcgagggggagggagagctcgagggcgagaggagctcgagggggagaggagactggggagggtgagagactgcgcgtcgcgtgactggggagaggagactggggagggcgagaaaccctag

SEQ ID NO: 19914 - DNA, 480 bp, Zea mays
  Peptide Sequence Number=SeqID_61693
atgatgtacccccctgtaacgtggtcggtccgagcccaaggtcgggcgaggcggagaccgtcttccgaggtcgaggctgagttcgagccctggggtcgggcgaggcggagaccgtcttccgaggtcaaggcgggggccgagccctggggtcgggcgaggtggagaccatcttccgaggtcgaggcgggggccgagccctggggtcgggcgaggcagaacttcctatggcgcctgaggctggactcggctgctgtcagcctcacactggcgggtggcacagcagtcggagcagggcaggcggcactgttttcctgtcagctgtttcaccactacattgcaaccatcaatatcatgcagacttcgatatatgccacgatttgtatggtctcatcattgaagagcacgttccacacatgccggaagaaattccctcgtacatcattagtcatcagacacgcaccaccatactctcttgcttaa

SEQ ID NO: 19915 - DNA, 576 bp, Zea mays
  Peptide Sequence Number=SeqID_61694
atggtacacctgaggtgggtccagtcggaggtcgccgagacttatggctacattgggcaagtcgtttgccaagggagacagggcttgcgaggccctcgtcatctctcctttgttgacgatgaaatccagacccccaaagcgaatggttgtcccgggagtctagatcgcggctccgccacacttgaccctgggctcggtgccacatggttcgaccggggtcagtattatttagaaaaaaatatccttgatatcctcgtcgttggagaccaacgcaatatgaaatggaacagggtatcaatggctcagcgcagggcggacccagcctctcgaagttttctagatccgtcattgctgttcttgcgcaccatgaaacttgagaatcatgcaacccccgcgtcagtcatgtggatgtggtttactactgcttcacgaatctgcgacacgagaagttcacggaagttagaaagccatataaatatagaggacaagagagcgaacaaaacgctcgtgtccgatcatattgatgaaacaaagacattcctttatattaaagccatgcagctagacgtgcgctga

SEQ ID NO: 19916 - DNA, 4176 bp, Zea mays
  Peptide Sequence Number=SeqID_61695
atggatgcatccactgccggcgatggagacacgaatactttgaagaggccatgcaaaacatcgcctccagaaggcgaaacagacaagtataaacggcagaagagggaatgccaggatttctctcccagaaggtaccagcttgatgtctatgaggttgctacgaggcacaacacaattgcgatgcttgacacgggagctgggaagacaatgattgctgtcatgctcatcaagcattttgggaagatcaacaaagcaaacaatgatcgaaagctcatcatattccttgcaccaactgttcaactcgtcacacaggttatggtcatgacaccacaggtgttgctagacgctttacgccaagctttcttgatcttggacatggttagtctcatgatatttgatgaatgccatcacgcaactggtaaccacccatatactaggataatgaaggagttctatcatggatcagagcataagccaaatgtgttcggggtctcctctgatttggattgcaaaaatcagctatctgagctggaaaatattttagattccaagatacactctgtggtggatagagaagagatagaactttgtgttccttctgcaaaagaagtgaatagatactatgagccaagaactgtttcttttgacgatttaagtgaagaactggaaattttgtgttccaagtatgatgggctgatcatacaattgcataacagatcgaccaatcagtacaaagatgctgatgaaataacaaaagaatcacggaaacgtctctcaaattctttagcaaagatttgctattgcctagaagatgctggtcttctttgtgctagtgaggctactaaaatctgcattgaaaggggccagagaaaaggttggctgaaggggggcagtgacaccactgatcagcaaagtggtcaaaatggacctatcctgtttgcagaaatttcaatgcttcatatggagttttttcaggaagtgttggatataatcggcaaacgcgtccaacagcaacaaggaattgatgcccttctgaactcagagcgtggatgtgtggaagcaaaaaatatgggctatatttcaccaaagctctatgagctcatgcaagtatttctctctttcaggggaaatgtgaaacaagatgatttgatatctgggattatgagaagtaaggcctcgatgactgggattgcttcaaaccgagagcctgaggattcacaccccagtttcttacccactgaagaaataaatgaataccatataagcaaaacaggagccaaaataactactgattctagcatcagtgttctcaaccagtactgtgataagctcccgaaggacaagtatggtgactacatttcgtttttgtccttttacatggctacacagtacacctattctatacattcagaaattctgcataccaagtttctgttaggtcaaaaagcaagaaacatgcagaaagcaaagcagcttgtttgccttgatgcatgtacaaccaaacggaaagaactgcatggtacaaccaaagttctttccatgtctggctcttggggttcagatagaagtgtgactaaacttcaaggctacaagttgaattttgtttgtgatcaagttggtcaaaaatactctgcctttgtccttttaattgatgctagtatagcaaaagaagctgctactttagatattgatctatatttgcatgacaagatggtaaaagcttcagtttccccttgtggacctcttgagttggatgcttggcagatggaacaaacaaaactatttcaagcacttctctttaatagtttgtttggaaaactgttcattggatcaaaagcatcaaaaaccccaagggagttcattctcaagaaagatgatgtgttcctttggaacaaagaaaatatgtatttgcttttacctgtggattctactctggattctcataaaagtgtttgcatcaactggagtgtaattgatgtagtggctacagctgttggattcatgagaagcatttattcagatggcaaatgtaacctaactgataaacttaattatgaaaaaaatggtgaagatcttattcatttggccaacaagtcatgcaagggtaatgatcttaaaaatatggtggttctagcaattcacactggaaagatctatactattgttgttgtatctgatttatgtgccaatagtaaatttgatggtacaactgacaagaaagaagcaaaattccggacatttgcagaatattttgagaagaagtatagtatatttctttgtcatcctttacaaccattgctagtgttgaaacccacccataatcctcacaatcttctttcctcaaagaatagagatgaagacaatgttgtggaaaataaaaatagggcgaacagccttgttcacatgcctccagagttgctgattccccttgatttacctattgatgttttgagagtattctacttgtttccatctctgatgcatcgtcttgagtcactaatgctagccagccaactaagaagtgaaattgcatacagagattctgatatatcaagcttcgtgattttggaagctatgacaacacttagatgctgtgaggacttctctatggagcgattagagttattgggggactctgttcttaagtatgcagtgagtgcccatcttttcatgacatttcttaataagcatgagggacagttatcgtccagaaggcaagaaacaatatgtaatgccacactttataggcttggtattgaacgcaggatacagggttacatacgtgatgctgcatttgatcctcgtcgatggcttgctcctggacagctgtccagacgtccttgtccttgtgaatgcccagtaaattctgaggttgtaactgaggatattcataggattgatgacaagtctataattataggcaaggcgtgtgacaagggacacagatggatatgttcgaaaaccatctctgattgtgttgaggctctaattggggcctattatgtcgaagggggattaaaagcagcttttgctgttctcaaatggttccagattgagactgaaatcgaggaagagttaattatggaagctctgtcgagtgcttcagtgcgaaactatcttccaaaagttgatgtagttgaattgcttgaagcaaaactaggctacacttttcaaatgaaaggtttgttaatagaggctctcacccactcatcacagcaagaatctggagcaacatactgctaccaacgcttggagttccttggtgatgcagtcttggatattttaataactcgccatctgttccttagtcataaagacacagatgagggggagctgacagatttacggtctgcatcagtaaataatgagaattttgcacaagttgcggttttaggtgatattgtagaaagtatagcaggtgctattcttattgacagcaaacttgatttggatttagtttggcgggtttttaaacctcttctttcaccaattgtcacacctgagaatttggagttgccccgattcagagaacttaatgagtggtctgacaagaatgggtactttattggaattaagtgtgaaaatcgaggagacagcacaatggctatccttaacttacaactcaaggatttgcttcttgtgaggcaaggttgtgggaagaataaagtagatgcgaaagcacatgcagcttccttattgcttagggatctagaggaaaaaggacttataattccaaggaatgcaagcagagtggaacaacttgaaaagaattctggtactgtaaaacattgcaacaacgtgcttgatgttatggacacacaaaacgtagcaccacctaggcaaaaggaagtagctgtgttaagtaccaccactcctggctctgttcttgataagccattggttgtgaaggttaagttgagcaaaggaggacctcgtatatcattgtacgagtcgtgtaaaaagcttcagtggccaatgccgacctttgaattcgtgaaggtcgaaccaagcggcaacgtagattccaagttcaagaagtatgaggaatcacctcgtggttccatcaccaaagatgcaatgttaccgccaccggcgattattgcttgggcatcttggagtaatgtcaccgccaaatcagtctttagtcgtcagccgcacgggggtgtaagaaaataa

SEQ ID NO: 19917 - DNA, 501 bp, Zea mays
  Peptide Sequence Number=SeqID_61696
atggaggtcgggggtaaccacttgcacttcgtccctctttttccatcgctactatctttgtctgctcagtgcggtttgcggctcggtttctcaaccactgctcccctctggtcccgatgccaatttatatatgctttatgctacttttggaattcaactgaggtcgtcgcgatggagttagattcagctcgttgggttggcagtcaagaagtgaagccaggagccacggtttcttgcaaagttggtgatggcttggttatccacctttcacaggctgcactgggggaatcaaagaaagcgagtgagaatgccattttgtctgttaatattgatgataagaaactagtgcttggaaccttatcagttgagaagcatcctcagatctcttgtgatcttgtatttgataaggattttgagctaccacacaattcaaaaacacgtagcgttttcttccgtggctacaagtcccctgttcctctgtttgaatatcctttcttatga

SEQ ID NO: 19918 - DNA, 333 bp, Zea mays
  Peptide Sequence Number=SeqID_61697
atgtccacgtcatgtgtacgacagcgggggagggtcgcgacatcgaagtctccacccacgtacgagaaaggacaagacaacacaccttgcatgtgctcgaacatgctggaaggtgacgcagttgagttgacgaaagatgaagtcatactaaaaacgaacctcgaccttaccgggagcacgttctgtgggacccatctgatggatgtgatagagcgccatgtgaggaatacagaggcacacgatatgttagaaggagccataccatgcgcaggcacgccccaagattggccccggaggggtccactgcgcactgtagatgagggcgctagttga

SEQ ID NO: 19919 - DNA, 225 bp, Zea mays
  Peptide Sequence Number=SeqID_61698
atggcctcccgcttcacctgctggacgccgccgaccgagcacgcctgtggcaggagccgctcgcttaaaccagattggcgcccctttagcagcgtgacttctgtccttcaagctatgaagggacacgtaattgggcagtggtggttcatggccaaggcacatttccatgaccagggcgacgtgcacaacatcgccatcgagtgcagtggtggtgtgaggacatga

SEQ ID NO: 19920 - DNA, 1152 bp, Zea mays
  Peptide Sequence Number=SeqID_61699
atggacctgtcggcggacgcggcgcccgctggagcgcctggagccgttcgtgcgggcgtgcgtgcgggcgctgggggcccggcgccggccccggacgcgcggcgcgcggccgcggccaggatacgcctgctggcgaagcaccgggagagcgcggccaccgcgctgctcaacctctcgctcgaggaccggaaccgctccgccatcacgacggcgggcgccatcaagccgctcgtctacgcgctgcgcaccggcacggctcccgccaagcagaacgccgcgtgcgcgctgctcagcctctcgggcatcgaggacaaccgcgccaccatcggggcctgcggcgccatcccgccgctcgtggcgctgctctccgcggcctccacgcgcggcaagaaggacgcgctcaccacgctctaccgcctctgctccgcgcgcaggaacaaggagcgcgcggtcagcgccggcgccgtcgtgccgctcgtgcatctcgtcggccgccgcggcagcgggacgtgcgagaaggcaatggtggtccttgggagcctcgcgggcatcgacgagggccgtcaagccgtggtacaggctggcgggatccctgcgctggttgaggccatcgaggacggccctgccagggagaaggagctcgccgtggtggcgcttctgcaggtgtgctccgactccccgcgtaaccgtgcgcttcttgtacgcgagggcgccatcccgcctctcgttgcgctatcgcagtccggctctgcccgtgccaagcacaagaagaggaactcccagggcgaatgcttggggtttgctctttgcaggatctgtgcatcttcattcgtcagtagaaactgggagaggattaggcgctcaacaaaccgtgatgttgttcccgacgacctacaccgtcgtcgcgcacctcgccgcgtcctcgtccaggcgcgcgccaactcccacgaatccacgaagagccacgacgcccaccgtgttgaaagatggagttcagaaggaagtggtagagagtattgccgagaagatgcgggtgatcggcgtgagattgttgaattgttctcgagtgagacgacgagagaaattccacgggagggaggagcttcacgggtgacgctacgcgcagggcggggccggatggtgggcatttag

SEQ ID NO: 19921 - DNA, 348 bp, Zea mays
  Peptide Sequence Number=SeqID_61700
atggggctcgccgcgccccgcgactggttgccgcgacctagggggaagaagggcgcctgggagctggggctgcgcgctggcccggtggggaggccgcgggcaggggcgagccgcccgcgcagggcctcccagcccgcgacgccgggcaggaccgcgggacttggccgcacaacggagggaaagggagccacgcgaggtatcaccgagaggaaacgaaccgctcggccgggggacagagaggactgctcgccggggaaggagaatggcgtgacacggggctgccgggagggaaaaagagaaggaaagcgaagagctgagagagtaacacctgaatttggtggatattag

SEQ ID NO: 19922 - DNA, 303 bp, Zea mays
  Peptide Sequence Number=SeqID_61701
atggggattgctacgcccgccggctggcaggagcaccgcgcgctggaggggacggtctccaagggccgcttgggctgtgcgcgggcgccctgctgcctgcggctaggggcgagctcgcaggccgggaagagcgaccatggggccagggcgggggcgaggcaggggccagacgcgcagggcctgcatgccggggcgctgggctcgctgcgcgctgcgggccgtggcggcagcaggccatcggccgtgcatagggacagggagcagggaccgaacgcctggcgcgtgggcgagccgccgagctag

SEQ ID NO: 19923 - DNA, 375 bp, Zea mays
  Peptide Sequence Number=SeqID_61702
atggccaggggcgagccagccgaggggcatgggcgggctggagccgcgcccgcgactggttgctgcgacctaggggatgaagggcgcctggggagctgggctgcgcgctggccggtggggaggccgcgacaagggcgagccgccgcgcagggcctcctggccgcgacgcggggcgggaccgtgggacttggccgcataacggagggaaagggagccacgcgaggtatcaccgagaggaaacgaaccgctcggccgggggacagagaggactgctcgccggggaaggagaacggcgcgacgcggggctgcagggagggaaaaagagaaggaaagcgaagagctgagggagtaacatctgaatttggtggatattag

SEQ ID NO: 19924 - DNA, 1134 bp, Zea mays
  Peptide Sequence Number=SeqID_61703
atgctcaaggaggaggagaagccatcatcgcctcagctgtcgaagattgatgtgaggccaagcgaagatgaaaacaccacaaagatggtgaaggacatggaactgcagaaactccacgggaccatcaaagcacttcagaaggtggtgtcagataccggggtggtcctggagcaagagaggctcgacttcaacagcaaccttcaggacgcaaggaagcagatcgagatgctgaagctgaaggagatcctggacagcgacgccagcgacgtgaactacgagcggatgatgaaggacatccagctggacctcgtccagactcctagccggcgagctgccgcctcacacgggcgccacaggaagaagaactccgtggctgcggcggcgcagtctgacgacaagatgctcgcgctgtggagcgtggacagggtgagcagcggcagccggtggcatgacgtggacctgcggccaccacagagcgaggcggccgagaacgacaagggaaagaagcggtcgtcgtccgagccggtggttaccgtgaaggacctcagcgtggacaagcaggaggtcctcttgcggcccattgtgggtgcggtggtggtggcgacgggctccacgacggagccacaccgggagtggaagaagaaggtgatcgaccggctatcctcggaggcgcagcggctccgggacctccgggcgtcgtcggacgcggagctggacggcgtcaaggcccagatggccgacgcagaggacgctatcgcggagctggccgacgcgaacgcgaagctcctgaagaaggcggaggagttcacgtcggcgggcgacggttgcggcgacgtggacctgcggagccggagccagcgcaagatcctggagcgcgtacgcaagatgtcggagaaggccggtcggctggagctggagctgcagcggttccagcacgcgctgctgcggcacgaggaggagcgcgcggcgaggcgcgcggccaaggcggcggcgtccaccgccgtgcaggtgcagcggcggtcgcgggtgcatctggtggagtacctctacgggcggcggcgcgacaaccggcggcccaagcagaaggcgcgcgggccgtcctgctgcatgagagccaaggccatcgacgactga

SEQ ID NO: 19925 - DNA, 180 bp, Zea mays
  Peptide Sequence Number=SeqID_61704
atggctcagggtggatgtggcagtggcggagacgcgagggcgggctcggtgggcgatggtggctcggcacaacaactggatcgtaagttcgatgtcatgtttcatgatcatggtgctcaaaattcaggtctatatattgtagtaactgttggagacttcttctcaaatgctatgagttaa

SEQ ID NO: 19926 - DNA, 213 bp, Zea mays
  Peptide Sequence Number=SeqID_61705
atggaaactaaccacatctacgcaaccacgggtgggattatgaccaatcctcacctattagaaggaaggaatgatgtcacccctgaatggattacaaagaccgatgctttcttggaatgggcatttggtgaaggtgctaaaggagcacgtctagtcccatatccgtgcaacaaaggtgccaacaggaaaagaaaaacaaagaagatcatttaa

SEQ ID NO: 19927 - DNA, 849 bp, Zea mays
  Peptide Sequence Number=SeqID_61706
atgtccaccgccggcgaccccgccgtcgcagcagcagcagctgcggcagcggccaccccgtcaggtcgcgcgccgaggctgccgcggtggacgcggcaggagatactggtgctcatcgagggcaagcgcatggtggagggacgcggcgggcgcggcgcgcggggccgcgcggcggcggcggcggcttctggagaggcctcggcggtggcggcgctggagcccaagtgggccgcggtggcagagtattgccggcgccacggcctcgagcggggccccgtgcagtgccggaagcgctggagcaacctcgccggagactacaagaaggtgaaggagtgggagcgtgccgctgcggcgtcgcgcgagccgtccttctgggctatgcgcaacgacgcgcgcagggaacgccgcctcccgggcttcttcgaccgcgaggtgtacgacatactcgagggccggggccgcgcgatcgtcgacggccgctccgcccggaatgccgcggcggagcagccggcgccggtgcgcgtcgacgaggacaaggaggcggaggtgccggaggccgtatttgacagtggccgcccggctacggaggaggccttgttctcggaggatgaggaggaggaagaagaggacgcaccgccggtggccccacctccccctccaccaccagtcatcgccgtgcctgtatctgagaagcccgaggcatcaaggcaacaacagagtgctgagcaagcaaggcttcagttgaagagaactatagaatgtctttgtcggtttgcctgcataactagtgtgaactgtatcatcagctatgagccatccattgttataacttataatagacattattaa

SEQ ID NO: 19928 - DNA, 444 bp, Zea mays
  Peptide Sequence Number=SeqID_61707
atggaatcacgtgagcgtcgtcgtctagacttcgagaatcggccagagagcttcaccgtggcgcggcgaaggattaagggtcatggtgggcgccacatcggggtacgcctacaccggcgctcagccattggaaacagcccaagagacttcaccgggggctcggactcgggctcggccccggaagacgatgaactccgcctcgcccgaccccagggctcggactcagccctggcctcagccgacggtctccgcctcgcccgacccaggggctcggactcgacctcggcctcgaaagacagactcgacctcgacctcggaggagcctccacctcgcccaacccagggctcggaccggccacgtcacaggaggcgccatcattaccctaccccaagctaactcaggctacggggaacaagaccggcgtcccatctggctcgccctga

SEQ ID NO: 19929 - DNA, 396 bp, Zea mays
  Peptide Sequence Number=SeqID_61708
atggcgagattggccgagatggttgaaggacgtggcagtgattcgggcaacctttataaggagcaagggagtccgacccaagatggccacggtgtcacagttgtggacgaacttgcggtagtagcccaccaagtcgaggaagccgcgcacagcccgtgccaaacgacaaggcgactagtcgaggatagccctcactttggctggatccatggcgatgccttccgtggatatcacatggccgaggtaggtgacggagggggtgccaaaagagcatctggcgcgcttgatgaagaggtggtgctggcgcaactcggtgaggacggcacaaacgtgaaggtgatccgcccaagtcttgctagagatcaaaatgtcgtcaaaaagacaaggacaaaatga

SEQ ID NO: 19930 - DNA, 228 bp, Zea mays
  Peptide Sequence Number=SeqID_61709
atggagaaagcatgtaagaggaacaagggcggtcgaggtggtggtggtgccgatgacaagcttgacggtggtggcgatgccgatagcgtgacctccatgtccagtgggctgtctgaccttcagttcgcgcaggccacagagcatattagctcgcaggaattcgttcttgacaagtacgtcgacgctctctatgagaagaggtgggtgcctgggtggtcctattcgtag

SEQ ID NO: 19931 - DNA, 174 bp, Zea mays
  Peptide Sequence Number=SeqID_61710
atggctaggaaaaaaaagttcaggggctccggcgcaacaataacccagactcagcactaccctcaggtggaccgcgggttaattcccttaaagcccgaggactcatttgttaaaccgactggccgaaggggtaacagtggatttgagccgttcgatcacagatcgaccgcctag

SEQ ID NO: 19932 - DNA, 399 bp, Zea mays
  Peptide Sequence Number=SeqID_61711
atgcagtcgccagctagagagccgctgtacagtacatacagggtcgtcgtctactcgtctcgagtcgacgacgcggatcctgctgcggcggtgatggccgatgggcggcccaaactggtcaaggcaacgacggactcctccgtcgcgaggacggcagcagcagaggccctcacccgctggctcaaccgccgccgcctgggctgcgtcctccgcgcgctcgtgggagcgcaccatctgaggacatggttggcgattctgatccagtacctgtggttcccaacggacctcacatgtgctcctgtccgtgaccgtgaccggcctgggtttatcacggggctagactggtcaaacctcgtcctgttcgccgctaaccaggggggaccagcgctcgcgccttga

SEQ ID NO: 19933 - DNA, 537 bp, Zea mays
  Peptide Sequence Number=SeqID_61712
atggcctcgccgctgctcaagtcgcactctcagctcgccgccgccgccgccctgcactccgtgaggagagccgaccgctgccctgcgacaatacacctgggcaagttccatgaccacgggctcaggtccggccgttctaagagatccggttcagcgaaggtgggcgccttcccgtcgctggacgtggtgccgctgatggtgacgatggtggagcacgtggacatgtcgcgggactacgtcgtgaccaagtccatctggcatctcagcgacgcagccctcaagagcgtcttgttcatggcacagcttgcttgcgtgcatgggtcaaatcgaaaacaggatcccttttacgacagcgagacgtacaggagccagggtggcgacgggaccgtgcactggtactacgacaggcaagaggacctggaggcgtctgcgagggaggagctgctgcgggaggagctgctcgaggagattgagcagagggttgggggcctcagggagctggaggaagcgagcaaggaggagcagctcacaaagtga

SEQ ID NO: 19934 - DNA, 2649 bp, Zea mays
  Peptide Sequence Number=SeqID_61713
atgtgggagggatgggagctggacacggcgtggggttatgggagccggacacggcgatatctcaaagctcagtttgaggatgagttcgcatccggacctttacacaatttcaatgcccttggctatgacgacaaaatattggatggattttatgatctgttttatgttggaaatgggccagcagcagttactatgccctcttttgctgagctacgagtccagccattttcacataaagtcgattgggaagctgtgttggtccacagaggtgaagaccctgagcttatgaaacttcagcaggaggccttaatcatgaatcatgaacttcattcgagaacttcagaatctgtgggcaatgctttggttaagggacttgcaaatctagttgctagacacatgggtggagtgtttgatcctgagcgcatgtcagcgaaataccagaatatgcttagctacttaagaagtgatattggaagtgtaattgtgccacttggccagctaaaaattggtctagctcgtcatcgtgcactgctgtttaaggttttggctgatggccttgatgtaccttgccgtctcctgaaaggaaagcgatacactggatcagatgatggagctttgaacattgtgaaatttaaagacggaagaaacctgcttagaaacccactcccaccatacaataaacctccgattttgaggctgtggagacatgctctgaagattgactttactgaggatatggaaccaaaattctctggcaaagacacaactaaccagcagataccatgggaatttattgttgatcttgtgtctgatcctggtacacttattccttcagatgtttctgttttgtccacagaattagacaggaatttcgtctctgataatcaacactttggccaagatgataataccaatctgttgggatcttctcttagcggtgtatcgagctcagcgtatggttcttttgagtatgagttacttgaccgaagatccacttcaagcaatgttggtccttctgatactgatggacctacaactaatctgacaagcaatcaacaaaatatgtcctcaaattcattcgataaactatcagttagcacattcacaagtgaaaataggcctgtcagtaaagaatctacaaatccagattacattattgttggaaaaaacaaagaaaaatatactgcggccgttgattcttcatcatcttcaccctctacaccagatatgggcagcgctccagctgtccggagaatgaaagtgaaggacatttcagagtacatgattaatgctgccaaggaaaatccacaattagttcagaaaatccatgaggttttacttgaaaatggtgttatggcaccacctgacctgttttcagaagattcaatggaagaaccaaaggacctcatcgtgtatgacaccaccctgtttcaaagcaaggatgaaatgaaaaggaggatgaatgagcttgggtcaagggaatacacagatcgtggtcatgatccattgttgcctcatcatcctggacatgaactccaaccaaaagtggctcctcaccgagcacctctggagtcacttaagcctgttgagggtttgggcatttaccacccacatgatatcagagatatagcatctccgtttgtttctcagtacgaaccttctgcacctcctcaggaagcttcatcccaacttacaaagcaattgcctgtcacagctgctgctgttgcaactgctgcagtggtggcatcctctatggttgctgcagccgctttatctaccaatgacgtaaactttgacgtgcctgttgctgctgcagccactgtcactgcagctgcagttgttgccacaactgctgctgttagcaagcaatatgagcactcggatcctggcaatcagctgtttagcgtaccaagtacttctcaaggaaataaatcagttgagaaagctggaggtgacctttgggacaaacaccatgttgaaactgatcatggccaagataattgtctggaccaagaagttcctcaggaagccgaacgaacctctgataaatcaaataaatcaagtgggacagaggatgtgaaatctgatcttgctttggacaatgttgcagagtttgagatccaatgggaagaaatttctattggtgaacggattggccttggatcgtttggagaagtttatagaggagaatggcatggaacagaagttgctgtcaagaagtttttgcaacaggatatttcaagtgatgctctggaagagtttagagctgaggtgcgaataatgaagaggttgcgccatcctaatgttgttctcttcatgggtgccatcactcgtgtgcctaatctttctattgtcactgaatttcttccaagaggcagtttgtttcgtttgattcaccgacccaacaaccagttagatgaaaggaagcgcttaagaatggcacttgatgtggctcgtggtatgaattatctgcataattgttcaccagttatagttcatagagatctgaaatccccgaatctactggtggacaagaattgggttgtgaaggtttgcgattttggtttgtcaagaatgaagaacaataccttcctgtcatcaagatcaacagctggaacagtgtatccaaattgcttgaagtgtgtctaa

SEQ ID NO: 19935 - DNA, 564 bp, Zea mays
  Peptide Sequence Number=SeqID_61714
atggcgggcgtcttttggggaggcgggagggcggacgaggtggctgacttcgacgagtacgaccccaccccctacggcggcggctacgacatcgccctcaccttcgggcgtccgctgccgccctccgaggagacctgctacccgatctccaccgcctcctcgtacgaccgtccgcagcagcacggaggccggaggcccggggccgaggagtcccacggctcagctgcaggcttcataaggaggagggagacccccggctacgggaggaaggggggacacgacgacgaccacgagcagcaggcgtaccgaaagccgaagccctcgtacgggcacggggacggcgacgacgaccaccaggcgtacaggaagccgaagccgtcgtacggggacgagaggcccagctccggccggaagaagaagaatgacgacgacgatgactctgatgacgacggcgcgaggaagccacgttacaaaaagaaagacgacgacgactcggatgacgatgacaggaagaagcgctacgagaagaacgaccgccgccgccgccacgactatgacgattga

SEQ ID NO: 19936 - DNA, 2562 bp, Zea mays
  Peptide Sequence Number=SeqID_61715
atgcccggcataccgagggatgtcgccgagcactcgctggatattcgggccggagcccgacccgtcaagcagcctctgcgccaattcgacgaggagaagcgcagagccataggcgaggagatccacaagctaatggcgacagggttcatcaaagaggtattccatcccgaatggcttgccaaccctgtgcttgtgagaaagaaaggggggaaatggcggatgtgtgtagactacactggtctcaacaaagcatgtccgaaggttccctaccctctgcctcgcatcgatcaaatcgtggattccactgctgggtgcgaaaccctatctttcctcgacgcctactcggggtatcaccaaatcaggatgaaagagtccgaccagctcgcgacttctttcatcacgcccttcggcatgtactgctatgtcaccatgccgttcggtttgaggaatgcgggcgcgacgtatcagcggtgcacgaaccatgtgttcggcgaacacatcggtcacacggtcgaggcctacgtcgatgacatcgtagtcaagacgaggaaagcttccgacctcctctccgaccttgaagtgacattccgatgtctcaaagcgaaaggcgtcaagcccaatcccgagaagtgtgtcttcggggtgccccggggcatgctcttggggttcatcgtcttcgagcggggcatcgaagccaacccggagaagatcgcagccatcaccagcatggggcccatcaaggacttaaaaggcgtacagagggtcatgggatgtctcgcggccctgggccgcttcatctcacgcctcggcgaaagaggtctgcctctgtaccgcctcttaaggaaggccgagtgtttcgcttggacccctgaggccgaggaggctctcgggaacctgaaggcgctcctcacaaaggcgcctatcttggtgcctccaactgatggagaagccctcttggtctacgtcgccgcgaccactcaggtggttagcgccgcgattgtggtcgagaggcaagaagaggggcatgcattgcccgttcagaggccagtttacttcgtcagcgaggtactgtccgaaaccaagatccgctacccacaagttcagaagctgctgtatgcagtgatcctgacgcggcggaagttgcgacactacttcgagtctcatccggtaactgtggtgtcatccttccccctgggggagatcatccagtgccgagaggcctcgggcaggattgcaaagtgggcggtggaaatcatgggcgagacaatctcgttcgcccctcggaaggccatcaagtcccaggtcttggcggacttcgtagccgaatgggtcgacacccagctaccgacggctccgatccaaccggagctctggaccatgtttttcgacgggtcgctgatgaagacgggagccggcgcgggcctactcttcatctcgctcctcgggaaacacctacgctatgtgctacacctccatttctcggcgtccaacaatgtggctgagtacgaggctctgatcaacgggttgcggatcgccatcgagctaggggtcaggcgcctcgacgcccgcggcgactcgcagctcgtcatcgagcaagtcatgaagaactcccactaccgcgacccgaagatggaggcctactgcgacgaggttcggcgcctggaagacaagttctacgggctcgagcttaaccacatcgctcggcgctacaacgagactgcggacgagctggcaaaaatagcctcggggcgaacaacggttcccccggacgtcttctcccgggatctgcatcaaccctccatcaagatcgatgacacgcccgagcctgaggtgccctcggtccagcccgaggtaccctcggctcggcccgaggcgccctcggttcagcctgaggtaccctcggcctccgagggcgaggatctgcgcatcgaggaggagaggagcggggccacgcctgatcgaaattggcagaccccatacctgcaatatctccaccaaggagagctacccctcgaccgagccgaggctcggcgggtagcgcgacgcgccaagtcgttcgtcttgctgggcgatgagaaggagctctaccaccgtagcccctcgggcatcctccagcgatgcatctccatcgccgaaggtcaggaactcctgcaagagatacactcgggggcttgcggccatcacgcagcgcctcgagcccttgtcgggaatgctttccggcaaggcttctactggccaacggcggtggctgacgccactagaattgtccgcacctgcgaagggtgtcaattctatgcgaagcagacccacctgcccgctcaggctctgcagacgatacccatcacctggccctttgctgtgtggggtctggacctcgtcggccccttgcagaaggcgcccgggggctacacgcacctgccggtcgccatcgacaaattctccaagtggatcgaggtccgacctctgaacagcatcaggtccgagcaggcggtggcgttcttcaccaacatcatccatcgcttcggggtcccgaactccatcatcaccgacaacggcacctag

SEQ ID NO: 19937 - DNA, 825 bp, Zea mays
  Peptide Sequence Number=SeqID_61716
atggcggaggcctccacctaccccttagacgcagtcaagacgcgcctccaactccaccgcaaccccggcggcgcgcccgggcgcggcgtaatccgggtcgcggccgagctcgtccgcgatggcggggtttatcggggcttctgccccgccgtcctccgccacctgatctacaccccgcttcgcatcgtggggtacgagcatcttcgctccaccctcgctagcgaggggcgggaggttggactttctgaaaaggcgctcgctgggggactctccggcgttgccgcgcaggtggtgtcaagccctgctgatctcatcaaggtaaggatgcaagcagacagcaggatgttgagccaaggcattcaaccacgttacactggaatggcagatgctctcactaaaatcatacgagcggagggtttccggggactttggaagggggttgttccaaatgcacagagggcatttcttgtcaacatgggtgaattgacgtgctacgatcatgcaaagcatctcatcattcacaaggagatttgctctgacaacctttatgcccacacattggcctctgtcgcgtcggggctgtctgcgacaactttgagctgcccagcggatgtaatcaaaacaaggatgatgaaccaggggaaggagggtaaagctatgtacaggagttcttacgattgcttggtcaagactttgaggcatgagggcgtaacggcactgtggaagggttttttgccaacatgggcaaggcttggcccgtggcagtttgtgttctgggtttcctacgagaagctgcgccaagcatcaggcatttcgtcattttga

SEQ ID NO: 19938 - DNA, 1677 bp, Zea mays
  Peptide Sequence Number=SeqID_61717
atggcggcgcggtggcaacccggcagcaagagcagatcgtcggccttgcgaccgacggtgctggtggccgcggcgagcgtggcggccgtcctgctcacggccgccgtcctcttcggggcccgatggacgccttccagcgacgccgaaacatgggtctcggccggagtccgcgtcgtcatgaacgccatgtctgacaagggcggcatcccgttggcgacggtgccgaaccccggcgacaggctcctcggcggtctcctctcgccagacttcgacgacagctcctgcctgagccggtaccgagcctcgctctaccgccgggcgtccctgcacgcgctctcaccccacctcgtctccgccctccgccggtacgagtccctccaccgcctctgcgcacccggcaccccggcctacgcacgcgccacggaacgcctgcgcgcctctcccaacgcctctggcgacggcgctgacccctcctcatccggcgcccggtgcaactacctcgtgtggacaccgaacgcgggcctcggcaaccgcatcctctccatcgcctccggcttcctctacgcgctcctcaccgaccgcgtgctgctcctccacagcagcagcagccacgacctgggcgacctcttctgcgagcctttcccggggtcaacgtggatcctgccggagaaagacctccccgccgttcacgaggggctcagcacccgcaccaacgcgagcctcgggaacacgctgcgacgtggcgaggcgctccgcggggcgccgtggctctacgtgcacctgctgcacaactacaacgtccaggataagctcttcttctgcgacgaggtgcaggccgagctgcgccgcgtgccctggctcgtgttccaggcggacaactacttcgcgccgggcctgttcctggtcccgcggcacgagcgggagctcgcgcgcatgttcccccgccgcgacgccgtgttccaccacctcggccgctacctcttccaccccagcaacgcggtctggggcatggtgacgcggtaccacggctcctacttcgcccgggcggacgagcgcgtgggcgtccaggtgcgcgtgttcaagtgggcgcccatctccaccgaccagttctacgcccagatcctcaagtgcgcggagcatgagaacatcctgccaggcgtcagcgtgcccagagccaacaccaccgccgccgccgtgggctccgccgcccagccggccaaacgcaaggcggtggtcgtcgtctccctatacaacgagtactctgaaaagctcagcgaactgtaccacgagcacggcgcggcgggcggggaggcggtgagcgtgttccagccgacgcacctgggcgagcaacgcttcggtgaccggcagcaggaccagaaggcgctcgcggagatggtgctactcagcttcgccgacgtgctggtcaccaccggcgtttccacgttcgggtacgtcagccaggggctggccgggctgagaccgtgggtgctcatgccccccaaccatgggaaggcgcctgacacgccgtgcaggctggcccccacaatcgagccgtgttttcactcgccgccgaactacgactgccgggcgaaggccagaggtgacaccggcaggatggtccggcacatccggcactgcgaggacttcccacagggtgtccagttgctgcagtcatga

SEQ ID NO: 19939 - DNA, 1380 bp, Zea mays
  Peptide Sequence Number=SeqID_61718
atggagctgcttgtgctactcctgctcttcctcgccctcccagtcctcccggcgcgctgcggctcggtgactccgcggcggtcgctccacctcgagctggcgcgcgtggacgccgcggcggccgccaacctcacggaccaggagctcatccggcgcgccgtgcagcgcagcctcgaccgaccggggatcgtggcgcgctctggcggcggagccgcggacgaggcgggcaaggccgtcgcgagcgaggccccgctggtgcccgggggcggcgagtacctggtcaagctcggcaccggcacgccgcagcacttcttctcggcggccatcgacacggccagcgacctcgtctggatgcagtgccagccctgcgtcagctgctaccgccagctcgacccggtcttcaaccccaagctctcctcctcctacgccgtcgtgccatgcaccagcgacacctgcgcccagctggacggccacagatgccacgaggacgacgatggagcgtgccagtacacctacaagtacagcgggcacggggtgacgaagggcaccctggccatagacaagctggccatcggaggcgacgttttccacgccgtggtcttcggctgcagcgactccagcgtcgggggccctgccgcgcaggcgtcggggctggtcggcctcggccgcgggccgctctcgctggtatcccagctctcggtccatcggttcatgtactgcctgccgccgcccatgtctaggacctcgggaaagctcgtgctcggcgcgggcgcggacgccgtccggaacatgtcggaccgggtcaccgtcaccatgtcgtccagcacgcggtacccgtcctactactacctcaacctcgacgggctggccgtgggcgaccagacccccggcaccaccaggaacgcaacgtcgccgccctcgggtggtgctggtggtggaggaggaggaggaggaggcggcatcgtcggcgctggcggtgccaacgcgtacgggatgatcgtggacgtcgcgtcgacgatctcgttcctggagacgtcgctgtacgacgagctggcggacgacctggaggaggagataaggctgccccgcgccaccccgtcgctccgcctggggctggacctctgcttcatcctgccggaaggcgtggggatggaccgggtgtacgtgccgacggtgtcgctgtcgttcgacgggcggtggctggagctcgaccgggaccggctgttcgtcacggacggcaggatgatgtgcctgatgatcggcaggacgagcggggtgtccatccttggaaacttccagctgcagaacatgcgcgtcctctttaacctgcgccggggcaagatcaccttcgccaaggccagctgcgactccttgccatag

SEQ ID NO: 19940 - DNA, 1929 bp, Zea mays
  Peptide Sequence Number=SeqID_61719
atggagtcggtgaaggggtgggtggccgccgactacgcggcggagcccatggcgtcggtgcagcactcgttgcgcgtcgcctacgtggtcttctccttctgcgccgccttcttcctcggcggcatcaaaggcacgccctttctttcctcggtggtggtcgggcccgttgccgccgccgtgatgatagtgggcaacgtcggcgtcatactcgtgctcttcccggcgcacgtctggtgggcaatctactcgctcatcaagaccgaccgcatcaacgcgggcctgaagctagccgtgctcttggcgctacccgtgctgttcggcctctggctggggctgggcatcttgggcagcgcgctggtgggtctcgggtacggcttcttcacgccgtggatctccaccttcgaggcgttccggcaggaaagcgaggccaagaagttcgtgcacggcattgtggtaaggcaggcagaccagacagcgtctcctgcaccggcgcaggatgggacgtggggcacgatcaagggcagctgcacggtggtcagggacttcgcggacatctgcttccactcctaccctgtctacctcaaggagctgcgcgagggctcccagaatcgtgagccccattccataaggttgctggacgtgccctcatgcatagtcgtcgctctcctcgggctagtcgtggacataccactttacacggtgattgcgctggtcaagagcccctacatgctcttcaaaggctggcagaggctgctgcacgaccttataagccgagaaggcccgttcctcgagacggtctgcgtgccgatcgccggcctggctatcctgttctggccgctggtggtggtcgggagcgtcctgctggccatcgtctccagcatctttgtggggctctacggagcggtcatcgttttccaggagaggtcgtttcagaggggcgtttcgtatgtcgtggccatggttgcggagttcgatgagtacaccaacgactggctctacctccgtgaaggaacagttctcccaaagccgtcctacagaaagaggaaaccgtcgaactccacggaattctcggtgagaacaaacgcctccggcggcaaaggagctgaccaccctcctggccccagtgaagcaccggcaatgttggttccgaatctggcgcctgcgagatcagtgagagaggctatacaggaagtcaagatggtccagatatgggagaacatgatgaagtcatgcgagcagcgggggagggacctcctgaaccagaacgtgataacggccgcggggctggcggagtggctgaggggggcgaaggagggcgggcaccacgagaccgtgagcctgggcctgccgtcctactcgctgctgtgcaccgtgctgcagtcgatcagggccgggtccgggggcctggtgctgggcagcttcgaggtgaaccagcacaaccggccgcaggaccggctgctggactggttcttccaccccgtgctggtgctcaaggagcagatacaggcgctgaggatgaccgaggaggaggtcaggttcctggagaagctgaccgtcttcgccggcaacgtcgcgggcgctggcgctggcgggtgggagaacggcgccgggatgatggtggtgccccaggaccctgtgaggctggcgcagatccaggccataagtagaaggcacgtgtgctgctccgttcacttgttgttcatgacatgcgtgtggtgtggcgtttctccttgttctgaatggtgctgtctttctggcaggctggttgggattgtgaggagcctgtccaagttcccgacgtacaggaggaggtacaggcacgtcgtgaagctgctcatcgcctactccgtcgagagggagagctcgggcaggtcgtcggcttcagggcgctcggcctcctactttgagataacacagctggacgtgtag

SEQ ID NO: 19941 - DNA, 213 bp, Zea mays
  Peptide Sequence Number=SeqID_61720
atggcatttggtgcagtatcagatttcccagaatctgtagatttccgaccacggttgcacgagcatcagactcggaccatgcaaagcttagcgtgtcagttgcaactgggcgccgtggcaccaacagcatatgcaccgttgcttggattggagctggagcagcaccgatcagaagatcgaatccacgcatggtactacctcgcatcggagtga

SEQ ID NO: 19942 - DNA, 189 bp, Zea mays
  Peptide Sequence Number=SeqID_61721
atgcaaatccactatgttatccctaatgaaaacctaagcttaaaggactgtaatcttgcggacggagagtacatcctcgtgccggagcaaggagctgctcaggaggtagccccagatccagcaccagagccagcaccagaggacctgcctgccactgctttggaaggcaagccccggttttatgcataa

SEQ ID NO: 19943 - DNA, 561 bp, Zea mays
  Peptide Sequence Number=SeqID_61722
atggcacttctctttttgcaaatttcaataatattctgtggacttacatttttttcagcactacgagaattcttccgagcgaaaaatggtaattgttcttgcatggagttctcatctggagagttgaccagggacacgggattacctcaaggtgaaaatcagcgaataaatttggaaatgcagcaagaaaatgagaacggaagacttgaaggtcctactgaaggatcactgggtggttctaacaggcacttaagcagtactggttcctttgttcaactcaatgatgcagcagatgagttctttgacgtgccagacgaatcagaatatgatcagagagaagttatgtttccttctgatgagagcttgcatgctgcggaccagcgtcacgctaaactgtccactgctgctgtttttgtaaaaaggttgcatgatcttgcagttcagaaaagaggatacattgacttacagggagctgcagatgctgataatgggccatgttgctatggatatactcttcccaaagattcgagctatacagtgcctctactgacgaatctctag

SEQ ID NO: 19944 - DNA, 480 bp, Zea mays
  Peptide Sequence Number=SeqID_61723
atcaaggcaaatagtaccctgatgcaaatggtaggtgctgactggataaaatctgataagcgtgaggatgatctagctggtcgccctggggggctagtccaggttcctggttcaaccacatacagcttagctttgtattatatgatggatacaccattagaaaaggtccctctgcttgaaagatttgtaaatggagatgaagcattcagaaattcaaggttcaagctcattccttacatctcaaagggatcttggattgttaaacagagtgtgggcaagaaagcttgcttggttggacaagcattagaaatcaattattttcgtggaagaaactatttggagcttggagttgatattggttcatcaacggtggcacgaggtgtggtgagcctagtgcttggctacttgaacaatcttgtgatcgaaatggccttcttggtacagatgagcatacatcttgtaaagatcaagaagatttag

SEQ ID NO: 19945 - DNA, 237 bp, Zea mays
  Peptide Sequence Number=SeqID_61724
atggcccagtccacagcatttgccggagtcattggtcaccaaccgacgcccgtccttgacttgctcgaggatgattcgagccatggcttgaccggggctatctccgacgtcgaagaagcgacagaaagagactgctttctggcgatgcctccgccaaacgataacgacaaagggaacaaggaggcccccaatcaagaagaacacctacgccagtgccaagctctgaaaaaacactga

SEQ ID NO: 19946 - DNA, 174 bp, Zea mays
  Peptide Sequence Number=SeqID_61725
atggcgtgggcgaggcgcagacgccacgcccccagccccgcccgtggccccgtctggccagcctgcctgcgcgcccatggctcggccatgccctacgcagcccagtgcgcgctctccaaccaagtcgccaccatgtccctggccccacacaccaggtctgtcccctccctctaa

SEQ ID NO: 19947 - DNA, 327 bp, Zea mays
  Peptide Sequence Number=SeqID_61726
atgtcgcacggactgcgccagggcacgctgcgcacacgccgccctagaccgcgccgaaggccctgccgggcgtacgtcgagcactggccgcgccatgggccgagccacaccgaccgcgggctgagcaggggcgacggccgagcacaggcgagccgcgctcacaaccacgacgagcaccacgccgacgaggaagaaaagagagagttgtggggaggaggggagagagaggaaggaaggaggctcaccccgacgacgaacctcagcatgacgacgacaacgacacctcggcaggagcatggatccggcgaacgacgacacaataggtag

SEQ ID NO: 19948 - DNA, 306 bp, Zea mays
  Peptide Sequence Number=SeqID_61727
atgtcgccgtcgtcgtcgctgagcgcgctgcggcacaggctgatggccaccgtgtgctgctgctttggccagggcgccggcggcctgggcgagcggacgcggtggcgccgccgcgcggacgtcggggagttccggtacgacccgctgagctacgcgctcaacttcgacgagggcgacggcgacgaggaggaggaggaggaggaggaggggcaacggggtgcccgcgcccgccgcggcgacggcctgctctaccacagcttctcctcgcggctgtcgacgcccgccgcggtcgtcgaggtcgcgtag

SEQ ID NO: 19949 - DNA, 906 bp, Zea mays
  Peptide Sequence Number=SeqID_61728
atgaggtccacttggttggcatttgccttgtcggcgctcgtcgtcgtctcctcatcagcggcacacgtacacgcctcgccggggaaacttgaggtcggtttctacgagcactcatgcgcacaggccgaggacatcgtgcgcaacgccgtccgccgcggcatcgcccgtgagcccggcgtcggcgcggggctcatccggatgcacttccacgactgcttcgtccggggctgcgacggctccatcctcatcaactccacgccgggcaacctggccgagaaggactccgtggccaacaaccccagcatgcgcggcttcgacgtcatcgacgacgccaaggccgtcctcgaggcgcactgcccgcgcaccgtctcctgcgccgacatcgtcgcgttcgcggcccgtgacagcacctacctcgccggcggcctggactacaaggtcccgtcgggccgccgtgacggccgcgtgtccaaagaggaggaggtgctcgacaacaatgtccccgccccgactgacgagcggctctacaacttcagcgggcagctggggcagacagacccgtccctcgaccccgcctacgccgggcacctcaaggcgcggtgcccttggccgtccagcgacgaccagatggaccccacggtggtgccgcttgacccagtcacgccggcgaccttcgacaaccagtactacaagaacgtgctggcgcacaaggtcctgttcatctctgacaacacactgctcgacaatccctggacggccggaatggtccacttcaacgccgcagtcgagaaggcatggcaggtcaagttcgccaaggccatggttaagatgggcaaggtccaggtgctcaccggcgacgagggagagatcagggagaagtgcttcgccgtcaacccacactactag

SEQ ID NO: 19950 - DNA, 309 bp, Zea mays
  Peptide Sequence Number=SeqID_61729
atggtctgcgcgccggggctcggttttattcccaaggctgtgccaaccactcgtcccagacccacagagatccccaaccggaatccgactgtttcagttagtgcggctcgattcaacagccgagttacgcggagcgcggccagcaagctcgacaggggtttgctcagatctagtcgtagggaagaaggaacgactgatagcatggtcccatttgtcagtgtccgggagcggaacaacgagcccaggcttctggctgatgcgcatgctggtgaacgggtccggcccgttagtgagggtcgcaaatgttag

SEQ ID NO: 19951 - DNA, 153 bp, Zea mays
  Peptide Sequence Number=SeqID_61730
atggactacggctggggagagggcgagagtccaatcgctgccgtgaccgtggatcgaggagttccagttggaaagactggggagcagatgggaccacgaataatggaacgagtaaaggtggtgcgcgacatggaaataaacatcaatacttag

SEQ ID NO: 19952 - DNA, 591 bp, Zea mays
  Peptide Sequence Number=SeqID_61731
gttatgtcactgcttccctgccttcctcaccatgagcagttgctacaaacagtttgttcaaccattggagcattttcaaaatggattgatgctgcaccagctgaattatctattctaccacctttagttgatattctcaataagggtatgagtacatcggaggatacagctgcggctgcttctatggcctttaagtacatatgtgaagaacgcgcaggagaactgcgcatcttatatattagagaggagatgttgctgagcaaatctcccaaaaacccacataaacccgaagactgtaggagaaagttctcagggtccctggatggcctcttccagatataccatattgcaatcagtggagttggtggttataaagtttcttcagaggactcgttgcatttggttgaagccctaagcaatgtgaaacaaccagaagtagttgctgaagctgtatatagatattggccgacactcaagagtatctttgatcaacgagcatgggatacccgtaccatggagtcaatatgccgatcttgcaaatttgcttgcggaaatgccattgagaatgcattatggaactattattgttag

SEQ ID NO: 19953 - DNA, 420 bp, Zea mays
  Peptide Sequence Number=SeqID_61732
atggccacctcactttacaaaaacaagctgaccggccaacgcaaaatcaggcccatgacatctgagatttcaccaaatctatctgttatggtatggagactggacccagaagcagcatcagatatggtgttgaagaagcgcaaacgttctgcatctgttagggcttgtggcggttctctatggtcgttatggaagactaggaatgatatggtgttcaacaacaagatccttgcatcgccggtggtggtggtccacaagacgttgatgatgctatgcaactggaagccgctgctgaagaacacagcagtggagaaagctgccatgtttggtgacacctgggtgcatttagaagttgtaagctcctttgtaaaactggtctcccccagtgtcgggtcagggtttcagcattacgccttctaa

SEQ ID NO: 19954 - DNA, 255 bp, Zea mays
  Peptide Sequence Number=SeqID_61733
atgcccaaccctatatcatgtgtttcctctatcgtgcttatgggaagggagacgagtcctctacagcttcttgcgtctctactgctgacgggagggaagggagcggatctggtgatccgtggtaacgacgtgcaacaatcctcaaccgtgtctcatgtccgtgtccgcgcgaaacctcaacaattggttgatgccatcgtgtgctttatgaccgtgctccctcattccaagatcctcgcgcttcttagaatataa

SEQ ID NO: 19955 - DNA, 3157 bp, Zea mays
  Peptide Sequence Number=SeqID_61734
cctgcatgtggccgccacatccaacgagagggaaaacgaccagcaagcactcctgtgcttcaagtcccagctttccggtacagtcggcactctctcctcatggagcagcaacacatccatggagttctgcagctggcacggggtcagctgcagcgagcattcacctcgccgtgtgatcgcgctggacctcgcatcagaaggcatcacaggtaccataccaccctgcatcgccaatctcacctctctcacaaggctgcagctggcaaacaacagcttccgcggcagcataccgccggagctcggactcctcagccagctccgcatcctgaacctgagcatgaactctctagaaggcaccatcccttccgaactctcttcgtgttcccagcttcaggcccttggactgtggaacaactcccttcgcggcgaggtaccacctgccctaggccagtgcgtccagctcgaggagatcgacctcagcaacaacgatctagaagggagcatcccctcccgtttcggggctcttccagagttgcggacactcgtcctcgctggcaacaggctcagtggcgccatacctccctcgttgggccgcagcagcctctccctcacgcacgttgaccttggggcaaacgctctcaccggcgggattccggagtccctggccggcagctcgtctctccaggtgcttaggctcatgaggaacagcctcggtggagaactgccacgggctctcttcaacacatcatcgctcatcgccatctgcctccaggaaaacaagtttgttggccctataccacctgccactgccgtcgtctctcccccggtaaaacaccttcacctgggagggaactttctctccggaacgataccggcctcgctggggaacctttcttccctgcttgaccttcgtcttactcggaacaggttgcatgggagaatcccagagagcataggctatctgccagcgctaagtttactgaacctgaatctgaacaacctgtctgggccagtgccactctccctgttcaacatgtcctccctgagagctctcgctatggggaacaactcgctcagcgggagactgccgtcaggcatcggctacacgctaccgagaattcagatcctcatcctcccgtccaacaggtttgacggtccaattccagcttctctcctccatgctcaccacatgcagtggctctacctcggacagaacagcctaaccgggcctgtgccgttcttcggaacgctgccgaatctggaagaactccaagtgtcgtataacctgctggacgcgggggactggggcttcgtctcttcgctgtcaggttgctctagactgactaggctctacctggccgggaacagtttccgaggggagctgccgagttctatcggcaatctttctagcagcctcgagatactgtggctacgggacaacaagatcagcgggcccataccgccggagctgggaaacctcaagaacctcagcacgctgtacatggatcacaaccgcttcactggtagcataccggcagcgatcgggaacctgaaaagactggtggttctgtccgctgcacggaacaggctctcaggcaccatccctgacgcgatcggcgacctcgtccagctgaccgatctgaaactggacgccaacaacttgagtggcaggatacccgcgagcataggacgctgtactcagctccagatactcaatcttgctcgtaatgcgctggacggtggtataccgagatcgatcctcgaaatatcctctctttctctagaacttgacctgtcgtacaaccgcctggctgggggcatcccggatgaaatcggcaacctcatcaacttgaacaaactcagcgtctcaaacaacatgctgtccggcagcatcccgtccgcgctcggccagtgcgtgcttctggagtaccttaagatgcagaacaatctctttacaggaagcgttccacagtcgtttgcaggactggtcgggatcagagagctggatgtctccaggaacaatctgtctgggaagatcccagggttcctcacgtccctgaactatctgaactatctcaatctatccttcaacgatttcgacggagcagttccggaaggcggcgtttttggcaacgctagtgcggtgtcaatcgaaggaaatggtcgcttgtgcgctgctgttccaacgagaggtgtcaccctttgttcagcgaggggccagagcaggcactatagcttggttctagctgcaaagatagtaacgccagttgttgttacaatcatgttgctttgcctggcggcaattttctggcggaagagaatgcaggcggcaaaaccgcatccgcagcaatccgatggcgaaatgaagaacgtcacatacgaagaaatcttgaaggcgacagatgcgttctctcctgctaacttgatcagctcaggctcatatggaaaggtttataagggtaccatgaagcttcacaaaggaccagtggccatcaagatttttaacctcggtatacatggagcgcatgggagcttcctcgcagaatgtgaggctctcagaaacgcccggcaccgaaatatcgtaaaagtaatcacagtatgctcttcagtggatcctgctggggctgacttcaaggccatagttttcccatacatgctgaacgggaacctggacatgtggctgaaccagaagacccatcaaaatagtcagagaaagactctgagcttaagccaaagaatcagtgtgtcactggatgtagcaaatgctgtggactatctccacaaccaatgcgcgtcgccattgatacactgcgacctgaagccaagcaatgttcttttggaccttgacatggtggcatatgtcggcgactttggcctagcaaggtttcaacgtgatacaccaactgcccatgaaggcagctcggcgagctttgctggcctaaaaggatccattggatatatcccaccagagtatggcatgagtgagggcatatcaaccgagggtgatgtctacagtttcggagtgctcttgttggagatgatgacaggccgccgtcccaccgatgaaaagttcagtgatggctcgtgcagacaactaggcctcgctggtcagtcgactcccatgacgccgctgatgagtggacccgaggccctgtag

SEQ ID NO: 19956 - DNA, 513 bp, Zea mays
  Peptide Sequence Number=SeqID_61735
atgctgatgggaaccctgctctatggtgtgaagtacacacttccagagtatttttgtacctttcttgttgctggcgacaagctccaagagaccaagacagttaagaagcttgccaaccctaatgcacctcttggctatacattgtgcttcctcaacttagcttttgatgggtatactaactcgacccaagatttaataaagtcaaggtacccaaagactaatccatgggatataatgcttggcatgaacctctgggggaccatatataatgctgtagttatgtttgttgcgccattactattcagtaactggccatatgcagatggtttcgaggcattgagattttgccaggagaacccagaggtggcctgggacatttttctgttctgcctatgtggcgccgtgggtcagaattatatcttcttaaccatcagcaggttcggcgctcttactaacacaacgatcactaccactgtatttttgttctactgtcccgaaagtaacctgttatag

SEQ ID NO: 19957 - DNA, 447 bp, Zea mays
  Peptide Sequence Number=SeqID_61736
atgtgcctgatgaagttcaagacggtggaggaggcgatcgcgagggcgaacgacacgcggtacgggctgggggcgggggtggtgacgcgggacctggacgtggcgaaccgggtggtgaggtcggtgcgcgccggggtggtgtgggtgaactgctacttcgccatgggcagcgactgccccttcggcggccgcaagatgagcggcttcggcaaggacgagggcatgcacgcgctcgacaagtacctggccgtcaagtgcctcgcgcttctcatcaccctcctcccggcgctcttcttcgtcctcccgaggatgccgcagcccgcgcacgaccgtcgtcgcgaggcggctgcgagggcgacgaccaggatctactggcaggccgtcgaccagatggtggcgtgcgcgctggtgctcaccgccctcctcgccacctacatataccactag

SEQ ID NO: 19958 - DNA, 804 bp, Zea mays
  Peptide Sequence Number=SeqID_61737
atgctgatgggaacccttctctatagtgtgaagtacacacttccagagtatttttgtacctttcttgttgctggcggtgtgtcctcctttgcgttgttgaagacaagctccaagacagttaagaagcttgtcaaccctaatgcacctcttggctatacattgtgcttcctcaacttagcttttgatgggtacccaaagactaatccatgggatataatgcttggcatgaacctctgggggaccatatataatgctgtagttatgtttgttgcgccattactattcagtaactggccatatgcaaatggtttcgaggcattgagattttgccaggagaacccagaggtggcctgggacatttttctgttctgcctatgtggcgccgtggggcagaatttcatcttcttaaccatcagcaggttcggcgctcttactaacacaacgatcactaccacccgtaaattcatgagcatcgtcgtttcatctgtaatcagcggcaatccattatcttcaaagcaatggggtagtgttgcgatggtcttcttaggcctctctgtccaaatatatctcaaatggaagagaaagaagggcagagaccgcaatgaggaggagatgcagcaaactgtgttgcattcggggtggtggggggaggggaagttgtatgatgaccagtgtatttttgttctactgtctcgaaagagatgttatgagagcattattcatgtagatatacgaatacaatgggtgctcaatgctccattacgaaatgtaaatgacagactgatactggctaagccgttctaa

SEQ ID NO: 19959 - DNA, 105 bp, Zea mays
  Peptide Sequence Number=SeqID_61738
atggggatcgaggcgctcaagtacattagctatccggctcaggtgttggcaaaatcttctaagatgatccctgtaagtttacatttacttaaacacactgcataa

SEQ ID NO: 19960 - DNA, 261 bp, Zea mays
  Peptide Sequence Number=SeqID_61739
atgaaggatgttgaagacgtgaatgaagcccccaagaaatcaagcgtttctagggacgagttagagggccaagccgattacatggatgacatggtggagagggaaaatgatgaagcagacgtagaaactacccccgtacgagaagacgtagaaactgccctcgtacgttgccagaggcattataagactgaagaagacttgattgatgtcactcctttagaggttgtggcagagggcaaggagaacaatggtcttgaggat

SEQ ID NO: 19961 - DNA, 297 bp, Zea mays
  Peptide Sequence Number=SeqID_61740
atggatcccaagctcctctatggtagtccaattggcccaagggacaccatagcctataccatgatcccctgcatgacctccatggcttcctccataaccaccatgagtacctatcatcacaggaaacctatgagcagtagcagtgaggagtctgagaagtgtctcgacttagatttcattgacgatcttgactgggacaactacctaggtgaagacgatgttgacgatgacgatagcgacgaagatagctgcaatgacgaggataagcagccattggtgaagcgtaggagaatgtag

SEQ ID NO: 19962 - DNA, 1128 bp, Zea mays
  Peptide Sequence Number=SeqID_61741
atggggatgcgtggatgcgggggcagcaagggcgagaagaaggcagtgacgacaaatatcgatgaatgtaaaacacaacacatttgcaaagagaacgaggtatgcaacaatgttgcagggagctactactgcaccaaaacaacaaaacagcagggtcttgttttgggtgtgattattgggctttgtgttggctttggcattctagtatcttgcttgggcgggatgcttgtcatccgtagatggaaaagggacattcaaaagcaactacggagaaaatactttagaaaaaaccaaggacttctcctagaacaactaatatcatctgatgagaatgcccgcaacaatacgaagattttttctctggaagagctcaagaaggctacaaatgactttgatacatcacgcatacttggacgtggaggccatggaatggtttacaaaggaatcttgtcggatcagcgtgtggtagcaataaaaatttccaagatcatggagcaaggtgaaatcgacagttttatcaatgaggtcgccattctttctcagataaaccaccgcaacatagtacgactcttcggatgttgtcttgaaactgaggtcccacttcttgtgtatgatttcgtatctaatggttctttgttcgaaattctccatgccgctgaggcaagcaacgatttccagttgtcttgggacgattgcttaaggattgcattagaggctgcaggggcactttattatctccattcttcagcttcagtctcaatcttccaccgtgatgtcaagtcctcgaatatacttttggatggaaactacactgcaaaagtttcagattttggtgcgtcaaggttggttcctattgaccaaacccatgttgttacgaatattcaaggcacttttggctacttagatcctgagtactaccacactgggcaactaaatgagaaaagtgatgtgtatagctttggagtggtacttgtggagctactccttcgaaagaagccggtttttacaaatgagactgggacaaagcaaaatctgtccaactatttcctttgggaaaagaagatgaaacctgttacagagatagtggcttctcaagttctcgaggaagcaacagaggaagaaaattaa

SEQ ID NO: 19963 - DNA, 300 bp, Zea mays
  Peptide Sequence Number=SeqID_61742
atggcgagagaagacggtaggagagatagagataccgtcgccgttcttgtcgaagagcgagaaggcctcctggaacgcgagcctctgctcgtccgtcagcccgtccatgcaactgacagcaaggcactatacgggaccaatgccagttgccaggtgaagtgttttgtctctatagattacaaccgcaatagttctgactttaatccgcgaagcgaacagccttctgtggtgaaccctgtttgtttgcatcgctccttggttacagtagctgtaacaccataccagaccaccctggagtaa

SEQ ID NO: 19964 - DNA, 513 bp, Zea mays
  Peptide Sequence Number=SeqID_61743
ggccccgcccggctgcccttcccggaggcgctagcacgaccggcctcccatcccggcggcgctagccaaaaacaaccgctcgagccctcgccctacctcgcggcggcgctcggccgcgcgcggcgctccccgcccgtcccggcaccgcggcggcgcccgcccgtcccggacccgaggcggcgcccgcgccgcactcgctcctccactgctcgagtgcagcgcgacctcggcgccaccacggcgtggctcggcgcggccccggtggcccatgctaaacgacgcggcccaggcgcggcctccggcccccggcgagtacccggagcggccccggccggatcggccgcccctggccggttcaaccgccccggccccggctcggccgcccgttcccccgtcccggcctcgcccgaccgtggttatgagattgatggttttggttatgactatggtgctggcgaagatgaagctgtggaaggagacttccaggagttccaagactacgacgagttctag

SEQ ID NO: 19965 - DNA, 255 bp, Zea mays
  Peptide Sequence Number=SeqID_61744
atggataactggttgagtatcattttgcacatatcaatgggccgcctatttggtgtacaccaagttgagccggttgctacaactgcaatctataaagacaaaacacaagcaatagaaagccggtgccaaccattaatcaagaggacggagtacctggcactgaaccaactgaaactctatgaacatttcggtctgaccaagtgcttcatccaagctataaaaataaacgacatgtgtactttggacagaatttag

SEQ ID NO: 19966 - DNA, 270 bp, Zea mays
  Peptide Sequence Number=SeqID_61745
atggagcccggggcacagacgaaatccgagcaggggaagcaggcgttcgccatgaaagacagaagagagagctcccggtggccaacgtccatggcgagctccaagtcggcgcgccagccagggagctccgcgagctgggagatggagcacttcggctggccggacttgggcagcgggagctggaggaacgccagcgagcagggagaagaagacacgagggagagggagggagacgcagccagggagaagaagctccacagctggagataa

SEQ ID NO: 19967 - DNA, 219 bp, Zea mays
  Peptide Sequence Number=SeqID_61746
atggcgcggtggcgggcgctcacggcggtgaagtcgccgacgaggcttccgggcacaataagcgaagaggaggtgtggccagggagggggaagggaggagaggtggcgagcaccggcaagctcgccatgacggtggtgatggcgcaaagtggcaacgggatggctcggggcgcctgggcgctgctcggccgcggtcgagttggggcggctgtgtcctag

SEQ ID NO: 19968 - DNA, 735 bp, Zea mays
  Peptide Sequence Number=SeqID_61747
atgactgttgatttccgatttggggattcggggctcgaatttgtggaattagggttccataaagattctatctgtgttcttgccacgtttctcactaatctgagtgagactcgtctctgcgctcttgtccgtcacgcatactttttgtgcgcggagggcggaggctaccccaggagaactagtgtacttgtagatcgtgtgagcgtgtggcggaggcagaccccacaagacccagaaggtggacttgaggccgaacgttggatgccggaagcggcgaccgtctaccatgatgggtcagcacgagccagtatcggtggcgccatccgtgacagcgacggtcgtgtcgtgctcgcattcgctgagcccacagagcactccacggttggcatagtggaggcgcgcgcgatggctcgtgtccttcgcctggcgcttgggcttaacctgcagcgggtggtggtcgagggcgacgacctcatgcttgtgcggctgctccgtggcgaggacacgcggacgcggatccctgtggcgctgcaggagatccacgggctgcttcgctgttttgcagggtgcgatgtgaggcatgtgtaccgcgaggggaaccaggtggcgcacaccctttgccgtcaggcctaccactgccccggcgtgtgggtagggactgtaccgtccgtcgtgtttgacaaggccgaggaggaccggcgtggcgtattgcatgagcgctcggtggtccgatga

SEQ ID NO: 19969 - DNA, 387 bp, Zea mays
  Peptide Sequence Number=SeqID_61748
atggggattagaacaagggagcaagaaaggagaacgcaccgtggtcttgccgtcggtagttcacagttcgcaaccctcaggccgacgccgtacctccttgcaagtgcagaagcaccgccgaggatctcaccgacggcggcgccctcacaggaaagcgctcgccggcggggagttcgacggcagcgcaacaatggacgacggatcagtcctccgcctggccggtgcacacaattctctactagttggtcagatagacaggttgaggcgcgagatggtagtaattaccactcttcgcacgaaaagattgagatggtcaccatagtggatgacatagattactcacattgttttgagaaactcactgagcccacagtgggctcaccataa

SEQ ID NO: 19970 - DNA, 600 bp, Zea mays
  Peptide Sequence Number=SeqID_61749
atggcgccacccaacgaccccaatctataccaccatacgtcgcagctctctccgtgggcacggccgtaccatcctggccgcgttgtcatggtgcaatggtcgctgccacctcatggttggtacaaactcaactttgatggatcagtctaccatgatgggtcagcacgagccagtatcggtggcgccatccgtgacagcgacggtcgtgtcgtgctcgcattcgctgagcccacagagcactccacggttggcatagtggaggcgcgcgcgatggctcgtgtccttcgcctggcgcttgggcttaacctgcagcgggtggtggtcgagggcgacgacctcatgcttgtgcggctgctccgtggcgaggacacgcggacgcggatccctgtggcgctgcaggagatccacgggctgcttcgctgttttgcagggtgcgatgtgaggcatgtgtaccgcgaggggaaccaggtggcgcacaccctttgccgtcaggcctaccactgccccggcgtgtgggtagggactgtaccgtccgtcgtgtttgacaaggccgaggaggaccggcgtggcgtattgcatgagcgctcggtggtccgatga

SEQ ID NO: 19971 - DNA, 429 bp, Zea mays
  Peptide Sequence Number=SeqID_61750
atggccagcacgcgtgccatggccaaggactggagcagagagggactcgacgagggagatgctgggcatggagaggaggaggagccgtgcgcaccagaggctatggcgagcgagcagaagggcgagctccagtgtacgattgagcagggggttgaagggctggacaaactcgacggtgtccacggccagagcgagttggagaagccgagcaagggcgagctccatggcggggtcggcggaggccagcagtggacggcgccctgcgcgcggcgtgaagagagcatgcgctaccgcgcagaggatgaaatgttgggcgagctcggccaggagagaggcagagagcagcgtggggcgagcagggacacgcaccaccatggtggggagggcgacgaccatggaggaagagaagggaaaaacgcgacagaataa

SEQ ID NO: 19972 - DNA, 573 bp, Zea mays
  Peptide Sequence Number=SeqID_61751
atggccggagttggtaggtcctcacgagcaggtgggggagctcgtcagcggcgagtgattcagcctaaccatgacggtatagctcaacctagtgagttggggagcttcacagaaagtcagagaggttgtaggcgcaaggaatttgtaaatggctcacatgttcgacggcggaggcgtgttgcccacggtggcaaggctcgccggagcacacccaagccgcgcctgacaccgtcccgcggcgaggagcggaaccatgacggccaagttgctctgactaggagcggctacgacggcgacgtcgggcctctccccctgaccccgctcgcggttctctgcgtcatcggcgaaggggccctgtggctccgagttgagggctggcaggagcgcacaaccaaagatccaacggaccctggtattcttctacccttcaaccatcagagcgatagtcgctcccggctgcggcgtcgaaacccggccaagtgccccaggcggcgcaagatcttcaggcaccagggaaagggtcccgcagagcacgactcaggtcacgtagtggatgcccagcggtgggcgtaa

SEQ ID NO: 19973 - DNA, 168 bp, Zea mays
  Peptide Sequence Number=SeqID_61752
atggagacaccaaagagcaagaccggagaaggaaaagatcaaccacgtcaaggaaggagagaagtcaacctcaatcttcaagatgcattaccacccaacaaggcgttcttcctcaccgtaaactttcttacccccggagattatatagaagatccatatatgagataa

SEQ ID NO: 19974 - DNA, 177 bp, Zea mays
  Peptide Sequence Number=SeqID_61753
atggcggcggcatgggcggggctggcttcgtttctcgtcgcggcgcagttggcgtcagcggcgcagatcacggcgccagcgttcctgtgggagcccaaaaactatggtgatgatgcatgtcaatcaaaggtgctatttacttttgacctaccttatgtaggaatttatgatgtgtaa

SEQ ID NO: 19975 - DNA, 492 bp, Zea mays
  Peptide Sequence Number=SeqID_61754
atgtgggcttgtatgaagcagttcaaagatgcagtctgtggtgtgatgaatgagccaggccctattgcaactaaactacttgctctaaagtttgtggaaacatggattttgtgttgcacacctcaagccaacagtgaccaagtacagccaactgagggaaaaaactggagatttgatacttcacgatcatctcaatttcatcctagccttgatcctgctattttggaagctgatgcacatcgagctctcctcctcctcctggatattctgcgaacagcttatgcccatcgagggtccttcctagttggcaccatcaactctttttgctttgattttgaccctggcttggagactgcaaagggggcacattcagcaagcctgcggtatgctatctttacaaccaaggatgttgctccttgtcatggggtggcagccaagggcatgaggcccatagggataggctcagggttaggattagtggataaagattag

SEQ ID NO: 19976 - DNA, 462 bp, Zea mays
  Peptide Sequence Number=SeqID_61755
atgggcgatggagacgcaaacccgatcactgatcggaaaatcgataagacgcaacaacaacagatatggtacatcactggggtattgcctatatttcctaggctagttgatctcccgcttgagagattccaagacgtacttgctcggatattgcagggaactgctcatactggtccagcattgactcctgctgaagttctcattgcaattcatgatattaaccctgaaaaagataaagttgccctaaaaaaggttgacagaataccaattcctcttctttttatgagaacagttattcaagcgcttgatgcttttcctgctttggttgattttgtcatgggaatactctccaggctcatcgataaacagatatggaaaatgccgaagctctgggttgggtttttaaaattgtcattccagactcagccacgttcttttgatgtcttattacagttttactga

SEQ ID NO: 19977 - DNA, 777 bp, Zea mays
  Peptide Sequence Number=SeqID_61756
atggactatatcctctcaaacgactacattcttcaggaaatgctttgtatgggaattgggaattatcgctttgatccaatcatgccaactgtacatggttcattgataaactatacaggtaagctcacaactctgagggtaaaacagagttcaggaagctattgttctttttcgttggcatttcaaaatgatgatcaaaagtcagaaggcagcatggaattgctgaattcagtgaaagctatttcgatccatcctctttccaataacaagtttttggtactggattcatctggagtgttgcatgtcttcattttttcaacaacacaaatggtctcaagaggtgccatcaagcaatgttctgaaaatatccatacatatcgcttgcattatcccatgaaagtgcaattatctgctgtcttttcagttacctctataattgagactgaatcccctaacggtgataatggagacgttactggagaaagagagttagcacctatcaagctttcagctattgaagcaatctttacaagcgaaagagttgaggacattgtatctatctccaaggattcagttcttatccttggtcaaggtgacgccagattatggacggaccacgccgtaatgaccctattgctctgcatgcgtactttacatgcaaagactggcacaattcttgttgatatgacttggaaagagcaatgctgccaaatctattcccagtctcagttgtcgtggaaagtggatcaccatgagggccattcagctatggaataa

SEQ ID NO: 19978 - DNA, 225 bp, Zea mays
  Peptide Sequence Number=SeqID_61757
atggctggcgcgagcgaggacgagggtcgtgccaaacttatggaagcagggcaagtggccatcatgggcgaggtcggcgaactaatccccggtagatgcggcctggttgaggcgaatggagccggtcagccgggtatcacgcgcgggaggccggtctacttcatcagtgaggtactgttcgagaccaagatcccctacccacaaattcagaagctgctgtacgcg

SEQ ID NO: 19979 - DNA, 501 bp, Zea mays
  Peptide Sequence Number=SeqID_61758
atggccaacgctcttcatcatgttcttctcgtcatcacacaaataccttatggcaagaggaagtccataagtcttaccagtgcaaaggcgaagacagggggagaaaagaagaaaagaccaacaagcaagatcttcaacacctacatcaacaaggtggataaaaaggcggctacgccatatttaatcaagaagaaaaagaatagaaaggtgatagccatcaatgccaacaagcaagccaacaagggaaagggagccaaatatatctgcgtgccaaaggagattatttcaaacatgaaaagcaccaagaagccccctaactctcatgcactcctctctccccctttagcgtcaagcaccaaaaggtacaccctaatctatggatcgaagttagaatctaacctaggatctacagtagaagctatagcgggtgttgactctaaggtggctgatggctgtgtctcaggagctggagccagtgttggcacagacactgcgacttaa

SEQ ID NO: 19980 - DNA, 225 bp, Zea mays
  Peptide Sequence Number=SeqID_61759
atgagggtggtatgggacgcccttggccaagcatctgttatggttcctatattcttgcttagggatctaggtacgggcatcgtcccacaactttttcttgagggcggagggtataggtttggagcggccttgggatcctctttgattaaagatacagatgatttgagatacaatggttctattgatggttttggttacgatgatgataatgatgttcctcgatga

SEQ ID NO: 19981 - DNA, 390 bp, Zea mays
  Peptide Sequence Number=SeqID_61760
atgtccgtggtggggactcgtcggagacgagggcatgagcgcactgtgggccctagggcgacgggaagggctcagggaggtcagggggagtgcggcgaacccgagcgtgggcacaacaccggcgcagaggcaccaaagggtggtggtccatggcgagatggctcggcggcagcgttgcctcacttcggtgaggaatcgcgtgcaacaaagggcggagaaggggaaataagagggcgggggaggttggttacctcgagggaagactctggatccttgaacggcagtagtggcacgacaaaggctcgggtcgatggcgatgtcgttgtggttgcgcagaagaagtctggtgagcgtgggcagagagaaccaaagggggatggagcaaattga

SEQ ID NO: 19982 - DNA, 124 bp, Zea mays
  Peptide Sequence Number=SeqID_61761
atggctggcgcgagcgaggacgagggtcgtgccaaacttatggaagcagggcaagtggccatcatgggcgaggtcggcgaactaatccccggtagatgcggcctgattgaggcgaatggagccg

SEQ ID NO: 19983 - DNA, 552 bp, Zea mays
  Peptide Sequence Number=SeqID_61762
atgggtcaggcaacccatccctccaactcctgctcctccgaaggctccatgctgtggctcaagttgccaccatcgtcgtctccgtcgaggtctcctcctgcagctggggtgccctatggttgtgcaggggcacctctggctagggcacagaggagggatgcctcccagactccacctcctgctgaggtgaggggaagagtcctactactcactctactgacgttggcgttcctgctccttgcacagacggtggtgcagtcgttccagctaagtccagcctcgggcgccataggaagctccgcctcgcccgaccctagggctcggacacagcctcggctccggaagacgacgaactccgcctcgcccgaccctagggctcggactcagcctcggctccggaagacgatggactccgcctcgcccgaccccggggctcggactcaacctcgacctcggaagacagtctccgcctcgctcgaccccagggctcaggctcaacctcgacgctggacgacggactccgcctcgcccgaccccagggctcggacatag

SEQ ID NO: 19984 - DNA, 1505 bp, Zea mays
  Peptide Sequence Number=SeqID_61763
aaagcggttgcttcgggcttcgaggccttactcgtcggctgctcctgcccgcctccgtctcccacagcccacagtcccacacagccacggccacgccgccgtcctcgagccgcctgatgagctgcctccgccgcgcttcccgcctcacccggggtctctcttcctcctcggcggcggaggcggagacgctcccgccgccgcgcccctctgcgggtcgccgcgtggtcgtgacggggctgggcgccgtcacgccgctggcgcgcggcgtgggcgccacctgggatcgcctcgtcgcggggagatgcgccgtgcgctctctcgccgcagaggacctccgctttccggaggaagcagcggggaggacgctcgagcagctcccgtccagggtggtcgccgccgtgccgcgcgggaagggcgaggacgagttcgccgaggacacgtggaccaaggataaatctgtatcaggatttatttcctatgctctgtgtgcagctgatgaggctttaagagatgcaaattggttgccttccgaagatgataagaaggaaagaacgcgtctacgtcgtctcagcccatacttcatccccaagattttgatcaacatggcatcaggtcatgtcagcatgagatatggtttccagggtccaaaccatgctgctgtgacagcttgcgccactggtgctcactctattggcgatgctactaggatgatccaatttggtgatgccgatgtgatggtggctggtggaactgagtccaatattgatgctttgtctatagcgggattttctaggatggctgcacgctggacggtggacaccggtggaggcatggagcggaggcgggcgctgcacactggagggcggaggctcgagcacaagcctctgcagcagccacacgatggagcagagagccgccggagtagagggggcgcagtcgcacgctggagaaggggcgacggctactgtgcggctgctgtggcacttgatcatgcaaaggaacgcggtgcaaaaatatatgctgaagttcgaggctacggaatgtctggtgatgcacaccacataactcagccacaaagtggtggtagaggtgctattttagccatgaagcgtgctttggaccagtcaggtcttcatgtaaatgaaattggttatgtgaatgcgcatgccacgtcgactcctcttggtgatgctgtggaggcgaacgcgatcaaatctgtatttggcgaccacgcagcatccggtgatcttgcaatatcctcaacaaagggagcaattggtcatctgctaggggcagctggatcagtggaagcaatcttcactgtgctagcaattcaccacggactcgctccgcctactcttaacctggagcggccggacccgctgttcgaaggggcattcacgccactagctgcgcccaagaagatgtcgatacgagcagccatctccaactctttcgggtttggtggaactaacacgtcgctgctgttctcgtgcccgccctag

SEQ ID NO: 19985 - DNA, 291 bp, Zea mays
  Peptide Sequence Number=SeqID_61764
atggttgccctcgggcggctctggcgggtcgcggggaggtcgccggagctatgggcgagcttgggggagttaggcgtggttattaagtgtactacaacttttatacttggcccaagccaagatcaaaagtggcactctatgtataacaatggtatgcgccttcaatgcaccctcttgagctatgaggtgcatgagcaaaaggagtcctcattttgtgacaactggtgctctcatggccattcagaattgatagagtatgccctgaccaagagatgttgtgatcccctctag

SEQ ID NO: 19986 - DNA, 294 bp, Zea mays
  Peptide Sequence Number=SeqID_61765
atgggagaccacgtctcaggtcgcgtgaggagatcaatccgcgggcaggttgactcagggcttgccttccaaagctggggcaggcagatcctcgatggcaggctctggtgctggctcctggtctacctcctaagcaactccttgctccggaacgaggactggttaaacattggtctctgtagtttatcctacaaatttgaggttagaatgaaattagataaaccttgggcaaaaatgacaaaagtctctgtgccaaaaatcactgaaagtgacctaatggttattttgttgtga

SEQ ID NO: 19987 - DNA, 411 bp, Zea mays
  Peptide Sequence Number=SeqID_61766
atgggtaggggcaagaacggcaagggttggcctcgcctcgctgatggcaagtgcaagcgccccccaagtcctccctcgaaggattttggtgacttggagtactcaaaggaagcttcctctgagtatgagcgatcgcccgttcccgcatcccccgtggtgtcatccgaggactcggatgactccatggggctgtccactcgcgccgggctcggtagatcgggtgactcggaggaggtctcctcggaagacgtggactcctccgactcctctgaggagtggagcagtggcgaggacgatggcagcagcggcgaggacgacggcaagggcggtggcggcggcgacagcgagggtgatggcgacggtgagggcgacagtggtgacaacaagggtgacggtgacggcgacggctag

SEQ ID NO: 19988 - DNA, 2148 bp, Zea mays
  Peptide Sequence Number=SeqID_61767
atgccgttcggcttgaggaatgcgggtgcgacgtaccagcggtgcatgaaccatgtgtttggcgaacacattggccggacggtcgaggccaacgtcgatgacatcgtagtcaagacgaagaaagcctccgacctcctttccgaccttgaagtgacattccgatgtctcaaggcgaaaggcgtgaagctcaatcccgaaaagtgtgtcttcggggtaccccgaggcatgctcttggggttcatcgtctccgagcgaggcatcgaagccaacccggagaagatcgcagccatcaccagcatggggcccatcaaggacttgaagggcgtacagagggtcatgggatgtcttgcggccctgagccgcttcatctcacgcctcggcgaaagagctctgcctctgtatcgcctcttaaggaaggtcgagtgcttcacttggacccctgaggccgaggaggccctcgggaacctgaaggcgctcctcacgaatgcgcctatcttggtgcccccagccgccggagaagccctcttgatctacgtcgccgcgaccactcaggtggttagcgccgcgattgtggttgagagacgagaagaggggcatgcattgcccgtccagaggctagcctacttcatcagcgaggtactatccgagaccaaaacccgctacccacaagtgcagaagctgctgtacgcggtgatcctgacgtggaggaagttgcgacactacttcgagtctcatccggtaactgtggtgtcatccttccccttgggggagatcatccagtgccgagaggcctcgggtagaatcgcaaagtgggcggtggaaatcatgggcgaaacaatctcgttcgcccctcggaaggccatcaagtcccaggtcttagcggacttcgtcgctgaatgggtcgacacccagctcccaatagctccgatccagccggaactctggaccatgttcttcgacgggtcgctgatgaagacaggagccggcgcaggcctactcttcatctcgcccctcgggaagcacctacgctacgtgctacgcctccatttcccggcgtccaacaatgtggccgagtatgaggctctggtcaacgggttgcggatcgccatcgagctaggggtccgacgcctcgacgctcacggtgactcgcagctcgtcatcgaccaagtcatgaagaactcccactgccgcgacccgaagatggaggcctactgcgatgaggttcggtgcctggaagacaagttctacgggctcgagctcaaccacatcgcccggcgctacaacgagactgcggacaagctggctaagatagcctcagggctaacaacggttcccccggacgtcttctcccgagacttgcaccaaccctccgtcaagatcgacgacacgcccgagcccgaggcaccctcagcccagcccgagaaggcacccgggggctacacgcacctggtggtcgccatcgacaaattctccaagtggatcgaggtccgacccctaaacagcatcaggtccgagcaggcggtggcgttcttcaccaacatcatccatcgtttcggggtcccgaactccatcatcaccgacaacggcacccagttcaccggcagaaagttcctggacttctgcgaggatcaccacatccgggtggactgggccgcagtggctcaccccatgacgaatgggcaagtagagcgtgccaacgacatgattctacaaggactcaagtctcggatctacaacgacctcaacaagttcggcaagcgatggatgaaggaactcccctcggtggtctggattctgaggacaacaccgagccgagccacgggcttcacgccgttctttctagtctatggggccgaggccatcctgcccacagacttagaatacggttcccaaggccgagggcctacgccgaccaaagcaaccaagctagtcgagaagactcgctggaccagctggaagaggctcgggacaaggccttactacactcggcgcggtaccaacagtccctgtgacgctaccacgcccgaggggttcagtcccgagacctccaggtgggcgacctggtgcttcggctgcgacaagacgcccgagggcggcacaagctcatgcctccctgggaagggccgttcgtcatcgccaaagttctga

SEQ ID NO: 19989 - DNA, 1920 bp, Zea mays
  Peptide Sequence Number=SeqID_61768
atggaaagaacactgatcacttctaacctctccatgagtgcacatgcttcaagatcgtcccggagggttcactacatctctcctgcggcctctgctgctgcacacaactccagctacaggaagaagaagaagaacgccccgtctccgccgccgtcggccgccgcaactgacaccgttgtcatctcccctcctgccactgacaatgttcagtccactgctccgaagcaggccggccgacaggagcttgaagagctcgtggccgccaagactaacacttcaagaattgctactgcaagaacaagtgcgtcgagccagtctcgggctaagcttcgccgccggcctgccccggcaatcacgtccctgccgatggcgttctgcagcgcgttggaggaggcgatcaacacgttcgtcgacccgccggtgctgcgaccgtccgtggacccgcggaacgtgctgtcgaccaacttcgcgccagtggacgagctgccgccgacgccctgccccgtcgtgcgcggcgcaatcccgcgctgcctcgccggaggggcctacatccggaacgggcccaacccccagcacctcccgcgtgggccgcaccacctcttcgacggcgacggcatgctgcactcgctcctcctcccgacggcggagtcgccgtcgtcggaccccgtcctgtgctcgcgctacgtgcagacgtacaagtacctcgtggagcgcgacgcaggagcgccggtcatgccgaacgtcttctccggattccacggcgtggctgggctggcgcgcggcgccgtcgtggcggccagagtactcactgggcagatgaacccagccgagggcgtggggctcgctaacaccagcctcgtcttcttcggcggccgcctctacgcgcttggcgagtcggatctcccgtacaccgtgcgtgtcgacccggccaccggcgaggtgaccacgcacggccggtgcgacttcggcggccgtctcttcatgggcatgaccgctcacccgaagaaagaccccgtcactggcgaggtcttcgcgttccggtacggccccgtgccgccgttcgtcacctacttccggttcgaccgggccgggaacaagggccctgacgtgcccatattctcagtgcggcagccgtcgttcctgcatgacttcgccgtcacggagaggtacgctatcttcccggagatacagatcgtcatgcagcccatgggcatggtgacgggcggcgcgcccgttgggtctgacgccggcaaggtaccccggctcggcgtgctccccaagtacgccacggacgagtcggagatgcggtggttcgaggtgccggggttcaacataatgcactcgctgaacgcgtgggaggaggccgacggcgaggagctagtgctggtggcgcccaacgtcctgtccctggagcacgcgctggagcgcatggagctcgtgcactcctgtgtcgagaaggtgcgcatcaacctgcgcacgggtgccgtgtcgcgcacccctctctcggcagagaacctcgacttcggcgtaatccatccgggataccttggccggcgcaaccggtacgggtacctcggcatcggcgaccccatgccgaagatcgccggggtggccaagctggacttggaccgcgccggcacgggcgactgcacggtggcgcggcgcgtcttcgggcccgggtgcttcgcgggggagccgttcttcgtccccgacgacgtggaggggaatagcaacgaggacgacggctacttggtgtgctacgtccacaacgagcggaccggcgagaaccagttcgtggtgatggacgccaggtcggcgcagctggacatcgtcgccgaggtgcagctgcccgcgcgcgtcccctacggcttccacggcatctttatcacgcaggccgagctccaggcgcagcagcaatga

SEQ ID NO: 19990 - DNA, 814 bp, Zea mays
  Peptide Sequence Number=SeqID_61769
cgtccttgggaaccagctgctgttcttgcttggcctcagctacactaaccccacctacgcggccgccattcagccgtctattcctgccttcaccttcatcctagcccttatcatgggaggcccagctgtgtttggtagcagcgagcttgagcttgatgtttatagtcatggtgttatagctgacatgacacagcctgagcctgccggacctctaatatctttgttcatggcctttgggctggaaaactggcacattggagtgctgtgcttgatagggaactgtctatgtatggctacttatcttgctttacaggctccaattttggtgaaatatccttcaagtctgtcactgactgcatactcatacttctttggagtggttttaatggtcatttctggggtttttgcaacaaacgataaacacgattggagtttgactcaatccgaggttgctgctgttgtatatgctggtgtcatggcatctgctcttaattatgtcctattgacatggtccaacaaaatactgggacctgctatggtagcactttatagccctcttcagccagtggtctctgctctattgtctatgatttttctgggaagcccaatttaccttggaagtatttttggaggacttctaatcatcttcggtttataccttgtgacctgggcacgccacagagaaaaactggcaagtattggagtaccttatgtaacatgtgtatcggagtcactcgatggtccttctcatgttgcaaagactgtgcccttcatatctctttcaaggctgtgggatgtgccacatgagtcttga

SEQ ID NO: 19991 - DNA, 810 bp, Zea mays
  Peptide Sequence Number=SeqID_61770
atggcggccgcgtccacgtcacgcctcgccatccaaatccgtgtccctttcgttccttggccttttccgtttccaccccgcctcgctaccttggcggtttccacccgcacccggctcgcctcctatggcctttgcctccccacgcggcccgccggcatgcctcctctcgccgagcacgagctcgcggccgcggccgccacctccgcgctcggcgtagccttcgggccgcgtccaaggccgcctccaagtcgtacaaggcgggcacgcacgctcggccccgccgccgcgcgcctcccctcgctcccctcctccaagcgcctcaaggccgcgctcgccgccgcctcggtcctccgcctcgccgccgccgcgccggcgggcctccacgccgcgtcgcccgcgggcgtcgccgtgctcgccgtcctcaagtccagctacaagctctccaagaacacctccaaggtcgtcgagggcttcctcggcctccagctgcacaagggcttcaggaacgggatcgacgcgctcggggtggtcgtcaaggtcgccgtcattgtctctgaggtcgccgtctgggtcggggcccgattctggggttatgggcgcgctcgctgcgtcatgttcctcggcttcaccagacccactggcttagtcctgcttggctgtagcaaatctgagccccaggttgcactattcgatccggttatagttgggatggatgctcaggggtgcgaattggaggagcgagggctctcagaattgttctctcttgctgtgccagtgccccaggccacaacattaatgactatgagttag

SEQ ID NO: 19992 - DNA, 549 bp, Zea mays
  Peptide Sequence Number=SeqID_61771
atggagcttgatttagcattcgatcgcagccggtacggtgtcagtggtggttttgacttggcttgtgcagtgatcgacacacctttaaccttatctgcaggaacaagttaccgggatgaagccgatctgttgttgctggaggaagccgaagccgagcagctgaaccagcactggcagcagccagcaggtggccgtgggcgcgtggccggctggctgcatcgtccgcgtcaccgcctggaagcaggcagcagcagggagcaccggcaccgaagcaggcagcgcagcagcacactgcagcctgcgggcgagcgaccgtcggcaccatggcaggaaacggaaatggggagcacgagcactgcagggagcggaaacggggagcagccgagcagggctgcacgacgtggagggaggtacggagccgagcgcccaagcgcgctgcgtctgcgtgcctgcggctgcgggcggcggcggaagcggaaaacggggcgcagagtcgcacggaagcaggaagctaggtttatcgacttagcggtgttcgggccgggctga

SEQ ID NO: 19993 - DNA, 1809 bp, Zea mays
  Peptide Sequence Number=SeqID_61772
atgggtgccggtgctactgccagggacgaggaggctgctaccggccgccaccatgggaggaagccgcatggcgcggcggcggagtacgcgcaggacgggtccgtggacctgcgcggcaaccccgtgctccgctcccagcgcggcggctggaccgcctgctccttcatcgtcgtgtacgagctgttcgagcggatggcctactacgggatctcgtccaacctcatcatctacctgacggacaagctccaccagggcaccgtcgaggcctccaacaacgtcaccaactggtccggcaccgtcttcctcacgccgctgctcggcgcctacgtcgccgacgcctacctcggccgctactggaccttcgtcgtcggctccgccatttacctgctggggatggtgctgctggtgctgtccgtctcggtgccggcgctgaagccgccgccgtgcggcgccggcggcgtgtgcccgcaggcgtcggcgctgcagctcggggcgtacttcggcgggctctacatcgtggccctgggcaacggcggcaccaagcccaacatctccaccatcggggcggaccagttcgacgagttcgacccgcggggagcggacgcacaagctgtccttcttcaactgggtggatgttcaccatcttcctggggcatcctcttctcctccaccgtcctcgtgtacctgcaggacaacgtgagctggtccgtggggctacggcatccccacgctggggcctcatggtctccatctccgtcttcctcgccggcaccaggctgtaccgccacagggtgccgcagggcagccccgtttcacgagcatggggcagggtcctggccgccgcgcctctgggaaagtgggagccgtccccgggtccccgggccgacgccaaaggagctgcacgagctggacgtcgaggagtacgccaggaagcgtaggttcaggatggactccaccgacgccatggccttcctcaacaaggccgccgccgtggccgtgcccagcggcgggccggcgtcgacgccggcgtggagcctctgcacggtgacccaggtggaggagacgaagcagatcctgaggctgaccaacacgctgttcgtgaagcagggcacgacgatggaccggcacatgggcccgcgcttcgagatcccggcggcgagcctgggcgcgttcgtgacgctgaccatgctggtggctgtggtggtgtacgaccgggtgttcgtgagggccgtgcggcggtacaccaaggacccgcgcgggatcacgatcctgaggcggatgggcacgggcatgctgctgcaggtggcgaccatggcggtggcgtcggcgatcgagagccggaggctggcctacgcgcggagccacggcctggacgccacggggggccagctggggctcaccatcttcgcgctgctcccgcagttcgtgctgatgggcctggccgacgcgttcctggtggtgggcaagatcgagttcttctacgaccaggcgccggagagcatgaagagcctgggcaccgccatgtccctcaccgcgtacggcatcggcaacttcctcagcagcttcctgctgtccacggtcacgcgcgtcacgcgggaccgcggccacgcctgggtcaccaacaacctcaacgcctccaacctcgactactactacgccttcctcaccgcgctcggcgccgtcaacttcgtcgccttcctcgcgctcagcgccaggtacaggtacaaggcccagtccaccgacaggatcgacgctgccgtcggcctggggaccgagaaagccaagcttcaggcggagccactgggctga

SEQ ID NO: 19994 - DNA, 1059 bp, Zea mays
  Peptide Sequence Number=SeqID_61773
atggcgcttcctgttgacgtggcgcccgagtccgagccctggggtcgggcggagcggagtttcgtcgtcttccgggtcttagcccgagtccgagccctggggtcgggcggagcggagttcgccgtcttccgggtcttagcccgagtccgagccctggggtcgggcggagcggagttcgccgtcttccgggtcttagcccgagtccgagccctggggtcgggcggagcggagttcgccgtcttccgggtcttagcccgagtccgagccctggggtcgggcggagcggagttcgccgtcttccgggtcttagcccgagtccgagccctggggtcgggcggggcggagttcgccgtggcggcgctgtccttctgtcagactggccagtggagcggtggagtgacggcggtcacttcggctctgccgggggcgcgtgtcaggatgaagctttatgctgatgggggttaccagctgagaattaggcgtcttgaggcctgcagcgctagcgagccctcgccttcccttccccattattcccaggattccccttgcgactgcaccacgccccacccaaacccacctaccgcctccgctcccctctccagcgagtcgggggcacggacgggaccagacgaccaggccatggggaagtacatgcgcaagggcaaggtgtccggggaggtcgccgtcatggaggtacccggcggcgcgctgctcggcgtccgcacccgctcccgcacgctcgcgctgcagcgcgcgcagaggccgctcgacaagggcgacgcggaggacgccgccgcggagtacctcgagctcaggagccggaggctcgagaagccgcacaaggagcatccgtcgccgcccgcgaccgcgaccaagaggggcgccgggaggaaggccgccgccgccgccgcggtgcagcacgtgctgatgcaggacgaggtcgaggtcgaggtctcgttcggggacaacgtgcttgacttggacaccatggaaaggtgcgattcttcggcctcctctgttctcgtccaagttgttccctttgcgagagagattgggtag

SEQ ID NO: 19995 - DNA, 537 bp, Zea mays
  Peptide Sequence Number=SeqID_61774
atggatcgccgcatcctcaggacctcgtcgtgcaacggcagcggtaagaacccgtccccttcctctcccgcggcggtctcacggcctgcgtcctccgggggcatcggctccaaggacgacgccgctgccggcgagcgcaaggcgctgctgccgcggcagcctcctggcggcatggcgcggaagggccgcaaggggtccaaccgccgcgtgcagtggaaagataagcatggcagcaagctcaccgatgtcagggagttccagcctagtgccactcgacagagtgagtctgacaggcaatcaggccttgccaaaggcgccacggcgaactccgctccgcccgaccccagggctcggactcgggctaagacccggaagacggcgaactccgctccgcccgaccccagggctcggactcgggctaagacccggaagacggcgaactccgctccgcccgaccccagggctcggactcgggctaagacccggaagacggcgaactccgctccgcccgaccccagggctcggactcgggctaag

SEQ ID NO: 19996 - DNA, 408 bp, Zea mays
  Peptide Sequence Number=SeqID_61775
atgtatcgtgggggccttgaccgcttcgagaaggcacaagccttggagcccttctcagtgaagtccaagacaggcaccaagaaggcacctgcagctgcaggaacaactaaagcactggctctattgacgctgccacaaaattctaattttttgctgggacctcaacaaccatccataagagaaactccaagaaagaagatacaactgtctacagaaacaataaacaatttttcttctcggactgctcaatctgtgcataatgtgcctgacgctacacaacaacgaggggaactacctgggaagcagcgccagaccaacctcgccaagcgcgctgcctccgaggccaaggacgcgcccgcacaaccgttgcccaacaagctcaagatcgcccccaagtctggtgcatga

SEQ ID NO: 19997 - DNA, 387 bp, Zea mays
  Peptide Sequence Number=SeqID_61776
atggtgcatgtaccatttatcatcctctacctgaaaaaacttgtgacatttctgtctcagaaaagcgcttatgcgactcgaattatggacctctttgagcgggcacgacgccacgctgctcctattgaggaattccaatggcttggcttggtggcggtgctgtttattgtcgttccattcctaggcaaccctgggtcctgcatgggctgggtgacgatgcagatgtcatttgggatgattccactgaccctggccttgggttcaagagagactggtacatccagcttcagccattctgggtgtacccgagcatgttctactcagatggacagtgatccgtgcccgtcctgtgttccagaaatttttgccttggagttgtttggttag

SEQ ID NO: 19998 - DNA, 765 bp, Zea mays
  Peptide Sequence Number=SeqID_61777
atgcctggcataccgagggatgttgtcgagcacttgctggatatccgagctggagcccgacccgtgaagcagcctttgcgtcgattcaacgaagaaaagcacagagccataagcgaggagatccacaagctgatggctgcagggttcatcaaagaggtattccatcccgaatggctagccaaccctgtgcttgtgaaaaagaaaggcgcgacataccaaaggtgcatgaaccacgtgttcggagagcacattggccgaacggtcgaggcttacgtcgatgacatcgtagtcaagacgaggaaagcctccgacctcctcactgaccttgaaacgacattcaagtgtctcaaggcgaaaggcgtaaaactcaatcccgagaagtgtgtctttggagtcccccgaggcatgctcctggggttcatcgtctccaagcggggcatcgaggccaacccggagaaaatcacggccatcaccaacatggggcctatcaaggacttgaacggagtacagagggtcatgggatgccttgcggctctgagccgcttcatctcgcgcctcggcgaaagaggcctacccctgtaccgcctcttaaggaagatcgagcgcttcacttggacccccgaggccgaggaagccctcagaaacttaaaggtgctccttacaagcgcgcccatcttggtgccccccgctgccggagaagccctcttgatctacgtagccgcaaccactcaggtggtcagtgccacgatcgtggtcgagagatga

SEQ ID NO: 19999 - DNA, 810 bp, Zea mays
  Peptide Sequence Number=SeqID_61778
atgcagttaccgcacttgtacccaccatatccggaatgggagaccctatctcatgagcaaacaatgagggagatcttctgcggcaggttcgggattttgctcctgaacttcctccttggcaactccttgctccggaatgagcacgtactctccgtcagcgaggcttctcgagatgtcgttgaccctacaattgtccagacatatgttgtggggcacaagggtccagatccggatcacccagagattctgtgtgacgagaatgcgacacaaaaattggtgtcggggaccataattaggggtacccccaagactcctaaagaaaacagcgccgcctgcgctgctccgactgctgtgccacccgccagggtgaggctgacagcagccaagtccagcctcaggcgccataggaagctccgcctcgcccgacccagggctcggcctccgcctcgacctcggaagacggtctccgcctcgcccaaccccagggctcggactcaacctcgacctcggaagacggtctctgcctcgcccgaccccagggctcggactcagcctcgacctcggaggagtcaccgcctcgcccgaccttgggctcggatcgaccacgttacaggggggcacatcattaccctacccctagctagctcaggctacggggaacaagaccggcgtcccatctggctcgccccgcaacctctccagcccgggacgctgctccgtttcgggagtctcgagttcatgtccctcgacagcagctacgacatgatactccttcctccgccgcgcgacaacgacagcgacgcccgttag

SEQ ID NO: 20000 - DNA, 549 bp, Zea mays
  Peptide Sequence Number=SeqID_61779
atggcctacttacatcgtctaccttccatcgaccagcgtttcctaaaacaggggtcggcggcgaagccatcaccggcggggctaatccccggcttaggtggaccctacctcaattcaacgaccctacttgttgcattaatgaaggtgaacgcgggtgagggtttcgcatcaggaattacctgcgcaagtgagcagtccacggggagggttggttccgcccccgattcgcactcaggtgaagaattcacttcgattcgggatcgttcggctcgattcgagggcacgaacagaattctcggatactggtgcacccacacggccacgcacccggggaggatcaccggaggacaagggatttcgccggtggcacagctccactgcgcacacgattcacgaacggcggttgcttcacggaaatgtgggagattatgttattgttttccgcttccgctatttcctaactccggctatgtgtgtaatgtctgtgtgatgggtgaagcgctcatgggtgatctaatgatgatacagatgaccgaacttgtcaagtga

SEQ ID NO: 20001 - DNA, 309 bp, Zea mays
  Peptide Sequence Number=SeqID_61780
atggcgcccaccggagacctctcccttaccgcactgaacaagcaccccatgaagcccgcccgagacattgacggcgtcgcacaattaccgaaaattgctcaaaaattgtttaatcttccaaatatgattatgatgctttatgttgtagtagcaaagcatcgactgtggaagagggatgtttgtttacccatgtttgctcgcctcattggagcaccaccaggtttggaatcatggtttgcccttgtctctgaagcaaccttcagcttcttcctttgtagagttcaatgtttcaagtttagcattgagtga

SEQ ID NO: 20002 - DNA, 525 bp, Zea mays
  Peptide Sequence Number=SeqID_61781
atgaatcaggtcatggatacactgggatttgattatccaatctacgcgaagttcgaagaacaagctactgggtcggggccaaaatcccctgctccaaagaagcgaaaatcatcgaagccggaccttgctaatgtagcgcctcggaaagaagctgaagatgcaactactactaaggttcaaaagcaaaaggatgttacatctaagaatgtggcttcgaagacgaagaaaattggggagacttctatggaagagaagaccttcgacttgaggtatttgggtgacgaagagatactgggatgtaaccctgatcgtgctgaagcaaaggtggtcaataatctaacgaagaccattggattccggaagttggagaccgacttgactgagatgtccaccgaagcagtatgtgtagggaacaggtttgtcactcagatctgggctaaaggtggcaaaaaggttgcacatgacgaagcaagagctctgcaaaatgatgccgatgatgatgaggtgaacgaagctgcagcttaa

SEQ ID NO: 20003 - DNA, 123 bp, Zea mays
  Peptide Sequence Number=SeqID_61782
atgtatgctgtggctggggaagaagccatcatgcaaggtggtagcctttgtgctaatgtcgaggtagctgagcttaagggagcatttgacatggtcgaagaagttgtgctgaagatagccgag

SEQ ID NO: 20004 - DNA, 912 bp, Zea mays
  Peptide Sequence Number=SeqID_61783
atggtggcctcgcgcacaggggtggtgatggtctcgcactcactgatagcgcttcaagttgacggtgaagacatgatcagcagaatgaagaacttctgtggacggatggcgcaacaaagattgcccagcacagtcgtcgatgcacgggatcaaaaggattcgacgcataaaggggcgacactgcctccggtggagattaatctcttcttgggggatgttcagggtctagttacttgggttattggtgacggcatgctgccttcttgggtgtttgttaagaacaaacctcttatacccaaagtcgtcctactatatgttcctggccttgatgcagctttatatatgtcacaaactcgacttctctcttctctgaaagaattatgtggcaatccaaaacctgttctagcttcaagttatggaaaatgtatagtttcttcctatacggatgcattgctgatgcaatcttattctagcagctgtataccggatgataggcacacaattgatgcactcctaacctgcagagtaaagagaaagcttgatgtaaaaacatcaaatcagtcatctaaacctgacagggatggaaaactatcaagtctggatgatcttggggacataccatttcctgttacgtattacacactttcagagaaagacttggaagataatggctaccccttcaatttaccaggttttgtccctactgtttcagctccttcaggttccttgccacataaagttcttgcacttgattgtgaaatgtgcataacagaagctggatttgagcttacaagagtgacattaattgacattaaaggatcggtggtgctagatagactagttaagcctgctaatccaatcattgattacaatacaaggtatatggtgcttttacctcccctttatggttag

SEQ ID NO: 20005 - DNA, 2271 bp, Zea mays
  Peptide Sequence Number=SeqID_61784
atgacccatagctcgagcaaatccgcggggtgcaggccaggctcgacgagggagcaggagcgcttgagccgatccgccgggacgtcgggcaggcatggacgggccaacctccggccggagaaatacgtcatctaccccagggcttccagcaccgcgtcgccgacgacgtcagggtcaggccgccacccgcatccagtggggtcggccagaacctggctgcagcagcaatgctcctccgcgcgatgccggagccatcaaccaccgaggggcgtcgaatccagggagagctcaagaatctcctggaaggcgccgcggtccgacgggccgagagctctgcctcccgaatgcatgggtacccctcggaacctcatgccgcgacttcccgattcatgcgggaagcctcgatttacaccgggcgcaacgcgcaacacagcgcctgcggccccgggtcgcctcggcaacgagcaccatcaccgcgatcgtcgggcccacctcgacgagagggtgcgccgaggctaccaccccaggcgtgggggacgctacgacagcggggaggatcggagtccttcgcccgagccacccggtccgcaggccttcagccgggccatacgacgggcgccgttcccgacccggttccgacccccgactactatcacaaagtactcgggggagacgagaccggaactgtggctcgtggactaccgtctggcctgccaactgggtggaacggacgatgacaacctcatcatccgcaacctcctcctgttcctctccgacacccgcgcctggttggagcacctgcctccggggcagatctccaactgggacgacctggtccaagctttcgccggcaatttccagggcacgtacgtgcgccccgggaattcctgggacctccgaagctgccgacagcagccgggagagtctctccgggactacatccggcgattctcgaagcagcgcaccgagctgcccaacatcaccgactcggatgtcatcggcgcattccccgctagcaccacctgccgcgacctggtgagcaagctgggtcgcaagacccccaccagggcgagcgagctgatggacatcgccaccaagttcgcctccggccaggaggcggtcgaggctatcttccgaaaggacaagcagccccagggctgcccatcggaagatgcccccgaggcgtcaactcagcgcggcgccaaggagaagggcaagaagaagtcgcaagcgaaacgcgacgccgctgacgcagaccttgtcgccgccgccgagtacaagaaccctcgaaaaccccccggaggtgccaacctcttcgacaagatgctcaaggagtcgtgcccctatcaccaggggcccgtcaagcacacccttgaggagtgcgtcatgcttcggcgccacttccacagggccgggctgcccgcggagggtggccgggcccaggacgacgacaagaaggaagatcaccaggcaggagagttccccgaggtccgcgactacttcatgatctacggtgggcaagcggcgaatgcctcggctcggcaccgcaagcaagagcgccgggaggtctgctcggtgaaggtggcggcgccagtctacctagactggtccgacaagcccatcaccttcgaccaagccgaccaccccgaccatgtgccgagcccggggaaatacccgctcgtcgtcgaccccgtcatcggcgacgtcaggctcaccaaagtcctcatggacgaaggcagcagcctcaacatcatctacgccgagaccctcgggctcctgcgcgtcgatctgtcctctgtccgggcaggcgctgcgcccttccatgggatcattcccgggaagcgcgtccagcccctcggacaactcgaccttcccgtctgcttcggaaccccctccaacttccgaagggagatcctgacgttcgaggtggtcgggttccgaggaacctaccacgcggtgctgggaagaccatgctacacgaagttcatggccgtccccaactacacctacctgaagctcaagatgtcgggccccaacggggtcatcaccgtcggccccacgtacaaacacgcgttcgaatgcgacgtggagtgcgtggagtacgccgaggccctcatcgtcgacctggagagcctctctaaggaggtgccagatgtgaagcgacatgccgacaactttgagccagcggagacggtgaagtccgtcccccttgacctcagcggcgacgcctccaagcagatccggatcggctccgggctcgaacccaaatag

SEQ ID NO: 20006 - DNA, 717 bp, Zea mays
  Peptide Sequence Number=SeqID_61785
atggctcaccgccttgctacccagtacccactacccaatccagccacccaggccttcctgctggttgcactaaagctgccagtggtttacatgcttttattactccagcaaaccccagcaatgttaataactaagttgctaaagcatatatgcaacctgaaacaccacagagatcatgatttggcaaagaagcacaattcagctatctgggtgacgtatgacatgacaatggatgtattggatccctttacaccaaccattccactaagaataacgtacaacaataggctacttctgccaagtgctgagctaaagccatccgcggttgtaagtaaaccacgagtcgatatcggtggcagtgacatgagggctttctacaccctggtactgattgacccggatgccccaagtccaagccatccatcactaagggagtacttgcactggatggtgacagatattccagaaacaactagtgtcaactttggccaagagctaatattttatgagaggccggacccaagatctggcatccacaggctggtatttgtgctgttccgtcaacttggcagggggacagtttttgcaccagaaatgcgccacaacttcaactgcagaagctttgcacggcaatatcacctcagcattgccaccgctacatatttcaactgtcaaagggaaggtggatccggcggaagaaggtttagggaagagtag

SEQ ID NO: 20007 - DNA, 1014 bp, Zea mays
  Peptide Sequence Number=SeqID_61786
atggcgacgggagagaggggaaagcgacgcgaggaagactggactggactgacggaggcgcgtggatggcaggaggtcgccgaggtcgtctcctctcgcgacagctactccaaggcgcccaaatccgacgtccagtgcaagacccgcatcgacacgctcaagaagaagtacaaggtcaagaaggccaagcacgactccgactggcgctacttcgaccgcctcgacgacctgctcgctcccgtgctgctcaagcccaattcttcttcttcctcggctgctgctgctacggcggcggcggcagcccggagcgccgggcccatggtccctccgcgcatcaacttcccgcagcgcacccgcacgcccctccactcctccgcgggggcaaagtggaggatgccgtcgccgttgccccagccgtcggcgtcgtccgactcctccgacgggttcccgccgtccgcggtggcgaacggcaagaggcagcgcgtggaggagcccgccgccgccgccgcggacaacggcgcggagagcagcgtcagccgcgcgcagggtctgcgcgagctggcgcaagcgatccggcggctaggggaggtgtacgagcgcgtggagagcgccaagagggatcaggagctccggatggagcgggagcgcctggactccgcccggcagctggaggagcagcgcgtgcagttctccactagcatgccccgcagcagtcgcattaccagaacagcacaagccccaccgggggcgatgacaacggcagcgactcggacaaggaagctcaggaggatgcggaagacgaagaggaagagagccagtgattgctctcctcttcagcaatggaatggttttctcagtgatcttttcactgttcgggtgcgggagcgtgatgcgctctcgatggcagtgcgttgggccggctggcctgccgtcccgagacgtcagtggcaggggccatgggataggcacctgcgcgccaggcaagcaccgctgcttcccaaagggctaggctag

SEQ ID NO: 20008 - DNA, 2910 bp, Zea mays
  Peptide Sequence Number=SeqID_61787
atggcggccgccggcacgtcgttctccatccgggagtacgcggtgcgtgcgcgggcgcgggccgagggcggcgggggcgggagctggcctttcggcggggacgcgggggcgctaccgcccatggaggtgcggcggttccggtggtggcgggacgaggcggcagcggtggaggaggaggaggccgaggtggagaggaggttggcggccaagcgccgcaagcgctccgtcgccgagctcttcgccgcggtcccgcgggtgccccgaggcggccaggggcgtggcaaggggaaggctgccaagaggaaggcggagaaagacaagggaaagctagtgctcgctgccagtgttaagaccaacaagaagaaaaaggtcccgactgggatcgatgccagaccaaaggagaaaaacagtggggtaaaggtgaactcagttagcatttctaagtcatttcagcatcctataaaaaatagggaacccaagagttcttgcaagaaaaagggaaaacaagaggtctcagtcttactggataagaaaagtaagaagggaaacagaaagtcagttttggaaatacacaaaaaggatatggcaaacagtgttcaaactcaaagcatttgtaaggatcagtcaaaagcaggttctagcacagcaccgaatacaacagatatgaggtgtaaattaaattcttgttgcaaatcaaagcatgttaccttttctgatggcgctgacatatttggaaggaccgcacatctacctgcagataatacaaagcaaccacaatctgtacagacattccagcaagccactcaggaaggtcgtgaccaccgtgatagagatgatcaacagttggtttatcaacaagctgaagctatatcccggactgttgagattaccaattctttgtctgaaaatgtagtactagctggtgtttgccgtacaatcccacttaccaaaccaaaagatatcactatactgggaaactcagtggatctgaatcactgcatagaaacttgtcatggcagtaactgtttgaactccacgagtttggcaagcttatctagtaagatgccatgtcaaaaattccaaggtgtgaactctcatctgaatggcaacaatgtttcaagtcttgatgttcagtatcttggagaacaaaaccatatgatatcacaagcatcatttaatcctgttagtttggcacccaagggagtatcaggtgatatgagcccattgtcagagccttccagttgttgtttatatgataggagcagtatcacgttccacgagaaggctgatgctaattaccacttgggaaaagttagttctgagattcttagatctggtaacgtggtgagaagcataagctcttcaacaggatcaaataaaccagcacaagccatcgattgtgtatctgctgcattcaggaacatgcacagccgccgtgacgattatgtcggccttcctatcaattcacgaggtgaattcgtcaaggttcatcctggtggcacccctaattctgttgacatttttacgaggcagtgtttgggggagaattcctcatgcccctcagattatccaaccatcttcagttctattacccgcatggatcatgtacccaactatcatgctcgacaattctatacaatagaccagtctgcttttcatgcagatcctcgttttcctccagcgggcccaatggcatatgggatggatgtgaggcagtggccaagttctgaaagagcaaaagttcattactacacaattccaaacaaaaagtatccatgcgccaaacagcaagagctttcaatggatcacaattcacagcagaagctacttgggctgcgaagccgctgtcccagccagaactctgggcagggtatgcagcacaacgccgaaacgacactgcgcctcatgggaaaaacggtcacacttgggaccagcagcagcatgcactgtagaggcctgaacaacggaaccccagcttgttccagtaaacaaagccaagctgaagaccggggaacgcgtacgaaagttttcccacagctgtttcacggaggactggctctggctgatcccgctgctgcgtgtaggatatcagatggagagaggcaaccgtctggacacccgtcacgtttctctttggctccagcagctgttcgggcttttctgcctggtaccagcagtttcagaacaggtggccacaaccagcaacctgaactagcaacagccagtaagaatccttatctttcaatacactgcagacatgcaccggagtcatctttcaatgcaaggaacagtttcagaaacttcacggaaaaggggccagcggcaccgtaccagtcgtccagttacctgacgcagcagctcagcagcaacatggcgcagagaaccgccgccgccgcctcctcttctgcgtcaggctacggcgttcagagaccccctggtctaagtctaacaacagcccagacgaaattcacgtcgctccggccgttgccgccttcggtcgtcccttcccatgcctacggcgcgccgcctcacggacccgtcaccgtctttcacccgtcagctcctcccgtgccgtatccagcgagcaattctggcggtcctggcagcagcgacgcggtgttggagatcgagagcgtgaggtggagcgtggtgggatcgaagcctgagggctcggagcgtctgaggagctgcaaaagggcagcagagatggacgccgacgtgtccgtggcgttgctgaagaagcctctcaccgtcgccgccgccgccgcagcacggcaggggctagatatgttgctaccggtcgcagagacggggtcggagttccgtggatccaccaggccggagccggaggcgcagccgcggcctagtggtacgagtacgacgcctatttgtgtcgacgacgagccttga

SEQ ID NO: 20009 - DNA, 309 bp, Zea mays
  Peptide Sequence Number=SeqID_61788
atgactgaataccttcaagtacatgaagagtcaaagacacaagatgaaagaagcttagaggaagatagacgaagaaatggaggaacaaactactcaatagcatcatacgtgttcggtgaggcattgaacgtgttcagtgaagcaccagataaaccatcagatatgagtggtactgtaccaaagaaggtctattgcaatagagtacaccgagcatgcaggtgtccaatagatgtcacactagataggacactggatatggcactcaaagaagactatagtgtgtttggggagatccacaaggtgtggtaa

SEQ ID NO: 20010 - DNA, 1842 bp, Zea mays
  Peptide Sequence Number=SeqID_61789
atgtcgttcggtttgaggaatgcgggtgcgacataccaaaggtgcatgaaccacgtgttcggcgaacacattggtcgaacggtcgaggcctacgtcgatgacatcgtagtcaagacgaggaaagcctccgacctcctttccgaccttgaaacgacattccggtgtctcaaggcgaaaggcgtaaagctcaatcccgagaagtgcgtcttcggggtccctcgaggcatgctattggggttcatcgtctccgagcggggcatcgaggccaacccggagaaaaatgtggctatcaccaacatggggcccatcaaggacttgaaaggtgtacagagggtcacgggatgccttgcggctctgagccgtttcatctcgcgcctcggtgaaagaggtctgcctctgtaccgcctcttaagaaaggctgagtgcttcacttggacccttgaggccgaggaagccctcgggaacctgaaggcgctcctcatgaacgcgcccatcttggtgccccccgcggtcggagaagccctcttgatctacgtcgccgctaccactcaggtggtcagcgccgcgatcgtggttgagagacgagaagaggggcatgcattgcccgtccagaggccagtctacttcatcagtgaggtactgtccgagaccaagatccgctacccacaaattcagaagctgctgtacgcggtgatcctgacgcggcggaagttgcgacactacttcgagtctcatccggtgactgtggtgtcatccttccccctgggggagatcatccagtgccgagaggcctcgggtaggattgcaaagtgggcggtggaaatcatgggcgagacgatctcgttcgcccctcggaaggccatcaagtcccaagtcttggcggactttgtggctgaatgggtcgatacccaactcccaacagctccgatccaaccggaactctggaccatgtttttcgatgggtcgctgatgaagacaggggcaggcgcgggcctgctcttcgtctcgcccctcgggaagcacctacgctacgtgctacgcctccacttcccggcgtccaacaatgtggccgagtacgaggctctggtcaacgggttgcgcatcgccatcaagctaggggcccgacgtctcgacgctcgcggtgactcgcagctcgtcatcgaccaagtcatgaagaactcccactgccgcgacccgaagatggaagcctactgcgatgaggttcggcgcctggaagacaagttctacgagctcgagctcaaccacgtcgcccgacgatacaacgagactgcggacgagctggctaagatagcctcggggcggacaacggttcccccggacgtcttctcccgagacctgcatcaaccctccgtcaagaccgacgacgcgcccaaacccgagaaagcctcgactcagcccgaggcaccctcggcccccgagggtgaggcactacgcgtcgaggaggagcggagcggggtcacgcctaatcgaaactggcagaccccgtacctgcaatatctccaccgaggagagctacccctcgaccgagccgaagctcggcggttggcgcggcgcgccaagtcattcgtcttgctgggggacgggaaggagctctaccaccgcagcccctcaggcatcctccagcgatgcatatccatcgccgaaggccaggagctcttacaagaaatacactcgggggcttgcggccatcacgcagcgcctagagcccttgttggaaacgccttccgacaaggtttctactggccgaccgtggtggccgacgccactagaattgtccgcacctgcgaagggtgtcagttctatgcgaggcagacacactag

SEQ ID NO: 20011 - DNA, 1095 bp, Zea mays
  Peptide Sequence Number=SeqID_61790
atggatgtggatggtctggattcagcaggtggactatctgtcgtacctgtagagagctgtgcaggccgcctgccatccctcgatgggacacctaatacgatagaaaagcagatcagccctcgggcgcaaaactccacctcacccgacgctgggcccgccctcgggcgcaatcttcgtattgcccgacgttgggttcgccctcgggcacaacctccgcctcgcccgagctcggcctcggctacctactccaccacgaatcccgtaggcgaccacttcgccaactatggtacacgtcaaggaaagctcgaccatcgcctcgggaagacttccgccttgcccgagcacggctttgacctcgatatccgcagcgaaggattcccaacgtcacccagtacagggacgctgacgtatctcgcgtatggccaacccctcggccttggcctcggctctcagcagaaaaacaacaagctcaagtcaacaacgcagcgcaaagtcatgtcatccacaggacgccaagacatctcccctgggaacatgatgtccccttgctcaacaacgctcgagatgatgatcatgttcgggagcctagagttcatgtcactcgacatcgagtacgacatggtactcctcgcacctgtccctctggagcgtccgagcacccgtcgccgcccttctcatcgcaagaggcagagacgaaacaaccgcaaccatgccacccatggcaccccgtgccctagcaaaactcctaggatggctgatgtcatagactccctttcgagggacctagccaacatcagcatcgcacctgaagcgccaccagcggcacctgcattaactctcctgctaagtttcgacaccagctccgtcactaggctttatgccggacttcctttcccctcgggatgcttagactccgaggaagaggatgaaggttacaacaccaacagggagggctatgacccaacccgggaatgcctccacatcgacccagagatccccaatgaggagaatcaccttggcatgcctcgggagggtgacttcgtactttggttacgacaggacaaccgagggcgccacaagctcactcctccctag

SEQ ID NO: 20012 - DNA, 1254 bp, Zea mays
  Peptide Sequence Number=SeqID_61791
atgggtcagagtacacttgccttcaccatgttgctgttcagggacgtctcctgcaacacactcggaaacctcggactgctcgttgtctacgcaaagcaatcattcattcaacgtgcttggagaatgacaagagaacagtacaccaaacatatgcaacagtgtgaacacatgttcaataaaagggaaaccaggaactcaggcacaagaaaaccggactgggggttgatttctaagaatccgaggggctatttaacagatttaccaggcgaaggggtaaggggcgttctcggtcgtccgatctcatatcaacgaccgaaaaccgatctcgcggaagagcgagcgcgcgggcgagcactaacaggcgggccagggcagtcagtggctcgggggcgagggcgggctgaccagtccggcccagcgtcaggggtgcaggcgaccggcgagtgggatccaggggcagggggcacgcgagaacatgtacctagtgatatgggccgcttgatcggggacaggcggctgagatcaaatgcgagggggttaactgcacggcggctgacactgctcccgtccgcgacagtgcagtcgccggagaccaggctggcgcaggctccaggggttttgaggtcgccggagctgcccaggaccggtgaggggaacccgacaaactcgatggcggggttttggtcgtgtgagagcggggctgaaagtgggtggacaacagaggccggagggggcgcttcgggtgggtcggttgtactccagcgagcaatcccagtcgcgaggaggggtgatcggacggacgggtgtgggacgcctagggccaaagcgcaggcacggggcagggctaaatcgatcggacgccgagcgggcgtggcggaccggcgcgtagcgactctggcgagcactaattcaccgcagagggaaaagaatcagggcaagaaaggcacggggatggttgcttacctcgggacggtgcccggggaggcttggcgcgacgtctggagttctagatgttcggcacggcgggcgcgggtcactggtgaactcgggcgacgacggctgtgcgcaagagaggctaggagtgagtcgaatgaagcaagattgagagagcgggttcgggtagggctcaaaagggagctagggaatgtggggcacgacatggccaactttctcggcgtgcatgcgtgggcgaggtcagcggcagttacaggaaggacagagctgacagggcgggtccacggtgcagcaacttag

SEQ ID NO: 20013 - DNA, 291 bp, Zea mays
  Peptide Sequence Number=SeqID_61792
atgagtcctcgccgccaacgagcccctctgcccgtacacgtgggcagcccgactccgaccacctccggggatgacccgtacctcgctttgaccgtcgtgccaccccaacctcaccgaccactcctcgagaaccctactgccgacgattgcaacctcgctgacggagaatacgtgttgatcccggagcaaggagttgatcaagaggagagccaggagcctgccctcgaacctgctaccgaggatatcccagcagcaccaacacctgaaggcaagccccggttttatacgtaa

SEQ ID NO: 20014 - DNA, 1521 bp, Zea mays
  Peptide Sequence Number=SeqID_61793
atggaggctgcgggcgccacggtggcgtgcttcggcgcgatgaacgcggtggcgcgtcccacgggcgggttggtgtcggacacggtggcgagactgttctacatgcgcgggaggctgtggcagcaggtgcctgcgtgccacgccccgtcctcccgacatcgacgtcacgtccgccccgctcgcgatgcccactcccccaaccttgcttcgacagacaccgcgtccatcctccacggcggtgagacgaccgtcgtctcccccctgccccgctcgcgcgttacccgggccctcccgcccaagatcgccgccaagttccgccccctccctttaatcccatctcgatctcgccccaaatgtggtgtgagcggccactcctcatatccagtcgttgctcttcctctaccattgcccgcattgtcagtgaactgctgccgcgccttcctggccgccgtccgctcttcccgcaacttccgccgccgcttcgcggcgctgcacccgccttcctctcctcggctttttttttggccccgacgggcaacgaaaatcccaccttcatgcccattcgccgcggctccgaccggggccacgcggccgccgtccgcgggcctggacgccttcctgacccgcgtcccgcacgaggacgacgtcttccccgggtggcagataatggagtgccgcggcggttgccttctcctcctcaactggagaaccaagcagctcgccgcctacaaccccctcacgggggccttggatctcgtccccaaactgcctgacgacatctgcaaagggcaccgcggcaagttcatctccggtgattttttcctggtagtccccgacgacgaggctcccgacaggcgttcgttccgcgtggtctcctcctgccacgacaagtaccgggtgcgcgtcgccgtcttctcgtctgccaccaggaagtggcagattctcccctggtcggagcctgtgccgacacagccggcgagcggtaagtactggcttctctcggggaggcaggtgagtgggttcctgtgctggtcacaccataagaatgcctacaaggtgttgctggacactgcgaccctgcaattctccgtcatcgatctgccgtatggcttgagtgggcaaggccacctctacaggactggggataccaaggatgggaagctctgcatcgttgccgcaatcgatttctcgctgttcgtttggttccggacaccagacgctggtggcattgacaggtgggtgctccgacatgtattgcagctggaggatgaggttcttgaggccaccgagggctcacggaatgaacttgaacagcttaaagtgtttgcaattctggacggcatcgtgtacatgacgacatttgagacgtttagagatgctaccttgccttgttggtacctatccttctgcctggaaacaaggaagctggaaaaactcttctatgtaaaagctaatggccatgctcatccctacttcatgccatggcctactgctttagtaggtaacaatttgagcccctga

SEQ ID NO: 20015 - DNA, 433 bp, Zea mays
  Peptide Sequence Number=SeqID_61794
atgacgcgccacttccgcgactcctccacctccagtgaccccgctgccgccacgccgccgctgccgcccccactccccgacctcggagtggccctctccgccgccgatctccgcgtcaccgcctacgagcttctcgttgccgcttcacgggccaccggcgccaagcccctcacctacattcctcagcccacgacggcagctagcaagctcaagggcgcgttcggtctcgggtcctcgccgccgtccaaggtcgggagggcggcggtgctggagctggtgcgggtgcggatgggggttacagagcaggccgacgctacgatccgccggctgctactccgcgtcgccgccggacagaagtgtaaagcatcagattttcctgaccctctagagtacgaggcttggcagatgaggaatttcaagcttcttgaggctg

SEQ ID NO: 20016 - DNA, 243 bp, Zea mays
  Peptide Sequence Number=SeqID_61795
atggcgtctgctacaacacaatggcaccacaggggacttgggtgtaggaacgcgctactcgtcgagcacaaagtcaggatcctctgcaacaaatcatcaacgggtgagcacaaaggtgacacaatagttcgggtagttcgggaatacccgaacccgaacccgaaatttcgggtacccgaaatttcgggtattgcaaaacccgttgtaatttcgggtatcgattctcaaaacccgaaattttaa

SEQ ID NO: 20017 - DNA, 477 bp, Zea mays
  Peptide Sequence Number=SeqID_61796
atggggaagatagcctcgctggtctgggcgggctcgccagagcaggggtgtaggggccatggccatgccaccgcggctggctggctgggcgagggggcagccacgcgggctacgccgtggctggggcacggccgcagagggctggccatggctggagcaaggccactcggctccgcgccgctgccgcgtagggaagatggcatcgcaaggcgggctgcagccggggcacgtggggcacagcggttgggagccaggctgctgcgccgtaaggaaaacgaaggaggatgtgccagacttctcacctcacgacacagcctagcggagagagctcgtggatgcctcttagttagacctgaaagtttgagtcgtgctgttttgggtcgcccagacacgatccaagaaaacaggcccgaagcatggcccgacacgaaatatattgggccgtgccagcacggcacgaatacaggactgggctga

SEQ ID NO: 20018 - DNA, 2889 bp, Zea mays
  Peptide Sequence Number=SeqID_61797
atggagctcctgagcggcggcgcgctggcgtggcagcagtaccgcgcgctgctccgcaagaacgccacgctcacctggcgcaaccgccgctcggcggcgctgcagctcttctcctcgctcgtattcatcttcctcatcttctgcatcgaccgcgccgtccgctccaggttctccagtaccaccgcctaccgcaacgtgcccgacccggaggcgctcgtcgcgccgccgatcccgccctgcgaggacaagttcttcatcaagtccccatgctacgacttcctctggagcgacggcgggagcgcccgcatcaggggcctcgtcgacgccatccggaggaacaaccccggccgacccatagcacccgaaaaggttttaggttttaggactccagatgatgttgatgcttggttgtttcaaaacccaatgcgttgccctggggctttacattttcaagatataaatgccactcagataaagtatggtattcagacaaactctactccggtagcacggagaggaacatatgaagaccctaccttcaagttccagataccactccaagttgcagctgagagggaaatggcaaggcttctgattggagacccaaattttagctggactgttggatttaaagaatttgctcacccagccacggagaccttctctaccattgctcaagcagggccaactttttttcttgccattgctatgttcggatttgttttccaaatcagtgcattggtggcagagaaagaactaaagcttcgtcaggctatgtctaccatggggctctatgaatcggcttactggttatcgtggtttacctgggaggcctttcttacaacactttcagcactttttactgtgctctttgggatgatgttccagttcgatttcttccttcataataattttggaatcctattcctcctgttcttcctattccaactgaacatgcttagttttgctttcatgatatccacgttcgtagcgaaggcagcatcagctactactgttggatttgcaatattcattattgggttcttgactcagcttgttaccacctttgggttcccttattcgtctgactacaaaaagttgtaccggacattgtggtctttatttcctcctgatttatttgccaaagccctcaacattctaggcaaggcaacagccactcctgaggataaaggttttagctggaatcagcgtggggagtgcccatcttttgagactgactgtgtcattactattgatgatatatataagtggctcatatccacatttttcttgtggtttgtccttgcgatatactttgacaacatacttccaaatgtaaacggcgttcggaagtcagttttctactttcttatgccttcatactggacgggtaaaggaggcaagatggaagagggaggcctctttagcttttttggttcaagccgtcctgcagatgatgctacccctactgacgaggatgtccttgcggagcaaaacctagtaaaggaacaagctgcaaacaatgcggtagatcctaatgttgcagttcaaatacatggtctacgtaagacatatccaggaactttcagcattggatgttgttgcaaatgctctaaatctaagccgtttcattcggttaaaggcttatgggtgaaccttgagaaggaccagctattttgtcttcttggtcccaatggagctggaaaaacaactacaatcagttgtctgactggaatcacaccaattacaggaggtgatgcattcatttatggtcactctgttcgaagcactgtgggaatgtcaaacatccgtaggatgatcggagtctgcccacagtttgatatcctgtgggatgcattaacagctaaagagcacatggaattgtttgccagcatcaagggattgcatccagcagcaatcacatcagtagcagaagagtcattagccaaagtaaagctcagccaagtaactaatgctcgagcaggcagctacagcggaggaatgaagcgccggctaagtgttgcgatcgcactgattggtgacccaaaattggtttttctcgatgaacctactactggcatggatccaataacaaggaggcatgtctgggacatcatagaggaggccaagaaaggaagagctattgtcttgaccacccattccatggaggaggctgatattcttggtgaccggatagctataatggcaaaggggaaactgcggtgcatcgggacatcaataaggctgaagtcgaaatttggaacaggatacattgctaatgttaatttctctggaaatggccacatgcagagccccaacatcaacagcaacactgaggctccggttaatccgaacatagaagctgtcaaatggttcttcaaggaacggcttgatgttaatccaaaagaggagagcaggacattcttgacatttgtcatccctcatcacaaagaaccacttctgacgagattctttggagagttgcaagacagggaaggggagtttggaatatcagacattcaactcggtctgacaacacttgaagaggtgttcctgaacattgcaaagcaggcagagctggagacctctactgctgaaggtaccctggtgactctcaacctgtcatcaggaacaacaattcagattcccaagggggctcgtttcgttggtattcctggaactgagacagaggagcatccaagaggcatcatggttgaggtgtactgggatcaggatgaaaatggatcgctctgcatttctgggcactctgacgagatgcccgtgccagttcatgctgagctgaggaggcctccgtcactttctcgtagggcctcaatggaccgtggacgtccagttgggtatatgattgacctgaaccaggtcccatga

SEQ ID NO: 20019 - DNA, 585 bp, Zea mays
  Peptide Sequence Number=SeqID_61798
atgtctccttcctccagcgtcgccaggcgacggagcagacaccccgcggtggcgcggctcactggagacacccgccctagcgcagcttcaccgagctgtaccccgattgattatgcacgtagttacgaccctagcaaagcatgtggaggttacataccgggggtttatgcggtagtggtcacagtccctatcgaatcacggccccgtgacgccgcacaatccccgacgaggaatcagggcctcaccgcgcactccctagcccggagccctgtaacctcacgctccatattcttcgaccgaaccccagaccgcatgtcgagagctgggtggcggtgtggccacacttcccacacggcggcacgattctctcacagcggcgaggtcaacttccctcacatcccggcaatgcaacgcgatggtggtctagcttctagcctctggtcgaaggaggtcaccggctccagtcttatagggcgtcgggtggacaccgagctggacgcgatgaggacacacaaactcccagcgaggacgatgtcttctgttacggggatgaggatggctcctgcaggcatgggacccatgtga

SEQ ID NO: 20020 - DNA, 231 bp, Zea mays
  Peptide Sequence Number=SeqID_61799
atgcatgatcctgagactcaaggcatcactcattgccttcaggtcgtcctcctactcgccacgtcgaaacgggccaagactcagtccaataactgtcatgctcttccacctaatgagtgttcttgtgaactttatgaaagtgcatctagcccttttgtgggttttggtgatttggataacaacacacttaaaggactaactagtttgctaagtgttcaacaagaaagttga

SEQ ID NO: 20021 - DNA, 129 bp, Zea mays
  Peptide Sequence Number=SeqID_61800
atggcagtcggggtcagtgaggtattttacgccaaggcagttctctggaaggacatggttgctggagtgacttgttcgtccatccttgccgccccgatggactgtcaagtgggaccctgcctcggctga

SEQ ID NO: 20022 - DNA, 459 bp, Zea mays
  Peptide Sequence Number=SeqID_61801
atgggtacgaggctcatcggtggagaaggcgtgcccgagctggccacggcacacggatttcccgcgattgatcttcaacgccggcgagaaatcctggataggtcagaggcaatcaccgcacggaaaggccacgagcagatctctccaccagctgcacagatggatctccacctcccgccgtggatcactcctcccttccagcataccaatggctgtgacttcacggcggagacggtcagtgtggcgattgttacgcccgtagcttcggtcagggtagttgagacgaacgacctggtcactgggccccacttgccagggtcacgtaatgaggcacgcggagagaacgactggtttgttgcggagagggcgatgagcgctgatagactggtcccacaagtcagcgccgagaagggagaaaggcgcgcggcacgcgacggagtggctggcatgtgggattag

SEQ ID NO: 20023 - DNA, 471 bp, Zea mays
  Peptide Sequence Number=SeqID_61802
atggctgttgcgatgccccctctagcagtgctagcgacagccgggagggtgccttcaccactgcaggctactgtggtggcggtggcggaggagactagagaggcctgccgagagttgttcgtggatgactacctggtaggagatgttggcatgttcaatgcccagacggggctactgcctggcgggactgaagctgggcagttggtggtggcaccggtgaagcctgctgaagggagggctccagtgaagacttcagcggtgacttcgctgggcccatgggcacaattttgcgctgaagctgacgggggcggagaagtcgctggcgcatctgcagtcaagggcatggcggcagccatcgcgcgatggctgcgctatgctgctatttttgccgaccaagtggcatctaggcgctgtgaatgctgcgacctctcaatttcattccaaaaggaagaggctaaaacgaatctctag

SEQ ID NO: 20024 - DNA, 204 bp, Zea mays
  Peptide Sequence Number=SeqID_61803
atggggtggcaaatatcctacagtccgtatgaaagctctcttgtgggttttggtggtttgaatgacaacctaattaaagtcaactggattgagccaaggatggaggcacgatatcttcgaggaactagaacaagggacaaggtcaaggtgactgaagtacctaaagccaaggtgaataagaggctctgcaaaattcaaggttga

SEQ ID NO: 20025 - DNA, 726 bp, Zea mays
  Peptide Sequence Number=SeqID_61804
atgtcaggcctctacaaccagggcttctcccctgcaagaaccctctccccccagattaggagcaaccccgacgctgatagccagtacttggccgagcttctcgccgagcaccagaagttggggccattcatgcaggtgctgccgatatgcagccggctgctcaaccaagaaatcatgcgggtgtcaagcatggttcatgaccatggatttagtgatcttgacagacgccggtttagaagtcctagccctatgtcttcaccgattgtccggcctaatctacatggaaatggttttggtccttggaatgggatgcaccaagagttcaactttgtgggacgcattctagggccaaggggtaattctctaaagcgagttgaatcatcaactggctgccgtgtttttattagagggaagggttccgtcaaagatacagaaaaggaggacaaacttaaaggaaaacctgggtatgaacatctgaacgagccactgcatatattaatcgaggctgagttaccagcgaacattgttgatacaagactgagacaggcacaagaagtcatggaggaattgctaaagccagtggacgagtcacaagatttgtacaagaggcaacagctgagggagttggctatgctaaactctactctgagagaagacagtcctcaccctggaagtgtctcccctttcagcaacggcggcatgaagcgcgcaaaaccaagccagtag

SEQ ID NO: 20026 - DNA, 1040 bp, Zea mays
  Peptide Sequence Number=SeqID_61805
atcacgccaagagggagaacatgaccggcaaaaagtctgcaggctcggggaggactctctcaagcgagtccggcaacaagtataaggagaaatcctctgcctccatcaagtcacatcggagaggtgacaagaagaagaagaagatgaagaaagtggtctactatgagaccgactcttcgtcaccctccatgtccggcatcgagtcgtccactacttctaagcgccatgagagcaagaagtatacgcagacaccaaacgtgggggacaaggaatacgactcggacgaggccgcccaaattaggcactttaattcccaagcaacttctatattccttgcctctctttgtcgagaggagtataataagggagaacaaggtcgattcgtcctcaacaaaggggaagagccgcaagccatgtacaacaggctcaagacgatggtcaaccaaagtgaggctaataggaagtcaggcccgacctcaggcaccataggaagctccgcttcgcccgacccagggctcggactcgggctaagccccggaagacggcgaactctgctccgcccgacccagggctcggacttgggctcagccccggaagacggcgaactccgctccgcccgacccagggctcggacttgggctcagccccggaagacggcgaactccgctccgcccgacccagggctcggacttgggctaagccccggaagacggcgaactccactccgcccgacccagggctcggacttgggctcagccccagaagacgacgaactccgcttcgcccgaccccagggctcggactcagccctggcctcagccgacggtctccgcctcgcccgacccagggactcggacttgaccccggccacggaagacagactcaacctcgacctcggaggagcctccacatcgcccaacctagggcgtgggccggccacgtcaacaggaggcgccatcattaccctaccccgagctgactcgggctacgggggacaagaccgacgtcccatctggctcgctccgccagataggcgatga

SEQ ID NO: 20027 - DNA, 492 bp, Zea mays
  Peptide Sequence Number=SeqID_61806
atggcggggccccgattgtcagcctcgtctccacactgcaccagccgaatgcccaccacacgcgcctcctgcgtccagcgttggatgtgtcgctgtttgactgggccacttcccgggtcaactcctctctcgtgccgttctcttacacgtgggacccatctagccagccccttagtccgcgtgccacgctccttctctccgcggaagacccgtgcctggctggtggaccccggcgctcggatccgtcttcttcgcgtcaccagccgcgcggacttggcaaacgccacgctggaacctcgccgcgcatctcggaggcccaaccgaatcccagtcgcgcggccaagtctccttccccacgtgcgctaccccttgaagtacggcgccgctcgaccaaccatgactccctttctttcgccaggccagccccaaaatcgcgaggagaagtgcgtagtcgccggtgtgcaagggaccggcatggggccgccaccgtga

SEQ ID NO: 20028 - DNA, 450 bp, Zea mays
  Peptide Sequence Number=SeqID_61807
atgtcgggaggatccgccaagagggaaatggaaaccggcgagaaggccacaagccacaagatggctccatcaaggagggatcccctcctcgcgtcaagtcgcatcgaaggtggcgacaagaataagaagatgaaggaagtggtctactacgagaccgactcttcatcgccctccacatccggccctgacgcggcgtccgtcacttctaagcgccatgagcgcaagaagttgagagcacctagagggggtctatatcccgtttgtgaggaatctccacaatttggagcctctcgcccttacaatgatgatcacaaaagaaacacagaagtaagggaggagagcaacacacacaagactcaaatacgcagcacaaccatgcacacaagtgaagacttgatctcaaaggacaacatagggagttcacaactcgaatggagctcaaatcactaa

SEQ ID NO: 20029 - DNA, 840 bp, Zea mays
  Peptide Sequence Number=SeqID_61808
atgagtgagcaagacgggcagcacgtcgggggcagcccgccggacgcggccatcgagtccttctcacagctccccttcgtgcgccccaagcccccgcagccggcgtcctcgtccagtccgtcgtcgatccggctgttcggcttcgaggtcccacccgacgccgccacgtcctccaccgcaaccagtgacgctaccgccgccagcgccaccgtagcgggccaggcggcggcgtcgggcgcggcgggtgcaggtgcaggtgcaagcgatggcaccggcggagggcgcaagttcgagtgccactactgctgccggaacttcccgacgtcgcaggcgctgggcgggcaccagaacgcgcacaagcgggagcggcagcacgcgaagcgcgcgcagtaccagagcgcgatggccatgcatcacgcccactacccaggccacccccacgcgtaccccgccttcactagctaccaccagcagcagcgcttcggcatggcgcgctacgagcccccaccgccgggaccgccgccgcactacccctcgtggtccccgcaggctgctccgccagtggtgcccagatactacggcagggcctgctccctgtcgcagcccatcaacggcagccccatcccggctgccgctctctggcgggtcccggccgtcaccgcggccgcgccactggtgcgccaagagcggccgacgccgctgtccttgggcggacgtgacgaggaggaggcaatgacaggagcaagaagagggaacgtcgtagctgcaagacaggtaggctcgcgctcttcctcctcgtcatccacggcgtcgcagcacgaacgccgccgggcagactga

SEQ ID NO: 20030 - DNA, 507 bp, Zea mays
  Peptide Sequence Number=SeqID_61809
atggcggtggcaggcgggcgggagcagcggtcacgtcgtcagccaagcttacgtcccatccgggggcagcgagagaaccctctctcacggcgtgaagacgacgcgcccgtgttccgttcctcgaacggcccgcgcacgcgcaacggccgccccgcgaaccgcacgccccgtcgcattaactccgcggctggaaaggtggcgcctcttgcgggggaagggccgggaaagggggacaccccgaaaaggatctttctccatgaaggaaccaggctccgagcctccctactgatcagaggttcgaaggctggcccctcggaagggttcaacagccgcctcagagcatgtgggctccacacccactactggtcagaggttcgaaggccggcccctcggaagggttcaacgaccgcctcaggctactcgggctccgtgcccactactgatcaggggttcgaaggctggcccccgaagggttcacagccgcctcagacacagagcgagggatga

SEQ ID NO: 20031 - DNA, 876 bp, Zea mays
  Peptide Sequence Number=SeqID_61810
atgggctactcgtcatcagattctctcgagcatcactcaaaccgctactgtactggcctcctgcaccagcatggacaccaatgctgtgattcaatgggcctggcatcaacaccgaagttgtcaagtatcagtggggccaagacagaaacctcatccatggacgcatcgatgaggacaagctcgtcacctgaagaggtcgacaggtctggtgagctcacggtgtccatcagcaatgcaagcgaccaggagagggagtgggtcgaggaagacgagcctggtgaaaacagcgccgcctgcctcgctccgactgctgtgccactcgacagagtgagactgacaacagctaagtccagcctcgggcgccatgggaagctccgcctcgcccgacccagggctcggactcagcctcgaccccggaagacgaactccgcctcacccgaccccagggctcggactcagcctcggcctcggaagacggtctccgcctcgcccgacccagggctcgggctcagcctcgacctcggaggagcctccgcctcgcccgaccccagggctcagactcagcctcgaccccggaagacgaactccgcctcgcccgaccccagggctcggactcagcctcggcctcggaagacggtctccgcctcgcccgacctagggctcggacttagcctcaaccccggaagacgaactccgcctcgcccgaccccagggctcggactcagcctcagcctcggaagacggtctccgcctcgaccgaccaagggctcgggctcagcctcgacctccctcgacctcggaggagcctccgcctcgcccgacctcgggctcggacccgccacgtcacagggaaggccatcattaccctacccctag

SEQ ID NO: 20032 - DNA, 678 bp, Zea mays
  Peptide Sequence Number=SeqID_61811
atggctagctgcagtcccctgctggtacatgtacatcgattgatctggtccctgactctgagcttctgccgcatgcggcaatggcatgcatcatgccggttcagcgatcagaattgcgataacgtaattgcggtcagctgggacggcggggaaggacgacgcagatcactccccacgcacgcctcacccactcagcccgcccggccaactgctgcgacaggcaccagcgggtatgaatggcggtggggggaagccttgttggccaccggcggggatgaagtgaacgctattcgggaagacatcacaccaccacacaatgcatgtgaacagcaaaaggcagattcaaagtccaaccgcgcacggcctgtacccctccctcggccgtgcagcgttctctacgacgcgcgtcacggcctcacagttgtgcctgtcgacctctacgctcgtgttccagtcgccgagggaaacactacccgactcgagagtgggaatcatttcagggccaaaaacaaatacagagatggtgacccctgcaaacattcgtgccaatccgaggcacagatcctcaggaggagggggcgccggttgaatgcgcagcacagcacagcacaggccggaacgggaccatcccatctgcaaaggagaaggacagttatggcggcagcgacgctcatgtga

SEQ ID NO: 20033 - DNA, 501 bp, Zea mays
  Peptide Sequence Number=SeqID_61812
atggaccccaacctcggcgccatcatcattggcgccgagataacacacatcgacgccaattccgttggcgccactatgtgttacctcggcgccaatgatgacggcgccgaggctagagcagcacaaatgaccaccctggacttgccccacagtgtactagcagtggttgttcctcttgcatatttaccaaatagtaaaaccctgttatataagggatttactatgtggacgatggaaggaatggcaaaacagtgttttattgagatttcgattgttattcaaaagcttttgagccacacagaaaagaagaaaaacagacggacaaatggaatgctaaatgggacatgggaatttagccattttgatcggaaactaaagcatgagccatcatttagagaaatttataagtggagacaagctagattagccccagaatttaacaaccctattgtgcagtcctcaaggaacactaacgaacttaatattggggtgtttgtttag

SEQ ID NO: 20034 - DNA, 390 bp, Zea mays
  Peptide Sequence Number=SeqID_61813
atggcgctcaaggcgtcgggcgcgtacaggcactgcaagccctgcgcaggctcctcggcggcggcctcgcggcggcaccacccgtaccaccaccgcggcggcagcgccttcgggggctccgacgccggctcggcctccgaccgcttccactacgcgtaccgtcgcgcgggcagttcggcggacgccacgacgtccatgagcgtgcgcacggacttccctgccggcgacggggaggacgacgaggtggcgtcagaagccgctggcggatgcggtggcaaggacgacgacgccaaggagtgggtggcgcaggtggagcccggcgtgctcattaccttcgtctcactggcgcaaggtggcaacgatctaaaacgtattcggttcagattataa

SEQ ID NO: 20035 - DNA, 201 bp, Zea mays
  Peptide Sequence Number=SeqID_61814
atggtcgcatccactagccaggctagattcgggcaggtcaagagcattcaggtgcatgctgtttggtttactgcatgtgtgcaagctgcagacgccccaactaggatcagcggggttaacaagcgtgggtggaagtacataaaagaatcacagaagaaactacacgatgcccccaaagtagacgtagcgattgctggctag

SEQ ID NO: 20036 - DNA, 993 bp, Zea mays
  Peptide Sequence Number=SeqID_61815
atggcgccgccgagatcaagcggcggcgatcagacaacagaagcgggaggcgcctccaacctgccgccctcggccgccaccggcgcggcctccgccaccctggcacgcacgaccgcccctcgcccgccgccggccaggcgtccacccgccgccgcggcggacgcaatgccgttccccgacgacccccgcgcgccgcgtctagatcgccgggtgaagcgccgctgcggcccgcggaggccacagtcggcatcaccatggacgcgctccccgggaaccaaccctagacggagctctccatgtgcgggacgagttatgttacgggagaaaaacaaaacaaaaatcagccccctcgcccacaaatctcggccgcggaacagaactggtggcgtactgtccactggcaacaccttcgagaagattcctctcctctcctccccgcgcgctgcctccgctccgctcatgtcgtccgcgccgagcaccacggcgtccaccatcgcagcctctatccacacgccgttctcctcgggtccccgcggggcccgccttccggccgcgctccgcctctcgctcgctcagctccggtcggccggatgccgcgcggcgccaggtcgcctcgctcgccctcgcgcgcgcgttcggtgcggcgcggcggccaggttcattgggcagggcgagttccccgcggaggtgctggagtcggagctgcccgtgctcgtggacttcgtcgccgactggtgcgggccgtgccgcctcatcgcgcccgtcgtcgattgggcctccgaggaatatgctgggcgattaaaaattgtcaagattgatcatgatgccaatccacagctgattgaagagtacaaggtttatggtctcccgactttgattctcttcaaggatggccaagaggtgccaggcagccgacgagaaggggcaatgataaaagacaagttcaaggaatacctggaacctctgttgactacaattacaacagccgcttaa

SEQ ID NO: 20037 - DNA, 1797 bp, Zea mays
  Peptide Sequence Number=SeqID_61816
atgccgctgcgcccgcgctcaccagctgccgtgcggcttcctccccttgccgcctccgtggaaccccgcgccttccctgccgcaaccacctcccagcagcagcaacagtgcctccctccctgcccctatgccgcgctcctccagcgcagcgccgccaccgccgacccgtgcctcgccgcggctctgcacgcggcgctgctcaagccgcgcctcctcgcgtcccacgtcttccttcacaaccatctcctcatcgcctacttcaaatgccgcctcccccacctgggcctccgcgtgctcgacgaaatgcctcgccgcaatgccgtctcgtggtccgccgccatcgcggggctcacgcagggggaccgggcccgcgatgcgctcgcgctgttccgtcggatgcgcctcgccgggtgcccgcccaacgagttcgcgctggccagcgcgctcggcgcgatctcgctggcacccgtgggcaccgggcatgcgcggcagctctatgcgctctcggtgcggcttggcttcggctccagcgtcttcctgacgaacgcgtttctcgctgccatggctcgtcacttgcagctcgaggacgcggtgcggctgttcgacggcgcttccgcccgagacatcgtctcgtggaacacgctgctcgccgcgttcgctcgccattggagcgtgcagggttggatcctgtggcgaaggatggtccgggaagccgttggcgccgatgggttctcgttcagcacaatcctttctgggctggcggtgaccgcgagcttggcgggcggtctgcaagttcacgcccagctcgtgaagagtggcttttgtgacgatgtgtgcgtggggaactccttggtggagatgtatatgaagagcaaatgcctagcagatggcgtcatggcattcgccgagatccgctgcaaagatgttgtgtcgtggacagggctggccgctggatgcttacactgcggcgagcctgccaaggccattggcattctcggtcagatgatgctggacggagtcatgcctaacaactacacatttgcaacgtcagctaatgcctgcgcgagcctcaccgatctggatgaaggaaggaaagttcacgggtatgtgatcaagctgggagacgactcagacgttggtgtcaacaacgcgctcatcgacatgtatgctaaatgcgggtcagtggcctgtgctcacaaggtgttccagtcgatgcaacagcggccagtcatctcctggacggcgatgatcatggctttcgcgcacaacgggcgagctcgggaagctgtggaggtgttcgacgacatgctgctgagaggtgtagctcccaaccgcgtcactttggtctgcgttctctatgcctgcagccaaggtgggttcgtggacgagggttggatctacttcaacgccatgaaggacaagtttggtattcagcctggggaggaccactacgcctgcatggtcgatctccttgggaaagcaggccaaatcgaggaggctgaagagctgatatcagggatgccattccggcctggcgtgctggtctggcaggcgttgcttggcgcctgtcatcttcacggaaacgaggctgtaggcaggagggctgcagagcatgcgcttgcgctcgagaacgatgacccgtcgacatacatgctgctgtgcaacacacttgccggccagcacgattgggacggcgcacgaagtgtcagagtgctcatgggatcacaaaccctgaagctgcccgggtcttcatggtttcagtccatgtctgacagaagccaggcatgtatcagatga

SEQ ID NO: 20038 - DNA, 171 bp, Zea mays
  Peptide Sequence Number=SeqID_61817
atggcacagcaggcccggcccggtttttggccgggcttcaccgggcccggaccgggccgggccgggcggcccgtttggccatctctagcttggagtgtcctatgcacagcggagcggaggtcatcgctagtcagcttcatgcttggtgttcaaatcaccggcagcaggtaa

SEQ ID NO: 20039 - DNA, 300 bp, Zea mays
  Peptide Sequence Number=SeqID_61818
atgaagattgaagaacagaactacacaaaatttctggatttctggatctgcgcgtatctggattggaaccgcgagtgtctggattctggacgagaaatctgggtcggtgaagttcggaacttggaactggattcacgcgtgtctggattggaaccgcgagtgtactggagtttggagcatattcattgttgcaggagcataaacagcagtgttataaggcctctgcacgcgcagcagcgttgccatatgagaaaaagtccagctggtagcatcctggagaatttcgggagcaaagcttaa

SEQ ID NO: 20040 - DNA, 882 bp, Zea mays
  Peptide Sequence Number=SeqID_61819
atgaattcttcctccgcgtgcggcgatggtgagttgggcggctgcgagtacgaggtgtcctacgcggacgggtcctacaccaagggcgcgctcgcgctggagacgctcacgctgggcggcacggcggtggagggcgtcgtcatcggctgcggccaccgcaaccgcggcctcttcgtcggggcggcggggctgatgggcctcggctggggccccatgtcgctggttgggcagctcggcggcgaggtcggcggcgcattcagctactgcctcgcgagccgcggcggctacggctccggcgctgctgacgacgacgccgggtggctggtgctcgggcggagcgaggcggtgccggagggcgccgtgtgggtgccgctggtgcggaacccgcgggccccgagcttctactactacgtcggcctgtccgggatcgaggtcggcgacgagaggctgccgctgcaggctggcctgttccagctgaccgaggacggcgctggcgacgtggtgatggacacgggcaccaccgtgacgcggctgccgcaggaggcgtacgcggctctgcgggacgcgttcgtgggagccctggcgggcgcggtcccgcgcgcgcagggcgtgtcgtcgtcggtgctggacacgtgctacgacctgagcgggtacgcaagcgtgcgtgtgcccaccgtgtccttctgcttcgacggcgacgccaggctgattctggcggcgaggaacgtgctgctggaggtggacatgggcatatattgcctggcgttcgcgccgtcgtcgtcgggtctgtccatcatgggaaacacccagcaggcagggattcagatcaccgtcgactcggccaacgggtacattggttttggacctgccaactgcggctag

SEQ ID NO: 20041 - DNA, 876 bp, Zea mays
  Peptide Sequence Number=SeqID_61820
atgccttacaaaaagacgacttcgacactggagggtctcattgcggacgattcacaccaccagccctcctctgcccacatcgaagatggagctgctaataatgggtccagggatatcagtggggattcttcatctgttgatttgaaaagcccagtcccactggggacacatgccgatgtcatggaagacgaaggatggatcacaattccatgcagtttgaggcacttcctgaaagttggaacgacatatcagaaatggttcagttgcaggctctggaccgttccttcctttttccaggttcctatactggcgtgcctgtcagcttctaagcaagatgtacaggttatatccccctttagaattgctgcagtaatgtctaagaatggaacttctatgcaaaactttacaaataaatctagccctgtcagtgcaaatggtcatgataatggagcagctggagaaagtggctatcaggatgttgaacccaatggtgaagcatctccttcaggacatgatattttggagactcaatctctccttcagatggaggatcataagcagcagatcgaacatgtgttgcgaagatttagagaatcaaatttttttgtccggattgcggaatcagtggaacctctatggtccaagaaaagtgtaacttcaactacgatggcagatgaacgatcagataaccagggaaatagtaagagctcaaggagtaatgtttataataccatttctgataaaggggtttttgatggtaacacatctgggggagttgctcgagatgttgtcaagtgttattctctgcaaaatggagacatagtgtttaaccaagcagcaggcacctactggaaattgactcagatctgctactaa

SEQ ID NO: 20042 - DNA, 486 bp, Zea mays
  Peptide Sequence Number=SeqID_61821
atggcggcaaacgcgcccggcggtgtgcatggctctctttgtctgcctgcttcgcgggttcgcgcgtccaactgcacagaagtgagaggaaggatggggggatttatctgcgctgcacacacgcacacaagcagcttttatgctaccctggcgcacaccacacggttggatacttggattcctattcgcacctgcgcgctagtgctctgctctgctctgctgccgcaggccgcagtgcatgccgtggttggtacttgcttggtagcctacatgcatgctactccgcaaaaggggatgggaaggattttgtttgcagtgcgtggccgggtcccactgccacccctggccgccgggcgccggccagggcgcggagaggggccagcagaacagaaaggtgtgggaaacagtcgaacagcggaacgggggaagaagaatgggtaccctgtgggttacgaggatttaacagactccaaagaattatgttaa

SEQ ID NO: 20043 - DNA, 132 bp, Zea mays
  Peptide Sequence Number=SeqID_61822
atggctaccacaagcgtggtgctggggaataccatggtggcgtgctacgtcaggtcaggggatatgcttttccatgacctgatggcagtggtgaccggtgctgtctggacctttggtgtcagtggccgctag

SEQ ID NO: 20044 - DNA, 1098 bp, Zea mays
  Peptide Sequence Number=SeqID_61823
atgatgttctctggtggaagtatgcaggttgttttgcaagtgaatgttagcgttaacaaattggaagatcctgtgcttgaagtccttcagtttgagaaaagtatatcaaacaattcctcttctgttcagacaccaaataatataagaccaccaccaatatctgaaagtcaagaatttatgcctgaaaaacctgcaaaaaccccagatattataaatgatgggcaactttcgtttagaggagttcctttagaacctgaacggtattctaatattgctcctactcatgcaaaagatatagtcgtattcatcgatgcaattactattgtatttgaggaggcatccaaaggaggtgctcctttgtctttaccaattgctagtattgaggttgggcatggtcacagcttgccaaacctagcactcaggaggggcgaggaacactcttttattctcaaaccagcaactatgtcctcaagggaacggaagaccaacagtcatgcacctctggccttatcactcccaacgatgaccggtgctactttaaatactcatacaccaaaggctggtgagccgtatgctgatctaagcgaccaatatgctgtactgatactaacactcgaagctactaatatgacatccgaaaaccttacattaactgtccttgctcctgaagcatctggttcttcttcagttgtatccttgaactcatctccaaccaccccaaatggttcttttgatggtgttaatgagtcatcaaaaagatctgggctgggaaaagatggaattggctttcgaagattgaattctgtcctagctactccaaaagaaggtgataatggaggaaacagaatgagtaatgcttcaggctgtactcatctgtggttgcaaagtgcagtgcccctagggtgtgttcctgcccgctcaagcaccactgtcaaacttgagctgctaccattatcagatggaattatcacacttgatactctgcaaataaccgcaagggagaaaggccttgcttacattccggagcactccttggagatacatgccacctctgtactggaagcagaatcccagatcatggcccggattgaacggtag

SEQ ID NO: 20045 - DNA, 372 bp, Zea mays
  Peptide Sequence Number=SeqID_61824
atgaagtgcatccctgttcctgcttattgtgattctgtaaccccattcacattgtggctaggactcgctggatcgctcaagcagtacctcaccaatgtcctcttaaaaacgtccacatctttaagaggacatcttggccccaaatcagaggaaccctcgcattacctcaccaatgtcctcttaaaatgtgggaccaacaaaggattgagacttgggagtgatgttgagcaccggcatctaaatgatatcatccacccttctagggctgagaccctgatttgggggccactgaagagccataggggtataattacagaagaaaatccaaagccaaggggtcgtttcagaagcctctgtccaagacagaggtaa

SEQ ID NO: 20046 - DNA, 378 bp, Zea mays
  Peptide Sequence Number=SeqID_61825
atggcacaagctgaggctttacagactactgacatgacatctaaagtgacgccacacaattcaactacgctggaggagatggatcctaagcaggaaaataacaagaaagtatctttctatactgtagaaacacttggtgtagtgctggaatacatggggtctctggaatctcttttaacatatcataaggatgttgatgagaagctcctctatgaaacattcagtgtatttggagtgattgtaactaatcctaaggatgggttcaagaatggttctaatatgcctatagagatggtgatggcgagaatgacgaagaaaatcaatcggattcccatttatttttacgtgaaagatgagatcttaaacaactacttctga

SEQ ID NO: 20047 - DNA, 1449 bp, Zea mays
  Peptide Sequence Number=SeqID_61826
atgcggcacgatctcgttgccctgttactccgcgccagctccatctccgtctccggcggcgctcgcgcagcacagacgctccacccgctggcgctcaagtccgggcgcgcctcggaggctcgcgtggcgaccgcgctggccgtggcgtacgcgcggtggggcctcgtcgcgcacgcacgccgcgtgttcgacgaagcgccgcgcagggacctggtcctctacaacgccatggtctcctgctatgcctcccacggtctcgcgcgcgaggcctgggcgctctttgccgccgcgcggcgctccgggatcgcccccgacgggttcaccttcagcgccctgctccgtccgccgccgcgccgtggccgccacccaaccgccggcgccgtcgatgacgggctgctgctcaggatgggagccctggcgcacagcctcgtgctcaggctgggtctcctcgcagacgtggtggttgccaccgcgctgctcgacatgtacgccaagtgcggccgggttgacgaggcgcgctgggtgttcgacgctatggcggtcaggatcttagtctcatggaacgcgatcgtagtctgctatggtcgggttggtggaggcaaggacgctgttgagctgttccggtggatgctgagagacggagctgctgcccggatgagctcacgcttgccagtggccaatgctgttatcacagcgtacggcaagaccggttttgctcgagaggcggggcaaatgtttgctatgatctgcgacccagatgtagttacgtggtcctgtatggtttcgtctttggcgtaccttggactatgcaaggatgcagttcatgtgtttgagagaatgctccaacaaggcgtacagcctgacagcgtcgccttccttggggttctttctgcctgcagccatgccgggctcgttgaagaaggcctgcactatttccttatgatggcgaggggctacaacatcgatccaaattcacagcaccttgcttgtctggttgatctcttggggagagctggtaggattcaagatgcttacaacattgttatcaagctttcttgcgagaacaatgctgatatcgttggagctttccttggtgcctgtaagctgcggggcaaaattgagttggcaaagtgggctgccgataggcttttatgcctggaaccaagtgaggcagtaaattatctgcttatgtctaacgcatttgctgctgcaggagcttggaacgagcttgcagaagtaagaagtgtgatgagacataggtgtggcagcaaggttcctggttgtagttggatagaggtaggtggaacagttcagacatttgtctccaacgatgtggtgctccatcagtcgattgaaatgcaacaaatggtgcaacttactatttcggaagcacaaaaagagtgcaacgaagacacaacttgtggtgatccaattttggttcaagaatga

SEQ ID NO: 20048 - DNA, 1137 bp, Zea mays
  Peptide Sequence Number=SeqID_61827
atggccgaccgaagggggccctgtggccacccagcagtcagctgggttgccgcagaagattgtgagtcaacttccaactctgatctaggtggaatgggggttacttcaagatcccgctcccccaactccgtgaggtacaagagcgaatggttctacgtcaagaatctagctggcagcgccccatgctttatcggtcaggagccagtgtcgacagatgactggaatcgtgggatggagccaggtcggaaggcctttgatggctcgccggaggggatcgattcactagcgcccagtcttccaccgctccctgagggggtcgctgttcaggcggcgcgcaagcgcaaaagtagtgacggggagaccctggggccactcatgaggtgccttaaggtgaagaagggtaagggtgtcacgcacgggcgagggagccgctcttcctcctggctcggaggaagcatcttccacgacttttggtggagcaggaattgcggcgttggtggtggtccgtcgcgccatggtgacgccgcaaccagctctaacatcccgactgatatgagcgggtcgaccgtggatcccgccttggtcgcgacgccttctatcaacgtcgcgacagtcatcactgcgagcggaatggcgcaggcggcggcgtgccccgtgacgcctctggatcccgcagggtgccacgtggaggcaacttctcgggtcatgccacaatcttttgttcctttgccgggcgcgctagggaaggtgactacagggaagcgttcatccagcacgtacgtgccacacaagtccgtgagggacatagccttggcggtcagagcagtgccttcatctccccaagccttcgggttgcagccactaggaggggaactcctagaggttggcatagttgcccctggtgtgccctcaccagagcgacagtctgctctgcccccgcctcttcttgcccttgcacctccgccgactgtcatcacaggggtctgtggtagctttgagggtgatgaggcggagacgagggaggggcggcgactcgagtcggccctgctccgagctgacgcggctctggaaaccattgggtgcatgcttagtgttggaacttgctctcctgggcaagttgatccaacgggggagtaa

SEQ ID NO: 20049 - DNA, 1137 bp, Zea mays
  Peptide Sequence Number=SeqID_61828
atgaagcgcaggcgacgaccggcggtggtcgcattgcaaggggtggttgcacgaaggcagcggcgtgggcgtcgggttgctcgtgctgtcgtgcagattggggcggatgatcgaccatttgagatcgagaccgaccacaccaaaaatccatctcgcaaccagctccgacaccggccagcgaagatccacctcgcaaccagctccgctgctccgcagctccggcacagactagcgaggatgaacgacctcatgaccgactccttcgtcgccgccgcggccaaggcgcaacagggcggcgcggtcgcccctgccggcggcgacgacccggagctcggcgcgttcctggccgaggtagacgccgcaaagaccgagatgatcgcgttgcgcgacgagctgtcccacctccgatccgcgcatgaggcgtccaagaacgccgtggtgggctccggtgagggccgcgccgccacgcaggccgcgctcgtccgcctcctcgtgtccgcgcggcgcctccgcgcgcgcctcgcctccatggaccgccgcgctccggcccccgcggcgcagacccgcagcggggctccgcggccgcgtgcgcgacctcaccgcggacgtgcaggccctccggcggcaggtctccgaggagcgccggagcgacgcggcccgccggtacctggcccgtggccgggggacgcgccgaccgaggagcagctggaccgcctcctggccagcaccgacggttcctccgacgcggcgatgcgggcggcgctgttgtccgccgcaggggcggagcaggatgaggccgcgaaggaggtggcggaggtggagcgcggcctcctggagcttcagcagctgttcctggatatggccgcgctcgtggaggttcagggcgcgccgctggacgatatcgagcagcaggtgggcacggccgcgggccacgtgggcgcggccgaggcggagctgcgggaggcccggcggctgcagggcgcagcgcgtcggaggcgggtttgcctggccggcggaatcaccgcgctgctgctcgtcggcgttgcagtcgccgtcctggtggccctcatgctcgcgcgcagaggcgccggtgggaagcttgtgctgcagctcgccatggacttgcccgcgcggtga

SEQ ID NO: 20050 - DNA, 192 bp, Zea mays
  Peptide Sequence Number=SeqID_61829
atggccgcagacgacgtcggcggtgccctggacctccacttcctctctctctcccgctttctcccccctctggagaccgggtctgcaactacccgcgcgcaaaaggtggcatcagcagcggtgaagatcgcgatggcggcggcgttcgttacggggaagatgaccgagctgacgggtggggcccatgtgtaa

SEQ ID NO: 20051 - DNA, 171 bp, Zea mays
  Peptide Sequence Number=SeqID_61830
atggccgacctacgcacggcgcgaccgtcgcccgtgtggtggatggacagccaccccccgacccggcagcacgtggcggttcgcctcctccgcaaggctgggatcgggaaaggggatatttcgaaaggatccttctcagcgaaggaaacgggccccgagccctcctactga

SEQ ID NO: 20052 - DNA, 648 bp, Zea mays
  Peptide Sequence Number=SeqID_61831
atggggaagcctccatccacacggggttggggtggaaaccccgatggggagcgagagaagcgtcgctgggtggccaagaggatggtgggtaggggcccgaggttggagatgaatgggggcacgtcgatgggcgggagggaacccctggccaccagttctaaaaagtctagaggtctctacggccatcagagttcagaggtctctagggtcattggagcattctcctatagttttcattactcaaattatggaaccatccatataacacattttcatgacaaaaatgcaagttttactggtgagaatgtccgaaagctagttaggagccccagacctagcatgcatgatgagaatgtccgaaaactgtcggacagcagcggctggtgtttcccagatatgctagttgctctggcagtgttttgtgcctgctctaatttgcaactggatgatccttctccattcactgaagctgctcctgaacgtcgcatgggagacgacgtcactcatgggattttggaactcggaccacacatctacctcccgcacacccttggagcctcaagaggtcacccactctcccatttgaggctcagctcactgcaacatgcagcaaaagctggcaacatcctttgcaagacaattaattaa

SEQ ID NO: 20053 - DNA, 1893 bp, Zea mays
  Peptide Sequence Number=SeqID_61832
atgccgcctctcctcttccgctccctcgcgtcgctcaacctcctcctcctcgtcggctaccttctgctcgtcctcctcgccaagctcttcgcgcgcctgcaccacagggccaccgccaaggacagaacaagtaattggtatgatggccgctgcgaccaccgcacggaggccctggccaccgatgaagcagagtacgccgccgccgccgccgatatcgtccaagcacaacaagcggacacgctgtcctggttcgacgaggccgcgttcgaggacagcaccctggtgcttggcgacgaaggaaaagatcacccgtacgccgctactgcagccactgcacgttgttgcttgcaggtggtggagagcaactttcccatgcaggaatctgcccgcatctcgccgcgcaaccagaaccgccgcgtcgatgtcgatgtcgaagccgaaccgatgcagcagcagcagcacgtgctggaggaggccaagggcatcgccgtcgatgtccagcaggcgacggtcctggaaccggaacggcggcggagtgctcctgctccagtcgtcgtatcaccggaggatgtctccatccaaggcagtctcctagggaacaagcaggaaagcaacagaccaggagaagacactcgtcgcgacgcccatgccgagcacgaggatgaggagggccagcaggggaagagcctcgctgaaggccaccataatgtcaagctgttcgtcaacaaccgtgcgctcgccgacgccaggaagctcctgctggagggcgcggtgaacggagcgcaggcgcagctgcagctgcagctgcaggacgacaaggacaataagaacggggacagctgccggctcgacgcgtcgacgctgacgagcgggtcgtcgacgtccaagagctcggtggagtggcagagctcgacggtgaccaaggactcggagacggagtaccccttctcgtgctcgtcgcgccggagctccgcgcggtgggagccgtacacgctcttccgcaagtacgacgaggacatggtctacttccaccgggtcggcgcccagaagctcaccgaaacagagtcattcaggtccatcaagtaccagccgcggtcggtgtcggagaggatcgtgcacaagctgacgccgagctggccgagcacccgcatcgtcggcctgcgggacccgtacccggagctggagcgcgcgtacgtggcgcaggtgtgcctcacgtgggaggccctgaactggaactacaccagcttccggcggcacaacggcagcgacgacggcagcgtcgcggcgcggtgctgcccggcgcgcgtggcgcaggagttccagcagttccaggtgctgctgcaccgcttcgtcgagaacgagccgtacgagcacggccggcggccggaggtgtacgcgcggacgaagaactccacgcccaagctactcctcgtcccggagttcagagacgaggatgacgagaaggatgatctgatatcggcggtccagttcctgcttatactggaggagtccatcaggacgttcatggcgttcctccgcgccgacaagaggagccactacgagatgttcagggagacggtgaagaggagggcgagcgccatggaccagacgccggtcgtcacactcaagaaagccaacaagaaaaagaagagccggctcaaggacctgacgcggccgcggcggtgcctcaggaggacgaggctgaggcagcaggaggagctgtccatcctactgggcctgatcgacctcaaggtggtggcgcgggtgctgcgcatgccggagatcaccgaccagcagctgcactggtgcgaggagaagatgaacatggtcaggatcgatctggtgggcaagatgcagagggattctgcacctcttttctaccctgcacattga

SEQ ID NO: 20054 - DNA, 897 bp, Zea mays
  Peptide Sequence Number=SeqID_61833
atggcgtgtggactccaggaggcaagtagggagcccattggacctgaacaacttgccggaggagtacggcaagcaagcggtagagagctccacgaccaccgccacatcaagctcccatgcaggacagggataaagaagaagggcgatggagggaaagacgatgctgcaaaggtgtatgagtgccggttttgctccctcaagttcggcaagtctcaagcgcttggcggccatatgaaccgccatcgacaaggcaagatcatacaccactatagccctagctcattacacaatgcttacatttccttgtattttatgggtttgttaatattgatttctgggcttcctcttccagagagggagactgaaaccctcaaccgtgcccggcaactcgtcttcggcaacgagagcctcgccgccatcggggcgcaagcgcagatgacgatgacggatgtaaatatggctggcgctgccccaccgaccgtattgggaggaaacttccggggaggcgccagcgccaccggtggcagcagcgtcggcgacccgtgtctcccgttccggccggtgcatccggggctatcgtcgcagccttcgtaccattacctctacacggcgccatccacactgcacccgatgagctacccgccggcgacgtacccgggccctcctcgtcagcctgcggtcggcgactatgtcatcggtcacgcagtctccgccggtggcggtgacgcactgatgcagtcgacgcaccgcagcagcttctcttgcttcggagctccactcaccgctccgccggcagcagcggcggcgggggctgctgctgctgctatgaacgtgcaggccgacaagcttaactgcaactgcagcttcggctgcggtggccacagcagaaataataac

SEQ ID NO: 20055 - DNA, 393 bp, Zea mays
  Peptide Sequence Number=SeqID_61834
atgcaggggcggcacaaccgcctccgcgattccgggtcccttgccggagacgaagaacaaggccacggcgtgtatgcggcggagaaggcgagtgcgggtctctgcggtgcgccggtgctacttctccagactgcccctgctccacgcgaacccgctctccagcgcgactacacgactgttgttcctagcgacggtggtgttccgtggcgcgacagcgaaatcgacgatcccaggaacgctttcgacttcgactctccaggcgtcgccaaccgcatcgtcccccgtggaacaagtggaggtgcagttctaatcttggccactgccgtgaaatgcagagccaatatcactatttggtaccgcctgatcctactctcttatctatttgggccataa

SEQ ID NO: 20056 - DNA, 588 bp, Zea mays
  Peptide Sequence Number=SeqID_61835
atgacacgaaccaagccagtgtctccctcatggttagatatggggcaattgggtaatttggcaggccatcatgggcccactctggaaaccagctttccactcccagggaaaccggaggctttggcagtccgtggatccgcagccccgacgcgcagggcaacgcccaccgtcttcctcgccaagttctacggccgcgcaggcctcatcaacctcatcaccgccggccccgaacacgtccgacccgcaatattccggtctctgttgtacgaggcttgcggccgcatgctcaacccggtgtacggctcggtcggcttgctctggtccgggaactggcagctttgccaggcggccgtcgagtcggtcctccgcggcatacccatcgcgcagccgccgcccaccgccacgggtctcccgcctctccggtcgtgcgacatccgccacgtcgccaggagggaggcaggctgcggctccgtggatgccggcctccaccgaatggccaacagcttgcgggggcagttcaagcgatccggtgcccagctcagatccgcagagtccgtcagcatcgagctagtcttctaccagccgtag

SEQ ID NO: 20057 - DNA, 321 bp, Zea mays
  Peptide Sequence Number=SeqID_61836
atggtcgcgccgggcggccgcagcatgctgacgctggtcctcgtggctctctcctcggtgttcctcacctacaacgtgctcatctccatccactcctccatccaggtgaccctcccttcctccttcccaaccaacatagcctcctcccgtcgcttcggtgccacaagtccgccaagtggagggcattccacatcgtggggtccgctcacccccacgctagcgatggtgggacttgtcgtaccacccgtcgccgccaccgcctctgcgggaccatgcgcgaccctcgccgcgccgggtgtcgacgtcagccgcctcatgtag

SEQ ID NO: 20058 - DNA, 138 bp, Zea mays
  Peptide Sequence Number=SeqID_61837
atggatcctggcacacatatggcctatctgagtgtgatcatcatctatctttacgcacatgattttcagcaagctcaaaaatcctacaatgactgctcagacttcaatttaaatgcagagaatgataggtcgaagtga

SEQ ID NO: 20059 - DNA, 192 bp, Zea mays
  Peptide Sequence Number=SeqID_61838
atggagatgatggccattcttgccaagttcacgtcggctatgctccagtgggtgccagcagttgcaacgcacattcaacagcagacagagcaagtggctcccagcatgaaaattggagtcgtcatattctcgggcagcggcaggatgtacgagtacccgagccctacatggaggacatgtgttgcaatataa

SEQ ID NO: 20060 - DNA, 423 bp, Zea mays
  Peptide Sequence Number=SeqID_61839
atgcgcgtggcgcccttgccccgcggcggcgcggccccgccactgccccccatcgcggcccggcagcgtggcccctggcgaggacctccggtgcggccccccggcgtggccccagagcgcccccggggactcgagcggtttctcgagtgcctctccgtaaggattggttcgttagatgaccacccgggaaaacagtgcaaccatgagggtggtgatgatgaggataatgttggtttctattgtgattatgattatgctagtccactacagccaaacgggacaattgctgagtatgttgatgtgtactcacccttgctttacacaccaaaccccccaggttgtccacgttgcaaccactgctcaggagaagatgaagtcatagaggaggacttccaggagttccaagagtacgatgagttctag

SEQ ID NO: 20061 - DNA, 297 bp, Zea mays
  Peptide Sequence Number=SeqID_61840
atgcctctcgagctcctcgtcactcgaagaagaggccagctcgttagtgctgtagttgaggtcgctcaaggaggcgaggaaggagtgctccttgatctttgccttctagagaaccccatgaaccgaatggacacaagcgccatctcctcatccctaaggcttgccacctactcctctatgatagatagcaaagaagatagagcaaacaaagctggtgaggggttagaagcaaaaccacctccaaagaccaagatcatggtgggtgcaccagggttctcaatcttggctcgggtctag

SEQ ID NO: 20062 - DNA, 234 bp, Zea mays
  Peptide Sequence Number=SeqID_61841
atggccctcggtgatgatgcagtgggccacgatggccaggacatcggcgatggctctgcatatgaggtatcacatttcgccgatgacctcgtcgttgaggtagaagagctgatggctgctttggctagtcaggataagtttctcaggctttctactcgtgagaggaaagattttaaaattcaaaagtttgatattcaaactttggttgaacttgcacttgggtttgaaaactaa

SEQ ID NO: 20063 - DNA, 258 bp, Zea mays
  Peptide Sequence Number=SeqID_61842
atgtcgattgctcgttggagcattaccactgccgtggatctgccctacatcgagtgtgggagtctctacgacatcatctccggtgagaactcttcccaaatgttcaccttctccacctctttgcgtagcgcttttcagagtggggtctcgttcaccaaggcaatgaattctaattgctccagggggtcacgcggccgtgacaggagcgccgccgttcccagattaccgaagattaaaccccggctttcaaagaaatag

SEQ ID NO: 20064 - DNA, 537 bp, Zea mays
  Peptide Sequence Number=SeqID_61843
atgaacattgctctcgtagtgttcacgctgacttggcatttgttcttgcgtcacgcttgtactttttccttctctcaagccgaagtatttgagaacaagtccccaacagccgcggctccccaccccttggataagggcaaaggtgccgcaagcagctcctccgcccgaggcggcgccgggatgtcagaggaagagaggcggcgccagctgcgccgcgccgacgagtcgtttgtttcggacccctcccctagtgggaccgagggggttgactcccagaagcgtcagagggccgcttgcggggccgaggagacctggctcgcaggcctagggcacgcagaggcgcgtcagccctccgccaccgcaaccatcaggtccgccgccaccacaaccaccgccactgtcgggttcgccgccgcgaccaacacccgggggcgatctccctcagggccgccagcagcagcaacaacaacagcagcagtagcaaaagcaatggccgccccgcttccaaggccgttggaaggtcctggccccaagtga

SEQ ID NO: 20065 - DNA, 696 bp, Zea mays
  Peptide Sequence Number=SeqID_61844
atgtcgatacgtgggaagccgccaccaccaccccaaccctgctactgtggttgttcgtggcgtaggcttcgggtggccgatgaggtcctgggcccgttcatcggtggttgtgtagatgtccacctcccgaaacagctgttccgaggtggtgggagctttctagaggatggcctggacaaaggtcaaattgttacacccgcgatagaaatcttcgatcatggcagcctccgcgacggcagggatgctattcctcatggggctcttttacaaagatgcatcagcaaaggggtatggagcgacccaggccgttggattagagattcagatcgccctcaaccgtccatcctagatctacggttcagattaggagcacgaagggatatcgcgatctacagttcatgggtcgtcttcaaccatcgaccaggatacccggcgacgcccgcacccacggcgaagccgcgctggcgagcaccccgacatagcgctctggcgagccaatttgagtgcagatatgtcctatgcgctgaggatagggcgaagcttatgaagacaagccttaccgaagatggggtagccgtgagggctgcccacggttgggtacggattcgcaacggcggacactccgatgagcaattggttgcggaccagggcaccccctcgcctgcgaagaccacaagctcaatcctagaggcgtga

SEQ ID NO: 20066 - DNA, 117 bp, Zea mays
  Peptide Sequence Number=SeqID_61845
atgtcgagtggtgcccctatggccggtcgcaacctgtcctatatcagcaacaacgagcttgtggacaacccttgcgtcaagcgcgaggtggatgctggaggcggcctttacggctag

SEQ ID NO: 20067 - DNA, 372 bp, Zea mays
  Peptide Sequence Number=SeqID_61846
atgcaggcggcatgcaactgcaccacggggatgcaccctttcgacttcgacgcatccagcatggaggcccaggcccacacgtcatgtaaccggcgcaccggttactacgtgcgaaaaactgcaccgccacttacgccaatgtcgcgccttctcgactgcgaaaccggtgccacgactcgaggcaaccctgtgcatggcccaacagtgccaaccaagcgcatcggtcacggggcaggcgacacctttggcaagcgaagcgggcgacgcttcacctccgccatgatgaccgcgtcaaaaaagggaccgggaaaggggatactccgaaagggatccttctccgcgaaggaagcgggccccgagccctcctactga

SEQ ID NO: 20068 - DNA, 561 bp, Zea mays
  Peptide Sequence Number=SeqID_61847
atggtgggcgcaagatttatactgattcaggcagaacgtctctgcatccagtcttcggcggcttgcgctaccgatacttttgttgatcaatgctcggaagaggggttacaagcgggccaagaagggggtcgaccagcggtggcttcctcaaagaaggagccaccagacgatggtaaaatcgagcgttctaccctggatgctgcagaggctgaggccgagctgcttcaggctcaacttgccgagttcgatggcctcgtgtgcttgatggagcctgagctttcaagtccttaccggttcgcgaatcaggccacgaggctcattcttgttcgtggtgggggctgcgacttgcgtctccttgatgtctcagcccgcgtgtacgagaatgtggagctcagaactcactggggcacggtagtggctctcgccattgtgctgctacacttcggtggtaatttctgcaatgtcatcgatccgccagagggttcgcccacagtagatctagaattgttgtcagttgatttcgatgatgttgcaaacaccgtgtttgaggtggtgttgtga

SEQ ID NO: 20069 - DNA, 1863 bp, Zea mays
  Peptide Sequence Number=SeqID_61848
atgccggaagcaccgactaccaagataaacccgccagccggcggcttcgcccccggggcgcaccgcgaggcactcgagttcatcgagcatgtcacggcgaacgccgggaaggtgcagcggcgcgtcctcgcggagatactgtcgcagaacgcgccagccgagtatctgcgccgctacggcgtcccgggaggatccgccgatgccgtcgaagccttccgccgtgtggtcccgctcgtcacctacgagggcctccagccggacatactccgcattgccaacggcgatgcctcgccgatcctctcaggcaaacccatctccgagttcctcacgagctctggaacatccggaggggagaggaagctgatgccgaccatcgccgacgagctggacaggaggtcgttgctgtatagcctgcagatgccggtgatgagccagtcggtgccggggctggacaagggcaaggcgatgtacctgctattcgtgaaggcggagtcgcgcacaccaggcggactggtggcgcggccggtgctgacgagctactaccggagccggcagttcctggagcggccgcacgacccctacaccgagtacacgagccccaacgaggccatcctgtgcgtggactcgtaccagagcatgtacgcgcagctgctctgcggcctcgtccaccgcgccgacgtgctgcgcgtcggcgccgtgttcgcctcgggcttcctccgcgccatccgcttcctcgagaagcactggccgcgtctgtgccgcgacatccgcacgggcaccctcgacccggagatcacggaccgcgccgtgcgcgacgccgtcgccagggtgctccgcggcgccgacccggcgcttgccgacgagatcgaggccgtgtgcggggggtcgtcatgggagagcatcatccggcgcctgtggccccgcaccaggtacgtcgacgtgattgtgaccggggccatgtcgcagtacatcccgacgctggagttctacggcggtggcctgcccctagcctgcaccatgtacgcctcctccgagtgctacttcggcctcaacctgaaccccatgtgcaagccaggcgacgtggcatacacgctcatccccaccatgtgctacttcgagttccttcctctccagtgcagcaacggcaaggcagagccgagccaccgcgacctggttggcctcgtggatgtgaagctgggtcacgagtatgagctcgtcgtcaccacctactccgggttgtatcggtaccgcgtgggcgacgtgctgagggttgccggcttcaagaacgaggcgccgatgttcaagttcgtcaggcggcagaacgtggcgctgagcgtcgactccgacaagacggacgagacggagctgcacgcagccgtgagcggcgcggtgcagcacctggcgccgttcggcgcgtcgctggtggagtacaccagctacgccgacgcggctaccatcccgggccactacgtgctgttctgggagctgcgcgcgggcagcacggccgtgccggcgtccgtgttcgaggactgctgcctgtcggtggaggaggagctcaacagcgtgtaccggcagtgccgggcctgcgacaagtccatcgggcccctcgagatacgcgtcgtgtccgagggcacgttcgacaagctcatggactacgccatcagccgcggcgcgtccatcaaaccagtacaaggcgccgcgctgcgtgcgccccggccccgtcgtggagctgctcgacgcgagggtgcaggccaagccgggcgtcttaattcgatcactgggcagcgctcaactgatactcctagatcagacatctgtgtcagcaactcattgatctcggcatttttacatatgtgcccttag

SEQ ID NO: 20070 - DNA, 330 bp, Zea mays
  Peptide Sequence Number=SeqID_61849
atggccctcacgccgacgcgggacaccaaagggcactgcacacggcgaggcaggccaacgatgatgcgagacagctccggcgagcaatcgcgcgagcaacagagcagtaacgaccaaattaagggtacagacgggttgctcaccttgaggggaagcgttggggtcacggagcaacggtgcaggcacaaggatacgacagggcgacggcggcggggctccggcagcgcaagaatcgctctggtgagcgcggaccggacgaaacagagaggggaagggcacaccgaagggtgtcccgatgaagcgccccaatcccttgggactcaaatgtga

SEQ ID NO: 20071 - DNA, 933 bp, Zea mays
  Peptide Sequence Number=SeqID_61850
atggataaacttattcagattatcagaatgcctcgaggacaaggctcttctgtgtcaacccgtgagaatcccaaagttgatcgggcaactgattcaaatgatgacagccgcaagaataggaggggtgcttatttgctactgggattgctgatagtgttccttcatggatcatggtctgtttatcagatccagtttggaagccttcctttgccccttgatgctgagcaggctggaaagaggggtttctcggaagcttcggcgctgaagcattatgtatatgcagtagcagaaaaaataaagaagacagctcattgggaggttgatgttcaattggagttgtttcacacagatataggcgcaaatcgtctatctggtggtcttttcaagggaaagactctcttgtattcagacttaaagcatgtgctattgagagttactcccaaatatttaccagaagctgaggaaaacttgattctggtttcttctcatattgacactgtttcgacaacggaaggagctggagattgcagttcatgtgtgggagtcatgttagagcttgcacggggagtggcccagtgggcacatgggtttaagagtggtatcttgtttttatttaatactggagaagaagagggtcttgatggcgcccatagttttataactcagcaccactggagaaattcagtaatatttgcggttgatctggaagctatgggtatcagtgggaaatccacactcttccagggtactgaccattgggcattggaaagctttgcagctgtagccaaatacccatctgctcagatagcttcacagcctcaaaccaacgtatttggtgctaaaaatgagcatgaagaaaaagggattttttttgttgctttggtgaaagtagttccagatctgtcagtttggtgctgcacattgttatcctag

SEQ ID NO: 20072 - DNA, 261 bp, Zea mays
  Peptide Sequence Number=SeqID_61851
atgggtgctgacaggcgggccaagggcgcagggcgcgcgtgtgcaaagcggtatccgcaatctaggtcgtgcgatcaagatcggatgggggagatcagaccagggagggatgaacgcctgcgggcggcgctgctcctctccacggaggtgaggtcgccagagttgaggcaggcgcgtgctagggtggcttcggggtcgcagggattgggcagagagggagaggatgctatgagaacaacgaatcaagctgattcatcagca

SEQ ID NO: 20073 - DNA, 1011 bp, Zea mays
  Peptide Sequence Number=SeqID_61852
atggtgtttgctccggccaagccccggcggccactgccgatggcgcggcatgcggccaggcacgggatccggccatggtgcggcctgggcacggcgactccggccccagcagcattgcacgcgcgggcgcggccatggtgcggcctgggcacggcgaccctggccctagcagccctgcggacgcgggcgtggccaccggtgtcgtggccccgtcatcggggcacgccgccctacgacggccacactgcaggcgctccccaacgggcgcacagccggcggtggctgcgcgcagcccctgtgcgggtgcgcgggagcggcccctggtggctcggcgtcccgacgctggcgcttcggccgggcacggctccgaggctggctttgccggccacaacacactccggtgcgcgggccccggcgtcctcctccagcatgggctccgaccatgtgacggcccagtacgggcgcaacagccccagccaatgcccaacctccttacgccgttcgggtccgaacaacgcatgcgagcgctgctgcaagcctgcaaccgccaccattgcatggtccggtgcaatgcaccattacggtggtgggcttctcagccccgccagcgggcatagcgttgctgccatgcgtggcccgcggagtgcatttcgctgttgccgcagactcgcccgtcgctgccatgcagtgacgtgcgaacggaagcgacacatcccaatcactggaatgcataccgagatgggtagcggcacaacgttggtagagcaaacatgcatatttaatttgctagatcaaaaggagagtcctgattatatacatgtgaaggggtgtctctcaagggacacgaggatatctagtgagcgaatgctgcggaggtcgacgaaagggaagcacttcatgccggcgagcccccacgtttacagaacacgaaacaagcaggctctcttcaacattacccagttcattcagaaccaaacattccatgctcgacaaacacgagggtacaagtag

SEQ ID NO: 20074 - DNA, 159 bp, Zea mays
  Peptide Sequence Number=SeqID_61853
atggaagaggatggtgtagagaaagatgctgaacaacaagttgaagtggttttgggtgctatagtccaagctgttgatggaaagcatgttgaagaacaacaagttggatgctctcctacatgtagatgctggagattttgcttgttggcttttgcttga

SEQ ID NO: 20075 - DNA, 105 bp, Zea mays
  Peptide Sequence Number=SeqID_61854
atggcgcacagtggtggcgataggatggctcgggcagacggggcaacaggatggctcgggcagacgcaaggcgccaaaccgagctggacgcccttggctgactaa

SEQ ID NO: 20076 - DNA, 402 bp, Zea mays
  Peptide Sequence Number=SeqID_61855
atgaacatgtatcagcatattcgtgagactgttaaagaagagaaagtaattcttgagtggcatcctcaacccgatcaagagaaaccttctgtgctgttgttgaagatttttgttaaggaagaaaaagatacaccgaaactctggtatagcaacagaaggaagggtactgcagctgatgttgctatctgtgcaatgcttgagatagacagaaatactcgtcttaaggagcttggttggacgctactcatgcagttgtttcaccactacattgcaaccatcagtatcatgcaaatttcgatatatgccacgattttcatggtctcatcactggagagcacgtcccacgcctgtcggaagaagttctctcgtacatcgtcaatcatcaggcacgcaccaccataa

SEQ ID NO: 20077 - DNA, 462 bp, Zea mays
  Peptide Sequence Number=SeqID_61856
atggccgtgatgggttcaacaacggaaaagatgtacctctgccagatggtcaataccaggaagggtggtggaattgatctacctcccaatcgacacactcaaaggatattcagacaaccacagccacaaccagtagagatggatcctccaccaccgcctccaccagtaggagttgatcccatagttgcggccaagggcgtcctcctccgggtcctcccagtcccaggcaagtcgaaacccctagctcccagcgcggccgacggcgtccttccctcgtcccaggttccagcaggtcagcagcagaaccaagggtccagggctccacggcaccgcgcaggggcgcagggccgcaaggcgagtccttctgtgattcgtcctctcctcctcccagtcggaggattccccggcggcaccggcatcgggcgccggcaagtcgggcagggacatgcccaagatgcactg

SEQ ID NO: 20078 - DNA, 543 bp, Zea mays
  Peptide Sequence Number=SeqID_61857
atgccgacagtgtgggccttggcaccatcatttgggctatgtgggcccttggccttcatagctctgggcatggtgcggctcatcgtgttgcgccctgctagcgcgctttctttattgaggggtgacttctttgctgcccctatggactcaagcaagcgcctagtggaagagcgctcccttgtgtcacgtcctctccggcaaaagatgattaacttagggcaagtggtcttaatgggtcaaaggaaagacttcggaatgtctatttgtcagggcaggattcctaccctctcatcgcaaactgcctcagaccttcgagggtgtttggccgctacccacgtgacactcgaggttgccgatggtgaggtggccgatctccgttcgcgcctggtggaggcagaccgctgtgtcatgggtcagtattgtcctttgctttcatggagatcccttcttggctaccttgacctctctttgtcctttttagaactagaacttgaggtcgcgggccttcgcgagggtgcggatgaggtggtcacctttgtctga

SEQ ID NO: 20079 - DNA, 460 bp, Zea mays
  Peptide Sequence Number=SeqID_61858
ctcgctcgtcaggttgctatcgcacgcggacccgctgctgcaggagcatggcgtcacgacactgctcaacctctccatctgcgacgataacaaggcgaccatcgtcgaggcgggagcgatacgaccgctggtgcacgcgcttaagtccgcagcatcacccacggcgcgggagaacgccgtgtgcgcgctgctctggctgtcccagcttgacggcgcctccgcggtcgcgctggcgccatcccgctgctgcagcgcgcgcgagaaccggcagcacggcgtggagaccggtgccgtgcggcccctgctggacctcatggccgacctgaagtccggcatgatggataaagccgcgtacatcctccactccctagtgaactccggcgagggccgcgccgccgccatcgaggaaggcgacatccccatcctggtcaaggtggtggaggtcggcacctcgcactag

SEQ ID NO: 20080 - DNA, 342 bp, Zea mays
  Peptide Sequence Number=SeqID_61859
atggccgggaggagggatggtcgcgtggcagccggagttattgccctccaccgcggcggtcttacccagagcaaaagaatcttcgcgcggagatgctcgctgcccgatcatcctgaccccggcgctaatcgcggtgtggatgggtcatcggcgatttttgttaaggacaaagttgtcttccttaatagaatttattcactatacatcaatctacaaccttactattggattattggatcaacaccgaacggattcaaagatattgtgcgtctaaaatggctccattccactgtgaccattcctggtttcagatttagtttcattcatcaggaacaagtctga

SEQ ID NO: 20081 - DNA, 159 bp, Zea mays
  Peptide Sequence Number=SeqID_61860
atggcgccgccgtggactgggtacaacgctgccgtggggaagaagtccaaggatcgctggatccttgagtgggattgtggtgtgatgagatatattattgttttaattattgttcatgacaagaccattgtgttaattggaacatggagcttaacttga

SEQ ID NO: 20082 - DNA, 594 bp, Zea mays
  Peptide Sequence Number=SeqID_61861
atggtgggcgatgcggacaccattttgggcacgcgtgaaccaaccctggacggctataagaagggcgtagccaggattcttatcctcccccttttctccgtcaactcgcaaatagtcccaaccaaaccaacccccactatcgtcgtgtgggccgagcgccgccgcacggggcaagccttccccttcgccgatctgggcgagttgtcaggccgtggagcatcgcgggttcgtggtgaatccgtccgtggtctcggcagggcaaatcaagagtccgtgcgtgaggaattgctcatcggcgtatcaccgacgacggaaaatcgcgtcgtcccatgggcaacctcttcctcgcctccatacctggtgagtacctccctaggggctttgtgtttatatgcgcaacgtgtagagggcaatagagggagttttgggctcggatttggtggttcagcgatccctggccatggctccgccgcagaacaggggcgagccaccgctctccggtggaaactgagcgtgtttgggattcgccgttggatccgtaaccaacgccccagattaggactggagtacctgttcggcgcggtccgatcatag

SEQ ID NO: 20083 - DNA, 339 bp, Zea mays
  Peptide Sequence Number=SeqID_61862
atgagcatcctagattgcttcgccctccaggtggttcacctttccacagttgtaggcctgaccacagactactggtgcttgctgtggtgctccttgtctcgctggggcattgactgctgtagaagcatgcatgacctcctacttgagctggcgctgcttgactgttctgattggttgctgggacaggaagacgagctgtctggttgttctgacgttggtactaatttcctccttgctggttgctctgatggtactgctgctgctgaggaaactgcctctggtactgctgttgctggttgtgacgatgatgctggtgctgatgttggtgaccttgcttga

SEQ ID NO: 20084 - DNA, 735 bp, Zea mays
  Peptide Sequence Number=SeqID_61863
atggaaagggagcgcaacgccgccaccgctggtgctggccgctgggaggcgccggacgggggccgccaaaaggagcaccagtaccagcagagaaagcgtgagatggagcgggagcgggagcagcaggacccgggggcgagggagggggttttggggctggacccgcagccgccagagaaggtgtactacaagacgaggctgtgcgagaagttcgaggcgggcaagtgcgcgtacgagggtgggtgcaccttcgcgcacggctccgaggagttgcggccgccgctgccgctgcccctgctgacctcgctcgtccgacggaagtcgccgctgccgtcgtcgtcgccaggtgccgctgccagcagcccccacggtgggtactgcgttagggtgtgcttcgagttcagggacacgggggcctgccaccgtggggataggtgcgccttcgtccacgcttccacgacagagatgccctttcctggggggccaaggtctatggagtatgctctgaggaattcgtcgtcgtatgcaaaggcgtactcgccggggtccacggccgccgcgtaccgtaacagcagcagcaccagcaccagcaactatgcaccggctaccacaagggcgttccaatccgtttctgccgacgcggccggagagggcggttgcaaggccacccgtctggagctccttggtcgcaagaagatgaacgacatctacggcgactggccggaacaggactga

SEQ ID NO: 20085 - DNA, 990 bp, Zea mays
  Peptide Sequence Number=SeqID_61864
atggagcctcaattctgcagcagctactactatggccatgccggcggcgccgcctatgcgcatagcgatagtagccactacggcctacgacgctacgacgacgacagcgtcgtcgtggacagccactgctactccagtagcaccatggcctcttccggcttcgtccagcaggcggcctcctccgcgtactactactacgaccctaccgcgtacagcagtgaccaccaccagcaccagcagcagcacccttcttcctcgtcgacagcgtgggcgtcatcgccgtcgggcgccaccacgccctcgtcctcgcaccaccaacagcagctgctccgttttggcggcggcgccgttgatgagtactaccaggaggacggcatgggcgcggtgggcatggatcagtcgagcgctcacatggtcatgggagccgccagcagcacctcctccggcgcttcgtcgacgacgaacacacccgactacctgctgctgcaggaggaggaggcggcggccggcggcggcggcgacgcgccgctgatcggggtgcggaggcggccgtggggcaagttcgcggcggagatcagggactccacgcgcaatgggcagcgcgtgtggatcggcaccttcgacacccccgaggccgccgcgctggcctacgaccaggccgcctactccatgcgcagcacggccgcggtgctcaacttccccgtggagcacgtgcaggcgtcgctgcgggcgctggggctcagcgtcgacgcgggcggctcgccggtgctggcgctgaagcggcgccactgcatccgcaagcgcttgcccaagaacaagacggcggccggcaaggagcaacagacgaaggtggtactggcggcgacggcgagtagccgccgcggccatgggcatgctgagcaaaagcaggcagcttcttgcggcgtgctggagctggaggaccttggcgcggattacctggaggagctgctcgccctgtcagatcaatga

SEQ ID NO: 20086 - DNA, 315 bp, Zea mays
  Peptide Sequence Number=SeqID_61865
atggcgattggccagcgccccccacaccatcagctactcgccgcattgcgccctggccctgtgtggactccacgctcatcgtcgtgttgtgctccatattactgtcgtcagtcaacgaaccacgtcgtcttcgatggccatggcggcgctggagcctactacgtcggattcacgcagaacgcgcttccacccctcctcctcgccctacgctgcaggcggcggcgcacgggcaaagcgcacgtagtcgcgctgatccggcctgctgactttgcgcacaaccctaagcacctctgcatcatctcgcatcacatgtaa

SEQ ID NO: 20087 - DNA, 465 bp, Zea mays
  Peptide Sequence Number=SeqID_61866
atggctggcctggccgagatatgtgtgcgcgcgtgtgtggggtgtagctatcccttcggcctgcggcaacgcctcccgcggcaggcacagcaacgtgacgtcccagcagacgctgccggtgccgttgccgccttcgcttttccgctttgcctcggcacacactggccgatcggtccggacaaggagagggtccctggactggatgctgccgcgcgcaccgggcagccagaggacgagccgagtaatacgcgcgttttcggacacgacgctacagcttcctgtcgtgtcgaggatggagtgaaaggatacaaacgagcgtggcttggcctgagaccgtctcctttgtttgcccatgtaaaaacaaaaagagcggcgtggcggtatggaaagccgtgccttgttgcacatgacatgcatgctgttggaataagtgtaaacgagacacagagagtagaaaggaattga

SEQ ID NO: 20088 - DNA, 942 bp, Zea mays
  Peptide Sequence Number=SeqID_61867
atggccctggccgggcgcctggcgcagcaacaagaccctgctgcgaagccgcggcccaaggcatgcctgcctgggcgaaccgcgaacggagagaaagcgagaggtccctgcactgcacactccgacgaagcgggtacgcgggaatccggcggctgcgcttgcgacctggcgctgcgctgccccgccccctccttcaatctcatgaagtacctttatgagaagattgtgatgccatcaactgagatcatcacaaccgatgataagaaggaaaagaatatgcccaatctagaggccaaggctacaaaccttcgattttatctaataaacacaaagaaggaattaatgaccatgactcagtacttcaccaagatgaagggatttgcaaatgagctaactgcattcagtaagatcctatatctgttagtgagtcgtatgcacaatctcttggttttgatagtcggtagacgatgcttcgacaatccgacctacggtacatgtcctttgctaacttggctacacaaggacgaggtcaaggtagaggaaaccaaggaggacgctcacctggagggcactcaagctatggacacggtcgaggccatggtcgtagccagtaagacaccggttagagaagagattagtataggtgtcaaatctataataagcccaatcatcgagcttctgagtgctgctacccgtatgatgaggattatcaaccagaagatcgatctgctgtatggaagaggtggtgccctaaacagaagaagggaatcttggaaggacactctgagttggagccttggaggcatagcggaacgaaacgattgcaaagatggcgtgccggttcggactgcaaccggcatgcagggtgaggtcggccccaggcccccatccgaggcgagagagtggatgggccgagaaaaaggatgggccgcccagacgtag

SEQ ID NO: 20089 - DNA, 594 bp, Zea mays
  Peptide Sequence Number=SeqID_61868
atgtcgtcctcgcccctccccaccacctccggcggggctcacatcttcccgtctccgcctcgaccgcgccaccgccggtgctcccaagtaatcgtcgccgccgccgctccgccccgttcctacggcgtcggtcgccgcgccgtctccctagccggcgtcgccgcctggcttgccactaccgtcggccgggcagacgcggccagtccatttgacaagtacgtcaagaggaagaagctggagcctttggagacctacgttccggctgtcctgctgaccattgaccaattcgttgatctagcggtccatgagagatccttccatatatggttcattgcagagaaatccttagaatttgagaaaccaaggtatgacgagagcagatcattacttcgctctggaccggcatcatctttaagagtcaacattcgggcagtggcacaatatgcttctagtaatggtcaaggcaaggctgcatcagatgctgtggacgagtgcttacgtctcttgcaaacggtgccatctgcagtactggataaaggaaaggcgattgctgatgcataccgaactccagtagatgattatgtagagggctga

SEQ ID NO: 20090 - DNA, 408 bp, Zea mays
  Peptide Sequence Number=SeqID_61869
atgagcaattcacggtctctggtgaacgattggaggcaagcgcgggtgctatggatgggtgattaccctacggagctcgcagtgcactcaatttataacgggcttaagcggtggccggggatttggacgaagacacgcggcggccggagaaataggaggtcactggcgcagttgattcgtggagaataccgtggcggactcatcggcgatgatcggatgactaacccaaccattgaagatttggagccattggcgcaccggacagtccggtgcccccatcagaccgttggctcggccacgcgtcacgcgcgagttgcgcggtcgaccgttggcgcgcctgaccgttggctcaacggacagtccggtgcaccaccggacagtccggtgcaccaccggacagtccggtga

SEQ ID NO: 20091 - DNA, 1461 bp, Zea mays
  Peptide Sequence Number=SeqID_61870
atggagagggctcttgcccctcgcctgccgcggctgcctcgcctctccctctcgtggccatgccgctcgatgactctctgcactatagctctgctccagcattggaggcacggcgcagcagaagccaaagggcccaagctcgaggacttcatgagcatcacttgcagcaacaagagcagtggccgcagcctctacgacagctgcggccaccacgacgacgagcaggccagcaagtaccacgaggtccacggcatccaccccctctcgtgcgggtcgtactaccacggctgcatcagcagcggcggcggcggcggaggcggcattggcctggggatcaacatgaacgcgccgccctgcaccggcgggttcccggaccaccagcaccaccagttcgtgccgtcgtcgcaccacggccagtacttcctgggcgccccagccgcaagcgcgggcccgccagcaggcgcagcaatgccgatgtacaacgccggcggcggcagcgttgtcggcggctccatgtccatctccggcatcaagtcctggctccgggaggccatgtacgtgcctccggagcgaccggcggcggctgcgctgtcgctcgccgtgacggatgacgtcccgccggccgagccgccgcagctgctgccggcgccgttgccggtgcaccgcaagcccgcgcagacgttcgggcagcggacgtcgcagttccgtggcgtcaccaggcacagatggaccgggcggtacgaggctcacctgtgggacaacacttgcaggaaggaaggccagactaggaaagggaggcaaggcggctatgacagggaggagaaggctgcgagggcttatgacctggcagctctcaagtactggggcccctcgactcacataaatttcccgctgagccactacgagaaggagctggaggagatgaagcacatgtcgaggcaggagttcattgcacacctgagaaggcatcaccagcacgggagatggcaggccaggattgggagggtcgctggcaataaggacctgtaccttggcacattcagcacgcaggaggaagcggcggaggcgtacgacatcgcggcgatcaagttccgtggcctcaacgcggtgaccaacttcgacatcagcaagtacgacgtgaagcgcatctgcgccagcacccacctcatcggcggcggcgacgcgtgcaggcgctccccgacgcggccgccggacgcggcgccggcgctcgcaggtggcgccgaccgctcgtcggacgcgccgggcgaccaagccgcgtccgacaactcggacacctccgacggccaccgcggcgcccacctgctgcacggcctccagtacggccaccccatgaaactggaggccggggagggaagcagctggatggcggcggcggcggcagcgcggccggtgcccggcgtgcatcagctaccgatgttcgcgctgtggaacgactgttga

SEQ ID NO: 20092 - DNA, 1506 bp, Zea mays
  Peptide Sequence Number=SeqID_61871
atgggcgaaacaatctcgttcgcccctcggaaggccatcaagtcccaggtcttggcggacttcgtggctgaatgggtcgacaccgagctcccaacagttccgatccagccggaactctggaccatgttcttcgacgagtcgctgatgaagacaggagccggcgcaggcctactcttcatctcgcccctcgggaagcacctacgctacgtgctacgcctccatttcccggcgttcaactatgtggctgagtacgaggctctggtcaacaggttgcagatcgccatcgagctaggggtccgacgcctcgatgctcgcggtgactcacagctcgtcatcgaccaagtcatgaagaactcccactgccacgacccgaagatggaggcctactgcgatgaggttcggcgcctggaagacaagttctacgggctcaagctcaaccacatcgcccggcgctacaacgagactgcggacgagctggctaaaatagcctcggggcgaacaacggttcccccggatgtcttcccccgagacctgcatcaaccctccgtcaagatcgacgacacgcccgagcccgaggcaccctcggcccagcccgaggaacccttggctcagtccgaggcaccctcggcttacccgaggtaccctcggcccccgagggtgaggcactgcgtgtcgaggaggagcgaagcggggtcacgcctaatcgaaactggcagaccccgtacctacaatatctccaccgaggagagctacccctcgaccgagccgaagctcggcggttggcgcgacgcgccaagtcgttcgtcttgctgggggatgggatggagctctaccaccgcagtccctcaggcatcctccagcgatgcatccccatcgccgaaggtcaggagctcctacgagagatacactcggggggcttgcggccatcacgcagcaccccgagcccttgttggaaacgccttccgacaaggtttctactgggcgacggcggtggccgacgccactagaattgtctgcacctgcgaagggtgtcagttctatgcgatgcagacccacctgcccgctcaggctctgcagacgatacccatcacctggccttttgctgtgtggggtctggacctcgttggccccttgcagaaggcacccgggggctacacgcacctgttggtcgccatcgacaaattctccaagtggatcgaggtccgacccctaaacagcatcaggtccgaacaggcggtggcgttcttcaccaacatcatccatcgttttggggtcccgaactccatcatcaccgacaatggcacccagttcaccggcagaaagttcctgtacttctgcgaggatcaccacatctgggtggactgggccgccgtggctcaccccatgacgaatggacaagtagagcgtgccaacggcatgattctacaaggactcaagcctcggatctacaacgacctcaacaagtttggcaagcgatggatgaaggaactcctctcggtggtctag

SEQ ID NO: 20093 - DNA, 1275 bp, Zea mays
  Peptide Sequence Number=SeqID_61872
atgatgaccgaggacgagaaggagaaggccagattgtttctgcctgatttgaggcgaagccccacttctagttcgcggggtccggctgtggaggagatgacttcgaatgaatctgttagcagtaatagcatctcaaactttaaatggggtgcaaccaataggcggtctcggacgcagtttagaggacaaggagacactgagatttcggctccagccttaattggaagctcagacaaagggatttctggcctctctgctggcacctcaaaggagaagaaaggcactgaagaaactcgtagtgcacagaacacaggaggtcctctcagtctcaacatcatcgatggtgttacgtcaggttctccagtacctagtgcagtaacccctaactactcaaaacatgattccacagatttagggcttattagttcttcatcaagtccagtaacaagcgcacaacggccactcccaagctccagcgtaggctcaaactcaagagaatcaaaaaagagggataccgctttgcatccactgattttcaaggaagctggccttccagataatactttgttgacttacaagttgaagaacggagaggtttccccttcggaatttgaaaaacacgctggcatggggaaaagacgacaaccgtatcaaaacatttatacatcacaaggattaacactccatgatgttgctctgcaactgcatcatttgaatttgaattcaaatggatttagcaatgctagtgtttccagcttcagtgactacccaaaccttacttcttcaggttgtggcaaagaaccttctgtcagtggacctattgtccccctgaaacggactttacaagaaagagtggtccaaacagagagttgctatttctgtgggtatggccacacagagcttggaaaaattgatccaaacatgattgtcttctgtaaccagtgtgagagaccatgccacgtgaaatgttacaatagtagagttgtaaaaaagaaggtgcctctggaaattttgaaagactacttgtgttttcacttcttgtgctgccaagaatgtcagtcacttcgtgtccgtctagaaggaatggagaagtgtgaagagattgccttccttggacggataagatccaatatttgttggcggcttttaagtagcgctgacgcaagtagggatgttaaactctacttgtctcaggtcatcgacatcttcaaataccttcttggtgttaatggcgcaaggcaatcagcctccctggctgttagtgtattaatatag

SEQ ID NO: 20094 - DNA, 243 bp, Zea mays
  Peptide Sequence Number=SeqID_61873
atggcgcggttaggggatcgtgcctcggggcggtcgaaatttcttgccgaaccttgccgccgccatagatctgcttcctaccgcagatcattgacacctctcgacgattcacgggcaccgtggaagccaggggacttcctcgtcggcgtgctccgccgtgcaatgggtgcggcggcgccgtcgtgtgtcgatgttgaatggggggcgaaagcctctggctatcgattctctaatgaacggtga

SEQ ID NO: 20095 - DNA, 150 bp, Zea mays
  Peptide Sequence Number=SeqID_61874
atgggcgcgggtctgacggcgcgggtgcacgccatgggcgtggcggttgcggaggaagggtgcgggtctgacgggcagggcccacgagccagcgaaagcgggctcagcatgatgcaacatttcatgactcacatagttttgcaaaaataa

SEQ ID NO: 20096 - DNA, 309 bp, Zea mays
  Peptide Sequence Number=SeqID_61875
atggaattactcagcaagacttacccgactaaagaaaagactctcaaggctatgctggttataagggagtcaagggatttcaaggaaggtaatcaaatccaaggaaggaaactagggtttccggagttggtaaaggaattcaaagggcaggggatttccaatgtttcactgaaaaagaaaaaggaaaagctgaaacagtactgggccgaaagcagcccgagcggcccaggctgcacagaaaagcgcgtgcgcccgagcccgcgctggcagctttgcgaaaaagccctcaacgattccttattccattaa

SEQ ID NO: 20097 - DNA, 147 bp, Zea mays
  Peptide Sequence Number=SeqID_61876
atggcgaacttgaccgccgtcactggtgtggcccctaaaaccacccggggatttgaggtccgagcgtggaattcggtggaactccggtgggtctctggcggagggagcactgcgaccgctggtgtgtatttactaaactatggttag

SEQ ID NO: 20098 - DNA, 1851 bp, Zea mays
  Peptide Sequence Number=SeqID_61877
atgaagacaggagcaggcgcaggcctgttcttcatctcacccctcgggaagcacctactctacgtgctacgcttccattttccggcgtccaacaatgtggctgagtacgaggctctggtcaatgggttgcgcatcgccatcgagctaggggtccgacgcctcgacgctcgcggtgactcgcagctcgtcatcgaccaagtcatgaagaactcccactgccgcgacccgaagatggaagcctactgcgatgaggttcggcgcctggaagacaagttctacgggctcgagctcaaccacgtcgcccggcgctacaacgagactgcggacgagctggctaaaatagcctcggggcgaacaacggttcccccggacgtcttttcccgagacctgcaccaaccctccatcaagatcgacgacacgcccgagcccgaagcaccctcggcccagtccgaggcaccctcggctcagtccgaggcaccctcggcccagccggaggcaccctcggctcggcccgaggcaccctcgggtcggcccgaggtaccctcggcccccgagggtgaggcactgcgcatcgaggaggagtggagcagggtcacgcctaatctaaactggcagaccccgtacctgcagtatctccaccgaggagagctacccctcgaccgagccaaagctcggcggttggcgcggcgcgccaagtcgtttgtcttgctgggagacgggaaggaactctaccaccgcagcccctcaggcatcctccagcgatgcatttccatcgccgaaggccaggagctcctacaagagatacactcgggggcttgcggccatcacgcagcacctcgagcccttgttggaaacgccttccgacaaggtttctactggccgatggcggtggccgacgccacaagaattgtctgcacctgcgaagggtgtcagttctacgcaaggcagacccacctgcccgctcaggccctgcagacgatacccatcacctggccttttgctatgtggggtctggacctcgtcggccccttgcagaaggcacccgggggctacacgcacctgttggtcgccatcgacaaattctccaagtggatcgaggtccgacccctaaacagcatcaggtccgaacaggcggtggcgttcttcaccaacatcatccatcgctttggggtcccgaactccatcatcaccgacaacggcacccagttcaccggcagaaagttcctggacttctgcgaggatcaccacatctgggtggactgggccgccgtggctcaccccatgacaaatgggcaagtagagcgtgccaacggcatgatcctgcaaggactcaagccgcggatctacaacgacctcaacaagttcggcaagcgatggatgaaggaactcccctcggtggtctggagtctgaggacaacgccgagccgagacacgggcttcacgccgttctttctagtctatggggccaaggccatcttgcccacagacttagaatacggttccacaaggacgagggcctacgtcgaccaaagcaatcaagctaatcgggaagactcactggaccagctggaagaggctcgggacatggccttactacactcggcgcggtaccagcagtccctgcgacgctaccacgcccgaggggttcggtcccgagacctccaggtgggcgacctggtgcttcggctacgacaagacgcccgagggcggcacaagctcacgcctccctgggaagggctgttcgtcatcgccaaagttctgaagcccggaacgtacaagctggccaacagtcaaggcgaggtctacagcaacgtttggaacatccaacagctacgtcgcttctacccttaa

SEQ ID NO: 20099 - DNA, 399 bp, Zea mays
  Peptide Sequence Number=SeqID_61878
atggctgatgcccctccagctactgctcgatgctgccctctcgatcccggagtctatcgctgccccctggtttcagccctcaaaccccagcgtcgatctccctgtcttgctgccggttgtgatcataatataatagttatagaggactttctaagatttccagaaagtcctagtttactatttttggatgcctatttttatcagtacaaagacgatatcaagtatgaagaggttagtgcgactgcaattctcttgggtggttcatcagtttccaacaaggattccttttttgattccagcggacttcttcgtgaattcacgcggaagcaagctcttcacttgcaggtggacaccgaggaaatcggagtgcaaagctttgatctttatctgccacggtag

SEQ ID NO: 20100 - DNA, 255 bp, Zea mays
  Peptide Sequence Number=SeqID_61879
atggttcctgagtgtgttgccgaagatcttcctgagcaaaaacctgggggcttcggcttcgagatgaaggtcttctcttacggcaaagacatacgatgtgaagatgcagcccgaaggatgaccaatgtcgaaggccccaacacagggagcttcgtcaagaaagttcaatcagtgatgatgaatagtatgatgactatcatcatggaacatgctcatgacaaagttgaacctgatacggagaagtatatcggaccg

SEQ ID NO: 20101 - DNA, 1365 bp, Zea mays
  Peptide Sequence Number=SeqID_61880
atgaagaaagatgatgacctcgagtcggcgctgctggccgccaaagagcccgcgccggcgcccgccaagggctacgcgtacgcgctcacctgcgcgctcctggcttccctcacctccatcatctacggctacaaccgcggggtgatgagcggggcgcagaagttcgtgcaggccgacctcggcgtcacggacgcgcagctggaggtgctcatcggcgccaccagcgtctactccctcgtcggctcgctggcggcgggctgggcgtgcgaccgcgcgggccggcgccgcaccatcgcgctgtcggcggccttgttcctcgccggctcagccgtcaccgccgccgccgacggctacgccgcgctcatggcgggccagttcgtcgccggcgtggcctgcggattcggcctcgtcgtcgctcccgtctacatcgcggagatctcgccggccaacgctcggggcttcctctcctccatccccgagatcgccggcaactcgggcatcctgctgagctacatcgccgacttcgcgctcgccggcctcccgacgccactcaactggcgcctgatgatcggcatcggcgccgtccctcctctattcctagcggccgcggccgcgcttgccatgccggagaccccgcgctggctcgtcctccacggccaccgcgacgaggcgcgccgcgtgctggagcgcacggtgggggacgcggaccgccggctccaggagatcttgacgtccgtgcaggaggccacgaagcaggcgggctccggcggcggcgacgcgccgtcgtcggcgagcgtgcggcgcgagatcctgctccggccgacgcccgccgtccgccgcgtgatgctggccatcctggggctgcaggtgttccagcaggcgtgcggcgtggcggccatggtgctgtacgccccgcgcgtgttcagccacgtcgggatcacctccgagcgcgacgtgctcggcgccaccgtcctcctcggcgccgccaagacggtggcgatcgtcgtccctctgttcctcgccgacagcctcgggccgccggcccatgctgctcaccagcgcgggcggcatggccgcgtcgcttctggtcctcggcctgtccatacgcgcgacgtcggccgcgacgggactggcgtcgggacggcggtcaaccgggtgatgagcgccatcgtggggatgaccttcatcccgatgtacgaggcggtgggcatggccgggaccttctacatcttcgcggcgatgtccgcggcggcgtgggtgttcgtctacgcgtgcctgcctgagaccaaggggaggagcctcgaggagatggaggcactcttcgacgccggtgctgcgccgtcgccacgggcggcgttgtcgtga

SEQ ID NO: 20102 - DNA, 150 bp, Zea mays
  Peptide Sequence Number=SeqID_61881
atggagctggcagatgacgatggtgttgcagcgaagcgaacaagccctaaggcatctaggagccgttggaggtcaacaaggaaggctatccttgccttctgtcgggtggcgcactggacagtctggtccgccaacggacagtcactgtag

SEQ ID NO: 20103 - DNA, 438 bp, Zea mays
  Peptide Sequence Number=SeqID_61882
atggccacctggatagatggttatcatgccttatgcaagtgtgggcttttacttgagtaccaggccatttctgaaaggataggcaaaaccgtggaatcgagtcgttctacaactacagtggaagctcgcaccggtgttaggctcatagatgtggaaatgtatatggcaggtcacaagggttctgatccccagaatggcaatgtgttgtgcactcaaatgaccatcaaccatctggcattatatggtgagcagaagattgaatgccatgaccaagactgtgattggaggagccaaccaattgaatctgaggcaacctatgtttgtacaggagaacaatcccatgcacttgaggcatcgaggtcgagcatctatatcatcattgttgcaaacatcgggttctcgttctcacacctccgcataggatgtggacattactag

SEQ ID NO: 20104 - DNA, 321 bp, Zea mays
  Peptide Sequence Number=SeqID_61883
atggcagcatttaacgaagacctacgtcgactcttcacctgtgtctgctttggtttccttcgatccatcctcacagaccaccgcacaaaggatttgagcgcgcaggaggactacaataggatggcagagatgcttgaggatgtacgacttgagcttctacccgacgattttgaggttccacatacgctagaggttctgaagtttttcaagcttgttaaggctttgaaagagaaaatcaatgagcacatgaaagcgaccacccttgtttttgtgactcgacttatggctattacgtccaagtttgcattctcgaacaactga

SEQ ID NO: 20105 - DNA, 594 bp, Zea mays
  Peptide Sequence Number=SeqID_61884
atggctgaactcccacaatcacaacttcgacccacaccaatgtctggcatcggtgatccttcttggatgtttgatcatagcactatggactcccaagatgggtacttcacttctttattgaaccatgaaggtgcagatggatttggccctgatgattgtttggaagttggcaatgcattaacagagttaccgatggcgaatgaaatgaactcacaaccgattaagaggggcagatccaagaattttagtgaagaggaggacctaatgttggtttcggtatatctgaatcttgctgatgcgaaagtagaatttcgagaaaaacaacaagggaagacattttttgtcttccatgtgtggatgattcttaggcatgagccgaagtggaaattcagagaatcaaagctcaaagaccaccatgaagccaacaatggtaatagtgatgctcctgtcaatattgaaagaccaccggggagaaaatctgagaaggaaaaagcacgcgtgagaaagaatggtgcctgtgatattgatggtgatagtttatttgatgaagtcaaaaagatgcgagaagcacgagaagagacagagagacactga

SEQ ID NO: 20106 - DNA, 909 bp, Zea mays
  Peptide Sequence Number=SeqID_61885
atggaggcgagcgggtcttgcggctgtgccggattcaccgacggcgtgattgaggcatgcggctacccgcgctccgagtttcgggacgtgcgtggcgagatcgtcgtgctgctccgcggcgccacggatgacagcgtggccgagcagctctgtgccgcgctcgacgacgtcatggtcgaatccctcaagacgctgctggtcgcgcccgtcccgcacgacctgctagcgtccacagacctggcaaggaccgtcggcgccctcggcaaccacgggtcgttccggatccggagcctcgcgcgcgacgtcgtgcgcgggtggagggtggccatcgaagcctcccgcaccactgctgtagcggtgaagaagaagctcgacagtctctgtgctaataagatcccgctcccgcgcgctgccgtcgacgagaagaagatgcttcccgctgctgctgaggtacacaacaagaacccgcacgtaccaccagcaaagacgcttcctgccgccgccgccgaggtgcacagcaagaggctacaagtaccaccagcaaagatgcttcccaccgccgaggaacacaagaagcagcattatgtaccaccaacgaagacgcttccgaccgcagcaattttatcgaaccaccggaagaacatgagtgagaccaagaagtcgtccgtcgccgacaatgagaagatggtggctacaaaacgcaagctacgggagggttaccaaaaagccgatggagtcaagcgtcggcgcagcatccagaccatcaaggaggaggaggggaagctgttggagcagaagcaatgcaagaagcatgcgtcccatcgtatggagagaggcacagtaggatgtaggactaggacctcgtcaggcgtcaatcgttctaggcctcctccttctcacgtgctttag

SEQ ID NO: 20107 - DNA, 183 bp, Zea mays
  Peptide Sequence Number=SeqID_61886
atgagcatgatgatgccatttgaccaaaaaggtttctccttgttcgcccccggtccgagcgtggccgtcggggtcggcggtgtcttcgacacgctcgtcctcttcgtggcgctgggcgccattgtcggagctgtaaggcgattcctcaactggaacaacgatgactacgactactactactaa

SEQ ID NO: 20108 - DNA, 933 bp, Zea mays
  Peptide Sequence Number=SeqID_61887
atggccaacgagcagagcgggcttcccctgcggaggtggaagcctttctacagcgctttccaggcgatcgacggcgcgatcgaggcatgcggctacccgcgcgccgagtatcgtgacgtgcgtggcgagatcgtcgtgctgctccgcggcgccacggatgacggcgtggccgagcagctctgcgccgtgctcgacgacgtcatggtcgaatccctcaagacgctgctggtcgcgcccgtcccgcacgacctgctggcgtccaccgagctggcgaggaccgtcggcgccctcgggagccacgggtcgtcccggatccggagcctcgcgcgcgacgtcgtgcgcgggtggagggtagccgtcgaagcctccttcgccactgctgtagcggtgaagaagaaactcgacaatctctctgctgatcagatcccgctcccgcgcgctgccgtcgacaaggtgcacgtaccgtctgccaagatgcttcccgctgctgctgaggtacacaacaagaagccggacataccaccagcaaagatgatttccatcgctaccgctgtcgaggtacacaacaagaaggcgcacgtaccaccagcaacgacgcttcccaccgccgaggaacacaagaagcaccattatgttccgccaacgaagacgcttcctcccgcagcaattctatcgaatcaacagaagaacataagtgagaccaagaagccggccgtcgccgagagcgagaagatggaggctacaaaacgcaagctacgagagagttaccaagaagccgatggagtcaagcgtcggcacagcatccataccatcagggaggaagaggggaagctgctggaggaggagcaatggaagatgcatgcgtcccatcgtgcgataggatgtaggacctcgtcaggcgtcaggtgttctcggcctcctcgcgtgctatag

SEQ ID NO: 20109 - DNA, 603 bp, Zea mays
  Peptide Sequence Number=SeqID_61888
atgttctcattcagagtaaaggcaatatatgacgtgtcaaacgacccagtcgtttactttcgtctagctcgaatgcatggaactgcatccttcgatgcattgattgtctatggaaaggggaagatctcagttctatatccaaacaagactaccacccccaagtcagttaaagaccttgaatttgatggtttctccttgactactgaccttcgtgagaatttgcaggacggacctttcaattttgttttgcttgatggcacctggagcaattctgctgcactgtacagaaggttgaaggagagatggactgcagtatggggagatgaagctctaccttgtattgcactatctacacttagtgcctcagtgatgcataaactacgaccgcagcctgcctgggatcgtacctgcactgcagcagctgcagctggcctcctctgggagttgagctcgcggcctgagctcatctcatttgggttggaaaagcaagccgaggcggtggagtgctcgttagacaacttgctggatgctctcactgccaggcggcttcgtctgggccgatcgataactcggaaacagagacatagtaggaactgcatatag

SEQ ID NO: 20110 - DNA, 741 bp, Zea mays
  Peptide Sequence Number=SeqID_61889
atgaggctctgtctccggcaagcggcggccaccagctcacccctcgcagctaccctccgcggcaaggtaacctcacacctcgatcgccgccagcctcctctctcccatccgttcttcctcttgccggcctccgccactgacctgcctgcctgcttgcccgcgaagacttctacgagcaccctcgccccccatggccggctcagcttcagccacaccacgtcgctgcagacggcgcccgggcaccgcgggctccgagcagggtgggcggtgcgcgtgctcccgctgacggaggagaacgtggagaaggtgctggacgaggtgcggccgagcctgatggcggacggcggcaacgtggcgctgcacgagatcgacggcctcgtcgtcgtgctcaagctgcagggcgcgtgcggctcctgccccagctccaccatgacgctcaagatgggcatcgagacgcgcctccgcgacaagatccccgacatcctcgaggtcgagcagatcgtcgacaccgagaccggcctcgacctcaccgccgacaacgtcgacaaggtgcttgatgagatcagaccgtacctctccggcactggaggtggaagcctcgagcttctccagattgacggatacgtcgtcaagatccggatcggcggacctgcagccggtgtaatgacagtacgagtagccgtgacacagaaactgagggagaaaataccttccatcttggctgttcagctcacagaatag

SEQ ID NO: 20111 - DNA, 186 bp, Zea mays
  Peptide Sequence Number=SeqID_61890
atgacgggacgatacaccataccgggtgtatgcctacgctcgcaggaagttgacgcaagcctcgtgatggaagatgaagctgcacaacacatgaccctgaaccatgccacaagtctaccctatgggacctgtcaattaccactacgtcggcgtcgggctcgctgccggaacccacatactggaaag

SEQ ID NO: 20112 - DNA, 495 bp, Zea mays
  Peptide Sequence Number=SeqID_61891
atgagttcatccaaggctatagaaataatcttttttcgactgaaggggtatactaaagatgaatggagaactggcttgaaagctcttcgagctgacagtattagtaaactgaagaaagcatttccagaactggtccaggaggtttcaaggccatccaatttccaggatttctacatatatgcatttcgttattgcctcacagaggaagtagaaatgtatagaaataccagctgctttcgttattgcctcacagtctcacagacccggtcgcccgcgccgttcgtcgcagatcacggcaccacgcacgcccgacagccgacgaccgtcctcgcgcgcggacgccggcgcgctgccgttggcagccgcgtcgcagccgagatctgcatcgcggtctggggctgtgtcgcaatcgagctccacgcgaagcgccgggcgggcgcaacccacgcgccgtcacgcgatgtcgctggctgtcgtggctccgtcgtgagctga

SEQ ID NO: 20113 - DNA, 507 bp, Zea mays
  Peptide Sequence Number=SeqID_61892
atgacgatgttgctggttccgcagacgttgatgctgagtaacgaaaaagagcgattgacaaaaacaagtacctctggatttcaacgctacgtagcttgccttaagcagctacatcattccaggacaaaagaaaaacatttgcaccaagagttgcaatacaataccatgaaagaaatgtgcttttggacacgagcaccaccagctatggaggcccgcttttggaaactgaggatcgcttttgggaactatcccagttcatctaggttgctgttagaacttcccccctactgtgtagggcgtatggtgtgcttcacctatgcagttcagcagcgtgcttcccctagagggaaactccggacgactacaacgatcgccctaggcacaatcatttccgactatttcttccttcgacttgaactggtacctgttcgacatcctacttctcaaggcttcataaacttctatcagtctgctgaggatttcagtgcttcattaaggtacctttga

SEQ ID NO: 20114 - DNA, 594 bp, Zea mays
  Peptide Sequence Number=SeqID_61893
atggcgcggggcggccctgactccgcgccgccgtcgcgtcctcgtcctccctcccgcacatcggccacctccacggcctcctccctgctccaccgactcgccgcgctcccgctcccgcccgcccgcgcgcacgccgctacgccgtcgccgtattcttctctcctcgccgccgcgctgctccgcttcgcgcacctcactcagccgcgcctggagaccgtccgcctcttcacctgcgtccgccacggccggtgtcgctcctccgataagcatcggtttgttgagaactcgttgatcggtgcgtacgtcgcgtgcggcgatgttggtgccgcgggtaaggtgtttcacgaaatgacggtgaaggatgtcatttcgtgtacaagcattgtggcagcgtattctaggagccgtgatatgggttcagctgaggagatggaggtggccggcatgcccattgatgaagcttcactcaccggtgcaatctgctcagctcggtgcgttgtttataacgtaagtgaggaagagaaagaaaggttgtcaatgggtcatagtgagaagcttgctctgtcatttggatttgctcaaactcgagtctag

SEQ ID NO: 20115 - DNA, 534 bp, Zea mays
  Peptide Sequence Number=SeqID_61894
atggacgagcagtgcaaacaggacagcaaggactcgattcggagaacaatcgtggagcatgataaggtcttcaggcagcaggtgcatgagctgcatcgtttgtaccatgtacaaaaaacattgatggctgaatgcgatagccataggtatcaaccgagagcagaaggaactcatgaagtggtgcagggatcaaggtcgaacctcaagtgcagtccttctacctcagggacaaaccaatctgctctccttggtaatgcacaatacccagctccgcagcaagtacaagaagatttgagtctccatgaatgcaagccggtgaactgcctcagcctcttcggtgaagaaaactcagcagccaaagaaaggtttcacggggagaaccataaatcagttgaagatgaaagctggagcgccgctgtagagagtgatcttgacctcaaactgagcatcggccccagctcacattcaccagaaacaccgcgctggctattctcaggaagcagggaaagaaacccttctggccagcatcgatga

SEQ ID NO: 20116 - DNA, 195 bp, Zea mays
  Peptide Sequence Number=SeqID_61895
atgactgcagatgacatagaacacaatgacagaggaccagtatttgacaagacaccatcttctcatgttgcatctcaagatgaaacactcaagtgcacaaaacgatttggaactgctccactccttacagagctcgactgtgttcgttctttgtgggatctattgtgttccaaggacattgacccaagcaaataa

SEQ ID NO: 20117 - DNA, 621 bp, Zea mays
  Peptide Sequence Number=SeqID_61896
atggagagtggggagcaaccacactccagaccttcaccagagctctgccagaacatcagcaacaggcaacagcaccgtctcgggatcaagggcgttcactgtgtgttcatatgtttgcaactttcttttggtaaagttcatggatcggagtacagttttggagcacatgatcacccatcgagtggagtttttgaggtggaaccaaagagctgcccagggttcatatacagatgtacggttttcataggccacacaactctgaattccttggaatttcgagaattcattcagaggatggcctcagaataccatggagatacctaccacctcatttccaagaactgtaaccactttacagatgatcttagcaccagattaacaggaaaatcaattcctggttgggtcaatcgacttgcaaggctagtggtggtttttttggcgccttttgcaattgccttctaccagaaggcttgcggcttgagtcaactgaaacaaagcatcttggagactgtcgtttctcagatggttccaataccaccagcaacgataactctgacgaagatgaattggaagataaacacctgcttccgactacttctgttggtgaagacacaattgtaa

SEQ ID NO: 20118 - DNA, 447 bp, Zea mays
  Peptide Sequence Number=SeqID_61897
ctccactccctcatctgcattggccacgtggcctccaacgctcatgtctccgccagcctcgtcctacactgcacatgggaacatgtcgatacgcgcaacgtgttccacgagatggttgtggagggcatcgagcctgacggtgtgacattactgctggttctggcggcatgtgggaatccagatgctatgctaccgcgaccgcgtcagtatggcctcaacgtgccgggcttggcgaccgctgggctcatcattttgcctgtggagcacgctcgacctccgcgcacactgctacgactgggaggtggcgtctggtgtcgtcacttgcctcctagtgtgggagcctgcgtcggctatgcctgcgcggtcacgaggcagcaaaagccgtcctgggccttcgagtgcgcgttctccacaaggtggtggctgaaggctaccgctgccacatag

SEQ ID NO: 20119 - DNA, 288 bp, Zea mays
  Peptide Sequence Number=SeqID_61898
atgacgatgttggtagactacacaacgggtctcctccagcagctgggatgccctatggtggtggaggggacatctctagctgaggtgcaggggaaggcggcctctcagactccacctcccgctcaggcgagggggaagagtcctgcggcccctgctcctgctcctggggttggcgctcctgctcctcgtgcaggcgacgatgtagtctctccaggtgactggactgacctggcaccgtgtgacgtagtggacgctccgccaggcgagaaggcaaaaaggggatcatag

SEQ ID NO: 20120 - DNA, 198 bp, Zea mays
  Peptide Sequence Number=SeqID_61899
atggctgatcttaaatgctccaccgatgggaaccttcccaacgaggaagagataggggctcaggccgagcgctacagttgctgtactaggaaggcacaacggccagatgtgcttcagaacacaaactccacgcgtgatcaagggcacagcacaacagtgaacgtcggtggtgtccggacaggaaacaagcagacatga

SEQ ID NO: 20121 - DNA, 765 bp, Zea mays
  Peptide Sequence Number=SeqID_61900
atgaccagggcgaagtggagagcggaggacgtcgcatgccgacggttggtcggagaaacgtggcacgacggcgcaacaccgccgtcggccctcaccggtgagcacgcaaaggtgaggaaggaacgggggagagagaagaaagaaaagggctacaggcggcagtggcgagaatggagcgagaacacagcgaggctccaggcagcagtggcgagaatggagcgagaagacagcgaggctccaggcttcacgcgagtaaagggtgttcgttgtgggtcctccggtggtcggtggctttgcatgcacgggcgcacggcactggcgcgacaacgacgattttggcgagggcgggtgagcaaggagagacagagtggcagacacatacgacctgggagaggacagaggagggcgagtgggggcagaaataggcgcgttgggggttcaaaagggccgaccgcagggtggttgacagcttcagtgcgtgacatcgtggcgggagcagaggttggttgggggagggggatggcatgtggggccgtggcggatttgaaacggccgtgtccagctgacgggtggccccccacgggtgaccttgcgggcggcgtttgtggctgcagggtgacttctagtgcacggggcacactgattcagggtgttacacgcacagaggaatctgctcctaccatatgtcgtgtattgttcgaccctaggtcgcagaccgtccgtgcctccacagagagcaccgttggtacacctcatagtgattga

SEQ ID NO: 20122 - DNA, 645 bp, Zea mays
  Peptide Sequence Number=SeqID_61901
atggtggaagactttatctgtcgcattgaaagatctaaacaaccgaaggaaggagttgaaataaactccaaggtgtggctaactccaacgagaactaggcaagcatttcaggcttggccgaacctcgggataaatccatggtacacgcacttctgcgtgtgcgtctccacgaacgtaatcagagggcgtgcccctattaatgcatttgccatcctcgtcgtcaatacatcttccggagggagatggatcccgtcgcagaccctgtcggtgagtccagttcccctacctgaactctacactcacaacgtgcctagtagacagggcctcggtgtcaggattggttgtttctcggaggcgtcacacccgcaacccattggtgttttttataggcgaagtgctcgacgaaaagccgtagatgatgcaagcatcgatgacgtggtgtgctcatcactgtgggcgttcattctagtggacatcctgggcgtcgtactccgcttcgtgccctgcctccccaaccgcgccgccgcgcaggagcggcacaacctaccaccgccgctaccactacttgtgctctccaggttcagcaacggctaccttcacctagggctgacctggcatcgacgtggtggtgacgcgaccttgtag

SEQ ID NO: 20123 - DNA, 138 bp, Zea mays
  Peptide Sequence Number=SeqID_61902
atgggcatcgactatgaaagggacatggaccagttgagagcagaggactatgagcacggttcaacggcttcgtacaataccgacaaagttaccatgtgcctctcatttttatgtcagatgcaagcacctggatactga

SEQ ID NO: 20124 - DNA, 408 bp, Zea mays
  Peptide Sequence Number=SeqID_61903
atggcgacggtgaactgcctctacgtcgcggccgcctccacggcggtaagcaccgctgctctgcagtggtgggcgtcctcgctcctcgacggcgacgctggggccggcggggatggagactggcttggagccgtgctgcggtcaagggtcaccgtcgcgctcctggcgaatctggcggcccacgtgttcgtcgttgtcatcctcgcgctcaagactatattttttgttcagctaacttctgtagagaccagaaaagtgttggagcacatcattaactatgtacttcacaaggtagcacttcaatgtagtgccctaatgagtagagggcagtctgtggtgtcaaactggagcagtggagcttcatacctgcaaggcagcctccttaatgctgcaggcctcgtcccttag

SEQ ID NO: 20125 - DNA, 426 bp, Zea mays
  Peptide Sequence Number=SeqID_61904
atggaagtggacgacggtagccgcgccaccccgccactggacgccgtggccgccgccttcaagtcccaagtcatggagttgcaggacctcgtcctcgcccgcagcatgttcccggccacggcgctgcccgacctcgccaacgtggacgcgttggtgacggcgatggagtcgcaggtggaaaccatcagccgccgccttcaggaggagcttgacgccatccctaaggccaagttgttggcgaaaattgaggaagggaacaaagagacacatccgagaatggaggtgacgcagacggcgattggcaacatggaatccacggtgaagagcgtgatgggggaacaagtggagttccagaggtggcgacccgaagtggagaccagggtgacagagatcgccgaggcgctccaagccatccagccaaggtga

SEQ ID NO: 20126 - DNA, 438 bp, Zea mays
  Peptide Sequence Number=SeqID_61905
atgtcatggcagccaagtaaaaagtgtccaaggggcaaccctaactctacttcaggagcaggagcagctcaccaagcggaccaagcctgccctggaagttgcagcaaacggggagcacaacaacatggggcagctgccaggcgtgccacatcggaccttggcgggtcttggcacttctggctgcgagccaggccagcccagggcgcatggagcaagaagctagtccagcggtccttgaaggaggaagagaagctgcagcatatgcttgcgaacttaccttctggaatgcgcaagaatgattttgctaatcagcacgaacagagctcatcaaggatgctgcctcattttaactcttcttttactgaagctaatgaatgtgaactgaagattaaggatgaaccagttgcagctcctaggaaagggcatgcttccagatga

SEQ ID NO: 20127 - DNA, 291 bp, Zea mays
  Peptide Sequence Number=SeqID_61906
atgggcttgttaatgggttcaaatggaaacccaatggtgagtataggaaatccgttgggtatccgaaacctgcatgtgcatgggtttgggcaaaaatttataccccgtcatggggaacacagcgcaacggagggaaaaccgtgggaggaaaaagcagcaggaaaggctgcctgttttggcgccagatacagagagacagtgacaaaaggaaccaacggacagggtaaaaagcaccaaatacagagagacagcgacgaagggaaccaactaacggacaaggcaaaaagctga

SEQ ID NO: 20128 - DNA, 456 bp, Zea mays
  Peptide Sequence Number=SeqID_61907
atggcagtggtctcttttaatgctgaaaagaatgcaactcaggttgatattgttgtaccaaatgatacattgagtaatgcacaattaaagaaaaaagaggtccgcataagaagttcaaaagagacaaaaatttgggtgggaaggaaagcacaaggggaggaaaaaaggacaaagcaaaaatatattgcatgtacaagcaccgaagcctacgggagccacaggactggagaaagaaataaggaaaaagtgggccgaattggttctgttgggctgctccatacgtggtgtagagctagaaaaaaaaggtgctccaaactccatgctcaaaatgaactagagctgcaccaactttatggagttaggctaccaaaaaatgtggagttcgagtgtttaactggctccgctcaaatccgcatgaagtttggagttggagccatgttagacatgtccttatag

SEQ ID NO: 20129 - DNA, 366 bp, Zea mays
  Peptide Sequence Number=SeqID_61908
atgacgcaagctgcagatgacgggtcgatggaaagggcgccattccgcgacagccccggccaacctcgctcccactctgccacgagtcgatggaagggcgcggatgcccccgcagccgccctcaccccacgatcctcgccccgcgctcgctatccgtggatggaaacggcgccattccaggatgcccccgcgccaacccccgccatcctcgctcccactctgctctccatagatggaagggcgtggatgcccccgcagctgccccaccccacggtcctcgcccgcgatagccccgtgatgctcgcccctgacgcccttccatctttggagaggagcgctggtgccgcgcgtgacgcagggccgtga

SEQ ID NO: 20130 - DNA, 363 bp, Zea mays
  Peptide Sequence Number=SeqID_61909
atgggatggggggcggctgtggggggcatccacgcccttccatctatggagagcagagtgagagccaagggtggcgggggttggcgcgggggcatcctggaatggcgccctttccatccacggatagcgagcgcggggcgaggatcgtggggtgagggcgactgcgggggcatccgcgcccttccatcgatgggtcgcagagtgggagcgaggttggccggggctgtcgcggaatggcgccctttccatcgacggatagcgaagatggttgcgcagactgttggtaactcagtatccgagtttctgtcgggcttcagcgatgggaagacagactcggcagcgagagtttccctcgctaattaa

SEQ ID NO: 20131 - DNA, 219 bp, Zea mays
  Peptide Sequence Number=SeqID_61910
atgacgaagatattgttaaatcacgtttttgaggaccttcggaggacgaaggcccccaacagtaataatagcaagtgcatctacaccttcatcccgttagctgaaaggactacaagacctcacttttgtgtcttggtgactacaaacagcggcgactcctgtgcaaacgtcaagcgtctcgaggaagaaacggcggcgaagatcgagcaactcacctag

SEQ ID NO: 20132 - DNA, 192 bp, Zea mays
  Peptide Sequence Number=SeqID_61911
atggacgagtctggtatgaaaaaggagatcggtgcagctgaacttttgccgccacctgagccttatgaccccgaggctgacctagccttgaaagcggcattggagacaataaggattgctgaagaagtcgttgacgaagctgtcaacaaactactgaacgaagctgctgaaaagattttaaaagaggattga

SEQ ID NO: 20133 - DNA, 591 bp, Zea mays
  Peptide Sequence Number=SeqID_61912
atgaccccgccttgcccgagctcagctttggtaacctactccaccgcaaatcccacaggtggccactccaccaactatggcacacgtcagggaaggctcgaccatcgcctcggaaagactttcgccttgcccaagctgggctctgacctcgataatcgcaacaaaggaatcacaacatcactcgacatagggaacatggtgcacttcgtaagtaggcttttacccatgccgaagccctattacaacaactacagggtgggcgacccctcccctggggctcgggcgtacgaccaaccccttggcctcaccctcggctctcaacaggaaatcagcaagcgcaagtcaacaacgcactttcacttctcggttgagttgcatccgagtcttcatgtcataatccactatgcgcatgaagtgttaggagagcaggattctagaaccgtcatttgcatctgtgacacctactcaggcgtgcaaatggttcataagatcaaccaatatgcttctaagtcagaaattaactcaaaaattagtctatttgtggcaaaacttggaaaagaggaaatagcaatagctcaacactttggataa

SEQ ID NO: 20134 - DNA, 1914 bp, Zea mays
  Peptide Sequence Number=SeqID_61913
atggagcccaaatgtggctttttgcaaataggcccaaaacttagggtttcatttgcaaatcttcaaatatgtgaaccatatgacctaagggacattcaatcctacatctcgcgggcgttcctctacttcgctccactgagcaagaaggtgttcattctcgtagacaaccagccttggctgacgacgaagcagtctcgatccgcgaggctgtggcagttcatggtcaccaagtacaggatgtctccttttgcgaattcgcggtcgctgcttcatcatcacaagcagcaggctgcggctgaggaggccgccgccgccgccgcagcagcagcagcagcagccaggggtgaagagagctccgacacgatgcggcggtggttcgcggtggcggcggacctgagcagggcgctgcacgggttcctggtgttcgaggtgtcgtggcgcgacgtgcacggcatcaactacctgaacgagctgctgagcgacacgtccctggcgctggaggcgcggtacatgaagaagtgggagttctacagcgcggagcaggcggccggctgcacgcacctgtggttcctgggccgcgcctccgaggcgcgggctctgaggggctacctctccgcgctgcacacgcactcggacccaagcgagcagctggaggagtgcagcagcgcgctgcgccggacgtgctcctcctcctcgctcacggccgtctccgaggacgaggacgaggacgacgacgagctggacggtcgatctgcagacggcatcttgatgagctccccgtccccgactaggagcaggagcagcagcagcaggtgggcgcgcgcggcggcggcggcggaggtcccgttcgtggcccctgcgcagtacagcgacacgctgatcctgttccggttcagggacagccagctgccgctgaagctgcggcagatcatcatgtcggacatcaggctgctgacgctgctggagtcgggcctgccgtcgtgggtcatcttcttccagtcgtacccagtgctgtgccagctgtaccggccgtggatgcggccgctggcgcggagcctgtacctgctggcgtcgctggtgacggtgctgatcggcttctacgacctgtacaagaacgtgccgctgctcaagtcggcggcggcgcgcatctgcgggccgctgttcgggtggatcgagacgtgggacatggtgaccaggatccagtacctgggcaccatcctgttcctgcgcaacctgcgcaagtgcctgcagagcctcgtggcgctgctgcgggcggcgcgcgcggtggtacgcacggtggcggcgccggtggccgaggcggcggggcccctggtggcctcctgtggcgaggtgtgggacctggtgggcgagggcctgctggcgccggcgtgggcactggcggtggacctggcggaggtggtgtgggcgcccttcgacctggtgctggacagcgtgggtggctgcctgtggccgctgctgcaggtggcgctgctgccggtgagaggggcggcggcgctggcgggctgcgcggggtcgctgctgtcggcaacctacaacttcggcaaggacatatgggagaccatgagcagcatattcgagctgaaccacatgtcggaggcgcagcagagtgccttcgacatgtcgcagataaagacgctatggaacgatctattctcacagatcttccgcgccatcaggggcatactcaatggcatcttggtgttctttgcatcctgcaacaggcacaggctcagcatctacaaccatgcgcagtctaggttccgccatatgcttcgcgtcgctaggctgcatcaggcgccgccgcattcgtcgtcgtgtcgttgcaagccgcagaagcccaaacgccgtgcttcggatgatgatgcagtggcggaatgtgacaggtgcaagtga

SEQ ID NO: 20135 - DNA, 309 bp, Zea mays
  Peptide Sequence Number=SeqID_61914
atggccatgatgggttcaacatcggaaaagatgtacctctgccaggtgaggaagcagcaaacgtttgctgcatttgttcaaaggtggtgcccaaagaagaaaaccaggagtgaagcttcgggaggaaaggatcctccgttaaaacttttgtttcatgtttatcgggaggggtttttgcctcctagtaatgtaagttattgtaattgcttccgcattttcgtacctccgatgtattgtaatgtatgtgtgacgggtgatacactcttgggcaagggttgtctaaggtccgttggacaaggacaactgtag

SEQ ID NO: 20136 - DNA, 261 bp, Zea mays
  Peptide Sequence Number=SeqID_61915
atggcttggcatgagtactggcgtctgatggatggagcagggaggtgcgccagggagatggtcgacgtaggcgctgggcgtggcttcatgctgaggacgagcagaaaaggatcacgacgagaggaacgatggccggagccgtacgtggagctcacgacaaacaccatggaagataaagacagcatccgagacctcgacgaccgccgggctccagcgagggtggagcccaaccaaggactgcgacactctgagcagagatag

SEQ ID NO: 20137 - DNA, 302 bp, Zea mays
  Peptide Sequence Number=SeqID_61916
atgcccgccgtcttggttcccggctgctgtcccgccgctacggcggcgaacgaagtcgtcgaggacgtattgggcctggtgcgcgtcctcggcgacggcaccgtcgtccggtcggcggtcggcccagtgttcagcccagcgaccagcttccctgagaaccacccgtgcgtggaatggaaggaggcagtgtacgataagcccaacaacctcctcgtccgcatgtacttttcgtcgccgccggccgccggcgggaaggcgccggtgctcgtccactttcagggcggcgggttctgcatcgggtc

SEQ ID NO: 20138 - DNA, 2816 bp, Zea mays
  Peptide Sequence Number=SeqID_61917
aaacacaacatcagttctctgctcgagaaagtgattggggtttcacttcatttatgccgttgggtgaactctacaaccacagtagaggttatcttgtaaatgatacttgtatagtggaagctgaagttgctgtatgtaaagttgttgactattggagttatgactctaaaaaggaaactggctatgttggtcttaaaaatcaaggtgctacctgctatatgaattctcttcttcagacgctgtaccacatcccatatttcagaaagatgcagctaactacagatatttcttgccaggctgtttatcacatgcccaccactgagaatgatatgccctcaggaagcatccctttagctctacagtcactcttctataagttgcagtataatgacagcagtgtctctacaaaggagctcacaaaatcattcgggtgggacatgcatgattcatttatgcaacatgatgttcaagaattgaacagagttctttctgagaagttggaagataagatgaagggaactgttgtagagggcacaatacaacaattgtttgaagggcaccacatgaactacattgagtgcatcaatgtagatttcaaatcaacaagaaaggaatccttctatggcaattgtaattctaatgcagatctccagcttgatgtcaaaggttgtcaggatgtctacgcttcatttgacaagtacgtagaagtggagcaattggaaggtgacaacaagtatcatgccgataagcatggtctgcaggatgcaaagaaaggagttctttttatcgacttccctcctgttctgcagcttcagctaaaacgttttgaatatgatttcatgcgtgacacgatggtgaagcatgtcaaggtacttaccatccattgtgaaccacagataaatgatcgctatgaattcccacttcaattggaccttgatagagatgatggaaaatatttatctcctgatgctgacaggaatgtgcgtaacctttatacccttcacagttcatttgttcacttcaagtatttactggagcgaaaaattcccaggttcaagtttgatgatgagcgtgtgacaaaagaagatgcaaagagggcactggaagaacaatatggtggtgaggaggagctacctcagacaaatcctggcttgaacaacactcccttcaagtttactaaatattcaaatgcatacatgcttgtgtacattcgtgaaagcgacaaggacaaaattatttgtaatgtggatgagaaagatatagcagagcatcttcggattagattggaaaaggaccgtgaagagaaggaacgtcggaagaaggaaaaagctgaggcacacctctataccataatcaaggttgcaagggatgatgacttaaaaactcagatagggaaagacatatattttgatcttgttgaccatgataaagtcccaagcttccgtatccaaaagcagatggcctttgctcaattcaaggaggaggtagcaaaagagtttggtattcccacacagttccaacgattttggctgtgggccaagcgacaaaaccatacttaccgacctaacaggccattgtgtcctcaagacgaagcgcatactagggtgttcagctgcaagccaaaatttgccactcctctgttaggcaactttgatcatagtagtaaggaccttaaacctcttcctcttccagacaagactagagaagatatatttcttctcttcaaactctatgaacctgaaaaggaacagctacggtatgttggtaggctctttgtaaaggcttcaggaagaccacaggacattctgccgaagctaaagatgttggcaggtttttcacaagatgatgatattgaactttatgaggaaattaagttcgaacccaatgtgatgtgtgaatacattgataacaggcttctgttccgatcttgccagcttgaagatggggacataatctgttttcaaaaatcttcaaaggcagatagtgctgaccgatatcgatttcctgacgtaccatcctttttgacgtatatacgtaaccgacaggtggtccactttcgttcactggagaagcccaaggaggacgattttttcctcgagatgtcaaagattttcacatatgatcaagtcgtggaaaaagtagctgaaaaacttggcgtggatgacccatcgaaaattcggcttacatcacataattgttattcgcagcagcctaagcctcagccaataaagtacagaggcgttgaacgtctactggacatgctgattcattataaccagacttctgatattctgtactatgaagtattggacataccacttccagaattacaagcgctgaagacattaaaagttacataccatcatgccacaaaagatgaggtgtcagttcacagtataagattgccaaaaaacagcactgttggcgatgtgctaaacgatatcaaaacaaaggttgagttatctcatcccaatgctgaactgagattacttgaggtcttttatcacaagatatacaaggtgtttgcaccaaatgaaaagattgaaaacattaatgatcagtactggacactgcgtgcggaggaggttccagatgaggaaaaaaaccttggtccctttgatcgattgattcatgtatatcattttacaaaagatactcaaaaccaaacgcaagttcagaactttggagaacctttttttatggttattcgtgaggatgagaccctatcttctatcaaagagcgtatacagagaaagcttaaggttccagatgaggatttctcaaaggttcctgacttccaaatgttttgttcttaa

SEQ ID NO: 20139 - DNA, 897 bp, Zea mays
  Peptide Sequence Number=SeqID_61918
atggcgtccgaggccgcgccgcgggtcgtcgtggacgagtgccggggcgtgctgttcgtgtacagcgacggcacggtggtgcggcgcgcgcagccggggttcgcgacaccggtgcgggacgacggcacggtcgactggaaggacgtgacgttcgacgaggcccgcgggctggcgctccgcctctacctcccccgggaccgcggggccggggccgggcggcgcctgccggtcttcttctactaccacggcggcggcttctgcatcgggtcccgcgcctggcccaactgccagaactactgcctgcgcctggcctccgacctgggcgcgctcgtgggcggcggggacccctgggtcgccgaggccgccgacctcggccgcgtcttcgtgtcgggcgactcggccggcggcaccatcgcgcaccacctcgccgtgcgcttcggcggctcgcccgcggacctggcccccgtcgccgtgcggggatacgtccagctcatgccattcttcggcggcgtggcgcgcacgcggtcggaggccgagtgccccgccgacgccttcctcgaccgccccctcaacgaccgctactggcgcctgtcgctgccggagggcgccacgcccgaccaccccgtggccaacccgttcggcccgggcgcgccgccgctggacgccgtcgacttcgcgcccaccctggtcgtcgtcggcggccgcgacctcctccacgaccgtgccgtcgactacgccgccaggctcagggccgctgggaagcccgtcgtggtcagggacttccacggccagcagcacggcttcttcaccatcgacccctggtccgacgcctccgccgagctcatgcgcgtcatcaagcgcttcgtcgacgccgacggccgcttcgacttcgactga

SEQ ID NO: 20140 - DNA, 585 bp, Zea mays
  Peptide Sequence Number=SeqID_61919
atggcggtggctttaatcaagtctgctgtgttagcttgtttgaccgcttggtgggcccaggctgtaagtcatcttcttcctaaaatgagcaccggggtgcgcggcggtctctgcttcctgcgtggcttcaacggctccgcgcgcatgtcccggcgaatgtgccctcgcaaacccgtgacggactcggaactatgggattccgtggattgcgctcccttcccctcgcgatgcggccgttccgcgtctgaccgcaacagaagcgcggactcggtctctgttcatctgctcccccaaattcgcgtcgagctcaacagaccgcgcgcatccttcggaactactccaatctcccccgcctacttataccgagtctatctggcgacctcccaagcgctcccccttccccatatcgagtcattggagctccggccaaccaccacgcgtgtgcagagagagtggggcggggcggaaagtcgtcctccctgtcgtcggtcgtccttgacgccaaattggggcctcgcgcgcagacagaaggcttcgcccaagcccctggaccggttgggtggcgattgtgggctcggagggtga

SEQ ID NO: 20141 - DNA, 657 bp, Zea mays
  Peptide Sequence Number=SeqID_61920
atggaagatggagatacagagcatcaccgcactgtgtcagcacatgctggtgcgcctggcgtcgtaccagtcaccaatgctaccttggcaccttataatcagctcactgcaccgcaccagcgcgtgcaggcgagcctgggcgttgtaccagtcactaacaccaccttggcacctttcaatccaataactgtaggagctctgcagtgcactcacaggacggtaggaaaaaggaaaataacggagatttttctgaggtaccaaaaactattggacatttgtataaagcaacagataggaatcttgcttattgcacaccattctgatgaccaggcagagctctttgttctcagactatctcgccaaagtggggttttagggcttgctggtacagcttttgtgtctcagttgtttgcatctaatgtaaaatatgatggggagagatttcgacgttatggcatacttcttgtgcggcctatgcttgagttttcaaaagatgacatgtataagatatgtcaaggtagtaatcaaccctgggtggaagatccaacgaatactagtatgaagtatgctagaaaccgaattcgggcgtctttaagaaaattatccaccgaaggtcaagctgtacttaaaactgccatgcttgctttaattttatag

SEQ ID NO: 20142 - DNA, 270 bp, Zea mays
  Peptide Sequence Number=SeqID_61921
atggagaggcggctgcggctggaggggaggggtgggggcggcggcggctggagggagggagaacctagagctctggttgctcgaccacttcataatctatgtggtttgttcagatgggaagagcttctgtgcagtgggctgttatcccagagcattaacttcgacagtacaatcatacaagtatacatcaaattccatgttcaagcctcccttccaaccagaacagctgcatctgaaagctctgacaaggcgacaaccagacatccttaa

SEQ ID NO: 20143 - DNA, 513 bp, Zea mays
  Peptide Sequence Number=SeqID_61922
atggcaacaaatgaattgctttatatcaagagacccaacatattttggactttgtgttcaacccacactctcaacttgatgcttgaaagaattgggaagatcttcagtgatccatccatctctgacattgaggatgtcatggatggatttattgcagccattggaacattctacgatggtgattatgagaagcataatcaagtgcttaatcatgacttgcacaagtttaaagatcaagttggacattttggcaaaaatgtagctaaggctggctacacagtcaagctaactagtcaaccaattctcacggtgaaccatccaccatgtctcacgttgaaatgttatagtaaagtaacccttgaaaacacgttcattacatcccataatgaaccatccaccaagtctcacagtgaacattttggaaatcattcattgcatctcacaatgaaccatccaccaagtctcatggcgaaccatcactggacatcgatcccttgtgttgtgactttgtaa

SEQ ID NO: 20144 - DNA, 195 bp, Zea mays
  Peptide Sequence Number=SeqID_61923
atggcggccatcacatacgctcgcccagctgcagtgcgccttttctccatatttcctctgtgggaagaagaagacgacgacgacgacgacagccacccggagttcctgctccgggtagtgcgcagggggtgtggatggacaccatgtacttgctccggagatcgcgtggtgttcgcttgtggacgattgaaatga

SEQ ID NO: 20145 - DNA, 450 bp, Zea mays
  Peptide Sequence Number=SeqID_61924
atggggtgggggaagggaaggggaacgacggcgcagcagaggacctcgagcaccgggagcatctccagggcaccctccagaggacctcgagcaccaggagcatctccagggcgccctccagtctggggttcgtctgaagcgtccgcagcagcacaggctgtaccagtccacgcccccacggccggcggcggcgcagcagaggacctcgagcaccaggagcatctccagggcgccctccagtctggggttcgtctgaagcgtccgccgcagcacaggctgtaccagtccacgccccccacggccggcggcggcgcagcagaggacctcgagcaccgggagcatctccagggcgccctccagcctggggttcgtctaaagcgtccgcagcagcagcgccatgattttgtgagttgcaacaagcgtgcgggtcgcggtaggattagcggctag

SEQ ID NO: 20146 - DNA, 507 bp, Zea mays
  Peptide Sequence Number=SeqID_61925
atggcgtggggacgacaccgtgggcgtgggacacatgccagagggaggggtaggctaaaagtgtcgggtagctggacaggggaagggggcaatccggccggggtcaggaaaaaccgaccgctgacgaggttccgcggcggttctccgccgtggtctcggttcctgggtgatcagggaggctaccagatgaaagaaggggagctcaccggagtggaggaagggtgtggcggcgcggagctcgattcggctcaggggaggggagggagtggccgaggccggtgtgaggaaggatggagctcgggcggttctttttataggcgctcagggcgggaagcgtccaaaggccagctggcgccggtgagggatgccatggcggtgatgggggcgcacagcgccgaggacgagacctctcgcgcaagctgcgagcacagtgagctgaggggggcggagcgggtgcctaacttcactggcgcaggagttatggcgagaagatggggcggggggtga

SEQ ID NO: 20147 - DNA, 405 bp, Zea mays
  Peptide Sequence Number=SeqID_61926
atggcctggaacgactgcagtcggactactcgtgtaatttgtataagttttgatcagatcgaacgatttcggagtgggatccggaagaaaggaacggtgtctaaagagcagatcatggtctgccgaatcaatcaagactttgaactgatcaacgtccctgagtgggcgataaagcgaaatggacacacgccaaacggcctccggcaggcagcgaagcagcccggtggccaagtcgtcttgcccccgcatcgcatagctggtgttcccatctcggggtcacggcggtgcccacgaactcgtcgctttccgctcgccgctgaccagcttcgcacacacacacgccccgccggccaggtctcctcctggtccaaaagtttcggcgtctggccattcctcatggtatag

SEQ ID NO: 20148 - DNA, 1167 bp, Zea mays
  Peptide Sequence Number=SeqID_61927
atgggcggcgctcgtggcagcagcggcgccgtcgtgcttgcgctggtcctcctctgcgtgctccttcatggcgagttcgccgaatcggcggtgtacacggtcggcgaccgcggcgggtggagcttcaacaccgccaactggcccaagggcaagcgcttccgcgccggcgacgtgctcgtgttcaagtacgaccccaaggcacacaacgtggtgcccgtgagcgcggcggggtacagctcgtgcagcgcgccgaggggcgtcagggcgctcaccaccgggaacgaccgcgtcacgctcaagcgcggcgtcaactacttcatctgcagcttccccggccactgccaggccggcatgaaggtcgccgtcaccgccgccgagaagatacagcaccagctcgacaccagggttaaccggagcggcctcgtcggctaccaatgtctgccaagtgatgcgtgggatgacaggcatcggcagatctgcatcaccggctcacagtcacggccgctggcgtacccgcctcaacctgtaccttgctcgactaaaagctctcttctggcccatcatgtgatcacggactggcgtcgggcgtcctatacagcattgaagctgcacagtatcgcgctggtccctcgctctctgctcgtcacctctgccgctctgcgcggtattgatttcctcggacaccgtgctccccgaccccgagcgcccatccagcagccagctaggagtaccgccgagtgcactctgtctctgcacgacgagtgcaacggtgagagtaccgagatggctgagggaagaggcagtgcaagggccatcggcgccatggcgttcgccgttgcctgctgctactgctgcgtcgccatcgccgacgcagccaccacctactacgtcggggacagcaacggctggtccttcagcagccccagctggcccaacggcaagcacttccgcgccggagacactctcgtgttcaggtacatcccctggatccacaacgtggtggccgtggacgaggacgggtacaacggctgcacgacgccgccggggtcgcggacctacacgtccggcgccgacagcgtgacgctcgccaggggggacaacttcttcatctgcacccggttcggccactgcaacctcggcatgaagctcgtcgtctatgccgcgtga

SEQ ID NO: 20149 - DNA, 234 bp, Zea mays
  Peptide Sequence Number=SeqID_61928
atggacccatcaggaagacaacggcttcatgatgggtgtaaatcagtaaaaaaatatggtagtaaaggcccagattcagctgtggcaactggcaagcgaagttactacgccagcggccgtgacttcagaggagttactctcaccaaagataatttagctaagcgaggttctattcagggcaacatactgactcagattctggaaattgttgcagaaagaacaacatcaacatga

SEQ ID NO: 20150 - DNA, 702 bp, Zea mays
  Peptide Sequence Number=SeqID_61929
atggtggactttccggggttcgagtcccacctcgtcgacctccctgatcccgccgagatgctgacacacgcgaacgaacggaagcggctccgcggagccgaggtgcggttccacggcgaggtgcaggggcccgagagcgtcgcctttgacccgatggcaacaccctttataatgagcttgaagttgtggagggaaccagaagatccattgatcttaattcatgacaagaaagtgacaaatatgcatgccgtggttaaggttttagaaatggctctaaagaaacaaaggcctctactaattgttgcaaaagatgtggaaagtgaggtattaggtactctgattattaacaagcttcgtgcaggcatcaaggtaatagctgaagagctaggaatgaaccttgagaatgttgagcctcacatgctgggttcatgcaaaaagcaggccagaaaccagtgtactaatgtgtttgaacttcattacaggccttcagtaaaaataccagtctctgttatgatgccagtggctcatgttgtagaatggacttaccagaaatttgccaagtatggaatggaagttcctcagctgaccccttcaaggatcaggctgctttcatgtaacaggacattcagttgctcaagagcaaaggagcagcttggttatgaacctctcgtgtcccttaaggttcttatctatatcctttaa

SEQ ID NO: 20151 - DNA, 278 bp, Zea mays
  Peptide Sequence Number=SeqID_61930
atgaccgttggtgagggcctctgtcgtatggcgcatcagacagtccggttccggcgcctcctgtcgtcggccgcgcccccggcgcacgccggcgctgccgtgcctgggccctgcatcgtgcacaagcgcggcaacgacatcctccacgatccgtggtacaacaaggatacggcgttccccatgacggagcgcgaccgcctcggtctccgcggcttgctcccgccgcgggtcatgtccttcgagcagcagtacgagcgatttagtgagtcgcccttccc

SEQ ID NO: 20152 - DNA, 1637 bp, Zea mays
  Peptide Sequence Number=SeqID_61931
taaactctttccgggcgctggagcacaatacccgcggcgagcctgactccatcgtcgcgctggccaaatggaggatcctcaacaggttgcacgaccggaacgagacattgtactacagggtgctaattgacaatatcaaggattttgccccgataatatacactcccactgttggcttggtctgtgaaaattacagcggtctgttcagacgaccccgtgggatgtatttcagtgcaaaggataagggggagatgatgtcaatgatttacaactggccagcagagaaggttgacatgatagttgtgactgatgggagtcgcattctaggcttaggtgaccttggtgttcagggcataggtatacctattggtaaactggatgtttatgttgcagctgctggtattaacccacagaaggttcttccaataatgcttgatgtgggaacaaataatgaaaagcttctggaggacaagctatgtgcgggcttcccctactattttcgctcaaaatactgctccctttctgaagtgataaaatcacagtttgaagacttccaaatgaaatgggcctttgagactcttcagaggtatcggaaccgattttgcatgttcaatgatgacgtacaggggacagctggagttgctctagcaggcctacttggtgctgttagagcacagggccgtcctctccaggattttacgaatcaaaagatagtcgttgtgggagctggaagcctactttatatggaatgttcattgtcaaaaatgtggttcgtacattctaattcctctttagaatccagtgctgggataggtgtgcttagcatggctaaacaggcaatgttaaggatgcctgggatccacagaaccggggaagggcataatcaattctgggttctggacaaagatggccttattacgaaagctaggaaggacctggattctgcagtggcgcgttttgccagaggctttggtcctgatgaggtcccagatctctatgagggggctagtcttgttgaagtggtcaagaaagttaagccccatgtgcttttaggactatctggagttgggggcatatttaatgaggaggttctcaaagctatgaaagaatccgattcccctcggcctgcagtttttgcaatgtccaaccctactactaaagctgaatgcactcccgatgatgtattcaagcatgttggagataaagcgatatttgctagtggaagcccttttagtaatgtttctttaggaaatggtaaatctggttatgctaatcaagcaaacaacatgtatctatttcctgggtatgacaacctttcaccttcaagtgcccttctttcaggtgcccggcatgtttcagatggcatgcttcaagcagcagctgagtgcctggcatcatacatcacagacgacgaaattcgaaaaggaatcctcttcccttcggtctccagtattaggcacatcaccgcacgtgtcggcgcagcagtcgtccgtgccgctgttgctgaagacctggctgaggggtgctgtgatgtgggtcctagggagcttgggagtatgtcagagtcggaagcagtggactacgtcgctcggaagatgtggtaccctatttacagccctcttgtgagcgacaaataa

SEQ ID NO: 20153 - DNA, 456 bp, Zea mays
  Peptide Sequence Number=SeqID_61932
atggagaagagcaggggcgacatgctggcggaggaggccaatctcgcgcgcgaggtgttcaaggcgcccggtcaccagatcctcaccatctgcaagtcgcttgtcgtcgccgccgtcgtgggcggggtaggtatagacatagtgtttacttgcacaatgtgcgctttttccctccttgcctatgttatcctaaaaatcaagggagtcgttacatttgttgaaagtcagagtagtagatcttatattatcaatgtgtatgctgtgatatggaatgaggcaaagagtcatttactaatgaaaaaggctactgtaacaaaggttgaggttggtcgtcttggtgatcgtgtttgtttggatctttgcagtatcatgcaacctggcggacaccttctggtacttgaaaagtcattattaggatttgcctttcaaattgcatttacaaccagtgagatataa

SEQ ID NO: 20154 - DNA, 630 bp, Zea mays
  Peptide Sequence Number=SeqID_61933
atggacgagctctgccggtacgctgctgtcggcgcgctgcgacctgagcccacggtcacatcccaagcgaaaagcgactgccacttccgtttcgaaagagaccccaggtacggtcctcgccgcgcatctggcggaaaccggcggctacggctcgcagaatcggaggccgaaggagcgaagcgcgacgcggctggtttggtgagcgcgcccggaggccggagaaaccaaaccgtggccgtgcccaccggttgggcgccctcccggctccccataaatcccggccgcgccacatgccacacacccccacacttccagacttggcaaccccaacggctacaagagcagagcagagccggcagcacgcgagagacagagagagacaactcgggcgcgatggacgtgtacatcgcggaggagtacgtggcccagcggcgcgccgagaggagggccgcgcgcgtcgccgcggccgcacgctgcggagaggagaaggcgcgggcggacagcgagcagaagcggcggtggacggaggacggcaagcggcctgccgacggcggcgatgccggcggtggcgccgccgccgcctggctgcaggcaggggaggacgccgttctcagctacttgtcggcttag

SEQ ID NO: 20155 - DNA, 363 bp, Zea mays
  Peptide Sequence Number=SeqID_61934
atgcaccagcctagagctcgctacccacccggctatggctccggcggtggaggcggagccggacgtggcggtggaggcggaaatggaggaggtggcggaaaccacaactactacggccgaaacccgcagcaacaccactaccaccagcagcagcagtcgcagcactctcataggaactcttcgtaccagcaacagtggctgcggcgagaccaggcccccgccgttgcgggggcagcgtccggaaacgctgtggccaagacggcgtctcagcttgacgccgtaggctcgagatcgcatgcggggtgttggagtgattttgggtgcttcattgtttacgttacttctactattatatcatgctga

SEQ ID NO: 20156 - DNA, 2193 bp, Zea mays
  Peptide Sequence Number=SeqID_61935
atgtctgagccttacacaccaacggctcagagctttggtggtgggaaccctgtggaggggttttattcacctgaacttagaggggaacttggtgctggacttctagaccttcacgctattgatgatactgagcttctgtctgaggatgtagcatcggaaccatttgagccatcaccttttatgccaaaggatattgatgatgatgatgaggacgtgatatcagggagtcaacaagcaccattagataattatggtttagtgaccagtgaaaaagagagcactactagagaaaataatgttgcaaagattaaagtagtggtaaggaaaagacctttgaacagaaaggagctatctcgaaaggaagaagacatcataaccgtgcatgattcatcatgtttgacagtatacgagcctaagctgaaggtttaccgtgaaacagttgagcccataattccaattatatttcagagaacaaaagcaacatgttttgcttatggtcaaacagtttctgtcgacctatctaatttacgagcaggcagtggcaagacatacacaatgcaacctttgcctctgagagctgcacaagacatggttcgtctattgcaccaacctgtctatcggaatcagaattttaagttgtggcttagctatttcgaaatatatggtgggaaactctttgatcttctatctgacagaaggcaactattgatgagggaagatggcaagaaacaagtttgcattgttggtctacaggaatttgaggtttctgatgttcagattgtcaaggaatatattgaaagagggaatgcagccaggagcacagggtcaacaggggccaatgaggaatcatcaaggtcacacgctattctgcaactggctgtgaagaagcatatcatagtaaaagataccaggagacagagagatcgtgatgctaatgaagctaaaaatacaaaggctgtggggaaaatatcatttattgatcttgctggaagtgagcgtggtgctgatactactgataatgatagacagacaaggattgagggagcagagataaataaaagtctgttagctcttaaggaatgcattcgagctcttgataatgatcagatacacattcctttcagaggaagcaaacttacagaggttcttcgtgattcatttgttggtaactctaggacggtaacaatgctatatccaagtgatatacgtgatttgtatgttccaaaaatgcttcctgtcattaacttagtagatttctggaacagggtcaaaagtctttccaagggtggaaacacaagaaaagagcagcccacaggaccaactaccacttctagccgggagtcttcgtcagctccatcatattcattgcctgctgaagctgaagaaattcctaaccagattcaagagaagagaccagttgatacttatcggaaaggcactgaaaattttacctccaacccttccgcggagcctgatagaaattccttcagtatggttccaaattattctaataaagggagagaagacaatggtgcagcatctggtaatgatagggagaggtatgatttgaagtccacccaaactgcttacactagtaaggcacagttggttcagaattcaacaaacacacaggaggagaaagtcacaaaagtctcacctcctcggagaaaggcttataaagaagacaaatctgatcggcagggcaactacgtgaaaaaggataatggtcctgagacaggtcggactgggtataagatacaacaggcaaagcagctgcaacagcagcaaaggccaacatctgcttcagcttcgtcaaggcaatctgaaaaggaaagttcttgtgatgatgtagaaattgatgcaattcttgagcgtggtgaggatgttgagaactcgaacgtcaccagcggtgacccgctcgcggacaaagcgcaggtcgatctccacgtgttttgtgcgttgatgctgcacgagattggaggagaggtagaccgcgctgatgttgtcgcaataggcgaggctgacgtgctggaggaggcctctaccacgccgttggccacagtgccgtacccggcctctgcgctggagcgagagacgacaggctgctgcttggcggcccatgagacgaggttgccacccaagaacacaacatatccggaagtggaccgacgcgtgttgggacagccaacctag

SEQ ID NO: 20157 - DNA, 273 bp, Zea mays
  Peptide Sequence Number=SeqID_61936
atgaaaggtgttgaagattttgcttattggcttcttcttttctcccccggttttcgccttccattagtaagacttgtggccttccttattgaaacgattatgttggctccaagagacaatgaggattccctgcttgaggaagtgttgaccatagcgagcgccgaggagttggatcctcaaatcatcaacatcgccatgaagcttgctgaaaagatgttccacaagatgaaagaggacaaggctaagaagaaggccgaagaagaagaagactaa

SEQ ID NO: 20158 - DNA, 573 bp, Zea mays
  Peptide Sequence Number=SeqID_61937
atgcaggttgaggcctctaccgaggtcatcgtgcgggaaatagggcgccacaccaaggcctgcctcggctgggagaaaaaattgaagcacttctcgtgcaagtcaataggaataggcctggaaggggggttcgagaggctagagcgacatcgacaagcccgacggtccaccaccttcacccagccaccatcgtcatcagcaacaacgaggaaaggggcaagaggcctagaggagacaagcgtgtccttgtacgagacctacgacctactaggaccaccatcgtcactccaacgttgggctttggaacggccagcaggtatagtgtcaggggaggaggaggaggaccccagcgccagggagaggagggaagtggtcgtcgagcctggagcactcgtcggcttgaggctgaggggtgtttgggtgccgggtagagggggagggctagggggtgggagacacgtcgccacttccaggcataacttggtgtttcttatgagttatgatgttgttcgaaattgggtcaatttagctagagtcaatgtagttttgtatccaagagacaaaaatgtctga

SEQ ID NO: 20159 - DNA, 384 bp, Zea mays
  Peptide Sequence Number=SeqID_61938
atgccagagccaacccatgaaaacagcgccgcttgcccctctccgactgttgtgccacccgccagggtgaagctgacaacggctaagttcagcctcaggcgcaataggaagctccgcctcacccgaccttgggactcggcctcaggaggaggtctccgcctcgcccgacctcagtgctcggcccccgcctcggcctcggaaggtggtctccgcctcgcccgacctcagggctcagccccccgcctcggcctcggaaggtggtctccgcctcgcccgaccccagggctcggcctcaacctcggcctcgaaagatggtctccgcctcgcccgaccctagggctccgcctcaacctcgacctcagaaggaatcgcgtcctcacctga

SEQ ID NO: 20160 - DNA, 1446 bp, Zea mays
  Peptide Sequence Number=SeqID_61939
atgggcaaggcggcgaggtggctccgcggcctgctcggcggcgggaggaaagaccaggagaggcgggcctcgccggcgccgcccaccgcggacaggaagcgctggagcttcgcgaggtcctcgcgggactcggccgaggccgccgcggcggcgaccgagggctccgtgcgcggcggtggcaacgcggcgatcgcgcgggccgccgaggccgcgtggctcaagtcgctctacgacgacacggggcggcagcagagcaagcacgccatcgccgtcgccgcggccacagcggcggcggcggacgcggccgtggccgccgcgcaggccgcggtcgaggtcgtccggctcaccagccagggcccggtcttcggcggcggagggccggtgcccgtgctggacccccgcggccgcgccggcgccgccgtcaagatccagacggcattcagacgcttcttggcgaagaaggcgctgcgagcgctgaaggcgctggtgaagctgcaggcgctggtgcgcggctacctggtgcggcggcaggcggcggcgacgctgcagagcatgcaggcgctcgtccgcgcgcaggcagccgtccgcgccgcccgctacagccgcgcgctacccgcgctcccgcccctccaccaccaccctcccgtccgcgcgcgcttctcgctgcaagagcggtacggtgacgacacgcgcagcgagcacggcgtggcggcgtacagccggcgcttgtccgcgagcatcgagtcggcgtcgtacggaggcgggtacgaccggagccccaagatcgtggagatggacacggcgcggccccggtcgcgcgcgtcgtccctgcgcaccgaggacgagtggtacgcgcagtcggtgtcgtcgccgctcctgccgccgccgccgccgccgccgtgccagcacctgcaccagtaccaccacctgcccccgcgcatcgcggtgcccacgtcgcgccacttcccggactacgactggtgcgcgccggagaagccgcggccggcgacggcgcagtgcacgccccgctgcgcgccgccgacccccgccaggagcgtctgcggcgccgggggcaacggcggcggctacctcgccgcgtcgcccggctgtcccgggtacatgtcgagcacgcggtcgtcggaggccaagtcgtcgtcccggtcgcagagcgcgccgaagcagcggccgctggagcagcaggagcagcagcagcagccggcccggaagcgggtgccgctcagcgaggtggtcctggaggcccgcgcgagcctgggcggcgccggcgtgggcatgcacaagccgtgcaatacccgcgcgcaggcgcaggacgcgttcgacttccgcaccgccgtcgtgagccggttcgatcggcgcgcgtcggacgccgccgcggcggcggccgagcggcgggatcgcgaattgttcttcctgcagaggaggtggtga

SEQ ID NO: 20161 - DNA, 972 bp, Zea mays
  Peptide Sequence Number=SeqID_61940
atgaatagggcgcacagcagcagctccaagctcatcaacgagaagctcgtggaacaccggatctccactgcgaagcactgcccccactgcggcgagaaaatcgacagcaaaccgttatgcacctcctcagccagcatgagacctggtggtggtgcaacttgttttgatgggattaattgctgtaactgcaagaaggattgggtggggctgccggcaggcgtcaagttcgatccaactgaccaggagctgatcgagcacctcgaggcgaaagtgaaggatgaaggctcgagatctcaccctctcatcgacgagttcatacccacaatagatggggaggacggcatatgttacacccaccccgagaaacttccaggtgtgacgagggatggcctaagcaagcacttcttccaccggccgtccaaggcctacacgacgggcacgaggaagaggaggaagatacagacggagtgcgacgtccacaagggggagacgaggtggcacaagaccggcaagacgcggccggtgatggtgaacggccggcagaaggggtgcaagaagatattggtgctgtacaccaacttcggcaagcaccgcaagccggagaagacgaactgggtcatgcaccagtaccacctcggcgacctagaagaggagaaggagggggagctggtggtgtgcaagatcttctaccagacgcaacccaggcagtgcagctggtcctccgaccggggcgccgccgccactgccttggcagcaacggcggcagcggcggcggcgcaggagcagcataggagggatagtggcagtggcagctgctcgtctagggaccacgaggtgtcagccacatcgttcccagccggatacacagtcaccacggccgtcgagatgcagcagcatatgaagcagcctgcggaccatttcagcttcgcgcctttcaggaaaaccttcgaccaggagttgtctgttctttga

SEQ ID NO: 20162 - DNA, 420 bp, Zea mays
  Peptide Sequence Number=SeqID_61941
atggcgcatgggaggggggcccctgtagtgctgtctgcccaagtgccgagcacgaccagagcaggtggacggtcgggtttcagagagactgctgctcaagtctttttacgtgggactgtgggagtgcagctgctgcatccatcgatcgcagcgctaggttctccagccctttctggggtgttgctttcagcagagacagggcaaaaaacacacactacggttttacagcacactcatggcattaggatacgtatttgctgcgacttgagcatcagcgtttgcgcgcccaccaagcaaatgggatggcaaattattgcacgggtggcgacggatccgtcggttggccagaaccgcgactccaagtgtgtattgtatgtacgcacggtcctacacaccgacgacaacgagagggggcattaa

SEQ ID NO: 20163 - DNA, 378 bp, Zea mays
  Peptide Sequence Number=SeqID_61942
atggaaccaaacccccgggaggagcaaatcaagagtcctgaacccggggaccccattcagcaggaaacaaaaaaccaaacaaaaggctgggaattttggagtccaaagcccaaggaaaaggctaaaaaagagcgccggagaagcggcgcggcgtcccacctcggcccctcgctcgccgtcgcggtcgcggtcgcggccgagtggaatggaggaagcgaagacccactgagactaagaaacaaagtccttgcaggttttgaaacttctctttcaccctccttcaaacctagaatgaatgatatagccttgtcgaagctgatcagagtaaagtactcgagatggacatacgatgttaaggatgtgtctccgcatccatga

SEQ ID NO: 20164 - DNA, 1392 bp, Zea mays
  Peptide Sequence Number=SeqID_61943
atggcagagcaggtggtggccgagctccgagtgaggtgtgagacgccgccgtcgatgctgcgcgaggtggccgtggagatggcccgcgagatgggcgcggggctggagaaggacggcgggagcagggtcaagatgctcctctcctacgtcgataagctccccacagggagagaggaaggattattctatggattggacctaggaggaacgaatttccgcgtcttgaaagtgcaactaggtgggaatgcgaagcatgtcgttgaccgtgactccagagaagtcggcattccgccacatctgatgtcagggagctcctcggagctttttggtttcattgcttctgaattggccaagtttgttgacgatgatgagaagtgcgctaacatttcgaatggcaagaagcgagaaatagggttcacgttttcgttcccagtgaagcagcgttctgtagcttccggtacgcttgtcaagtggacaaaggcattttccattaatgatgctgtaggcgaagatgtggtggctgaactgcaaacagccatggagaagcaaggtctggacatgcatgtagctgcattgattaatgatgctgttgggacgctggcgggagcaaggtactatgacaaagatgttgtcgctggtgtaatatttggcactggcacaaacgcagcatatgttgagaaggcaaatgctattccaaaatgggagggtgagctgccccattcaggagacatgatttacgagaagttaacgtcaggaatgtatttaggtgaaattgtaaggagggtgctccttaaaatatcattgcagtccgccatttttggtgatattgaccacactaagcttcaaacccatttccttctgcggactccacatatttcagcaatgcaccatgacgaaacatctgatctgaagattgtggccgaaaattttgaagaaaacctagagattacaggcacatccttggaggctcgtaagctggtcgttgaaatctgtgacattgtggcgacaagagcagcccggctggctgctgcggggcttgcagggatcctcatgaagatcgggagagatcacagcgtcgaggaccaacggtcagtcatcgccatcgacggaggactgttcgagcactacaccaaattccgccggtgcttggagaccacactgggtgagctgctaggagacgaggcgtccaaggcggtggccatcaagcatgccgacgacggttcaggaataggtgctgccctgattgcagcttcacagtctcagtacaaaaacgacttagtggccgtcaagcatgcagatgacggttcaggagtcaagtatgcagaagacaagcgtgcagatgacggatcagaaataggtgctgccctgattgctgcctcgcaatctcagtag

SEQ ID NO: 20165 - DNA, 420 bp, Zea mays
  Peptide Sequence Number=SeqID_61944
atgtccagctgtagtgtgggatggaagggattggttggaagatttttcatgcttcgctgcactgtttgcatggctcgcaatagatcaatgactaagctctccacccctacgtcatctaaggcacttcaaggggaggaggacaaatcagacatggagattgtgtatggctcaacgagagcttacccccaattcattaatgaggttaggggtattcatatgggcggtgaggtgtcaagactcgaagttccccatgctggcttatcgaagcaaatggatgaacaactagacctaggagtggttctatgcaaaggtcgacttgaaggaaagaaaggatctaaaggacatggttatgaggccaatgaagataagattcaacttaaagagacccctctacgacatatattgcctccaacaccgtag

SEQ ID NO: 20166 - DNA, 264 bp, Zea mays
  Peptide Sequence Number=SeqID_61945
atggcggccacgtgcttccggcgcgaccctactgatgtcgattacctaagtgttagaaacaggaaaagaaaaagattggaagagagtgcatgtgtgcagccaagactcagcacagtctggcgcatcggactgtccggtggtgcaccggacagtgtccggtgcgccaggatggtctccggcaaactggccactctcgggaaatcttcggcggtgtacgactataattcaccggactgtccggtggtgcaccggactgtccggtga

SEQ ID NO: 20167 - DNA, 2649 bp, Zea mays
  Peptide Sequence Number=SeqID_61946
atgcggactccggaaaccatcggttcggccctggcccgcttcggcacgtcgcggtcgctgttcgccggagcgcacctccactcccacctcctcaagtccggccttctcgccggcttcagcaaccacctcctcacactctactccaggtgccgtctaccgagcgcagcacgcgcggtgttcgacgaaatccccgacccgtgccacgtctcctggtcctcgctcgtcaccgcctactcgaacaacggcatgccccgggacgcactcttggcgtttcgggccatgcgcgggcgcggcgtcccgtgcaacgagttcgcgctccccgtcgtgctcaagtgcgcgccggacgtccggttcggcgcgcaggtgcacgcgctggccgtggccacgaggctcgtccacgatgtcttcgtcgccaacgcgcttgtggccgtgtacggcgggttcggcatggtggacgaggccaggaggatgttcgacgagtatgtaggcgttggaggggagaggaatgccgtttcgtggaacaccatgatatcggcgtacgtcaagaacgaccagagcggggatgccatcggggtgttccgcgaaatggtgtggagcggggagcggccgaatgagttcgggttctcgtgcgtggtgaacgcgtgcacgggatcgagggatttggaggctgggaggcaggtgcacggtgcagtggtgaggacgggatatgaaaaggatgtgttcacagcaaatgcgctggtcgacatgtactcaaagctgggagacattgaaatggcagcaacggttttcgagaagatgcctgcggcggacgtcgtctcatggaatgctttcatttctggctgtgtaacccatgggcatgatcaccgtgcactggagctgctactacagatgaagtcttcaggattggtgcccaatgtgttcaccttatctagtgttctgaaggcttgtgctggtgctggtgcattcaatttgggccggcaaatccatgggtttatggtcaaggccgttgcagattttgatgagtttgtcgctgttggccttgtcgacatgtacgcaaagcatgggttcttggatgacgcaaggaaggtgtttgatttcatgccccgaagggatctgattttgtggaatgcactgatctcaggctgctctcatgacggacggcatggtgaggtgctgtcactctttcacaggatgaggaaggaggggcttgaccttgatgtcaataggacgacactagcttctgttctcaagtcaacggcgagctcggaagcaatctgtcacacaagacaggttcatgctcttgcagagaagatagggctcctatctgactctcatgtcatcaatgggcttattgattcatactggaagtgtggtcagctagattatgcgattaaggttttcaaagaaagccgttctgatgacattatatcttctacaaccatgatgacagctctctcacagtgcgaccatggtgaggatgcaataaaactgtttgtgcagatgttaagaaaaggccttgaacctgattcttttgtactaagtagcctcctaaatgcttgcactagtctgtcagcctatgaacaagggaagcaagtgcatgctcatctgattaagaggcagttcacatcagatgtatttgcaggaaatgcacttgtgtacgcttatgcaaagtgcgggagcatagaggatgcagacatggcattctctggcctgccggagaggggaattgtctcatggtctgcaatgattggggggcttgcacagcatggacatgggaagagagcattggatttgttccatagaatgcttgatgagggtgttgccccaaatcacatcacgttgaccagtgttctctctgcttgtaaccatgccgggcttgttgatgacgcaaagaaatactttgaatctatgaaggagacgtttggaattgacaggactgaggaacattacgcatgcatgattgatattcttggtcgtgcagggaaactagaggatgctatggagcttgtcaacaacatgccattccaagcaaatgctgcagtttggggcgcacttctaggagcctcaagagtacaccgagatccagaactcggaaggatggcagctgagaagctcttcaccctggagcctgagaagtctggtacacatgtcctgcttgcaaacacttatgcttcagcaggcatgtgggatgaaatggctaaggtgcgaaagctaatgaaagacagcaacgtcaagaaggagcctgccatgagctgggttgagataaaggacaaggtgcatactttcattgttggcgacaagagccatccaatgacaagagacatatatggaaagctagccgaattgggagatttgatgaacaaagctggttacgttccaaatgtggaggtcgatctgcatgatgtagacagaagtgaaaaggagctgcttctttctcaccacagtgagaggctggccgttgcgtttgcattgatcagcaccccatctggggccccaatcagagtcaagaagaatctgcgcatatgcagagactgccatgtcgcattcaagtacatttcaaagatcgtttcaagggagattatcatcagagatatcaaccggttccatcatttcacaaatgggacatgttcttgcggtgattattggtga

SEQ ID NO: 20168 - DNA, 717 bp, Zea mays
  Peptide Sequence Number=SeqID_61947
atggaaggcgaaggcctcttcgatcgtagggcgacgtggttaccgacggagaccatagggctccgggctgtaatcaaagggctgatgatctttttcgcccttgttacttacgagagtggatttgagtcattgatccatgagggttgtgaccacgtggtgcgcttgacctcggatgagtttgaagccagagaaagcttgtatgtcgaggtttgcgaagtggctggtactgcggcagatgacatgctcgaacgcatgtggagccccttccgtgcggaggttgcccgcaagcgttctatagctgagttggagcaagttcctctatgggggcttgcgcaaagcgattctagagtcgtcttgatcaaggaagagggctcgttggacaacgtgttgtgtgttacccctttggcttgccagagtccctcggattcttatagttttggtgattgttttgattctcagtcgtcggtggatgatggacttaggttctttcgcggaaatggacgagtcgtccgacgaggacttagacttttttgtcatgatggacgtcgcggcctcaaaggcttccaggcagcaggggcccttcagttgttgagacgggcagggtgcatcgaactcgtgctaccgcctctgagcgaggggccccttcgcgagtggatggttcttgtccgtcgacccgaaggcgagatgggggtcgatgctaggaatatctcaatttaa

SEQ ID NO: 20169 - DNA, 135 bp, Zea mays
  Peptide Sequence Number=SeqID_61948
atgacgagatcggcgacgagctcgttgacgaccccggttgtggtggcgctgagcaagttcgtctgggccacggctacctttggtggaggcctaagtgcagaggtcgtcgcaaagcattactgcttgcatttgtag

SEQ ID NO: 20170 - DNA, 114 bp, Zea mays
  Peptide Sequence Number=SeqID_61949
atgggctctcctacgcgggttcggaggacgaccggtttcactctcctcctggtgcttctgttcctctcgccgcccgtgtcagctgatttaattagtcttggagttaaaagttga

SEQ ID NO: 20171 - DNA, 2628 bp, Zea mays
  Peptide Sequence Number=SeqID_61950
atgggctccgcagcggcggcggacgtggtcatcccggcgtgcgcggcggtgggcatcgccttcgcgctgtggcaatggttcctcgtctccagggtgaagatgtccgcctacgcggcgcccggcaacggcggccaccacgggggccccgtcttccggatggaggacgacgaggaggacgtcggcatgggcggtgccggcgaccgcgacgaggaggaggaggagaccgccggcgacggcactgtcgccgtggcgcgctgcgcggagatccagagcgccatttcggttggcgccaactcattccttttcacacaatacaagtatctcgccgcgttcacggtagtcttcgccgtggtgatcttcctcttcctgggctccgttcaccggttcagcactgacagccggccgtgccagtacaccagtggtcgcacctgtaaaccagcgctggcaaacgcggtgttcagctctgtggccttcctcctcggcgccgccacctctgtggtgtccgggtacctcggcatgcggatcgccacctacgcgaacggcaggaccaccctggaagctcggcgtggcgtgggcgcggccttcgccacggcgttccggtctggcgccgtgatgggcttcctcttggcctccctgggcctcctcgtactctacatcaccatcaaggtgttcgggctctactacggcgacgactgggagagcctgtacgagtcgatcaccgggtacggcctcggcgggtcgtcgatggcgctgttcgggcgcgtcggcggcggcatctacaccaaggcggcagacgtgggcgcggacctcgtcgggaaggtggagcgcaacatccccgaggacgacccgaggaaccccgcggtgatcgcggacaacgtgggcgacaacgtgggcgacatcgccgggatggggtctgacctgttcggctcctacgccgagtccacctgtgcggcgctgttcgtcgcgtccatctcctcgttcggcgccgaccacaacttcgcggcgctcatcatctccaccgtgctgatgaccgtcgccgcgcttgtcgtgtccttggcggcgctccccgccaaattcaccatgttcgatttcggagaagcgaagcaagtgaagaactggcacctgttcttatgcgtggccattgggctttgggctggtctcgccatcggcttcaccaccgagtacttcaccagcaacgcctacaggacgggcgctgcgaccaacgtcatcttcggcctcgccctcgggtacaagtccgtcatcgtgcccgtcttcgccatcgccgtgtccatctacgtcggcttcacgctggcatccatctacggcatcgcggtcgccgcgctcgggatgctgagcacggtcgccacggggctggccatcgacgcctacggccccatcagcgacaacgccggcgggatcgctgagatggcaggcatgagccgcaggatccggcaaagaaccgacgcgctcgacgccgccggcaacaccacggccgccattggcaagggattcgccatcggatcggctgcgctggtgtcgctggcgctgttcggcgcgttcgtgagccgcgcgggggtcgaggacgtgaacgtgctcaacccgaagagcgtgggcagcgcagcactgaagatggtggaggaggtgcgccggcagttcatcaccatccctgggctcatggagggccgcgccgcgccggactacgcgcgctgcgtcaggatctccacggacgcgtcgctcaaggagatgatgccgccaggagcgctggtgctgctcgcgccgctggtcgccggcaccttcttcggagtcagcacgctcgcgggactactcgccggcgcactggtttccggtgtccagattgccatatctgcttcgaacagtggtggagcatgggacaatgccaagaaatatatagaggagagacgtactggcaccctgcaagccgacgtgtcggtgcactgtgcggttgacttgcgcctgctgcatcgggtatgggctaaaggctgcttacggggtgcgtcagcgtccttgcacgggatgacgtcgagattccctgctgtgtttatcgagatcagagcccctgcttggtcgaggcgaaagtcttcccgaggcactaccacagttaggcggagtggccgtatgcgggattcgcgggtagtaggtggacgaggccgagctcaggcgaggcggagaatttgtctgagggccaaactcgtcgtcgggcgaggcggagaaatcacccgaagcctggacccggggtcgggcgaggcggagggattgcgcccgcgagctgaaccctgcttcgcgcgaggcggagagattgcgcccgagggccagtctgctctgcttgtcgtattaggcgtctcatcggaaggtggcaggcagcgagataattcggataaccctaattattacccgacactacgtctagcttgtgcgtctgatcacgccaagtctctgggccccaaggggtcggacgctcacaaggctgccgtgatcggcgacaccatcggcgaccctctcaaggacacctccggaccgtccctcaacatcctgatcaagctcatggccgtcgagtctctagtatttgcgccattcttcgccgcccatggaggcctgatattcaagtag

SEQ ID NO: 20172 - DNA, 687 bp, Zea mays
  Peptide Sequence Number=SeqID_61951
atggcggagcaggagcggagggacgcggaggctgggggcgatgccgcgggcgcagcggtggcgtctcacaccagcagcatgcagcgtgtcaaagtataccgtttggctgatggtgggaagtgggacgatcaaggaacaggtcatgtttctattgattacattgagggttcgaaagaactcggtttgactgttttagatgaagatgacaatgagacgctacttatgcacaacatcacatctgatgatatttacagaaaacaagaagaaacaatcatttcatggagagatcgtgaagcagcgacagacttagcactaagctttcaggaagctgcaggatgctcctacatatgggaacatatatgtgaaattcagagaaaccttcagttcagtaaccttggtgatgattcattccgctctgctaacggtgaattcagggaacttcctcctgttgagctgtctaatcttccttttattttgaagtgtagcccagggtgtgaagcagtgaaaggggttgtggggttgtttgccaatcgagacagtcttggaaccaggccactctgcttgcctattgaagggcattgcttatattgttggaaacctaacccatggagtgggctgagtgttgcatatattagaaaaaaggaattacatggggtcatgggctgggccaaggcccataacacttaa

SEQ ID NO: 20173 - DNA, 210 bp, Zea mays
  Peptide Sequence Number=SeqID_61952
atggagtctggggtgtggcctgaggtgtctactgaacagggtactagtgagattgctgccctcctccaggacgagcttgtgtaccctagggcagagcatggcgaggacgaatgctgctgcttccctggccctggtgctatggcttatccagaagcttctggaaagatgggaaggtatgagacatcagctggtactggagtggcccaatga

SEQ ID NO: 20174 - DNA, 423 bp, Zea mays
  Peptide Sequence Number=SeqID_61953
gggcagtggtggtcgtcggggtcgtggcttcactcggctcaacggcgtacggcgccctggctccggtggccggcgacgaaggaaactccggcgatgaagggcacgacagcgtctctgtgggtggctcatagcaagagagaagggcgcgaggggctagaggtttgggcagggctccagggcgcggcctcggattttatagagagaggtggagaagaggggcacccggcagaggaagaaacgggcggtaatggcgcccttgatggccattacggcggaggtttcctcattgatggggaagaagacgtgggggagaagaggggggacagagaagaaaacggccgccgcttgaatgctccacttccgtccggagccaagggggcgcggggtaggcgaggcggcgtgggaggccaagcggcgcggtag

SEQ ID NO: 20175 - DNA, 660 bp, Zea mays
  Peptide Sequence Number=SeqID_61954
atggagaagaccaacacagaaaagatcaccaatgagatgctggctgggttgtctgaggattccagcgatagcgatagttttgatgtggagagtgagaatgaagatgccaaagatcggtcgtggaggctgagccatgttgtttttgggaagtcaactatgcgcgtgtggctgcctcgagtcgtgcaagcctcccctcgtccagccgttgtttacgcagcggtcccacatatcatctcctcccttctcccattcacagctgcctcagccccgtgcttgtcgaacgccaaggaaaaccggcccccactccaccatggcccgccacattgcttggtcttcaagccccttgcagttcaaccgcatagcagtccccgagacgcgctcaccgccatgctgcgcgtggccacgcccggagcaagctgcgcccgcgattctccctcgtcgagttcgtcgcaaggtgagaagtccagagacgcggcgtctcgcaccgtccctcccgcgaagcctcgcctggagttcccctggacccgcccttcgttcattcatggtgagctcgcccccttcctctctccatacccctcctcctcgcctcttgatgtgctcggcatgacacacactcgccgtggccagagcccgacggaaatggcccatggccgtgcccgg

SEQ ID NO: 20176 - DNA, 237 bp, Zea mays
  Peptide Sequence Number=SeqID_61955
atggacctctccctgcgccgtgggccaaatcctcaccagaggcccagttccaaccttaacccgtttggcccagcctcccccgcgctttcgctcactggcaggagggtcctgcgcgtcatccgtctgaccagtggggccactgtgccagagacccacacccctgctgtccgcaactcggttggactcgccgcgcgacgcggacctccaccatgggcgcatcatgagcaccacggatga

SEQ ID NO: 20177 - DNA, 488 bp, Zea mays
  Peptide Sequence Number=SeqID_61956
tgataaatagtggactgaagaagatcccaggttctctgaaccttgtcgccggtgatcttcgcaccacgattcgggcatgcctgggagatttacgctgcgatagcatggacaacgcaggggggctaaaaagatctcgacacggaggggagctcaagccttatcaccgtactattcactacgccacttgccgcgcgatcggccgagatgccctcaccggagttcgcctctcctcgcagtcgtgccacgtacttaagggtgttaccacgtcgcaagaggtcgcattggacagcccatttaccgccctgagtccttaccccgctgagcgccacgcgtcggaggtgaagcccatgcactcgacaccaccagagcacgtcaccgccggcgagaatccgcgtctccggccaacatcattgttatacttcaccattgttgtgagccaaagctatccatctggtgatagcttcggcgtttactcttatcctctttag

SEQ ID NO: 20178 - DNA, 744 bp, Zea mays
  Peptide Sequence Number=SeqID_61957
atggcatatggccagactggtactgggaaaacttttacactgggaagacttggtgaagaagacactgctgctaggggaatcatggttcgtgcaatggaggatattctagcagacataacacctgggactgattctgtctcagtatcatatcttcagttgtacatggagatgatacaagatctccttgatcctgtaaatgataatatagccattgtagaagacccaaggactggggatgtttcattgcctggagccacagtagttgaagttagagatcaaaaaagctttgtggatcttctaagggtgggtgaggctcatcgtgttgctgcaaatacaaagttaaacacagagtcatctcgaagtcatgcgatcctcatggtgaatgtcaggaggtctgtaaaaggtagaactgaaatggatgtcagcatttctggtgaaaatgggctctcatcatccttggtagggtctttgagaccacctattgttaggaaaagtaagcttgtagttgtcgatttggctggatcagagcgcatagacaagtcaggaagtgagggtcatacgttagaagaggcaaagtctatcaatttgtctttaagtgctctgggaaaatgcatcaatgcacttgctgaaagcagtcctcatgtgcctgttcgtgattctaaacttacaagattgcttaaagattcatttggaggccaacattctgcaccatacaacacaacatgtctaatcgtcatcctatga

SEQ ID NO: 20179 - DNA, 846 bp, Zea mays
  Peptide Sequence Number=SeqID_61958
atgaccccgagctgctcgcgcggagtgaagaagaccgacccgacaggttggtcccaggatgcagtgacaccgcgagcaaggaggccggaggagctgagggcccacgcgccagggggactaggtggcaagcgcgccgcgcagcggatggcgagcggctgcgaccgggcgatggggccaagtgcagagagcgccagcgcgcgcagcgtggagagaaatgggctacgcacagatggtttatcctggtgggccaaaagtggccatttccaacatctgcataatgaggactctacggagaagcctcgtagtgagaccctagccattcacctcggaatcgtgctcacggttatgagcggcctggaccctcacatgataattgaacttgaagatgaaataaagcatggggcggaggacccaccgccgccgcgactccgcgagtccatcgtccgcgactcgcaccgcaacagctctagctcgggctggctgctccgctggccgctgctcctactcgatgctgtactgctatcgctctcgctcaatcgtgctcgtgctccatcaggcgtggaagtagaccaagcactcgcgctagtggagtttgcaatgaacccggaatacaagttggagttcaagagaataatagtgaagaagttgccaatggtgaaaatgttaatggtcaagtcgaagatgaagattatgatggtgaacttgatggatgctagtctagcgatgttgggggtctccttctctgtcgagggtcctcagaatgaaggaaacatgcttttcatcaccttcgtccaagaaccattatctttgaaagaagataatacttcgaaggacgaagatccttaa

SEQ ID NO: 20180 - DNA, 1068 bp, Zea mays
  Peptide Sequence Number=SeqID_61959
atggctcattccaacggcgcggccgccactgccactgccggcggcggcgacatggacgacgagaccgccccggtgccgcgggccctcgcgccggcgcggaaggtggcgctgatcacgggcatcacggggcaggacgggagctacctcacggagctgctcctgtccaagggatacgaggtgcacggcctcatccgccgctcctccaacttcaacacgcagcggctggaccacatctaccacgacccgcacgcggtgccgtcggccccgcgtcccccgatgcggctccactacgccgacctgtccgactcctcttccctccgccgcgcgctcgacgccatctcccccgacgaggtctacaacctcgccgcgcagtcgcacgtcgccgtctccttcgagatccccgactacaccgccgacgtcaccgcccacggggggcgctccgcctcctcgaggccgtccgcctcgcgaggacacgcccttccacccgcgctcgccctacgccgccgccaaaggtcgccgcgcactggtacaccgtcaactacccgcgaggcctacggcgtattcgcctgcaacggcgtgctcttcaaccacgagtccccgcgccgcggcgagaacttcgtcacgcgcaagatcacgcgcgccgtcggccgcatcaaggtcgggctgcagaccagggtcttcctcggcaacctctcggccgccagggactgggggttcgcgggggactacgtcgaggcaatgtggctcatgctgcagcaggaacagccgggggattacgtcgtcgccactgaggagtcccacaccgtcgaggagttcctgcaggctgccttcggctacgccggcctcagctggaaggatcacgtggtcattgacaagaagtacttccggcctgcagaagtcgacagcctcaagggggacgccaccaaggcgaggaaggtgctcaagtggaagcccaaggttgggttccaggagctcgtggagatgatggtcgatcacgacattgagctcgccaagaaggagaaggtcctggtggatgctgggtaccgtgatcccaagcagcagccatag

SEQ ID NO: 20181 - DNA, 993 bp, Zea mays
  Peptide Sequence Number=SeqID_61960
atggcgagcagcggggtgaggaacggcgtggggcccaggatgagcgcgaaaccggaccgtcagggcgccggcgccacgcccaagacggccgcggggaagcaccgcgtctcctcggcgggcggcgccggcgcgtaccgccggaccagctccggcccgctccccgcggcggcgggcggccgcgcggcgtcggacggagctgttgaggataatgaagagccacagttggtaaatgtgtcttcctgctggttctgtatgcatctcgtgtttgaggcttcaaatgaggtaagacttgatgtttatttcagtttcgttcaatttcagacttcaaaagagtgcattgtcaagggcgtcgagcccccgactagccggaccgcgtctacgcagctcgtagccgtcggccgtcctctccgaatctattcctccctggtcccagcagtttctagtagagtaagggttgctgtaaggcttaggcctaggaatgcagaagagttggcggcagatgcagattttggtgattgtgttgaacttcagccagagctcaaaaggttaaggcttcgtaaaaataattgggagtcggaaacatacgaattcgatgaagtgcttacagacttctcttctcaaaagcgagtgtacgaagttgttgcgaaaccagttgtggagagtgttatggagggatataatggtacagttatggcatatggccagactggtactgggaaaacttttacactggaaagacttggtgaagaagacactgctgctaggggaatcatggttcgtgcaatggaggatattctagcagacataacacctgggactgattctgtctcagtatcatatcttcagttgtacatggagatgatacaagatctccttgatcctgtaaatgataatatagccattgtagaagacccaaggactggggatgtttcattgcctggagccacagtagttgaagttagagatcaaaaaagctttgtggatcttctaagg

SEQ ID NO: 20182 - DNA, 399 bp, Zea mays
  Peptide Sequence Number=SeqID_61961
atggtggaggggtcaatttggtcggaggatgctcgggacggccagtccacggcgaggtggcgggcgcccacggtggtgaggtcgccggtgaggccaacgggtgtaataggcgagggaaaagaatccaaaagagagaggaagggggagctcaccggagatgaagatgacggcggcgctggctcaatcaagctcggggaaggggaaagaggtggccgaggctggggtgaagaagggtggagctcgggcggtcctttttataggcgcccggagaggaggaaggggaggtggcgagcaccggtgatgcttgccacggcagcgatgatggcgctcagtggtggcttcgggatggctcgggcagacagggtgacgagatggctcgggcaaacgaatcaagcttga

SEQ ID NO: 20183 - DNA, 264 bp, Zea mays
  Peptide Sequence Number=SeqID_61962
atggcgaaggaggaggaggaatctgagaacccggggccaccagtcagcggaacaaagggagagaaggcggacagagtcaatctgatgcgtaggtcccaccagtcattgaaggtttcaggcagtgtcggcgtcaggataggagttcgcgcacgtttggatgaacccggtagagggggctgcctagtggggccccatgggtcatccctagagctaaacgcgcgggcgctgttggaaatgacttccaattgtctaataccattctaa

SEQ ID NO: 20184 - DNA, 756 bp, Zea mays
  Peptide Sequence Number=SeqID_61963
atggagaagagctggggagggcgctggcttgagggagcagaggggtctgctcagccattgggggtgtcgagcgccaaagcgaggccaccaagaaccatggcttcaaggaaggagagggcacagtggatcttggcactggtgagtgctggggcggactatcgctgctgggcaaggccgcagcgaggccgagttgggcgtcaactggagacttgccaagcagggaggtcgagggggaagggcaccagatgctcatggcacagccatggccgagcagggaggtccgcactaggggaaggagcagagaagggaggcgccatggggagaggatccacgaacgaacatggaagggagaagagagcatttggggaaaaatggcggccgggtgggggcatcgtggcgatgggaggaaaagctcctgctggtagcggctgctccaggggaactcggccgaggaggcttctgctgcgggtgcccatgggaggaggggctagagcttggggtgccggccatggagagaaggggaggagacgccatgggaggagcggtgccacggaggagagcagaggcgtcgcggattctgggcgtccaagaggggtcgccggacctagggaagagcaggggcgagggggcgctagggaggtagccatgggagttcccttgctcctgcgtggaaccggagaggaggaggaagacgccaggagaacgcttctgcgtgctgaggaagaatttccctgcctggcgtgcgtgcctggttga

SEQ ID NO: 20185 - DNA, 756 bp, Zea mays
  Peptide Sequence Number=SeqID_61964
atggcccgccattctcttgctctagttctgctcgtcgtcatcgccatctcggttaccggtgttcagtccaagatgttcaccatcaccaacaactgcgtgcacacggtgtggccggggatctccaccggagcgagtccggcgccgccgctggacaccacgggtttcgagctcgcgccgggggagtcgcgtgccttgccggtgccgtccgggtggtcgggccgcgtatggggccgaaccctgtgctccaccgccgccggtacgggcaaattcacctgtgtcactggcgattgcggctcaggtctccaggagtgcgcgagcggcaacgccgcgccgccggtgacgctcgcgcagttcagcatggacgggagcggcggcatggacttgtacgacgtgagtctcgtcgacggatacaacctgccaatggtcgtggtgcgccagggcgccgccgcggaggggaactgcgtgccggcagggtgcgtggtggacctgagcggcgcgtgcccggccgagctgcgggtgcccggcgtcgtggcgtgcaagagcgcgtgccaggcgttcggctctccccggtactgctgcaccggcgagtacggcaaccccgacacctgcaagccgtcagcctactcggagttcttcaagaaggcgtgcccgcgggcatatagctacgcgtacgacggcaacacctccaccttcggttgctccgccagtgacaccggcgtctatatcatcaccttctgcccaagcacgtccaggtag

SEQ ID NO: 20186 - DNA, 144 bp, Zea mays
  Peptide Sequence Number=SeqID_61965
atggagatcggaattgggaggaccttgtcggtgtttcgggtccgaccacgcacccagggttaccccccaagccgactcatcttcacccagttccgatgtacggggctcctgcgcgggaaggtcgggtcactgcccataacttga

SEQ ID NO: 20187 - DNA, 294 bp, Zea mays
  Peptide Sequence Number=SeqID_61966
atgcccccaacagtgtccttggacaacaatgacgacctgatgtctggacattggatgggcttggtctcctcctctgacgaagatgatgagaacgacgatggcagcaatgactacgacatcagtgacgaggacaacgacaacagtggcgacgatgacggcgatgatgatggcggggcaagccaaagcgatgagatgcctcccagcaagcgtcatcagctgcagcatgataacttattatggagtttacaagcacaacaggagaggggaagtccccaagtccctagagatgattga

SEQ ID NO: 20188 - DNA, 195 bp, Zea mays
  Peptide Sequence Number=SeqID_61967
atgccctgcataaggtcaccttttttgagggccctaagcttcacttcacttagccttcaaagtaccttcaagctatcttgtgcaaagaagctgaagcaattgaaaaacaagtgctcaacattcccgttgaaggaaaatatcatgatgctaccgatggaggagaataagtgtcctagatcaagagtgtcagaataa

SEQ ID NO: 20189 - DNA, 234 bp, Zea mays
  Peptide Sequence Number=SeqID_61968
atggcaaactcgaccgtgggcacaacgctggagcgggcggcactagagggcgcagaacatggcgggactcaggggcgcttgagcgatggcggggacacggggaagcctcaggtctacggtgggggactccggctgcacggggagtccccctcgccgctggcgatctgcgtgcccggattcacgccgatcaccgtgattcgtgcctggcacgcgttgatattcgcggggaggtag

SEQ ID NO: 20190 - DNA, 1923 bp, Zea mays
  Peptide Sequence Number=SeqID_61969
atggctgagggtagctggaccccgactgccgagctacctctgcgacaggacccggcggtggacgacgacctgccgcaggtggtggtccaggagaagcagcatggcggcggtgctgccgctcggactgcgatggcgacggcgacggcgacgcgggacgggtcggtgggttggagcggcaagccgtgccgcagagacaggtccgggggatggttcgccggcttcctcatgctcgcgaaccaggcgctggtgacgttcgcggtcaactgcgtggggaccaacctggtgacgttcatgtcggtggtcatgaggctggacaacgccgacgccgccaacaaggccaacaactgggccggcaccacctacgtcttctccatcgtcggggccctcgtcagcgactcctactggggaagatacaaggcctgcaccatcttccagctcatcttcctcgcggggctggtggagctggccgtagcctgccacgtgttcctcgacaagtcctgccacttcggcggcggcggcggcgggcggcaggagcactgcaggccgccgacgacggcgcagtccctcgtcttctacgtctccatctaccagatcgcgctcgggaacggcgcgtaccagccggcggtcaccacgttcggcgccgaccagttcgacgagaccgacgcgcgggagcgccggtccaaggccgccttcttcggatacttcttcgtcgccaacaacctcggcggcgtcctcgccgtcaccgcgctcgcctacatggaggacgagggccagtgggtcctggccttctggatcgccaccgccgcggcgctgctcggcttcctcctcttcgccgtcgggaccatcaggtacaggcacttccttcccagcggcaacgctgttgtcagcgtctgccaggtggtcgtcgctgccgtcaggaaccggcgcgtcagagctacggttcgagcgcaggatatgtacgaccccgataccgatggagatcgcggcaagaagggggtcaggaagatggtgcacacaccagagtacaggtgtctggacaaggcagcggtgatcaaagatccagcgtctgcgttccgagcaccggcaggtcaaccacagggccattcctcctccaagcccaacccatggaggctctgcacactgacccaagtggaagaactgaagtgcatcctgaggctagtcccgatctggctctgcagcatcctctactccacctcctactcgcagatgtcgtcggtgttcatcgagcaggcgcagaccatggacgactccctgtcgaagctgacgatccctcccgccggcatggacgtcttcgagatactgggcgtcacggccttcgtgttcatctaccgcttctgcatcgtcagggtcatggccaaaatatcgcacgagccgacggagctccagaggatgggcaccgggctcgtgatctcggccgcggccatggtcgcgtccggcgtggtggagcagcagaggctggcgcgcgccacggccggcgtcgacgcgtccagctctctcagcatcctctggcagatcccgcagtacctgctgatcggagcgtccgaggtgttcatgtacgtcaccatgacagagttcttcaacgaccagctcccggaaggcctgaggagcctcgggagcgccatgagcgtggcctccatgtcggccgggagcttcgcgagcagcctcctcgtcactctggtgatggccatcacctgtagaggcggccggcctgggtggatacctcaggatctcaacaagggccatgtggactggttcttctacctcatagcagcccttaacgccgtggacctgctggcgtttgtggtgtttgccaagaggtatagaccggctccggtgatcatacatggagaagatgaaaccggtggtgtcgagaaggcccaggatgcggaggaatgcatttga

SEQ ID NO: 20191 - DNA, 393 bp, Zea mays
  Peptide Sequence Number=SeqID_61970
atggtgccactccctcataggtatcacgaactagccactggttgtaccatccacttttttgctttgataggattacttataagagcttggcccttttcaaagttcatatccaacctgcctgtccaagacgacagtctagaccatagagtgtgctcctctttagaagatatcgaggccttcattgccacgtaccgaaatctccctgaagaggagagaccgacccatctccagatgcaaatgactgctgatgaggctgaaacaaacgttgttcttagtatgctagtgggcgagtcatctgaatctgcccgtactaaatcagcaagcgctgcagctgggcgcgccctcagcaaggatgaaggagcttgcagttctggaggtgctcatcgcaaatga

SEQ ID NO: 20192 - DNA, 444 bp, Zea mays
  Peptide Sequence Number=SeqID_61971
atgggcaagagcaagaaaggtggtggctcttcgcatcactctggcgacaagcgcaagcgcgagccgactcctccctcggaggacttcagcgactcggagtactcggaggagaaccctcctccgaatgactcccaaggaatcgccgcggaggtatggacttacatccaggccgtcgagcgcgctgggctcgagggctcggatgagtcggagtactcctcggacgaggagaattcctccgactcgtccgaggagggcagcggcggcgacgacgacgacgacggaggcgacggtgacggcggtggcgatagcgacagcggcaagggcggtgacgacaacgacaagggtggcagcggcgacggcggcggcggcagcaagggcagcagcaagggcagcaacaaggccagtggctatacgccactggttttagatgttagtgtagattag

SEQ ID NO: 20193 - DNA, 138 bp, Zea mays
  Peptide Sequence Number=SeqID_61972
atgggggacttcgtcgtatcagctaggaggtcctcgacaacggcgaccacacagaggcccatgcaagaaaggggcttgtcatcattgaagccactacggacgaaggcccctcgacaagcgaaggaatgtagcaggtaa

SEQ ID NO: 20194 - DNA, 129 bp, Zea mays
  Peptide Sequence Number=SeqID_61973
atgagatttattcacacccctgaagatgatgtggttttatactctcagagggaaacgttatacaacctattgtcgttgttcgaggaaatgagatggtgcttgatgctcatcaaggggagtaagaagtag

SEQ ID NO: 20195 - DNA, 231 bp, Zea mays
  Peptide Sequence Number=SeqID_61974
atgggcaagagcaagaagggcagaagttcgtcgcaccattccggcgacaagcggaagcgcgagccaagtcccccctcggaggacttaggtgactccgagtactcggaggaggagttttcctccgagtccgaggggtcgctgcgctttagaggtagctgccaagttatgctgggcaacgtcggcgctttagaggtagctgccgagttatgctgggccacgtcggcgctttag

SEQ ID NO: 20196 - DNA, 465 bp, Zea mays
  Peptide Sequence Number=SeqID_61975
atgcggaggggatccggggctgccgctgcaggcttgctgcggcgttatgtcgagcacgccgagggtgcaacgcaaaagagatccacgtggctgcgcgaactggcgtcgcggctgctgcgtgaggtacgccagggagtcctggacgcgacacggccaaagcacagagtgtccagcgcggctggaaaaagtgacatgtggggagggtgctcggctggagcagggtgtgcgcgtcgggcgcgcagccctcggaatgaaagctggtgctggggaggagatggagcagagctaaggcgtgaggagggaggggcgccactggggattgcgcgcgggtctagcctcctgagaatggcgagctcgagctgtgagccaagaggacgcgcgaggccatgggaggatgggcatcgggctctgctgttgtggggaggagaagctgcaagggaggggcacgtccatggcagggaataa

SEQ ID NO: 20197 - DNA, 1119 bp, Zea mays
  Peptide Sequence Number=SeqID_61976
atgtctacttccccgttgtctcagaagcctggccgcaacgtcggcgctgcgtcgtcggcactggggatccggatggacaaagagttcctcgctatccaaggccacctcaagaaagcgaagaactacgcgctagcgccacaacgtcgacgatcaccatcaggggctcgtggtgtgtcgtcgacaccaaggaggacgacgtcgcgagccaaggcatcaacggaggctgcgtatcagactcggatcacggcaccagaagcgaactcgaagcaacagcagcacccatacccgatccctccggcagttcctgataacaagctgcgaccggtcgaggcttctacttcatcgtctcagaagcgtggccgcgacgtcgacgctgcgtggtcgtcggcactgcagctccggatggatgaggagcttccagtcctccaaggcctcctcaagaaagtgaagcccttgccccgttccacgttccttgccgccgacgagaagaagaactatgcaccatcacctgcaggacggtcatccacatcaggggctcctgttgtgtcacgtggccacgacgtcgacgctgcgtcgtcgtcggcactgcagcttcggatggatgaggagcttccagtcctccaaggcctcctcaagaaagtgaagcccttgccccgttccacgtctcctgccgccgacgagaagaagaactatgcaccatcacctgcaggacggtcatccacatcaggggctcctgttgtgtcgcgtggccacgacgtcgacgctgcgtcgtcgtcggcactgcagctccggatggatgaggagcttccagtcctccacgacatcctcaagaaagtgaagcccttgcccccttccacgtcccctgccgccgacgagaagaagaactatgcaccatcacctgcaggacggtcatccacatcagtgcctcctgttctgtcgtcgacagcaaacacgacgacgtcgcaacccaatgcagaaaccgagtttgtgtatcagaaagaaagggaggaattccgccaaatgctgatggagatggagaagtcggcgctgcgtgatgagacgatatacccagaggacctacaggagctcggcctctcgcaccattggtacatgtcgtga

SEQ ID NO: 20198 - DNA, 189 bp, Zea mays
  Peptide Sequence Number=SeqID_61977
atgggccaatctattctgaaggagaaggacttgaagaagatgaaagagcctggctacttcgggaacaagggcaaggaatggttctacgctgaagtgaattatgagcatcatatagactttaaagatatgttgatgagtccattggagattagcttcggtctgaagagaccgaagtgtgacatgaattaa

SEQ ID NO: 20199 - DNA, 552 bp, Zea mays
  Peptide Sequence Number=SeqID_61978
atgaagcaagctaaatctattgaagaagaagccaaggatactgaaattgataatgaagaagagtcacctacggacaaggaaactcctttaaagaagagagctaagaaaacaattgcacaagcacagggtagcacttcaaccacatctctgggctacaccctgattcttgaggtaatgactcgacctctgcccttgtccactctgagtcctctaggactagagctgactagcctattgcttaatgcaaagggaacatgcaaaggtgggcaagcttcgacactcgtggagactgaggagcccccatcagaagtggagagcccacgaattgaatcactcatggaggcaatctttagggcttcgtcgctagaggaggatgaagatgaaggacagaatgtcgaaggtgaatgtgtgcctaaagctggtgaaggtagaattgttaggaatattgcccaatgcatcgagtttctaatgattgagacatcattgagccaacacaagaatggaaactttcacaaagcttggattgcactagcatcaagggcctcatgctaa

SEQ ID NO: 20200 - DNA, 333 bp, Zea mays
  Peptide Sequence Number=SeqID_61979
atgcggaagtcgtcgttcttctgggacgagccgaagtccggcctggagtcggcggatgcggagttcgtcgtcttccggggcgaggccgagtccgagtccgagcctggggtcggcgaggcggagtttgttgtctttcgggccgaggccgagttccgagccctagggtcgggcaaggcggagcttcctatggtgcccgaggcccggacttggctgctgtcagcctcactctgtcgagtggcacagcagtcggagcagcacaggcggcgctgtcctcttgtcaggccgtcagtggagcggcgaagtgactgcggtcacttcggctctgtcgactga

SEQ ID NO: 20201 - DNA, 243 bp, Zea mays
  Peptide Sequence Number=SeqID_61980
atggagactcgtcgtggttcgtggaaggcaaccagagcatcaatgcgtgaagggaaccatcgaagcatggggaatttgtccctggagtctttcctgcgccgcggatctgtcactcaccgtgggctggggttgtcactacataactatggggtaagaagtctcatgttagagtctctgtgtcttcggcatcgtgaagagctatcaggctgtggttctcgtctacgatctcaaagcgacacatag

SEQ ID NO: 20202 - DNA, 591 bp, Zea mays
  Peptide Sequence Number=SeqID_61981
atggctcgttttagacacactgcacggaagtcagtcattcctttcttgccttctcgtctcgcggagcgtccgcttcatcgtccggtgaatagtcagtctagtcatttggagaggctgcaccaccgcctgcacgaggagcaggagcgtcgacgacaggagttggagcagcaaggctcttcttcctcgcctcagcaggaggtaaagtctgtgaggagctgctcccctgtgccctggctggaggcgccccctacaccaccattgggcgtctcggccactggagtagctgttggaggagaccccgacgacggagcacagtcgcggggtttacccggaccgctaggaggcgacttgtttagtgcgccgtccagagaacagtctccagggtgtggagtgctcggtggggtggtcgatggtctcaacatgaggtattacccccgccgtctatctagcagcacaagagacgtggttgtctcacttgttggtgaggacaatcctaggttgagcagcacagtcaacctagccgtcgtgctaaacacggagctggaccatgacttagatgagctgagtagggctcgtgctgagatcgcctag

SEQ ID NO: 20203 - DNA, 807 bp, Zea mays
  Peptide Sequence Number=SeqID_61982
atggtcgtggcctcgcccgtgctggcctacttcccctcggcggcccccttgtcggaggcctccgcttttagcactgttgctgccctctccgacgacgctctgattgcggctgtggccaccttctccacctacgtccccactgccggtgctccgcccatggcccactccctcaccgaagcgccgcctacgccgatcaccggtggccctacgcatcccatggctcctgacgtcctcgaccctgcctttgccctgaccgccggcgccaccaccttcctagctctactaagttccgttgggaacgctatgcgaatcctcctacacgacaacccagcttgtccggggcattttcgtggccttcgattgggcatgaaccttatttcccgtgattgcgtcgagctcccccctcaggcgggtcaaccccatgcctggaccgccgccttcccccgtgttgtgattgcctccctggtgatcgagaccccgttgtctccctccccacctagtggctatgtcgggagcacctcccctgactctctcttcgcaccacgtgccttcaccacctctccctctccaaccgattcggtggtcgactccggagcctccttccacaccactcctaccaccagctcgttatcccactaccttcttccacacccctcacatccttcctctatcgtggtggggaacagtttcacccttccggtcaccttagtaggtgcatcggttctctcgggacccttctaccttaacaacgttcttgtagctccccattactcatcctcttctctcggttcgtcgcttcacaagtga

SEQ ID NO: 20204 - DNA, 894 bp, Zea mays
  Peptide Sequence Number=SeqID_61983
atgagcaaaaagaatgttgatttgcatgcagaaaggcacatcatgccattgttttcaaattgcttaagttcatataggcatttattgtctgaatctcagttggagaactcatacagtggatggccttgggatgccatgacaaattatgcggaagagttatcaccagtatctgagcaccaaaatgaattgttcacattgtctcctgaactattcaggaatgcatttcttgttattcatcaagctggtgggcaaggagttaccttgagagaactttcgcaggcactgcatccgttaggtaagccagcattacaatttttgttcttacaaatctgtgcagccatgcagctggtcttaataattgttgacactctcaaaagatttcagctggctgttaaggtcaatgcatatgatggcgttcagattgtggactcattacattcgtcaaagtatcatatagctacacttgcagaatgtgatagttgctgctgtacagatcctccaacttctcaatttgttgataatgaaaacacaaaaaatctactgaaagagaagcataccaagcctattaattttcctggtccaataaaaatgcttggtgatgggcacacagtgacagtaattaatgttcaaagcaagttgagcccaccttacatgcacagcaaagatcctggggatgcggaaaggttatctactccaggagagaacaataaggagagtagtttctatcataattgtgaaaggcattgttatcagcctatattaaatggtgatggtagtactaatagcactctctatgaaggtttaagtcgccgagttattggttatgtcatgcactatccaggactatcggtggtatatttgcttttattgtttgtgcctgctctttctaaatag

SEQ ID NO: 20205 - DNA, 411 bp, Zea mays
  Peptide Sequence Number=SeqID_61984
atggcacccaggatctggaactccaggtgcagcgtggatgttcaggcgagggacacgaggcgacgtgagcagagggagcagaagaagcagcgtcggatgcgaagcagagctgcggcgtgctctccacgtcggctgctaccaccacaccgccgcagtacgagcataactcgggtgcctggtacgtcgccaccacgcccagggatggaggaggaagaggagatcagaggggaagaggagagtagaggggaaaggggactcaccgctcgaggggccttgtcccgctctgcacctggagttcgccgctcgccggccagcggggtgaaggagccggatctgaggatgagaagggctcgtgaggggctttgtcccagggaggacgcaattgtccgtccgattcagagggatgaatag

SEQ ID NO: 20206 - DNA, 216 bp, Zea mays
  Peptide Sequence Number=SeqID_61985
atggtccttagagaaaaggaagatgttatccgtaggatggatgtattgaatcctcagacttgcaggaccctgctagaaaagctaacgctcgatgggaaccttcatgttcgggtttttgaagaacctgtgccaatggctccgaccacactgcagggagagggtgcgcactctcatgctcgagacactataaatgggcgttttttgttgcgcaaatga

SEQ ID NO: 20207 - DNA, 2064 bp, Zea mays
  Peptide Sequence Number=SeqID_61986
atgacttcacagcaaagaattgagattacaaagcctgaactacttgggagcaatgaagaggccaatgtagatgcttttcgagtagatggagcttttgatgttaactccaagaatgatatatctattcatgattatcttccagcaatgaaagccatatgtgataaacttgaagaagcaagtggaaaggtcgactgctctcacattttccctattaaagctatgctggctcttgttgtgtcagatataaaagttgatctcgactacaggatggcatatgggcacagagcatggagaaatgtggtgatacgtgaattgattccattcctcatactgagcaaagtattgcatagattaatagatgcacgacttgtggagatatttgatgtcgaagatgatgataaggttgtccgttgtttgcgtctactgaaaaattttgatccaaatgagtttcagccaaaaagtatagcttcaaattttaaatttgttaaaaaaggtcaggcaactgatcaaattttggaacttccattagagaactgtatatatgatatgatcagtagccaagggacaaaaggtattacacttgttgagattggcaaacatcttggactcaacaattcaaaaaaacttcataaacgagtatcatccatgctaaaaaaattcaacctaacatgggaagcagaagttccagacaagacatcgcagtaccgaatttggacttcaaaaaacttctcactctacaaagctggtactgctctgcaaaattttgaggcactctcagaagactgtgatgattgttcggatttgtggtccctagtttcatctaaagatttggaatcacctagttcacagggcaaattactcttgcttgaagaagagaaccatgacaaaccaattggacatcatatccagaacaaccgtgatgcttctgctgcagtttcccagttagttgaagaaggttgcaaccaaattgctattaaactcaataaacaggtcagatttttcctaggtgttggctttaggccaaagaagaaatttgtactgaaggtggagttacataaatggttagaacggcttgaaaagaaggacgggaaaataatggataggaagacattgactcgcacgttgaataagcttcagcaagagggaagctgtaaatgtatcaaagtcagtgctccattggtgacaaattatgctcgcagtcgtctctttgatgtaatactgcattcttctgttggagacgtgtcaccagaacttgtggagcaatttaggaccagacaaaggaactttgacaccaaatctcgcgcaggtgcagcagctaaagtgaagcaaaatcaacatatgactgccatacctggtctgaggatttcacgcagagttaaagtttacaaaccattactattagaagctatgtatgcaaatggattcataggcgcaaagatgattcgagcaaagttatttcataaatttctgtgggcttatgtcaattctttgccaaattggtgcaatgcatttggttgtaccaaagcagggcagtatgataagagccttaatcaatcatgcctgttattttctatggaagcagctatgaaagaaatgccccttgaactctttctacaaattgttgggtcagcaaagaagattgataacatgataacgttgtgtaggcttggaaaaacactttcagaaatacctacagaggaatacaatcagatcttggatactcatgccaatggccgactctcacgtttagtaaatattttggacaagctcaagctggttcagcttgcaaaagaattcttagaagatgctggtgtatcgtcaaatgccatgtatacacattcgatggagctcaggccttacatcgaagaacccatgccaagaattcttccatcttcccaactgaacaatcatcggaaaattcggcatgattttgtactttcaaagaaagagtttgttgattcttattgggaaacactagagtgctgttatttaacagctggtttggctgacccgttaagtgccttccctggcagttctgtcccggaggattatcgcatacgttga

SEQ ID NO: 20208 - DNA, 1476 bp, Zea mays
  Peptide Sequence Number=SeqID_61987
atggccgccgatgacgttcgggttctgagcatttcgaacacgctgcaattcgctgatatcttcaccaaagggctgccgtcgagggttactgggagtggtgggaagccgtacaccctttcttcacaattcttaaccaatgcttgttgttcaccttttccatttggttcagggaaaaaggcttctatattttctaattggcttatagctcagcaaaagaatactacagacagtggagtttatttgtatccagatatacaatgtggagaaattgttcatctattctctctggttttgtcaggaaaccttctcatttcacctttcttgcctagtgaaggagttggtgaggctgatgagcctaacagctctggtcctttggtcgtagataccagcggtttggctgacaacagtcataagcgcaaggctgatacagtgaaactgaaaagcagcaaggctaagaaaccgaagcctttgccaaagatagaaagtgacttttgctaccgccgggagaaaggatttcctgctatccaaataggtctaaatcttcatagaattcaaacaagcaatttcttgcaagagtttcatggtaaagaatcctctatttttacttcaagctgggcaatgagcaaaaagaatgttgatttgcatgcagaaaggcacatcatgccattgttttcaaattgcttaagttcatataggcatttattgtctgaatctcagttggagaactcatacagtggatggccttgggatgccatgacaaattatgcggaagagttatcaccagtatctgagcaccaaaatgaattgttcacattgtctcctgaactgttcaggaatgcatttcttgttattcatcaagctggtgggcaaggagttaccttgagagaactttcgcaggcactgcatccgttaggtaagctggtcttaataattgttgacactctcaaaagatttcagctggctgttaaggtcaatgcatatgatggcgttcagattgtggactcattacattcgtcaaagtatcatatagctacacttgcagaatgtgatagttgctgctgtacagatcctccaacttctcaatttgttgataatgaaaacacaaaaaatctactgaaagagaagcataccaagcctattaattttcctggtccaataaaaatgcttggtgatgggcacacagtgacagtaattaatgttcaaagcaagttgagcccaccttacatgcacagcaaagatcctggggatgcggaaaggttatctactccaggagagaacaataaggagagtagtttctatcataattgtgaaaggcattgttatcagcctatattaccatggataaatggtgatggtagtactaatagcactctctatgaaggtttaagtcgccgagttattggttatgtcatgcactatccaggactatcggaggtatatttgcttttattgtttgtgcctgctctttctaaatag

SEQ ID NO: 20209 - DNA, 267 bp, Zea mays
  Peptide Sequence Number=SeqID_61988
atgaagcggggcgaccaccgacagaaactctccacagtccacggggacagggagtgcacgactgtgacagtgcgaggcaagcacgctccgcacgcgggggcgccggttcggcgctactttggggatcttgtacccgcggccgcccgctggctaccggcgctgttatgcgccgaggtaacacatctcggcgtcataggctatggcgccgaggtacgtgctgcgctgacacaacctggacgacgtgacgccgaagtgaaagttgcctag

SEQ ID NO: 20210 - DNA, 666 bp, Zea mays
  Peptide Sequence Number=SeqID_61989
atgcctccatatcctcctgttggaaacatcccagttcaccaatcaagacaagaacaacctcctccgcacctccatcccagtgggggtatgccaccataccctatgcatcctttcagacctgatgctcctatgggccactttgaaatgggtgatcatcggccacctcctgtacattcgatggaatatatgggtgctgatagaatgccatacttgtatggtgttgaacaaggaggtcctcgcccttttctagaacagccttcgccaagaacctgccctcctgaggcaccaaggacaaacagtgaagttcccagaaacatgtctgatgcagtgccagctacagatttcagaaagggaccagtggcaattgaaaaccaagtggctacaccaacaggcacaactgaagttatcattccttgcaattatataggctttgtctgtggaaacaatggcagtgaaattgaagaaatagagaagatgtcaggtgcttcaattacagttcatgatcctaaagctggcgacgcaaactcaaaagttgttatatgcggggatccccgaagaaacaaagaaggcacagagcctgattcatgccttcatattctgtggtctgtatcaaacataattgatgacttgatcactgtgcagtaccatcgtcgtttatgttcttga

SEQ ID NO: 20211 - DNA, 822 bp, Zea mays
  Peptide Sequence Number=SeqID_61990
atggcgtcgagattccctgccacgcttatcgaggtcggagccccgctcgagcggtgctggacgagccatcacctgacgtgtgccacagttgggcggagtggccgtctgtggcatttgcggcggagttggtggctgaggccaagctcgggcgaggtagagaattcacccgaaggccgaacccgttgtcgagcgaggcggagaagttgcgcccgaaggctggtctcttcttcgggtgaggcggagaagttgcgtccgaaggctggtcgctgcttcgggcaaggcagagaagttgcacccgaaggctggtctctgcttcaggcgaggcggagatggcacgcgaaggctagtctctgcttcgggcgaggcggagaagttgcacacgaagtctggtcgctgcttcgggcggggcggagatggcgcccgtgggctggtctctgcttcgggcgaggcggagaagttgcgcccgaaggctggtcgctgctttgggcgaggcagagatcacgtccgtgggctggtctctgcttcgggcgaggcggagatggcacctgtgggatggtctttgcttcgggtgaggtagagaagttgcactcgaaggctggtcgctgcttcgggcgaggcggagatcgcgtccgtgggctggtctctgcttcgggcgaggtggagaagttgcgcttgaaggctggtgctgcttcgggcgaggcggagatcgcacgcgtggactgtctctgcttcgggcgaggcggatatggcgcccgtgggctagtctctgctttgggcgaggcggagaagttacacccgaagggtggtcgctgcttcgggtga

SEQ ID NO: 20212 - DNA, 378 bp, Zea mays
  Peptide Sequence Number=SeqID_61991
atgaccaaatggcaatactataggtgccactactcagtctacctacccacacaaattactatactggcttgtaatggtccaaaactgatctcactgcatgggtgcatctctgaagcacttcgaaatctggagaagatgcaccaagaaaagcagctggacaaacttgtcgacaaggggctggggagcaaatatgaccgcattgagctagaggagatgatgcaagtggcgctgctatatacccaattcctccctggtcataggaccaagatgtcaaaggtggtcaggatccaagagggcgatgggcttgcagagcggtgggaggcatcacaacacatagagtcacacaaattcaaggtgcccgagttttccttcagctga

SEQ ID NO: 20213 - DNA, 420 bp, Zea mays
  Peptide Sequence Number=SeqID_61992
atggacgtgggcgaggtgcagcactggaacgcggacgtcaacaatgtctccttccatgtcgccgagcagggcctcgaggatgggccagcggtgctcctactccacaacttcctggagctctggctctcgtggcgccacaagatagccgagctggccgtccgcgggcgtggccctggcgccggcgaacatgtcgggaacgcaggtgagggaggcgaggtcgagaggaggcaagggcgtgacataaggactggaggaacgacgtgggggaatctggtggacactggcgatggcaaccatggtccatggccccggacgtgtatgagacacgacgaccagcattttccagtcccagcgaagcgaacacactgcaccgacctgtttccacttcttgggcctggacgtggtcctcgtttaggctga

SEQ ID NO: 20214 - DNA, 594 bp, Zea mays
  Peptide Sequence Number=SeqID_61993
atggcgaggaccacgcggtcggcggcgacggagcgcgcgtacctccacttcgcgccggcgccgcacggaggaggcgtcgtcgtggtgccgacgagccccctagcgggcacgggcgaggacttcgacgagtcggacatctggggcgcgttcgccccgagcgccgctgctgcgcctgctgccgaggcgccgccgccgcgggcgcgcccgtttgtgctggccgcggccgggaaggcgacgacgaagccggcggctcctgcgcacgggtccctgccggtgaagatcccggactggtccaagatcctgggcgacgagtaccggcccgcgggataccacccacggctgggactgggagcacagtctgctgctgcagtgacatcaatcatcggtgatctcatcctcgtcgtcgggagcccaggttggcagctgcaagaagatggaggaggtggaatctgctgcttctctctctcatccctgccggcgccaactgtctgcgaagaaaccattggcagtgcgctcggatccgcccagaaagtctcaccaataacagctcttgcttaccaagggaacattgctcttgctggcgtgtcgtcgtag

SEQ ID NO: 20215 - DNA, 609 bp, Zea mays
  Peptide Sequence Number=SeqID_61994
atggcgtggcgaccggatgaaggcaggcagtgctgctacaaggaccaattcatcgcgctggtggtggaatggctgaaggtgccgccgccggagccaccatggtcgatgcgcggcaggtgtggcggcccgccgcttcctgcagggcgagctcgtgctcgccggagaagtggaccgccgcggagcctgggtggaccaggtgcagagcatagtcgagacgctgcgcgttcctggcgctgtcggcagcagggtctcttgagcccgtccaggcgctcaacgccccgtagatgctcgccatgtgtcacagacacaatggaagatgcagcagagaagccgatcaataaggagaaagaacagcttcatgtatcaggttcgacagaagtcataggtgctttggtgaatgaggaacaagccacaacagaagatggagccgaaaagcgcatcaagaggcccaatacccgtttcagcggtcaatgtaacatggagaaggggaaggaagggaagagcagaaaagggtggaatacagagttggtattgggaatagtttctccagttcaattttggtgccaggtcatattgcggctagcgtttttaagcatccgcgcaaaatag

SEQ ID NO: 20216 - DNA, 261 bp, Zea mays
  Peptide Sequence Number=SeqID_61995
atgtctcctgaatatgctatggaaggctcattctctatcaagtctgacacatataactttggtattctactactggagattgtaatctgcttaaagattggctcaccccatctaataatggaccatccaaacctcattacttataacatagtttcattggttcaggcatggagcttatgggaagatggaaatgtaagggaattggtgcactcgtcggttttggagagttgtccatcgttatctgcagtcaatgagagctag

SEQ ID NO: 20217 - DNA, 1497 bp, Zea mays
  Peptide Sequence Number=SeqID_61996
atgcctggcaaggcctgtggagcccggaggaggacagaggcgccgggcagctcgggcaggacgaaggcaggagggaggggaggggaggggaggggtagggcaggccggagttggagaccgccgtctaatcagctaattgacgtggtaaggtcgtggcgccacaagattcacggtgagcacagagtgcgggtcgcaattcaccggtgggcgccgctgtgggctaagggcagtctcgtggagaacctttttgaacgatcttggcttcctggaattaggaacgtggatttgctgtggagtctactactctcgagaatcttgcctaagctgctcggtcttcctggtattttgctgaagaaattccgaaaggaaggctcggtttgctcgtcatggcatgctacctacaaatgcctgctcgacctgaggcaatacaagcaaccccagacaccatgcctgttctacacttgtgaatctaccggtagcaacgtagggtttctatacagcctcaaggaaaataggtcctacaagttaactctatcggagccacccatccgtagtaggttactggtcgggtcctccaacggttggttgattactgcagatgagaggtctgagctgcatcttgtgaatcccataactggagaacaagttgcacttccctctgtgattaccatagagcatgtgaagcccatctttgatgcatcaggtactatccatatgtatgagttgtcatatgagacaccacccgacctgtttgatcttggcgatctgcgcgatgagctctacttcaaggcatttgtgtttcctgatccatccaccactggaagctacatcgtggttcttattcatgagccacattcacagctttcgtttgcacgaccgggagatgacaagtgggcctgggttggacaaggtcgcgaatataaagactgcacatatgtggatggtcttttgtatacagtgaattactttggaaaaattgatgcgtttgattttaccgcatcccctgttaaaatgacaataattatggacgagctgaagtatcctgtatgtgaaaacatgtacattattcaggctccatggggtgatttgctgcatgtttggaggactattgacgttccacccaatgctccgtcgtgggtccctggaaaatgcctgtcagaaaccttaaaaatacaagtttataaaatggacttggaagcaaagcaacgggtggaaataaacaggttgcagtgtgatagtgttttatttcttggccacaacgattcactttgccttagtgctcaagtacatccaggactcaagtcaaatcatgcatacttcactgacgattttaaagaattgactgttttattaaaaaattgcatgcgtgatatgggagtcatggacttggaaaatagtgtcaagaaggaaattgtctctcaaatttggtccaactggccctgtcccacttggataacacccaatcttatgaagctgaatcaggcattcaacatatag

SEQ ID NO: 20218 - DNA, 336 bp, Zea mays
  Peptide Sequence Number=SeqID_61997
atggagggcagagtccgcatatgccccctccagccatcagtagccacgggctatcctgcgcccaccacctgccctacccctcccctcccctcccctccctcctgccttcgtcctgcccgagctgcccggcgcctctgtcctcctccgggctccacaggccttgccaggcatggggttggccttgttgaaaccaccagatttgtgcctcctagaccccagttcctcggcaacaaggtaacctccgtgcccctgctccctttcctgactgctggtgatgaggatgatcctatccggtgcctcctctgtgaacgcctactcctgggcccctgcaactaa

SEQ ID NO: 20219 - DNA, 351 bp, Zea mays
  Peptide Sequence Number=SeqID_61998
atgggcgctgacaggcaggccaggggtgcagggcgcgcgtgcgcgaagcggtatccgcgatttgggccgtgccgatcaagatcggacagaggggatcagatcggggggagtgaacagctgcgggcggcgctgctcatctctgcggcagtgaggtcgcaagagttgacgcaggcgcgagctagggtggctcccggggtcgccgggattgggcagagagggagagaatgccacggcgaactcagtggcagggaaaaggccacaaatccgcgaacagagggggaagaacggcggggagaaagcctcggacggaccggaggaactccagtgagggattccgatcgtggggactaa

SEQ ID NO: 20220 - DNA, 207 bp, Zea mays
  Peptide Sequence Number=SeqID_61999
atggcggtgcctaaggtagttggagacgccggggagagggtcatgctactgcttgctggactgcgggaggggaagaaggaggggaccggtgaggacggtttcgctgccgtggttggggcccgagggatgccgctgatgatggagggcgggatgcggccagagacggggagcccgcgcacgggcggcctctccccgatgggaaattag

SEQ ID NO: 20221 - DNA, 249 bp, Zea mays
  Peptide Sequence Number=SeqID_62000
atgacgaaggtcagtacttgccaaaggtggtcgaaagagttcaccggaggtgggcgccaatgttggagacttgctctcaaatgctatgagttaagaacaagaaagacagaaacaatattgaattacaaatgtaccttcggcttgatagaaggcaaaaagtacaagcgtgacgcaaaagcaaatatatgtcagcgtgaacagtacgggggtactgttcatctatttataggcacaggacacagcctgtga

SEQ ID NO: 20222 - DNA, 600 bp, Zea mays
  Peptide Sequence Number=SeqID_62001
atggaccagcagggtgcgggcggggacgcggaggtgccggcggggctgggtctgacggcggcggagtacgagcagctgcggtcgacggtggacgcgcaccaccgctacgccgtgggggagggtcaatgctcctcgctgctggcgcagcgcatccacgcgccgccggaggccgtctgggccgtcgtccgccgcttcgactgcccgcagaccccgaagccggcgacgccctctgccccgggccgcctccgcgaggtcagcgtcatctcgggcctgcccgctagcaccagcaccgagcgcctcgacctactcgacgacgccgctagggtcttcggcttctccatcaccggaggcgagcaccgccttcggaactaccgctccgtcaccaccgtctccgagctcgcagaccccgcgatctgcaccgtcgtgctcgagtcctacgtcgttgacgtccccgacggcaacaccgaggacgacacccgcctcttcgccgacaccgtcatcaggctcaacctccagaagctcaagtccgtcgccgaggccaacgccgccgaggccgccgcaaccaccaattccgtccttctgccgcggccggcggagtag

SEQ ID NO: 20223 - DNA, 180 bp, Zea mays
  Peptide Sequence Number=SeqID_62002
atggggagctggagtgcgaaccatggtaatcgcgtcttaggcctaagcacagtacagattggtccacatcgtaccgagcctgtccgaagtccatggtgcttgaacaaagtgcgaagaaaaatgagcaaaaagaggcttgtgtggggttcaaaccatggtgggacggcttcaaaagcttag

SEQ ID NO: 20224 - DNA, 381 bp, Zea mays
  Peptide Sequence Number=SeqID_62003
atggaccgcagtggatcagccgcgagtccgccatgccctcgagagattccgggcgattctgacccccagacgccaaatccaaccccaataatcacaggggagatgcactcggtcaagatgcaagagatcataccaggaataaggatgcaggggtacccagccacgacgtacgacggatttgaggactcgggttcaacggtgtgggttgagggagcatacgacgtccagggccccgattttatagctgatgccatgcccaggtcgaggagaacggcggatttcccccgcccgattcgcgcgggtgtgttccgaggcatacgcaaggttgttctggggttccgaggcatacgcaaggttgttctggggtgggagacgatctga

SEQ ID NO: 20225 - DNA, 414 bp, Zea mays
  Peptide Sequence Number=SeqID_62004
atgaggtgtcaggccatccttgcattaaatgctcctgcgatatggtcggtcggcgtggcgatttggccaaggttgcttcttggcgaaggctgggcctcgggcgagccgaagctttgtgctgatgggggttaccagctgagattaggagccttgggggtacccctaattatggtccccgacaactatcaagccacgtcgacagaacgggacatcactgggccatgctcagactgtggaagcagcaccgagggtctctctcaaatacaacgacggatatgtatccctgttgacacgtgggaccggacaactctagccgtagaaatctcaacatcgggtctctacaatgacccatacactggatgggatggggcaatatgtcatgccaggcatgcatctacgcatgatgaaagatga

SEQ ID NO: 20226 - DNA, 225 bp, Zea mays
  Peptide Sequence Number=SeqID_62005
atgagctacaatgcatttaaacatggcctaaaatacacaacaaatgccgttccaaacatggacgcactacgagcaaggaaaagtagaggccatggtagatatgccgatgtaggggaggacctgaacgtcatcctaatgctgaccggagagaaatgcgtctacatggacagggtcaccaaaccagccgtgattggttacccgtacttccacaacaacactgtatag

SEQ ID NO: 20227 - DNA, 1869 bp, Zea mays
  Peptide Sequence Number=SeqID_62006
atgcgggaagcctcggtccacaccgggcgcacgcgcaacacagcgcctacggccccgagtcgcctcggcaacgagcaccatcaccgcgaccgtcgggcccacctcgacgagagggtgcaccgaggctatcaccccaggcgtgggggacgctacgacaacggggaggatcggagtccctcgcccgaaccacccggtccgcaagctttcagccgcgccatacgacgggcgccgttcccgacctggttccgaaccccgactactatcacaaagtactcgggggagacgagaccagaactgtggctcgcggactaccggctggcctgccaactgggtggaacggacgatgacaacctcatcatccgcaacctccccctgttcctctccgacaccgctcgcgcctggttggagcacttgcctccggggcagatctctaactgggacgacctggtccaagccttcgccggcaatttcccgggcacgtacctgccggcagcaaccgggagagtctctccgggactacatccggcgattcttgaagcagcgcaccgagctgcccacatcaccgattcagatgtcatcggcgcgttcctcgccggcaccacttgccgcgacctggtcagcaagctgggtcgaaagacccccaccaaggcgagcgagctgatggacatcgccaccaagttcgcctctggccaggaggcggttgaggctatcttccggaaggacaagcagccccagggccgcccaccggaagatgcccccgaggcgtcaactcagcgcggcgccaagaagaagggcaagaagaagtcgcaagcgaaacgcgacgccgccgacacggaccttgtcgccgccgccgagtacaagaaccctcgggaaccccccggaggtgccaacctcttcgacaagatgctcaaggagccgtgcccctatcatcaggggtccgtcaagcacacccttgaggagtgcgctatgcttcggtgccacttccacagggccgggccacccgcggagggtggcagggctcgtgacgacgacaagaaggaagatcaccaggcaggagagttccccgaggtccgtgattgcttcatgatctacggtgggcaagcggcgaacgcctcggctcggcaccgcaagcaagagcgtcgggaggtctgttcggtgaaggtggcggcgccagtctacctagactgttccgacaagcccatcaccttcgaccaagccgaccaccccgaccacgtgccgagcccggggaaatacccgctcgttgtcgaccccatcatcggcgacgtcaggctcaccaaggtcctcacagacggaggcagcagcctcaacatcatctacgccgagaccctcgggctcctgcgtgttgatctgtcctcggtccgggcaggcgctgcgccattccacgggatcatccccgggaagcgcgtccagcccctcggacaactcgaccttcctgtctgcttcggaacaccctccaacttccgaagggagaccctcatgttcgaggtggtcaggttccaaggaacctaccacgtagtactggggaggccatgctacgcgaagttcatggctgtccccaactacacctacctcaagctcaagatgccgggccccaacggggtcatcaccgtcggccccacgtacaaacacgcgttcgaatgcgacgtggagtgtgtggagtatgccgaggccctcgctgaatctgaggtcctcgtcgccgacctggaaagcctctctaaggaggtgccagacgtgaagcgccacgccggcaacttcgagccagcggagacggttaagtccgtccccctcgaccccagcagcgacgcctccaagcagatccggatcggctccgagctcgatcccaaatag

SEQ ID NO: 20228 - DNA, 417 bp, Zea mays
  Peptide Sequence Number=SeqID_62007
atggcgacgccacgacccgtgcggcggcacttcgccgacgtgacgcgcgtccggcttcccaaccatgctacaagaacaccggtcgacggcttgtggctgcgtgtttggaatttggatagcggtggcattgccatgcttgctatggcgctccaatctctcggcatgttcgttctatgggacaaggggatcccaggcaagcagggcccagctgttcgagtcgaactcggcgatacgtccatgggggactcggaacagaaggagactctagccactaggcccactagacggcctcccaaacgcgtgcgccggagcaagagtctggggaagagaacacctgtgtcgggttcttgcgaggacacggtggcggaccggactcgggaggtagagcccctgtccaagaggggaagagggtgctga

SEQ ID NO: 20229 - DNA, 255 bp, Zea mays
  Peptide Sequence Number=SeqID_62008
atggccgacaacgctaaagggaagggcaaggtgaccaacaaggagactctcaacaatgagccaaagggagaaaagcccgccgacttgcgattcgggaagaaggacgggaagaagaagaagcacattaaaaagatcgtctactacgacaacgacacttcttcaacttcaccaaaggacaacgatggctcctcttcgaagcaaaagacggaaaacctcctcactttgatgggaggattattcttggtggagccataa

SEQ ID NO: 20230 - DNA, 360 bp, Zea mays
  Peptide Sequence Number=SeqID_62009
atgaatgcactttcagttacggacagtccgaccctcgagttcggaccgtccaccctgtgcctgaacacctcgaacgatgcaccaacacctatggaggaagacgatctggtgggagaggacttggtggactacggagctacgccggaaaattcagattgtacaaattttagccacggtgaacctgtcgttgctcaattcgattttggtcctaaagaggccgccttcactaagccaaaagaatcagtcaatcatttaaagctgctctgtaatgatgtttgttataagctcaagccctcaaattcaaaagctatttttgaaaaccaaaaatctcttgaacgctatatggctgaccgtgattag

SEQ ID NO: 20231 - DNA, 426 bp, Zea mays
  Peptide Sequence Number=SeqID_62010
atgtccgcgtcaacgatcgacagcgcaatcagtgcgcaatcaacgagcgacgcgtggccagagccaacggtcaccaggccgcaccggactgtccggtgtgccaaggggaccgcgggtgcaacggttggcttgccaaacaaggaaagaaatcgtgcactgttcatgtccggtggtgcaccggactgtccggtgcgccaacggacagaaggcaagaattgcctaccaaatggagctccaaaggcttctagctaccttgaggctataaaagggactcctaggcgcatggagcagtacaccaagcctctattgaacatcgcgttggattacccaatgcctggccgttggatcatctgcctcggtccgacgatactcaatggtcatagtgatctagttgtctcagatatagccatcaagagtgtattataa

SEQ ID NO: 20232 - DNA, 1257 bp, Zea mays
  Peptide Sequence Number=SeqID_62011
atggccgtggaagtcgtccagtttcttgtgaagaagttcgtggatagcttcaccgaggaggcagcggacgcagaggcggagctccctttccgcgcccaattccacgacatgaggaccgatctggagaaggcggccgtttctcccgccaacgccgatgagctccgggagtgcctctacgaactcaacgacttgctcgccgagtgccgcaggctcgccaaccggcctaatcagcagcgctggtgctttgcccagtccgacgcctggcgcttccccaagaccaagaagagggtgaccgcggtcaggcgcagagtcctcgagtgcgtcgagaacgactccggtggcaacgctgcggcgtcgcaggaggacgccgccgctgggttggaccgctggacgacgtcttggctcgaagggagcaggatccatgggtttgaccagcagctcgcggagctggagtccatggcgttcagggactgcggcgcggggaagcttaacggcgttggcatcgtgggcatgggcggcatcgggaagaccgtgctcgcgcagctcctgttcagcagcccgcgtgcgaaaggccgtttcttccccaggatatggatgtgcatgtcgcgcaccgcctctgctggagcagacagacgcaaggaagttttgcaggggatgctcatggctcttggacacgaggaggatgccatcctgtccatgaacggcagcgatagcctgacagagctgacgatcgccgtccacgaacagctcgaggggaagaggttcctcatagtgttcgacgacgtgtggcacatcgatagctggtactctgacgttgttggcgttggcccccagaacgccatgcggagagccgacgacctgtctgtcttatcagaacgcctcgcgttcgcactgcccaaagggagaggtggcctggtgatcgtcaccagccggctggagcaggcggcagaggcgatggtgaggaagagctgcttgtaccgtgtgcggccattggtggacagcgcgagctgggcaattttcatggatgttgttctttcccagccccaggagaaaaaggctgtcgatcttgtcactgttaaccatatgaaacaggagatccttgagacttgtggcgggttcccatcggcagccaagacaatgggagacatcttcgcaagcagcagcgtttcgcccacctgcatcgacatctaccagcgaggaactcgggcaagagtgaccatatcatcactgctaggtaacagcggaagcctgaaatag

SEQ ID NO: 20233 - DNA, 228 bp, Zea mays
  Peptide Sequence Number=SeqID_62012
atgggtagtggccgaagcaagaagaaagagaaggcggtcactacatggcgcccatgtggcggagtcaagaggactgctggggaggtgcgcttcttctgcgggccgccgggaacccgggcgtggcggaatccggcgcacggggtgcagctgcagcaggggagattgatgccgggacggccggaatcgccgtcggtgcacctgcgccgccgttttcctccagggtcgtga

SEQ ID NO: 20234 - DNA, 216 bp, Zea mays
  Peptide Sequence Number=SeqID_62013
atggcgcccatgtggcggagtcaagaggactgctggggaggtgcgcttcttctgcgggccgccgggaacccgggcgtggcggaatccggcgcacggggtgcagctgcagcaggggagattgatgccgggacggccggaatcgccgtcggtgcacctgcgccgccgcaatgccaccagggtcgtgatcggtgtcctctgttgcatgaatctaggtga

SEQ ID NO: 20235 - DNA, 336 bp, Zea mays
  Peptide Sequence Number=SeqID_62014
atggggaaggatttttcgtgcctgggcaccgggttccttccaagcgactcggagtttgcccgatggctcgttctgattagggatctgacgccccaagggcagcttgtgatgacgcctttgttccgccaccccgactctctccctagggtggctgtttcaagagaaggtagtgctcctgaaccttctttgagtttggcgccacttttgagggagatccaggcgctgctggggaccaccgtccccactatacattcctcgatggcggcccgagagcctgcctcaaagggtgtcgttgatgtcgggcttcccaacagtgggaagccatccctccattag

SEQ ID NO: 20236 - DNA, 420 bp, Zea mays
  Peptide Sequence Number=SeqID_62015
atggatgacctagagttcatggagatcaccggtggcggcggggacctcatcttcgacgcgctctgcacagacttggacttggatctaggcaccctctacgggaatggggcctcaggacaacgtaaccagagacccccatggctataccttggggaaagcatcgatgggacgaattcatccccatcttcgcaacgtgaacgaaaggacctgacggggaagctggtcgagactgtgaatacctacgcctcgaaggctacaagaaacttaaaaagtgagcgaccacagagcgagccccgcacaatgggtcctaccaacgccttcaggtctttagagctcgccatacagactggagtgctcagcgctaaggactcaaaggcgctcctcggcacacgtgaactcctccagcaccatcgttggtaa

SEQ ID NO: 20237 - DNA, 2235 bp, Zea mays
  Peptide Sequence Number=SeqID_62016
atgacttctctaggaaggagtcgtaaggctgaggtaaaaccagcgttttacctcggagcctctgcctgtgcctcgtggcggctattgccgtcggcaaagcagattaatcgtgtcagcggatacagcaccggtatcccctgcggccgtatcaccacaccacaccaaccgctccaacaccgagccttactgagctcttcttgtatctcaatcaccaacgagctgtccagcgcgttcagggggccttggtcttgcgggcacgaggcccagcgcgaagagaggccgctcgggtcctgtggtaggtcctgccgtcctggcggctggcgaagaggaggaggttatagtctgcctgtgattgctaaaaccagcatgtcgcaggagcggacattggatgaagtcgtttttccatttctaatgcagttggaaagggcaagagttgttcctttgggtccagatgaggatagttcacattcagatattttacttctgtttgaaaatatcaagaaagaagcatgtgaagtcaaggatatacttctgagagtgtctaaatgggaaaatgagataataaatgattttggaggaatagctagacatttggatgaaatcatagaagaaggcaaccagctcaattcaatacattccacacttcaaattgtaaacactgagatgtccaagttaaaagatcgtatgcaacttcctctccatgttcccatgatcaagccaatagctcccacaaccttgccatcatctgtaccatccaaatgggttcacgcaaaagtttcagagcagtggaaaaggctagagattgagaggaaaatccttgagagctcaaccatttctaacttgcaggttagctatgataatcttgatctgcaactgaagttgtgcttgttatgcttctctgtcttcccagaaaattctatcatcagcaagagggccatgatccattggtggattggcgaggggttagtagcagccacaagaagtcagacagccgaagatgtcggaaaggcatgctttgagaagctgattgctctagagatgattgaaccggtgtatcagaaatgcaggtatggggtaaaccaatgcaagttacacccctggattcgtcgtatgttgattaaagttgcaaagcaagcacggttttttgaatttgattcagatggcaatgcaacatgggactgttcagctactcaccgtgcttgtctagttgaagagcaccaacaggaaatcgatgtggcatcactcagaaaccttctaacaatatttaatataaatgagcaatacctacaatttgagaagagttggttcttggatttgagaaagattgcagttctccaactaggaagatggcacaacttatgtcgacaccatattgaggttgacagtactgaatttttggaaggactgcagtcatccaatcagttgaaatatctttgtctgaggggcatctctagaatcattgaacttcctgcttccattggtggactctcgaatcttaggatcttggaccttcatgcctgtcacaaccttgagagactgagtactagcatcacgtatcttcagatgctcacccaccttgatgtgtcagagtgctacttgctggaaggcatgccaaggggtattggcttgcttactgaactccaagtgctcaaagggtttgtcattggtggttcaactggcaattacaattgccgggtagcagagttggctaggctggacaaactgaagaagctgaccatatatattggaagcaaagttgcagtgacagaaaatgaactgaatgagcttgagaacatcaaaggcctttgcgtgctgaaaattacatgggctgtatcactttcaaagaaagaacgagtccatcaaacttctgattctacaccattgataacttcactctccctacctctaaatctcgaaaagctagacctgtgctgcttccctggagagaaggtgccagattggttaagtccgagtaagctgttgagactgaagagactctacttcactggaggaatgctaaaaacttttggaaacaaaaacatgttagaggtgtggagcgttgaggttttgcgcctgaaattcttgaatgatttatcagtacaatggacccaggtgcatgaaatatttccaaagctgacctttctggaggtcttcagatgtaggaagctagaatccttcccttgcgataaggatggggtgtggatgaaccatgatacgaaggatagcagaaagtag

SEQ ID NO: 20238 - DNA, 531 bp, Zea mays
  Peptide Sequence Number=SeqID_62017
atggaatggaattaccttttcgatcacacgtccttgtccgcacagtcctcggatccagctgacccggctcggcgcctagcacacagagccccaggtggtggacgaatcccgtgcgggcggcgggcgttcacgacgcggtggagggtggacggccgccggtcgcccgcgaggcacggtccgctccagcttcgcgtgcggcagcggcagggcagggcagggcaggcagccgcggggggtcctgatcctggggtctggcactggcaggcacgcgtcgtgcgtgcaacatgcgatgctgccagcgacagtggtcccttgctcctcggcgcgggcgcgggcgcgagcggaacgttcaggcagggcccccccggccccgacccggcggcatgtcgaccaaggaacatcatccggccagagtggcagccttggggtggtgtggtgtggtggcctcatcactgcctcagctcgtcgcacggtgcatgcacgatggatcgcgagatgactgattggcctggccgaactgattggccctag

SEQ ID NO: 20239 - DNA, 930 bp, Zea mays
  Peptide Sequence Number=SeqID_62018
atggagttcaagagggatgtatggagcctgctcctcgtgctgctcctcgggcagctcgtcgccttctccatggccgcctcaagcttcgcctcctccctcattgctaatcttgttgtgaaggcgtaccagtactcatacattaccagtgtgactttgttggattgctggactgttgtatgggtcgtcatgctcacctggtacgcactgggcacaagatactcactctggcagttcgtgggggcagggacctgtgtggcagggctcgcccttgtgctgctttcagatgcaaaatctcaagatgagcaagatccgaaaaaaataccacttctgggggatgcccttgttattgctgggacagttggttttgcatttagcaatgttggggaggaatactgtgtcaagaaaaaggatagagttgaagttgttgcaatgcttggtctctttgggttgctgatcagcacagcgcagatacaaattcttgccagacaagatgacgaggcacccaacccaaccaaaccaaacgcggggccctacgcccctacgtccggacgagggcgcgcgcatatggctccaaccgggcggggcgagcccacctccactgttccgaggtcaactgccggagacgtcgccgcccccagcggacagcgtcccctcaccgttcacggctcaccagacggtgtcctggccgacgccgccggagagcggccaggcgaggcgtcgctgtccttggaccccgtttgcattgccagccccctgtcccggtccctgttcttggaacggctaggagctcgaaagcgaccggcgcgggaggagtcgtgcgccgcacgcggcgcacagactgtcctaggagacgggcaaatggcctgtgaaggctgtacagccagtgcacgataccccaatcaccatccacgtacacgaggtgtaggatag

SEQ ID NO: 20240 - DNA, 1152 bp, Zea mays
  Peptide Sequence Number=SeqID_62019
atggagggtgctttcagcgtgccgtactacgagtggctcaagccacggtcgtcgccgtcgacgtcctgctggacgacgatgacgctctcaacgccatcatcgatggaccgattattagccgccgttgctggcggccacgacgacgacgaggagcgcgacgccacgatgtgcttgccgcttcttggtaggctcgaagggagggcaaggactcccgagtaccatagtcctgtcaaagaagagctgagcaataataataccaccaccaccaccaccggcgcgcggggagaggagagtcgtaccggcgccggtgttcacctgaccatcggcttgccggcgactggtggtggtgctggtgggggctacagcatgagctctgaagaggcgcccatggacgatgaagatgacgagcaggatgaggattatttcgagctggaggaagaggaccagaaggcaagcgaacatgacaacaagtgcaagatggaagcagctggtgaagcagagcaacgtcggcccgggggagaggaggagggtatcaagagcttcgtcggcagccgcggccggcggtactggatcccgactccggcgcagatcctcgtcggcccggtgcagttcatgtgccatgtctgcagcaagacattcaacagatacaacaacatgcagatgcacatgtggggccacgggcgcgagtaccgcaagggcccggagtcgctcaggggcacgcaggcggcgacgctggcgctgctcaagctgccgtgctactgctgcgcgccggggtgccgcaacggcgtggcgcacccgcgcgcgcgcccgctcaaggacttccgcacgctgcagacgcactacaggcgcaagcacggcgacaagcgcttcgcctgccgccgctgcgccaagcccttcgccgtcaagggcgactggcgcacgcacgagaagaactgcggcaagcgctggttctgcgcctgcggctccgacttcaagcacaagcgctccctcaacgaccacgtccgctcctttggaggcggacactgctccgtcacgcccgaccaccaccagcagcagcaggcgcctgtgcccgtgccgctgatcaacaagcagcccttggaccgaatgatcatacgcttcgatcagggagcgccatggacgtcccatgcatga

SEQ ID NO: 20241 - DNA, 446 bp, Zea mays
  Peptide Sequence Number=SeqID_62020
ggcgacgtcagcaaggattcgaccgctccaacggctgtccctccgccaggctccgtcgcacctccgacagccacgacatcatgccagcaaggtgccaagacctctccggctgccacattggcatggccttcttagagaaggttggccgcgcgggaccagggacgggacaggcgctctcttggggccgctcgcttccctcacccgcgtggacgcttgtaacccccctactgcaagcgcacctgacctgggcgcgggacgaacacgaaggccgcgggacttccacctctctcacgctcgactccggccacctcgcctctccccccttcgcgctcgcccacgcgctcgacccatctgggctggggcacgcagcacactcactcgtcggcttagggacccccctgtctcgaaacgccgacagttacatattgacatttttgtcattgtaa

SEQ ID NO: 20242 - DNA, 3231 bp, Zea mays
  Peptide Sequence Number=SeqID_62021
atgagcaatcttaagcttggtgttgaagttaccagcgctcatgatctcctcccgaaagagcaggacacggccaatccttttgttgaggtcgacttcgacggccagaagttccggacagccgtcaaagacagggacctcaaccctgtctggaacgagcagttctacttcaacatatctgatccatcccgcctcccagagctacaccttgaggcctacgtataccatgcagaccgtgccagtaattccaagtcctgcctgggcaaggttcgcatatcgggcacatccttcgtcagccagcctgatgctatgcccctgcactacccgctggagaagcgcacgatcttatcacgtgcgcgcggtgagcttgggcttagagtcttcctcacagatgatccatcagtacgagtgtctgctgctccagctcagcaggagttcgatatgctaagcacgcctaccactgcgcaggagcagcaggcagcagccaactccatctcaaatcctttccaagagaccagagcaaacccagtgaggcagttccagcacttaccaagagaacagcagcgtcctgcacagccacagccatactacgctgaaggttcatacggagaccagcagcagcaacagagaagcttttctgcggttgcgaacaaagctgcagcccctcagcctcaggttcaggtgtcaaggatgtatgctccaggtccacagcagcctgtagacttccagctcaaggaaacaagcccaacgcttggcggcggccgtgtcattggcggccgggtgtaccctggccagaaggctggggcgtacgaccttgtcgagaagatgcagtacctcttcgtgcgcgtggtcaaggcacgcgacctgcccaacatggacatcactggaagccttgacccttacgtggaggtgcaccttggaaactacaagatgaagacaaagcactttgagaagaaccagaggcctgagtgggacgaggttttcgcgttccccaaggaagtcatgcagtcgacgatgcttcaagtcgttgtgaaggacaaggatgtccttcgggacgactatgtcggccgagtgagcattgatctgaatgaggtccctctcagggtccctccggacagcccactggcaccggagtggtaccgtctgatgggcaaggacggcgtgagggacagaggggagctgatgcttgcagtctggtacggtactcaggcagatgaatgcttcccaagcgccatccatgcaggatcgacaccggttgattcccatcttcacagctacatccgcgggaaggtgtaccccgcgccaagaatgtggtatgtgagagtcaatgtgattgagggacaggacatatacccaatggagaaccgcatacctgatgtgctggtaaaagtgaggctgggccatcaactgctgaggacaaggcaggttcgctcgccgaccagaaacttcatgtggaacgaggagctgatgttcgtggcagcagagccgtttgaggacgacttgctcatatcagtagtagaccgtgtggcacaagacaaagacgaggtgattggtgaggctatcataccgctcgcgaggcttccaaggcgggctgatcacaaaccggtactcccagcatggttcgatctaagaaggccagggatcatcgacgtgaaccagctgaaggaagacaaattctatgcgaaggtaagccttcgtgtctgccttgaaggtggttaccatgtgcttgatgagtccacacagtactgcagcgatctccgtccgacgatgaagcagctgtggaagccaccaatcggcatgcttgaagtcggcatcttaagtgcgaacggtctcaatccaacgaagaccagaaacagccgtgggtcgtgtgatgcgtactgtgttgccaagtatggttccaaatgggtccggacgcgcacgatagttgacagcttgagccctcggttcaacgagcagtacacatgggaggtctttgatcatggaactgtgctcacaattggtctatttgacaactgtcacataagtggagatgataacaaggacggttcctcaggccacatggataaacccatcgggaaagtgaggattcggctttcgacacttgacacggcgcgtgtgtacacgcactcatatccattgctcttcctcagcccatcaggagttaaaaagatgggtgagctccaccttgccatccggttcacagtcacatcccttatcaatgtgctcttcacatactctaggcctctcttgcccaagatgcactacgcacagcctctgtcaatagttcagcaggaaatgctccgccaccaagctgtgctgcttgttgcgcagcgcctgggacgcatggagccaccagtccgcagggaagttgttgagtttatgtcagatgctcgctctcacctgtggagcatgcgacggagcaaagctaacttcttccgccttatgcaagtcttctcagggttcattgctgcagggaaatggtttgctgatgtttgtcagtggaaaaacccggtcaccacagtgctggtccatgtgctctttatcatgcttgtgctctatccagaccttatcctgccaacaattttcctctacatgttcttgatagggctgtggaattaccggttccggccacgcttcccaccacacatgaacacaagaatatcttacgctgatgttgcacttccagatgagcttgatgaggaatttgacacattcccaacctcaaagagcccagatctcatccggatgaggtacgataggttacgacacgttgctgggaggatacagactgttgttggggacattgccactcagggagaaagattacagtcactgctcagctggagggacccaagggcaacagctatgttcctgatattttgcctgattactgcgattatactgtatgtgacaccattccaagtggttgcactctgccttgggttcttcgggatgaggcatcctcggtttcgccacaagggtctcaacaacagcgggtcccgcacaacgctctcgtgcgacaccgtgtgctccagctcgtacatgtatgctgtagcgcttcacgcttgttggctgccaacaagtggcatcggagccactttcatcgtcaccaatgccagcgccaactggccagtcctcacccgcaccaactatgacgagtgggtgttggtgatgaaggtgatgttgtgggcaaggaagttatggcgcgcaatcaacatcggcactgaggagtga

SEQ ID NO: 20243 - DNA, 132 bp, Zea mays
  Peptide Sequence Number=SeqID_62022
atggaggcggtggagcgggacgcggctgccatcgccgagagctacgcctccctcttcgcttcactccgcgtcgctctatcaaaccacttgaagcatcttcgaaaggaaataagtacatcaattcgtgcttga

SEQ ID NO: 20244 - DNA, 779 bp, Zea mays
  Peptide Sequence Number=SeqID_62023
gatctttttctgaatggaggggcaagcttactaggaactttggttttgccattgatttgataagcttgttgatgtcacttggtcattactcgatgatattttggcttcgtggtatggcgtttcatctggttgatgcagttctcttattgaactcgcgttgtgttgataccattcatttgaaacatttccaggctcttatagtttcctttttgaagaggattaaagctcacatcaagttacggaaggcacttagttcactcgatggagcacttccagatgctacgtatgatgaaatttgtgcatatgatgatgagtgtgccatctgcaggggaccaatgggtcgagctaaaaagttgtcatgcaaccatctatttcatctagcttgtttgcggtcatggttggatcaaggactaatggaaggttactcctgtccaacttgtcggagaccgctcttattgtcatctgaagggcaaagaaggtctacaactgcggaggtagcaaatgttcagcgaattgcggaacaacttactatggggatgaatcagcagagagttcctggtaatgaacatcctgttgaacagcagaacccttcagatgctgtttggaggagtctctttcttcaaaccttggagaggttgggtggctattccccctacttcacttttagaaccgttgcactcaaccacaatggtttttccatccaccaaaaatgtatcgatgtcctccgcatcctcgcatacagtagtgttgctgactccattgatagtatatcaaaatga

SEQ ID NO: 20245 - DNA, 297 bp, Zea mays
  Peptide Sequence Number=SeqID_62024
atggcggcggtgaactgcctctacgtcgcggctgcctctacggcggccagcgccgccgcgctgcagtggtgggcatcctcgctcttcgacggcgacgctggcgcgggcgaggatggagcctggctcggagccgtgctgcggtcaaaggtcaccgtcgcgctcctggcgaatctggcggtccacgtgttcctcgtcatcatcctcgcgctcaagctgtatctatcacttctgttgcggctcgtaatctgttgctttgatgggtcaattttgactggagatttatttgacttggcctaa

SEQ ID NO: 20246 - DNA, 297 bp, Zea mays
  Peptide Sequence Number=SeqID_62025
atggcgaggctgagccttgacaggaacgcgaggaacagggggaagggaagcggggaccaaattattgcagcagcgacggcgagggggcatactattgtattcctatatcagtttagctacgcgggggatttacgtaaatatgacacttctgaaaggtacggcgcgagtgtcatacgcccacgacgagatgccgagatgggtttgggcaagtgggtcccgagactcagtgggtaccggaaaggaatttcgtgtattgtgaagtgtgaacaaatgtgccagattgtccgcgtcagttag

SEQ ID NO: 20247 - DNA, 1782 bp, Zea mays
  Peptide Sequence Number=SeqID_62026
atgaaggggcggctgctgctgctgctgtgggcgtgggcggccgccacatgggtgtccgtcagcgccgtgactcgcctcggcagaggcgtcgccggagagcagccgctgtccaggatcgccgtcgagagggtggtcctcgccgtcaacgacgcggcgtacgtcaaggcgtcccctctggttctcgggcacaagggcgagaacagtgagtgggcggacgtggagttcttccacccgaacccgtccgacgacgactggatcggcgtcttctctcccgcaaatttcagtgatgcgatctgtgaggctgagaatacgggtaccccagtgctgtgcactgcacctatcaagtaccagtttgcaaacttcgaaaacgatggctataacaagactggaaagggctacctcaagcttcagttgatcaaccagagggaagatttctcattcgcgcttttctcaggtggtctctcaaagcccaagctgatttctgtctccaacaaggtagcctttgctaatccaaaggcaccagtgtacccgcgtttggcgcaagggaagtcttggaatgaaatgacagtcacctggacaagcggctacgatattacagaagcagttccttttgttgagtggggtgagaaaggaggtcgacgacttcttgctccagctggaacattaacatttgaccgaaatagcatgtgtggctcaccggcacgaactgttggttggcgccatcctggttacatccatactagcttcctgaaggatctgtggccagactcgccgtatacttacaggcttggccataggctgatgaatgggacccgcgtctggagcaagtcatacagcttcaaagcgtcgccttaccctgggcaagattctttgcagcgagttgtcgtatttggggacatgggaaaggcagaggctgatggttcgaacgagttcagcgacttccagcccggttcgttgaatactacttaccagatcatcagggacctcgaagacatcgacatggtggtccacattggggacatctgctacgcggatggctacttgtctcagtgggatcagttcactgcacagatcgaaccgattgcttcaagggtgccatacatgattggcctcggtaaccatgagagggattggcctggcactggttcattctacgggaaccttgactccggtggagagtgcggcgtccctgcccaaactgtgttctacactccagctgagaaccgtgcaaaattctggtacgcgacggactacggcatgttcaggttctgcatcgcaaacacggaagaggactggaggccggggaccgagcagtacaagttcatcgagcaatgcctgtcgtcggtcgacaggcagaagcagccgtggctcatcttcctcgcgcaccgcgttctcggctactcctcctgcacctactacgaatcggagggcacgttcgaggagcccatggggcgggaagcgctgcaggagctctggcagaagtacaaggtggacatcgccttctatggccacgtccacagctacgaaaggacatgcccggtctaccaggagccagcattctcgattctgagttcaccacctcgaagatccagtggagccacttcaccgacttcgaccacggggttcgtcaagctcacggccctcaaccattcctccctgctgttcgagtacaagaagagccgcgacggcaacgtgtatgaccatttcacaatctcacgcgactaccgggacatcctcgcttgctccatcgacaactgcccccggagcacactggcttcctga

SEQ ID NO: 20248 - DNA, 555 bp, Zea mays
  Peptide Sequence Number=SeqID_62027
atgcggctgcgatctggccgtcgcctcgtctcgccgccggtggccgcacccagaggagctgcgcgtagcgttggtcccccgcgccggcacaccgcggatagcggcgacggcgttggggaggaccggctcagcagcctccccttggacctgcagctagaggtgctcgcacgtctccggtgcgcgcgcggggctgcgcgcaccagcgtcctgtccagggcatggcgcggcctctggacgcagctccgtgagctggccttcgacggcagcgttggtcccgattcgctcgccggcgccctctgccggcttgctggtgagcggacccaggtccggcccaagctcaagcggctttgcattcacctccccggcaacctgaagctcggggacgccaggatctcgtcgctgctccacgccgcctacaagctcgcgccgttggagttggagttcgtcgttgtacacgcagatgcaattgcaccagaggaagctggtccgcggcgttcccagcgacttcggaagcccaacccaaaatacttcggtgacaaatgggcccaggcgtga

SEQ ID NO: 20249 - DNA, 1083 bp, Zea mays
  Peptide Sequence Number=SeqID_62028
atggctatccccaacgcctttgactcccccctcgcggccaggtccgccgtcggcgcggcgctggcggccgtcatcgccgtccgcgcggtccgccgccgctccctagacgcctcgggcggggtcgccggcttcgtcgtcatggcggtccacatctcatgcggctacaggtacggggcgctgctgctggccttcttcttctcatcgtccaaggtaaccaagatcggggaggaccacaagcgccgcatcgaggagaacttcaaggagggcgggcagcgcaactggatccaagttctagcaaatagcacaattgccactgtactggttgtgatatttgcactaatgactggagggcaagatcagtgcatggactcaaatggttcaaagcttataactggcatcataggtggtatcattggccactactgttgctgcaatggagatacttggtcatctgaaatcggtgtgcttagtaatgaacaaccaaggcttattacatcccttaagattttaccccatttcattccaaatagctgccagaagtaccgtcggttcgggagtggacggggtgttacaatatcaccccgcagtcgcagcgtcgtgagggtgcgaatgttgcggcgggagggaaggatgagcctcccggggacggtgccggtggctgaagtgtttatatgtgagctgataacagtattgctctataagcctgtcaggaagggtacaaatggtgcagtcaccttacaaggacttcttgctgccacaggaggaggccttatcattggtctcactttcgttgttgttggactgttgactgctgaatgttcttccgatatggccatcaggcagctcctagtactacccatctctgctgcagctggtttgcttgggagtctaattgattcattgctgggagctacacttgaattcagtgggtattgcagtgttcggaagaaggtggtcagcaaaaggggccctacggttacaaagatttctgggatgactatcctggacaacgatgctgttaatgcagtatctattctgctaacaactgtacttacagcttatgtatgcatttgcatcttttaa

SEQ ID NO: 20250 - DNA, 237 bp, Zea mays
  Peptide Sequence Number=SeqID_62029
atgctcctgctgcccaggcacccgggcgactgcgccgatcagggctccgccgcctccaccgacggcgagtggtcctccacctgcaccgtcaacgacgtcaccgtccccatcgtggaaggacggcatgtgctcgtctacttccatggtagaatagacaaagattatagtgtgtgggcaagaatgggatgtgtatgtgtggacatattagcactggagccaatttatgttggaatttag

SEQ ID NO: 20251 - DNA, 342 bp, Zea mays
  Peptide Sequence Number=SeqID_62030
atgacgtcctcagtggccgctacatgcaactccaccccgcagggaagcagggacattggatggtgtcgagaatggctggattggggctggagcaccaaccagcaattggataagggtatatatgcatgtgatggcatatgcctaggcggacctaagctgaagctaaagccaactacaaatgcacataactgggtagctacagatgctgcagggcaggcataccgctcacataatcaaacagatgacatcatactgtggccagatatcatattatcatggattccggtcacctccatctccaaaaaggacatgaagtatgggcatcctggaatagacggttga

SEQ ID NO: 20252 - DNA, 198 bp, Zea mays
  Peptide Sequence Number=SeqID_62031
atggcgagctcgcatggatgcccctgcacgcaactgtgccctctgctcgaattcctgttggccgcgccccctatttctccgggccggttcgagaaacgtacgttaattaatcgcgtgatgcggaaaatggctcaagtcgaccccaagcgcggaccaatccgcaggatgatgctgatggacgaaccggaagatggataa

SEQ ID NO: 20253 - DNA, 1821 bp, Zea mays
  Peptide Sequence Number=SeqID_62032
atgccgcgccggcggaggacgcgcagcagcgaggagctcaaggcggaggacttcgtcgactcggtgctcaacttcggcggcgaggaggatggggaagaggagaagcaggaggccggcggggacggccagccggcggcggagttcaagtccaagaacctggaggccgagcggaagcggcgcggcaagctcaaccgcaacatcctcgcgctcagggccgtggtgccgaacatcaccaagatgagcaaggagtccaccctctcggacgctatcgacctcatcaagaggctccagaaccaggtccttgagctgcagcgccagctcgccgacccgcccggagaggcctgggagaagcagggcagcgcgtcgtgctctgagtccttcactgccacggaaaacatgccgtatcagggtcagatcgagctggttcctctggggccatgcaagtaccacctcaggatcttctgcaagaaggccggcgtcttcaccaaggtgctggaagcactctgcagctacaacgcgcaggtcaccagcctgaacacgataacgttctacggctacgctgagagcgtcttcaccatcgaggtgaaaggcgagcaggatgttgtgatggtggagctaaggagcctcttatccaacatcgtggagggccggcacgcggacggtgcttggactgcccttgtcatggatcgcgccgagctcaccacggagcaggttctcaagcgagatattccatgggagcattacatgtcaactaagcttatctccggaacgtgccttcagcttttacggcgatatgaccacaaaccggagagccagcgagctcctttacttgaggaggtcttactttactttgactatagtgcacgaccaaagcttcggaatggcacacttccaaatggagatgcttcgaattcgaagagcaagcttacttcaacacatgatgtattgagaggtttggtcaattggctctgttcacagctgaggaatcctacacacccgagctgctctattcctacttccatccattgcctctccacttcgctaagagaaccatatgttaggacattatttgttcaagctgatggcatcaagctgctcattccattaatttccccagctgccacacaacagtcaattcagctcctttatgaaacttgcctctgcatctggcttttatcattttatgatgctgcagttgattatttgtccaccacaagagttatgccaagacttgttgaggttgtcaagggatctactaaagagaaggtggtcagagttgctgtgttgtctttctgtaatttgctggcaaagggtgcatttgctgcccagatgatcgatcttggattgccgcaaatagtacaaaacttgaaagctcaagcatggactgatgaggatctgttagatgctttgaatcaactagaggtgggactcaaagaaaacctcaagaagttgagttcctttgataagtacaaacagcaagttcttcttggtcatcttgactggtctccaatgcacaaagatccaagtttctggcgtgagaacattaacaattttgaagagaatgatttccagattctacgagttctcatgacaatcattgacacatcaagtgacaccaccgctcttgccgtggcctgctacgacctctcacagttcctccagtaccatccatctggccgaatcgtggtggcagacctcaaggccaaggaccgagtcatgaagctcatgaatcatgaaaacactgaagtgcagaaaaatgcgctgctctgtgtgcagaggctcttccttggcgcaaagtatgccagttttctgcgggcttga

SEQ ID NO: 20254 - DNA, 456 bp, Zea mays
  Peptide Sequence Number=SeqID_62033
atgtttgagggcgccgggcgccggaaagtcggacggttccttgagattgcgcgtaaccttcggacggtccggcaaggtgtcgcatgccgacaaggaggcacaccagtgtttctgtgcacccgtggcaaggtagagatgcgaactgaggcgagcagtggggtgaaggtggattgtatggacgacatggtagagggagaaaaggatgaatgggaggaagaaactttcctcggactggatgtgtctccattcgacgttttcttcgaggaagttattccagagaacatgttgagtcaactaccagaagtacatgttgttgatgcagagggcgaggggaacatgggctctggggatgcaaaacttcccatcgtctcgttgcctgctgggctagtggtagacccgttgctcgacgatcagtttgtgcagggcgaaatgccaactgaagaaatgccaacttag

SEQ ID NO: 20255 - DNA, 306 bp, Zea mays
  Peptide Sequence Number=SeqID_62034
atggccctctactccatcgcggccctctgctctggcggccctctgctcaatcgtgtggctgttgcagaggcctctgctcgagcctccgccctccatgttgtcggagtcacatcttatgtatttaactttagttctactagtctacaacctttggactctagagtctcctgcaacaactccaatttcctatttactcttgctcgactttcgtcaactagcactacatcgttcgaaagaagcattcacgaagggatattcgattctatgccccttgtgacctcatccatcaccaaggcaaaaaggtaa

SEQ ID NO: 20256 - DNA, 132 bp, Zea mays
  Peptide Sequence Number=SeqID_62035
attgccccacatgtgaatgttatacttgtaaaaaccaagttctatggcaatcatatccttaagctatttatgcagctgattctacttgcttctggaatgcaatgcacgatgtttactggctatcaggagtaa

SEQ ID NO: 20257 - DNA, 375 bp, Zea mays
  Peptide Sequence Number=SeqID_62036
atgcgcacgccaaagaagacatcgccgttgttcgccgtggtctcgagcttgtttcgtggtcgccgtcgagtcctcaccgagtttgttgcctcggtgagttttgcctctgcgtctgcgacctgggacacccctcaattcgcccctcccctctgtttctctctacccacgctcaccagacttccctccgcgcagccgcagcaccgccgccgtcgacccgagtcctcgcttcgtccctgtcaccgctcaaggtcccaagagacccatcgagacaacgagcagttcgtggttcccgagtgtgttgcaagagacttccctgagcagcaacctggtgaaggcaagtgttctctgacccgttatgtcctacttacgttataa

SEQ ID NO: 20258 - DNA, 1290 bp, Zea mays
  Peptide Sequence Number=SeqID_62037
atgacggtggctctccagcgccgcgccctcgaccaagggactcacttgtcctatggtaggatttattgcttgcagcttgacagagttagtatgtcattgaatctatatcgcttttaccgtgatgctgttgtacaacagggactgcccatcaatagtagacaagtatctcagactgcggatagccagtctagtgcatacggtggaaccatctatggagaaggttggaacttcctcattccagacctcatctgtgatgctgagaatgggctcttatggaagctccatttagatctggcggctattgctgctagtagttctgatgctccttcaattttggaattccttcagagacgaaagtctgacccaagcatggttaagactctatgcctagctatagttcggacaatcatcctggaaaggaggtcagtgcccacagttgctaaggcgatggatgttgtccttgattcctacacgcgtttgatgaaaatgggaggggcttttcctggggttaggcgaatacatgagcaaaatcagcagtcaggtagtcagcctattgatggctcccatgtggtttctcaggaatccagtcctggaacaacagttagtcctgctgtgaacccagaccacggaagtgaggctgtggatatatatgtgcagtcaaatccaggagttgagcatacaatagacaggggattactaaatataaacatatcttctgattctgtggacaatacatctgatgctgtcgacaaacgacagcaagctgtaggcgaagctagccgaccattgtcttcaggcacaatgacgcaacatggacaacatgctggaaccgtggcaatttctccaattgagatgttccagtctgtctttacacttgttgaagatgaaatgatgggtgatcctgcatatcttattgctgtcatcatagagtttctacggagtgtctcaaaggctgggcttaaggctcctcacaacctttatgtgatgacggcgacactactagctcgtagcaaccgttacgctgaaatagcattgtttgtgtcaaacaagattcttgagccgtgtaaagaactggcaatgcaacttatggagctgggtctgcagcacccgccaacgaggaagctgggcatggacatgctgagggagcgaggcctgcatcacgactacgtgactgcgatgctgcaagatgggtactacttggaggccctgcgctatgccagaaaatacaaggtccttggctttgctttgattcgctcttccccctttcaccttgcatacgccgatgactga

SEQ ID NO: 20259 - DNA, 420 bp, Zea mays
  Peptide Sequence Number=SeqID_62038
atgggctcatccgcctcctcaccgaccgcgtgcaggcccaccgaggccaccaccgctaggcccaagcacggccaccgcggccttgcccgcctccccaccgaccacgtcgcgcgcgccgtctccgagccgtacgaggccgacgtgaggactgaggagggtggcagtgattggggcgccactgttgggataccggaagagatgagaaaacagcagttggccacacgcttcaagccgcacgccgctcgctgctcggcgctctcctctcccgaccacagctacaccacacgactgtatggtagtggcaattggaaggatattttagataacaatcctgacgttgttttatcggcggaacacctgtttgtatttggttattatagtgaacttgttctggttgccaatcaagagttcgacctctaa

SEQ ID NO: 20260 - DNA, 387 bp, Zea mays
  Peptide Sequence Number=SeqID_62039
atgagcggcgacgtggtggagagggagacagagcagctgagggagagggttgctggcttgacgtgtatcagggtggcggctgagagagtaataggagaaggtgtgtatgcccccaaggaggacaccatgagtgctaagagatttttctacaaagacttagatggcatggttagagctatacaaactagtggaaagcttttcatacgagatatcaattggcatgtagataagagtgcaagttttgaggtgaatgcctgtagagataaaacaaaccaagattgcgagaacaaagtggtgaaaactaaaaaggggagacatcacaggtcttcaaggaaatggtcatcaaagagggcacttggaagcaagatgacgcaaacaaacatgtga

SEQ ID NO: 20261 - DNA, 393 bp, Zea mays
  Peptide Sequence Number=SeqID_62040
atggcgcaacagcagacgcagctaaccactggctcgggcatcctggatgccgtcccgctcttcgtcgtcatcctcctcgcggcccacgtcctggccctcgtgcgctttcccctcgcttttcttatttttcgttcctcgcgtctacacggtgttctggatgtacaagctggcttccgagaagcaaccaccccggaggaagacacagtgacggcgccgatctacgccatcggcgatccttcgctagcctctttatcggtagaagtacaattgcttctgcttatggcagtgacagtggttcagtcatgcttattaaatcaaagccagaaaactactgaaaaaaatgtgaagggcacattagctgtcctatgtactgatcaccaatgcaatctttga

SEQ ID NO: 20262 - DNA, 687 bp, Zea mays
  Peptide Sequence Number=SeqID_62041
atggcgctatggcttaacgagaagcttgtttttgtttccactcgcgacaagatagtcacagagagccctgagatacctcactcgctaatagaaagatacccctgtatgcgaggagacctgccaacactggggcttgcactccttgatctggtgtccgctgggaagcgtcaccaccgttcgagcaggaaagtgcagctcgccgccactgacacgtcgtcgtcagctgccatctttcgggatccacttgccatttgggtgtgtcgctcgctgccaccgtcctggcgccgctcgctgccaccgtccgggcgctgcttgccgcgactgggcgggcacagctctccgtcatcggacaggcacaacatgtcgcgactggctaggcacaacgcaccaccacctttgtgtgccgcggtgccgccagaggacctcacctcgtctccaaatgcatgcctagaagaagagttgcaggcgacgtcaagacctacggcatcggcgaaaccggtgctttcgaaggatagggatagggatacctctcagagacggaagtccatgagatcacccaagttgagcagccatgcggaggacttgttcgagatagaggacgtccagctcgcaatcggtagctgcaagatcgatccagagagtgcttctggcagtgagaagcctgggcacccgttcttgcgcagataa

SEQ ID NO: 20263 - DNA, 684 bp, Zea mays
  Peptide Sequence Number=SeqID_62042
atggaagcctactgcgatgaggttcggcgcctggaggacaagttcttcgggctcgaactcaaccacatcgctcgacgatacaacgagactgcggacgagctggctaagatagcctcggggcgaacaatggttcccccggacgtcttctcccgagacctacatcaaccctcagtcaagaccgacaacacgcccgagcccgagaagaaggtacccgagggctacacgcacctgctggtcgccattgacaaattctccaagtggatcgaggcggtggcgttcttcaccaacatcatccatcgctatggggtcccaaactcaatcatcaccgacaatggcacccagttcaccggcagaaagttcctggacttttgcgaggatcaccacatccgggtggactgggctgccgtagctcaccccatgacgaatgggcaagtagagcgtgccaacggcatgattctgcaaggactcaagccacggctctacaacgacctcaacaaattcggcaggcgatggatgaaggaactccccttggtggtctggagtctgagaacgacgccaagccgagccacgggcttcacgccgttctttctaatctatggggccgaagctgtcttgcccacggacttggaatacggatccccgaggatgagggcgtacgacgaccgaagcaaccggaccaactga

SEQ ID NO: 20264 - DNA, 243 bp, Zea mays
  Peptide Sequence Number=SeqID_62043
atgacgaaggtgatgcttgccgaaggtgttcagagctcaagaaatggaaatcgcgatttgtttctgtgcttcgaggaatcgaagatcaagagttggcgatcaagtgatctgggggctcaggccatttttcctgagtacctctccgttgcctttggtgcaatctatgctcaggtaaacaagaaggagaaagacgtcgaggcggatctccaggagttccaggacttcgacgagtttaaggattag

SEQ ID NO: 20265 - DNA, 138 bp, Zea mays
  Peptide Sequence Number=SeqID_62044
atggcgaaccggtggtggaagatggaggtggagccatcatcgaccatcgtggattggagtcgagccaccgatgaggggagggcggcatgggcctgtgacgaacctgtggagtgtgcatctcctttgaaaattgcataa

SEQ ID NO: 20266 - DNA, 384 bp, Zea mays
  Peptide Sequence Number=SeqID_62045
atgggtgtgcccaaagggtgtctgccccgcgaaaggcggcttgaattgcttattgaattcttgcgattgttcggtgtgcgggcacccctcgtggcgtcgttcgaggactcggacgactccatggagctgttcaccgcggcccgggtgtactggcgatccatcgagcgcgtggagctcggtgggtcggacgacttggaggagacctccttggaggaggtggacgactcctccgactccgaggagtggagcggcggcgagggtgatggcggcgaggacgatggcagcaacggcgagggcgatggcgacggtgacagcaagggcgacgacgacgacaagggcgatggcggcgacggcaaggccgatgacataatgctgctggcataa

SEQ ID NO: 20267 - DNA, 399 bp, Zea mays
  Peptide Sequence Number=SeqID_62046
atgagaatccgagagcgacgtgcaagtgattacaagtcagcaattgattcatccttctcccggatcgtgcctttcatgtcatgcacaccttcatctcaaagccgaaggttcctgtggcagtatattatacttggaaagcatgttagtcgtgtttttgaggaccttcggaagacgaaggcccccaacaaaatgtctaaggagaaggtgtctgaggtgacaaaggtggccgaggataagaagattgtggacccttttattgctgggttttatgaatctatggcaaaaacaaatgcagagaagattaccaaggagataatggcggatttatctgaggattctgatgacagtgatgattttgatgtggaaagtggagatgaagattccaaagatcgaccctag

SEQ ID NO: 20268 - DNA, 237 bp, Zea mays
  Peptide Sequence Number=SeqID_62047
atggtctcctggttcgggtccagcggctgcagagcggtagcccctgtcgctgaatctttcttcggtggcatgacgaagaaaaatagaaatgatatcaagttacaaatgtaccttcggcttgaaagaaggtacctgttcatgtattatactccagaaacattgttaaatcatgtttttgaggaccttcggaagacgaaggcccccaataatgacttcgctcttcatttgaggggatga

SEQ ID NO: 20269 - DNA, 126 bp, Zea mays
  Peptide Sequence Number=SeqID_62048
atgacgaatggggaggaggcgacacactctggtgaattggtggctggaggagacaacgccgagggaggtcgacgccgagcatacggacaattatctaggttccagggttacgagaggtctaaatga

SEQ ID NO: 20270 - DNA, 222 bp, Zea mays
  Peptide Sequence Number=SeqID_62049
atggcgccgccacgcccctatgtggcgccgccacgcccctatgtggcgccgccgtcgggacagcctgggattggggagctgatcgcggctcgtcgatcgaatgatcgatggctcagattagaagtaggaaacgtttcggaagagcccgtgaccgaggatcctggtgagcagcaggttgaagtagctgagcaggagctcattgaaggcaagttgtgcccttga

SEQ ID NO: 20271 - DNA, 105 bp, Zea mays
  Peptide Sequence Number=SeqID_62050
atgggctacgcagagatctccatccgcccctctgggagcggcaagttatgggcttttgaactgcttcaagctggagtgatgtcgctgtggtgcttttatgactga

SEQ ID NO: 20272 - DNA, 456 bp, Zea mays
  Peptide Sequence Number=SeqID_62051
atgaagaaggtgatctactatgagaccgactcatccaagccctcaacctctgacgccgagccaacatcttcaaagcgccaagagcgcaaaccaccatattttgatggtgaagattattctatgtggagtgataaaatgaggcaccacaagtgggcgatgaggactacaactccgatgaggccacccaagtgctcgaggagcctacacaagtataagagaaaccaccatcctccatacaaatctctcctccaacacaagttgaagagcaagcccaagatgatggtgatcaagttcaaggcaatgagcaagcttaagatagtggcatggatcaaggggggcctgaagaagaagagcaagaaaaggaggatgaacatgagatttaggctcaaagaccacctccccaagagtccatcaagcaactcaaagagaccaccctgtcaactccattctcagtga

SEQ ID NO: 20273 - DNA, 1368 bp, Zea mays
  Peptide Sequence Number=SeqID_62052
atggaattcgacacgtcaaggatctactcgggccaccaatttgtgcagcgtttctatgttcaagttcaccagcttatgcccaattccgtggtggcgttggtgaagtttatgtgggcagcgactacatatggcgatgagcctttggttgaggtcttcactaagaactattgtctgcactggaagaagaaagttgctggtggcaagattatgcagtttggttcgtgcacattcattttgaggactaggaagacttcgggtgaagttgtggaactcgttccgtgtgcaacgaacaagtgggggaactggtgggatttttggttttatgtgacattgaaggacgtcgaaggcagaagatgtaaaaattgtagggaaatattcgacgaagatggagatgccaaggagttgaaacatacgaggttcgaatatcaggctaaattgtatcttcaagctgaacggtctttggtatggcctgttcctgaggagggctctgctgatgctggggatattgatgatcacaagagaaggggtgtggcgacacgtggtggggtggttgaggggtgctctaaaggtcaggtcatggctatggcagtgagaaaaaagagaagggttgatgctgaaaagaagggtctggcgaagacatctagggtggcgggggcctcggacagatttgttgaggaactggcgaatacgtgcgccaagccaggggagaaagctctgttgtggcttgtggaccctcgacgtgaggtgaaggcgctctgtactggcacgaagggtgctgccactatcatggtgatgcctccgcccgtggtgccggttgttactgctggggggatgccttcgcctggcaaagctagtcaggatggagtggtgaggagtgctgaaatgggtggagctgttgcgatggtccggcagctttttgtcgatgattacttgctcgagggtctgagcgtgttcgatgcccacaccggtctcgtggctgatgggtcggggtctggccagttctgcgctgttgtcgatagaggcaggggtgtcaccgaggtgtctacatttggtggttttgcagcgactgctgtaaggcagctgtgctatgaggagctagagtccctctcgtccatcgtgacgggcctgttttcttacgccctccctcgttacctgcgaaggcgctcgttgtatgaccgtgggggtcacatggttgcacttttgttagggaaaggggctgaagagattgaggacctcgttagcttggagggctccctggccactctagatgatggcgttgctgagatgggtgcggaggagcaattgtttcgtgtgggtgccgggccttatctatcccaatgcggtggggacttcacaccattctgctaa

SEQ ID NO: 20274 - DNA, 195 bp, Zea mays
  Peptide Sequence Number=SeqID_62053
atggcccggatagtcaggggcggatttgggcccccggccacctgggccgtggcccgggcgcagcccaaaaaccctcatgtatatagcgacgcggccgcctccattcagtcctctatcgctctccacgccttcaggctctacgagtccggcaagggtacaaggcagcaacctccgaggcggccggacgggctctga

SEQ ID NO: 20275 - DNA, 1305 bp, Zea mays
  Peptide Sequence Number=SeqID_62054
atggaggtggaggcggcggggccggataagctggcgcctccctcgccggtggagggccccggcgagaatggcgcggccaccaaggtgcagaaggtgtaccgcagctaccggacccgccggaagctcgccgactccgccgtcgtcgtcgaggagctctggtggcaggcgctggactacgcgcgcctggagcacagcaccgtctccttcttcgacgagcccaaaccggagaccgccgcctcgcgctggaaccgcgtcagcctcaacgcatccaaggtgggccagggtttatccagagacggcaaggccctcaagctggctttccagcactggatcgaagcgatcgacccgcggcataggtatgggcacaacctgcacttctactacgatgaatggtgcaaaagccaagcaggccagccattcttctactggcttgatatcggcgagggaaaggatctggaccttcctgaatgtccaagagctttgctgaagcagcaatgcattaggtatcttggtccgcaagagcgtgagcactacgaatacatcattagcgagggaaagaaacagagaggcgtgttccagcactccagctttctggcaggaggtgcaactatagctgctgggagattcactgcagaaagtggagtgatcaagtccatctgggcgtacagcggccactacaaacctagcgcagagaacctccacaacttcatgaacttcctcgaagagaacggagtggacctcaaagaagtcgaggtacgctcatctaccaaagaagactacaacgaggacccagtgccagtgccggtacttaacgacacacggagttccacttcagctaccatggaagaggcagaccttccacaggcggcggttcccgtccccgctctaaacagcacagagggcgacgaaggagacagccctccggaagacgaaggacgaggcagggcgaggtaccagaggaccttgtcaggcgggctgcagagccccagagccacccaagtgccccagagggcgatcctcgagaggatgaagtccaagggcgagttgtccaagtcgtaccagctcgggcacaggctgtccctcaaatggagcaccggggctggcccgaggatcgggtgcgtcaaggactacccgatggagctccggatgcaggcgctggagatggtggacctttcgcccagagggttgtcgtcgactccgtcgccgtcgaggagactgcctcctccgtgcttttcccccactaaagtcgcctcgccgacgtctccgctcgcgccagttcaggcgtccctgccgcagccaagctag

SEQ ID NO: 20276 - DNA, 1830 bp, Zea mays
  Peptide Sequence Number=SeqID_62055
atgccgccggacagagaagacgccgcgggcgcgggcgcggacgtcgcggccgacgagctgcagagcgtgagcttcggctcgtcctcggaccgctcgcgctcgcgctcggcctccacggcgtccacggccacggcgtcctgctccacgtcctcgtcggggccgctacaccagcacctctcgctcccggccccgcgccgcaacccctccccctcccccgcgccaaccccaaccctgcccacgcagatcccgcgcctcggcgccgtctcgctctccgacatccgcttcctgcgccggctcggcgccggcgacatcggcagcgtgtacctggccgaggtccgccgccccacccccaccgccggggccgccggcaaggagaagcacacctcgactttggcggcggcggcggtggtggtggccgccaaggtgatggaccgcaaggagctggaggggcgaaacaaggagggccgcgcgcgcacggagcgcgagatcctcgaggccgtcgaccacccattcctgccccgcctctacggcgtcgccgagggcgaccgatggtcctgcctcctcaccgagttctgccccggcggggacctccacgtgctccgccagcgccagccgcaccgccgcttctccgaggccgccgtcaggttctacgcggcggaggtggtggcggcgctggagtacatccacatgatggacatcgtgtaccgcgacctgaagccggagaacgtgctggtccgcggggacggccacatcatgctgaccgacttcgacctgtcgctcaagtgcgacccgacggcgccgacgccggcgcacgtcatctccgacccgctgtcgctggcggggcggtcgggcggcgccgcgtcgtccacgtcctcctgcgccatctcctcctcctgcatcgtgccggccgcctcctgcttccagctcttcccgggccgcgggcgcgggcgccggcgccgccggccccgctggctgcgcgcgggcaagaaaccgtccccgaacaacaacggcgggctggagctggagctcgtggcggagccggtggagctgcggtccacgtcgttcgtgggcacgcacgagtacctggctcccgagatcgtggccggggaagggcacggcagcgccgtggactggtggacgctgggggtcttcgtcttcgagctgctgtacggggctacgcccttcaagggccacgacaacgagatgacgctggccaacatcgtggcccgcgcgctcgagttcccccgggaccgcgacccgcccgcgtcgcccgccgcccgcgacctcgtcaccgcgctcctcgccaaggaccccgcccgccgcctcggcgccaccgtcggcgccgccgccatcaagcgccaccccttcttcgccggcgtcaactgggccctgctccgctgcgccccgccgccttacgtgccgccgccgttcagcatcgccaaggcggcggctgctgctggtggaggcggcgggaaagacgacgacgacgacgacgaattgtcagaggtgaacatcttgtgttccaagcaggacctcacaagtcagaactggtgtcgcagagctccggatgccttttgggcggcagccggggcccggggccggggcagacgagacgccgaggcgatgatgattgggggcgcactggccaagtggggggtggtggcccggagattccggtgcgccgcgctcgtgcgcgtcgtcgccgtcgccgtcacgctgaaacacagcgatgcagcagcccaccgaccggtcactgagacacctttaccaaagaagtggctaaagatgctactgctagctctgctgcacactgcaacaaaccagggttaa

SEQ ID NO: 20277 - DNA, 219 bp, Zea mays
  Peptide Sequence Number=SeqID_62056
atgacgatggcaatgccgttctgggtgagggctccggtgttggggctggccggcctcgtcgccgtcgaccgcgcaaacgtcggcgtccgactagaaggcctggaagcccaacgtcgggcaactccctggaaggcgatatgcggcaggatcgggacattattgatccacaggcccctaccagtgctatctcaccctgcattatgggatctctgcaagtag

SEQ ID NO: 20278 - DNA, 315 bp, Zea mays
  Peptide Sequence Number=SeqID_62057
atggctgaaaaactcccagtgctgctacgctaccagagtcttcatgtgcatacttacttcaagaactcaaggccaaggcgctctccgagcaggctgccgcggtcggcctgcgcgcgcagctggtcggtcgaggagctcgccgccacagcgggggacgccggcctggcggagtcgtcggcgtcggcattcgtggaccctcgctgcgtcgggccgccgccagaccacgcgtgcctgggctgtcgcctcaggccggccatcgtggtgctcctcccctgcaggcacctgtccctctgcaacggcgccatgccatgccct

SEQ ID NO: 20279 - DNA, 669 bp, Zea mays
  Peptide Sequence Number=SeqID_62058
atggaggtgtccggaggagtggaggaggcgcgagtggaggcatcaaggccgcacgtgggcctctgcccagtagctggttgggagagaagcctggaagagaaggcagcaaatcatattagtggtggtgtgaatcatgcgttcggcccgaccgtcctgggcagaggtgtagggcacgagagacgcaactggacgccactggtgaacaatcggaagccttaccatagtgtgaactttgtaattgctcatgatggatttactttatgcgaccttgtttcgtataactccaagcacaatgatgcaaatggagaaggtggtcgtgatgggtgcaatgacaactacagctggaactgtggcattgaaggaggaacaaatgatttgaatgtgttaagtcttcgttctaggcaaatgaagaacttccatgtggcattaatgatttcccagggcactccaatgatgctgatgggagatgaatatggtcacacgcgttatggaaacaacaatagctatggacatgatactcacataaataattttcagtggggccagttggaagaaagaaaggatggccatttcaggtttttctcagagatgatcaagtttcgtcataaccatcctatactgagacgagacaggtttctcaacaaagagagctgcgtatcattgaattaa

SEQ ID NO: 20280 - DNA, 714 bp, Zea mays
  Peptide Sequence Number=SeqID_62059
atggatgacgacgacaatggtaggtaccctagaaccatcaatgggaagcttgttgagttatggcagcttcccgatgacgtcgatgacttgggagatgttgttgttgtcttgtttggtatcggtagcagtgttgttcccgtggacctagagggggcgcctgttagtgatgttgtgggctctaacgaacttgattcattagctttttctagcactactgggtacttgggtgctgatattgatccaacagatccaagtaacaaaacttataatgatgtgcatgagcgttgtgcctatcacataactaacttgattgtgaaatgtggcttgaaaaggcttaatgattatttagatatgtatagaactgttattatatttgttagaggtaaactccagccgggtggcgaaatacacctgcctaatcaacccgacttttatgtgccgccactgagctcatcaaggacatcatgcttccgcgcttccaggatcggctatggcggctactgcagctcgcctaccaccgcctgcgccacttcatgccaagtttcagaagaagaaggagaggcgggttccgtcaagaagtctgatgccgacgcggaggccgagggggtgtctaaggcgatggagtctttgctcgagctcaaatcactttttgggttgaagctgctcgctagggaggatgggattctccttctgaagggatgcagtgtgaactaa

SEQ ID NO: 20281 - DNA, 240 bp, Zea mays
  Peptide Sequence Number=SeqID_62060
atgggtgaggagttcgtactgcccttctcggacttccccacctctgattctggcaccctcatgctcacgccactctccctctacctgaccaacaccggctttgaggtcgcctcaccgggccaccgcgacgtcgtcggcttctcggccatcgcgaacgcccacgccggacgctgcaagatcttcgatgctgctgcttcaccaaacaatgaaatgctcatgacacatgatggaagaggataa

SEQ ID NO: 20282 - DNA, 2277 bp, Zea mays
  Peptide Sequence Number=SeqID_62061
atgaggcggagttcgttgtcttccggggccgagcccgagtccgagccctggggtcgggcgaggcggagttcgtcgtcttccggggccgagcccgagtccgagccctggggtcgggcgaggcggagtttcctatggcacccgaggccggacttggctgctgtcagcctcactctgtcgagtggcgcagcagtcggagtgacgcaggcggcgctgtcttcttgtcaggccggtgtttgttcgtgcgcgtggattgttttgtccgtgtctggtgcccgtgcaagagcccctaagctgcctagtagcactggatttgcagccccgacagcagcaggtggcactgatggtggtcggtttggtgggcgtggaggacaaggggctgctgcacagtatggagggccttatgcatcagtgtatggcacccaacaggttgggatcagtatttcagaagctgtgtcatatttgcatgtggttcccacattttttttggcaaatatctcaactgaatatcctcgttctttccaacaggttggtggacttggtggcaaaggtccagcttcttcaagtcttcctagcttgccaaatcgtccaacttctctcactgagtcatccaagttcacatctgcacctgtggggtctggcctggcaagaccaaatgatgactatatggctgtgcgaggttatgcacagaagcaagaccaatatggcacagattatccactagagagacgtatgtatggtgaacactcggccaatcttggtagaagggatggtctcagtgatttggatagaagatacactgatcagatagctgctggtcatcagagttcatcaatgcgccatcagcagctcttgaaaggtcagctgcagcctggatctgatacgagacaagccgattactttgcaggaaggtctgctccagttcatcaagcatcccaggaaattggtgtatatggaagagttgatgctgataaccacaacatgtccattcttgggactactccatatggaagacagcaagcagcctcattgttggaaggagctccgaggacaaacattgacagcctctatggacaaagatcatcaagtgctggttttggtgcaggtcttcctcctggacgtgattatgcctcagggaaaggcctgctccatccatcttcggatcctgattaccgagatagcatcttaccccatgtacatccaggtgtatcaatgattgatgaccgtagaattgatcggatcggttctcgtcgtgaattggatctaagagatgaagagcgccgaagggacctaatactggaaagagagaaagagcttgagtgggaacgtgaacgtgagttacgggattttcgagaccgtgaaagagaaagagaacgtgaaagggaaagggaccttgaaagactactaagagaacgcgaaagagaaagggagcgcgaacatgaaagagagcgtgaaagagaacgccttcgtgagcgccgggagaaggagagagagcgggaaaggaagcgcggagctgatccaaggcgggagcacactccatctagaggtcctggtgaccggcgacactcttctcttagatctgagaagcctgtgcggcgaatctcccctcgacgtgatgctgggcataggcatcgttcacctgttaaagaaataaagagagaatatatttgcaaggtgtttccatttcgcttcgtggatgatgagagggattatctgtccttgacaaaacggtatcccagacttgcaattactccagaattttctaagattgtcttgaactgggctaaagaaaacttaaatcttcctctggatacaccagtgagtttggagcacgatatccatgattcagatgatggtgctgatgaaggagcaattatctctactgagaaaacatcaagcttcaatactccggccaccatttggaatgcaaaggttgtagttctgatggtactattgatgagtggcatgagcaaaggtgcctttgctaacataacttcattgagaagtactgaggaacgagttgtgcacttgaacaatatcttaaaatttgctgtattcaagaaggatcgttctctttttgcaattggaggcccttggaatgcagatatagatggtggtgacccatcagctgactgttcttgcttgattcgaactgccatcagatgcgttaaggaaacggttcacgttgatctatctagttgcacccactggaaccggtttgtcgagtttaacaaaatacctttgtttagtaagagaaacacacatgatgctgccttgtga

SEQ ID NO: 20283 - DNA, 488 bp, Zea mays
  Peptide Sequence Number=SeqID_62062
ccaacggccaacggagcttctccccacccaacgacgcccaggcggtggtgccctgctccaacgacggagcatcaccagagcatgggatgcatcataccgactatgaggtggtggtgggatcagtccatgacagacagcgacagcagtggcatctcgactccgatgagggattcgtgatggctcaactaatcttcggctccctcgactccgcgcctaggattacctcggacccggtgatgtcccacagccctactccgaccacggactggcagcacgggtggaatacaccgacggcggccaccttgtccctccctcagatttgcatggcgaagctcggtgattgttcactggctccccaggttaggttgacgagatggggcacgaggagcccaacttttatagtccgcatggagggcaacgaccaggcatcgaggtacatgtggccaggaatcccggttgttttgttacaccagatgcggagggaataa

SEQ ID NO: 20284 - DNA, 651 bp, Zea mays
  Peptide Sequence Number=SeqID_62063
atggcgaacatgaagaaggtgaagaataccggaaatcgggcgcgcagacaagttgttcacgcgttggggcggctaggcggtgttatctccactccggcgaggaattccccgcgccgttgggacgtttcgggcctcaatccgccacagacgcgttccacggccccagggaagttaccccgaccaccgggcaacaccggaatgatagcgcagaggagagtcagcggcggcgatggggttgtcactgtgcggcgtgcactggaatcctatcggcggcgatggacacggctaggtggggcgaggagtagtcacggcaccgagcgctcacatttatattggtcaacacccaacggtccgagcgagtcccacgccggccatggcggcgaggtccgcccgcgccgcgcgacaatcgcggaggagacgaccgtgacgcggaggctggtcaaacggccccaccggtcagtgtgttgggaggagtccggtcggcgcgcgcgcgaggatctggccgggcgggcccacagtctagccgcggagtcacgcgtgcatacacggtggatggctgaccagtggcccccaagtgtcggcgccgaagacaagtctgggctgcgcgggggagaaggaggagatgggccagaatgggtacagtcggcccag

SEQ ID NO: 20285 - DNA, 366 bp, Zea mays
  Peptide Sequence Number=SeqID_62064
atggatattttggctttggggaagggaccaaattcagtgtctctgactggtgctgtgaaccagaccaggtgcagtgactgcagtatggatcagagcttgactaggttcagtgtttctttggacagtgcatgtgagccagcaaagtatatgtgcatgggagccacgttgagttgctcctgcagtgctgctgtgctggtatgccccagaattcatgttcaccaagttgtggtcgagttccatatccctgctgttgacacctttttagggcgccaatcactcaacacgaaccaacggcggtgctctgtgcacaggggcggacggtccgtggccaggggccagacggttcgtggcctggcgcgaggctag

SEQ ID NO: 20286 - DNA, 327 bp, Zea mays
  Peptide Sequence Number=SeqID_62065
atggacccacccactcagccacttggcgtgttcccctctctgctcgtgccgccgccgcatgggcccatgttgtcgggagtcaccttctacctggattccgagctgaattgggcgtcacgatcttctccgcgcgcggtcgccaggggaactgataccgcaaatcatgggggaaaaccgggaatcgttgcaactgttgagacttttcctgtgtataaataccggtgcttaccttggcctatgaaagccagcgtcgtgcctcgtgacccatcaccggcagtggagagcattgggccgccgcgggcaaattacgttgtcgtcggcgcttaa

SEQ ID NO: 20287 - DNA, 1437 bp, Zea mays
  Peptide Sequence Number=SeqID_62066
atggacgccaagaggcagggcttcttctccgcgctgcgggaggaggtggcgcgcgggctgtcgccggggcgcgcgcggcggcggtcggcgtccaacgccgcggaggtggcggcggcgctgcgccgcctcgggggcggcggcgaggcgctcgcgccgctcatggagggcccggatccggaggcgggccccggcgcgacctgcggcggctccgcgaggaaggaaggcgggtgggggcggtgggtgcgcggccagctccagctcacgcgcgcgccggcgctggaggccggggccggagctggctccggcgccgccgccgccgccgccgccgccggcaggcgcaacgacctcaggctgctgctcggcgtcatgggcgcgccgctcgcgcccgtgcacgtctgcgccgctgagccgctgccgcacctcagcatcaaggacacccccattgagacgtcgtcggcgcagtacatactgcagcagtacctggcggcgtcgggcgggcagaggctgctgtcctccatccgcaactcgtacgccatgggcaaggtgcggatggtggcgaccgagttcgaggcgggcggccgcgtcgtccggaaccgcatggcggcgcagcgcgccgagcccgggcgcttcgtgctgtggcagatggcgcccgagatgtggtatatggagctggccgtgggcgggagcaaggtgcacgccggctgcaacggcaagctcgtctggcgccacaccccctggctcggcgcgcactccgccaagggccccgtgcgcccgctccgccgcgctctgcagggcctggacccgctgacggcggcgagcatgttcgccggcgcgcggtgcatcggcgagaggaaggttaacggggaggactgcttcatcctgaagctgagcgcggacccggagactcttcgggcgcgcagcgaggggctggcggagatcatccggcacgtgctgttcggctacttcagccacaagtccggactcctcgtgcacctggaggactcgcacctgacccggatccagtccgccaccggcggcgacgcggtgtactgggagacgaccatcagctcgtccgtcgaggactaccgcgccgtggacggcgtggtggtggcgcacgccgggcggtccgccgtgaccctgttccggttcggcgaggcggccgtggggctgggccacaccaagacccgcatggaggaggcgtggaccatcgaggaggtggcgttcgacgtccccggcctctccgccgactgcttcatcccgcccaccgacgtcgggcccggctccgtcagcgaggccgccgagctcccgcggggcgagcggagcaaggccgccgccggcctcgtcctcccgtgccaccgcgctagggtcgccgcgctcgagaaggccgacgacggtggcgtcgcgtggagcggcgccctgcagctcgggtgcaagtga

SEQ ID NO: 20288 - DNA, 552 bp, Zea mays
  Peptide Sequence Number=SeqID_62067
atgtggaagaaggtgtcggagcttgaagcttcaagtgctgaaaaagacaagcatattgcatcacatgaagttgaattaaaacgcgcaaaagaggaatacgaaactgaaatttacaagataaggcaagcatctgccaaaacaactattgacattagcgctacccaagtgaagataggggacctcaatgatgaagtaaaccacgtcgggtgtaataatgtgaggacttgcactgaccctgacttcaaagtttctatcgaccatgtccgaaggtcaaccgttgaagcttcagagtggtccaaaaaattattatctgatatatggaagaaaggcggaaaggaaattagcattgaagaatctataaaaacagggagaagcttgtcctctaacttttgctgggaagtttctacttcgcaggtgataattgaagtaaagcataccaacgctgaagccaaggatgttgctattgaagcagaagtagtagctggcagggctacaaagaaagctgcggacgaagttatcttcaagatttgcgaacaaatttatgatgaatga

SEQ ID NO: 20289 - DNA, 312 bp, Zea mays
  Peptide Sequence Number=SeqID_62068
atgcccgcactcactcccccgcctcatttcacgcagtcccaccctcgctcgcgctctgctcaagtcgccagacctcgcgggagacctgcgcccgcctccccgaccatctacttcgctggagaccgcgccaagccactccgagctccgccccgagataatgagcagtctgaggttcctgagtgtgttgttggacacctccctgagcaacaacctgggggctcaggcctttttcctgagtacctctcgtgctcaggaggtgatgctggcaacatggaggacttcgaggagttccaggattacgatgagttctag

SEQ ID NO: 20290 - DNA, 204 bp, Zea mays
  Peptide Sequence Number=SeqID_62069
atggccggcgggaggaagcgggagtggctgcggaacaggatggcgacgatcgccgggacaccgggcgcgcgcagacagcagcagtcgccgcggagtacaggacagccatggcttgttgcccaacgtctgtccgcgttctttgccctgaaaaggatgtaccatgatacccctgttccatccagcgtcgtgcaatccaaattgtaa

SEQ ID NO: 20291 - DNA, 2208 bp, Zea mays
  Peptide Sequence Number=SeqID_62070
atgaagggtagacctagtgcagtggtgacagctatctttgccgagtcaccaggtcacgggtttgaagcagcctctccatatttacaggggaaaggtttgcctcggtttatcccttccctaggccccactcatgtgggagcttccggcactgggtctgcccctttatgtttcactaccataatgctagagaagggaatggcttattatgtttgcagcaatgttgcccaggctgatgctaagaacactttccagcctccatctcaagtgaaacatggttggggtggtgttccaggtcgcccttccatggctgaaatagtgaagatgggccggcctcaagctaaagttgggagcagatctgttgcaagtagcattgtcatgccagctattggtgattcagccattcccaatacaccaaatcttgcgcccaatgaatacaaccaaactgtatttgcatcagaagtaggccatggtgcagcagataaattgccaaatgttgccgatgaggtgcactctgtatctaaagatgcttcctcacttgatatgttaccttcagcagagggaacagatgttgaagccccttccatgagtgctaacatgcaaggttcatcaacgccagatgccaatgaagatgacgttgaaaaagacacaaatttggaagagggcaatacagaaagcttgacgactcctggacaagtttctgcttctggtaaagatctgaatggagatgtgtctacaacgacaacacaatttgatcatttgactctgcttgatggaccaaaattgtctgatgagaatccggctgtaataatccctggccatcttcaggtttcaaacgctgattgtgcgcacttgacatttggtagttttgtgtatggaacacttgatgcgtccttgacaacaaaacctcttgagagtcatggggatatcgtaacaattcctgacgatgattatgaccaatcagagggcaggcatgttccttctttttcttttattttatgcactctatttttatcatgtatctcttataaaccctttatcttcagaatccatgacgatgaaagcaaggtaacattagcgcctgctgctaatgaatatgttacttctacgtcaaacagcaatgtagagaatcttgatattacatcagtacagcaatctgaagtcactagatccaatttcctggatgtcacgagcaatacggaatacaacctatcatcacccccagattatgcaacttcaagtgcagcgctgcaagattctacttcacagagttatctacaggaaaatcgacaattccagagcatttctcctctcccaagcttcatgcaaatacaaaatggtctcatgtcaccagcaattccaccattgcgcgaatttgatccagcattctcactattgctcactaatcctcctattatgcatggtacaacgtcatcatccatgagcagtgcaactgtttctacgcagccccaagagaatgccaatccagttggtttacccaaccctcaattgactcaatctcagccaagcaccagcattgctccagggcctccactccctcagcatcttcttcatccctatgctcaaacaacccttcctcttggatacgcaagcatgattggctatccatctcttccaccaagctatgcatatctcccacctgctgcttttcagcaaccatacatgaacagtggcatgttcctccaccaagcagcagcagcagttcccaactcaagtgtgaaataccctctgccgcagtacaaaagcaacattgcccttgctagcttaccacagccaggctctttgctctcaagctatgtcgggggctttggaactgcaaacaacatgcctggaaatttccctctgaaccaaagtacaacgtcggcaaccgcaactcttgggtttgatggaacggtcccgtcacatttggaagatggaaaccagtttgtttgtcttcagcagaacgagaaccctgcaatgtggatgcatggagctggttcacgagggatgcccccacttgcagccagtaccatgtatggctatcaagggcagagtcatcagaccggccttcggcagggccagctaccttcacaatatggctctgctctagggcagtcacagccgggcctgggccccgaacaccgaaatcctagcgatagtaacctaagtggtgctgctcaggctaaccagatgtggccaaacagctactga

SEQ ID NO: 20292 - DNA, 372 bp, Zea mays
  Peptide Sequence Number=SeqID_62071
atgatcatgagaaaaggtgtcaacatgcacatggtcagggtgaggggcatgactaaggagaaaggcgcacacaatcaggggcataccaatcgagggccagggagaggcgcggccacgatcgtggatgagagtatgaccgaggggagatacgtgcatgaccacggagaggacacatttggctataggagggggccatggctgtctgagaaggaggtagtgcagtggatcgagggcccgtttggcaaagctccagctcctgcttctttagctccagatcctgatccttctgaggagctgatcctcctgattctcctagagaatcagaatcatttttcaaaacgtttggcaagtaaactgattcttgtctgctga

SEQ ID NO: 20293 - DNA, 794 bp, Zea mays
  Peptide Sequence Number=SeqID_62072
atggcgcaggctgcatggcatcctcgcccttcactacgcctactgctacttctcatcaatgcgtgcgccgtcctcaacagtccggtggccgcgcgagccgagcggacggggtacattgtccacatggacaagtccgccatgccgcgacaccactccgatcaccgcgactggtacgccgccaccgtcgcgtctgtgacggacgcgtcagcgggcgtccgaactaagccgcagctcctatacacttacgacgaggcgcttcacggcttcgcggcgacactctctgcctccgagctccgcgccctccgcggccagccgggcttcgtctcagtctacccggaccgccgagcgacgacgctgcacgacaccacgcactccatggagttcctcaacctcaactccgccagcgggctgtggccggcatccaagttcggcgagggcgtcatcatcggcatgatcgacaccgggttgtggcccgagagcgcgagcttcaacgacgccggcatgcccccggtcccgtcccggtggcgcggcacgtgcgagccgggcgttcagttcacgccctccatgtgcaaccggaagctcgtcggagcgcgctacttcaacaggggccttgtcgccgcgaacccgggcgtaaagatctccatgaactcgacgcgcgacacgggaggggcacggcacgcacacgtcgtcgaccgcgggaggcagccccgtgcggtgcgcgtcctacttcgggtacgggaggggcacggcgccgcggcgttgcccccgcgcgcgcaccgtccccatgttacaag

SEQ ID NO: 20294 - DNA, 531 bp, Zea mays
  Peptide Sequence Number=SeqID_62073
atgaatggggacataacctttcagttggatgactcttttgatgacactaataggcgttttgtgtgtaggatccaagaacctgaggttaaagaggcattgaaaaagatgaaagaggtaagccatacaagaagggatctagtctgtaatgatgatatacatgataggctaagggtagcaccaattgaagaaaagctgtctgaagtatttgctgttgcatttgctgtcctggcagctggggctataattctgaccttgaatgttctgcttctgggtggacacatcatcttcttccaaagccttagtcttcttggttattgcctgtttccactggacgttggtgctctactttgcatgctgaaggacaacgtgatacttaagattgtcgtggtgacaatcacattggcatggagctcctgggctgcctatccattcatgagtgctgctgttaacccaaggagaaaagctctggccctatatcctgtcttcctcatgtatatctcagttggtttcctcataattgccattgattaa

SEQ ID NO: 20295 - DNA, 237 bp, Zea mays
  Peptide Sequence Number=SeqID_62074
atggcacgagatggcctgttgccatccttcttctctgatgttaacaagcaaactcaagtacctgttaagagcacaattgtgataggcatctgtgcagctgctctggcttttacaatggatgtctcacagttagcaggaatggtaaggaaccagctatctgttcctgtttgtgttggtggagaagacacaggtctgttgcaactgaaagtagagataagattacaactactaaagtag

SEQ ID NO: 20296 - DNA, 663 bp, Zea mays
  Peptide Sequence Number=SeqID_62075
atgagcgtcatcgaacagttgcacgcaaggaggctcctatcgcacgccgccgctgctgcgactgctccgtcgtcggctgcggagccggagccggcggccgtggccatgccgcaggcgcaggcggtgtctgcagcgcactcgcacgcagccgcagcgcccttcagctcgctgaacgcgacggtgatcacggcgctctcgctgctcctgtgcggcctggtggccgtgctcgcggtccacgccatcgtacgctgcgcattccgcgtcacgcaccgcgtgtgctacggccaggacgaggacgaggacgaaccccgccgccgatgcgtcggcggcctcctgccagggccggtcccgccaggaggaagcgcggggccgcgggccgggctgcccccgtggatactctactcccgcgaggtcgagctcgccgggtgcggcgccggcgcggcggaatgcgccatctgcctcgcggagttcgtgcagggtgaccgcgtgcgcgcgctgccgcgctgcaaccacggcttccacgtgcggtgcatcgaccgctggctcgccgcgcggcagacgtgccccacgtgcaggcgggcgccgttcgccgctaaaccctcgctgacggagccggacagcgcgggggcgccggaggcagtgcagcttcaggtgcacgcctga

SEQ ID NO: 20297 - DNA, 657 bp, Zea mays
  Peptide Sequence Number=SeqID_62076
atggcgatcacgaggtcgtcggcgtcggcgtacaactgctcctccgcgtccagcgacgtgaactacccgtccttcgtcgcggccttcggttttaacgccagctccggcgccatgcagttcaggagaacggtgaccaacgtcggcgtgggcgcctcggtgtaccgcgcgtcttgggtgtcgccgagcaacgcgaacgtgtccgtgtcgccggggacgctggagttcagtgcgctggggcagacggcgacgttccaggtgggaatcgagctcactgcgcctaccggcggcgagccgactttcggggacatagtttgggccgacgctagcggcaaccgcagagaagagcgcctccgccgagccagacacctggacttcgtcaccctcctctcctgggccaagaatgccgcccttggggcgactcaacctcgcaccgccatacacgacatcaccaacgggacccgccggacgcccagctacggggaggcgctcctacgcggccaggtcaaggcgctcctccacaaggtcgaggaggagcagggctgcgccgccgcgggtctggcactgcacaacatcaccaacgactcccacatcccatcatcgggttcgcgatgggcgacctccatgccactgacaccacctcacctccaccaccgttaa

SEQ ID NO: 20298 - DNA, 705 bp, Zea mays
  Peptide Sequence Number=SeqID_62077
atggacgcacagctcgccgtcgacctgctcgacgaagcacgcaacatggtcgtggttcgctctgccaagtaccaacaggacttgcgacgctaccatgatcaccagccgaccgttgcagcaaccggccccgtggcacaccagacagtccggtgcgacctggtgaccgttggtgaagtccacgtgtcgtccgctgatcgcgcggccgaccgttggagtgggcgcggctgccacaccggacagtctgtccaccttgttttcaggatcaagaaagcggaacatgtcgaccaaactgccacatcccgctcgggggctaggagaggagcaccccaggatacgtcgcttccatccgtgatcagtggtaaaacctcctcgtggcgcactgccggattagttggcgctagaggaggcgacaccatctcgcggcctgccaacgcagggggagtagaagacgactcgttcgccctcgacatccctttgcgatgccccgtcggcatggtcgtcggggcagtgggcgccgcgacggcgccctcccttcggaggagggcgctggagctcgcctcgacgtcatcagggcgggaaggaacgccaacggacgaagggttccccgctccggcggaagccgtagaggtcaggtcctccgtgtccgtggatggggtgatgctctcccccgacttgacgcgagcaagacaagctttcttcttgtga

SEQ ID NO: 20299 - DNA, 1486 bp, Zea mays
  Peptide Sequence Number=SeqID_62078
ggtgataccgtcgtcctcgccgtcgcacacgggcctcggatctcgcggcgcctagcgcaggccgccagcaggcccggcggcgggggcagcgggccgggctccatgaacgtcgaggagctcctccgcggcatctacagcgacatgcccaccccggcgccgcccgcgtcggaacccggacgcccgatgcccccggccccggcgccggtgagcgccacgcggaagacggcggaggaggtgtggaaggagatcactggcggaggtggcagtggggaagccgtggctcccgtggcggctcaggctgtcgctcccgatggtggcgctggcacaggcggcccggaggtgacgctggaggacttcctggccagggagagcgcggtgaaggaggatgaggttaagatttctgtcccccccgcgccggtcatggggttaccgggcggagcggagggcgtgagtgtgcctggcggcggaggcgggagggaacggaagcggcagcttgtgagtacagtggatcgcgctcgctctgctatccagcgagagaaacgaatgataaaaaaccgcgagtctgctgccaggtcacgggagaggaagcaggcctatatcgccgagctagaatacatggtaacgcggctcgcggaggagaaagctgagttgttgagacaacaggtaatactcgactctgacatattcatgggggcgctgcacaaggtcagggcatacgacagctcctccttgggcggcggtggtggctccttgggcagcggctctgtcttggggcaacgacgggagctgcagacgtgttcgccgctggggactgcagtcgtgtgcgccggtggcctggtccttgtgcgctggcagctcctagttcttgttcaccgacagctgtgcgggactggagggcggctgaccggctgtgcgcctgtgagaagacgaccaagcagacttgccgagcaagtctgcgaggcggggcgaacgaccaagtcccccgccaagcaagcctgcgagactgagtggacgaccaagtcccctgccgagcaagtttgcgaggcagggcggacgaccaggcattcaccaagtacccgggaatgtggtacccaaaacaagcccataaacccttttctagccaacgcgccaaagtcccccgccgagcaagcctacgaggcggagcagacgaccaagtcccccaccgagcaagtttgcgaggcggagcggacgaccaagtcccctgccgagcaagtttgcgaggcaggcaggcgaccaaatcccccgtcgagcaagtctgcgagacggagcagacgaccaagtcctctgccgagcaagcatgcaggcggtgtggatgatcaagttccttgccgagcatgtctgtggaggcggggcgacgaccaggcatccgccagtgagcccaagcagtatgccaccgccgcaagcatacgtcaaaccacggcaggacaccgttctcatgagcccaggcaatggtccggaaccgaat

SEQ ID NO: 20300 - DNA, 2148 bp, Zea mays
  Peptide Sequence Number=SeqID_62079
atggccggagcgccgtcgtcgctagcgcgcctcctcctcctcctcctgctagctgccggatgcctcctcccgctggtcgctgacgccgcgcggctcacgctgtccctcgcgcccgccgccgacgcgctcctcaggctcaaggccggcattaaggacgacggcggcgcgctcggcagctggtcccccgacacgagcccctgcgccgacggcgggcccagctggaagggcgtcctgtgcaacaaggacggcgtgcacggcctgcagctcgaggggatgggcctctccggcacgctcgacctgcgcgccctcaccagcctgcccggccccggcctccgcacgctgagcttcatgaacaacgagttcgccggcccgttgcccaacgtcaaagagctcagcggcctccgcgctgtctttctgtccgagaacaagttctccggtgtcatccccgccgacgcgttcgccgggatgggctcgctcaagaaggtggtcctgtccaataacgacttcactggccccatcccggcgtcgctcgccgacgcgcccaggctcctggagctgcgcctcaacgacaacaagtttcagggcaagatcccggacctgaaacaggaggagttgacggaagtcaacctcgcaaacaatgagctcgagggggagatcccggcgagcctcaaatccatgacatcggacatgtttgccggcaacaagaagctttgcggcccgccgctcggtgccaaatgcgaggcccccccgacgccgtcaccaaaggcgcatccgcaggcctccgtcaaagaaggcaccacgccgtcacaagcagcagcagacaccgtggcatccacgggcgcgtcgtcagcagacgacccgaagcaagacgaaggccaggagcccgtcgagggctccatttcgttcggcgtctccgccgcgttgcttggcacgcttttgatcgccggcgtggcgttcatcgcgctgcggaggcggagggggtacaaaaccaagaacttcggcccgaccgcgtcgtcgtctcgcccctcggggccgccaagggtcgagccgcacccgccggcggcaaaggcgcccgccgccgccgggggcgtggcgcacggcggcggcgcggcgcggaaggcggagcaggggcgactgacgttcgtgcgcgacgaccgcggccggttcttcgagctgcaggacctgctcaaggcgacggcggaggtgcttggcgccgccaacctcggcgtgtgctaccgcgccacgctcacgacgggccagtccgtcgtcgtgaagcggttcaaggagatgaaccgggtgggcagggaggacttcgaggagcacatgcggcggctgggccgtctcagccaccccaacctcctcccgctcgtcgcctactactaccgcaaggaggagaagctgctcatccacgactacgtccccaaccggagcttggcgaacctcctccatggcggcggcgagagcggcgggatgaagaaggcggcggtgcactgggcagcgcggctgaagatcgtgaagggcgtggcgcgggcgctcagctacctgtacgacgagctgtgcatgctcacggtgccgcacggccacctcaagtcgtccaacatcctgctcgacgcccaccacgggccgctgctgacggactacgcgctggtgccggtgatgaaccagtcgcacgccgcgcagctcatggtggccttcaagtccccggagcggaagcagttcggccgctcgtccaagaagagcgacgtctggtgcctcggcctgctcatcctcgagatactcactggaaggccgccgacctacgacccgcccaaggcggcggcgccctcaggcgagctgtcgtcgtcccagcagaagccggggccggcggcgggcaacaccgacctggtgaccgtcgtggggtcgacgccggagggcgagtggctgaacaccgtggtggaccgggacctgcggggcgaggaggaggaggacaaggaggagatggtgaagctgatcagggtcggcatggcgtgctgcgagagcaacgtggacaaccggtgggagctcaagaccgccatcgagaggatcgaggagctcaaggcgaaggagcgccccgacgaggagcaagcgacggtgatcgacgaggactacagcgatgttgccctcaactga

SEQ ID NO: 20301 - DNA, 1014 bp, Zea mays
  Peptide Sequence Number=SeqID_62080
atgccgccgcgctcgtaccagctcctcctcttcctcgtgatcctggagcttaccagcgtagccgtcgccgccagcggcgaggacgaggacgaggagcaggccgcctgcgccgcggcgaaccgcacggacgcggcccggctccgtgcggaccgactgacggtgatcctcacgggttactcggagcgtcgcctcccgctgctccgcgccatcgcgggtgcctacgccgcgcacccgctggtcctcgcggtggtggtgctctggtgcaacccctccacgccggaccgcctcctcctcggcggggccgggttccctcctcgcgccgcggtacgccgcgccgcctcggcgtccctcaactcgcgcttcctcccgcggccctccgacgtgcgcaccgccgccgtggccgtggccgacgacgacgtgctccccgacgccgcggcgctgtccttcgccttcttcgcatggcagcagcaccagcgaccggtgccgggcccggggcccctggtcggcttcttcgcgcggtcgcaccacctagacctgacccgcgggaggtgggcgtacacagcgccgcagccggggcgctactccatggtgctgaccaagctcatggtcctcgggaccgacctcctgcgcgcgtactcgtgctcgccggagctggcggccgcgcgcgccgtggtggaccgggagcgcaactgcgaggacatcctcatgaacttcgtcgccgccgaggcgtccggcgccgggcccgtgctggtggaggccggcggtgtcagggactggggcgaccccaggaacgacgccgccggcgaggggcctcgaggcggggccagggacgtggggctcagcgccacgggcgggctgggccactgggagacgagagggcgctgcatcaccgagttccaccgcctgctgggaaggatgccactgcggtacagctacggtaagctggtgcaggccaccggcggcgaccaggggctctgcagcaaaggcggccgcctcgtccactgcgaccagtag

SEQ ID NO: 20302 - DNA, 318 bp, Zea mays
  Peptide Sequence Number=SeqID_62081
atgtccccttaccagccctgcggtgaagctccagcaaggagccaacatacgttgtggtggcacatagggaagcaacatgctgttgcaatatgggaccaacaaggcatggacgaccatgaagcagtccacgttgtcagatttgaagtcccatcttcacccgattctggctacaacaaccctattccaggaaacaaagcaaagttcgggagcccacgtgtcagcatcagcccttcgatagagcatgtcttgcctgttgtggcacaagagtggttgaacgatgagttggatgatgggccaaaagagcaagctaatgattga

SEQ ID NO: 20303 - DNA, 540 bp, Zea mays
  Peptide Sequence Number=SeqID_62082
atggacggttactacatcattcgccgaactaacacgccaggatctaatcctggccgtcccttgttcgatcaagagccaccgaagctcggccaccgtttccccccaaccaccgcggtggtcggaacccggcacggcggtgccatggccaatcccctctggaactcgatcctaagtgcaaagctcgactccctaatgatgcaaaaccaaattgaatatggccccggttatactcgccgcacccaggcgagccttcgtagccaccctaccacggttgaattgacaatggatggaggtggcgactacaccacaacgatttcccctaagggggaagctctggcctccgcgccaataaactcgcggcgccccgttggtgaggacagccctgatgatagggtccaacatggcagcggctgtgttaacatgcgcaatgggtacagtgaggctggttgtgggctcgacttgccagtgtgtgtaggagtagctcgtggaagggctggcgcgaaaatatatgggggtgggccgcgggaggaagtctggtag

SEQ ID NO: 20304 - DNA, 255 bp, Zea mays
  Peptide Sequence Number=SeqID_62083
atggatactgccaggaaacgaattgtgtgtgtgtgtgtggggggggggggggggggggagactattagctacttttgggcccagtctgttagttacttttgggtccaatccggctcatgggtgaacttttggcaggtcgagaagcaggttactcaaggagcagaaagggtgaaggtgattgctctatacttccacaagaaggatttggagactcaggattggataaatgccagatcattcctaaatgctgattaa

SEQ ID NO: 20305 - DNA, 345 bp, Zea mays
  Peptide Sequence Number=SeqID_62084
atgcggtcgtgcccctccaggcggcccgcgcccctctccgcagtcgtgccccccctgcggctcgccctcccccgcagccatgtcctccccggtgggctcgtccccacggcggctcgcccttctccggcggccgtgccctccccccccgcacagccagtgccctccccgacgtcggtgccccacgccccgcggccccaggccgtgccccggcggcggctcgcgccccgtgtcccgtggcgtgccccggctatggccctgctccccgcgcccccggcagccccacgcccttccccggcggcccctaagcgtgcccctggcgcgcgcagcgcgttcccacgcgcgtga

SEQ ID NO: 20306 - DNA, 408 bp, Zea mays
  Peptide Sequence Number=SeqID_62085
gatcccttgcctgaccgccatcgcagcaaaatcaaccaaggacctccctacactgaccactcccctactgcccttgcccctttcgggtaccaacttgctcttcagatgacacgtgtccacactgctaaacgtagcaatacagacaaacatgctgctgaccgagtgggggcgctatcttccgagtccctcgagaaagagctcatggaggccaacgcgcaccgggatggcgcgctgcgcgaatctaccgacgtgatgtcgtcgctgggggagctggccaccaagctggtgagcgtggaagcgtactgctcggagcacaagaaggcactgcggcaggccaccaactcacacctgttctttcactgcgcgagacctaggttcatggtgcttacccgtgatgaagacagctag

SEQ ID NO: 20307 - DNA, 423 bp, Zea mays
  Peptide Sequence Number=SeqID_62086
atgggcaagaacaacaagcgcaagcgtgagccgactcctccatcggaggagtttggtgactcggaatactcagaggaggagttctcctctgagtccgaggggtctccggctcccatccccctgcgtgagtcgtctgatgactcagacgactcccaggggcttgcggcggaggtctggacgtacatccgggccgtcgagcgctccgggctcgagggctcggatgagtctgagttctcctcggacgaggaggactcggacggcggcgaggacgaggatgacgacgacgacggtggcgacggcgacggtgatggcggcaacggcggcggagacagcagcagcaagggcggcaccaagggcggcagcagcgtgggcagtaccggaggcggcggcggcaagggcagcggcggcagggctagtggctaa

SEQ ID NO: 20308 - DNA, 306 bp, Zea mays
  Peptide Sequence Number=SeqID_62087
atggccatgatggattcaacatcggaaaagatgtacctctgccaagtaccaaactttgggtttgaaatgataaagctgagaccgggcgagaatctcggtgtagtgtctttgtctgagtcgattaaggaccttgtcgatgtaggcctgctgaccgaggaccctttaactggtcacatgcctcgtcatggggctttgtcccatgttgttttagttgatgaagtagcaacttttgttgtttctgttccaaagtggtgcctaaagaagaaaatcaagactgaagccgcgggagaaagtgtcctactttaa

SEQ ID NO: 20309 - DNA, 588 bp, Zea mays
  Peptide Sequence Number=SeqID_62088
atggacaaggacagtgtcaatgcttcttcaatcgtggacaagaatgagacagatgttgttggccaccaggagcccccggaggttggagagcctgttgccgagctcgacggggatgcgaccatggatatgatgcgcaaggcggttgatggtcaccgggacctcctcacggaaccaatcgtagctcaggttcagcatctgcaagaacgtgaggttcccgaaggccgagatagcgcgccgcgcaggcgcctccacctcggatccggcgagcagcactggtgtagggtgtgcccgtcggagccaggtggcgaaggtacaggagaagggcgggtgggcctacggaggctggcggcgctcgcctacaccctagcgcccggcggtatcgtggagctccaggcattgaagacaaccaagatggcgatggctcaccctactcatgcctcacggggagcgctaccccaaggagtctgccgctgttggtatcaagggaagtcggtcctcccgcaggcgaggccgtatgggaagggcggggatgacacggtgggcatggcggcggacgcggatgtcgacctccctgagccggtcgtctag

SEQ ID NO: 20310 - DNA, 237 bp, Zea mays
  Peptide Sequence Number=SeqID_62089
atgtcgtcctcatctccatggatacaacgccgctgcttcgggtcgtcctccccatggttgctctcttccggatctagtggcgactacgtccctcgtcaacaacaacgacagctagtaggattggagtgggatggcagcgccaacctcggacggggcaagggctgcgaggggggcagcgaggacgccatcaatgcgcgattgagatcctggacggggagcggagggggaggatgttga

SEQ ID NO: 20311 - DNA, 795 bp, Zea mays
  Peptide Sequence Number=SeqID_62090
atggactccagcttcctccctgccggcgcggacaatggctcggcgggcggcgccaacaatggcggcggcgctgctcagcaggcgccgccgatccgcgagcaggaccggctgatgccgatcgcgaacgtcatccgcatcatgcggcgcgtgctgccggcgcacgccaagatctcggacgacgccaaggagacgatccaggagtgcgtgtcggagtacatcagcttcatcacgggggaggccaacgagcggtgccagcgggagcagcgcaagaccatcaccgccgaggacgtgctgtgggccatgagccgcctcggcttcgacgactacgtcgagccgctcagcgtctacctccaccgctaccgcgagttcgagggcgaggcgcggggcgtcggcctcgccccggcccctccgcgcggcgaccaccaccaccaccaccactccgtgccgccatcgatgctcaacaagtcccgcgggcccggctccggagccgtcatgctaccgcaccaccaccaccacgacatgcacgcctccatgtacgggggcgccgtgcccccgccgccgcaccacggcttcctcatgccacacccacagggcggccactacctgccttacccctacgagcccacgtcgtacggcggcgagcacgccttggccagcgggtactatggaggggccgcgtacgcgccgggcaacaacggcgggagcggcgatggcagcggcgggagcgcgtcgcacgcaccgccgggcggcagcggcggcggcttcgaccacccgcacacgttcgcgtacaagtag

SEQ ID NO: 20312 - DNA, 1641 bp, Zea mays
  Peptide Sequence Number=SeqID_62091
atggcggatgtgtgtagactacactggtctgaacaaggcatgtccgaagggtatcaccaaatcaggatgaaagagtccgaccagctcgcgacttctttcatcacacccttcggcatgtactgctatgtcaccatgccgttcggcttgaggaatgcgggtgcaacgtaccagcggtgcatgaaccatgtgttcggcgagcacattggccgcacggtcgaggcctacgtcgatgacatcgtagtcaagacgaggaaagcctccgacctcctttctgaccttgaagtgacattccgatgtctcaaggcgaaaggtgtcaagctcaatcccgaaaagtgtgtcttcggggtgccccgaggcatgctcttggggttcatcgtctccgagcagggcatcgaagccaacccggagaagatcgcagccatcaccagcatggggcccatccaggacttgaaaggcgtacagagggtcatgggatgtctcgcggctctgagccgcttcatctcacgcctcggcgaaagaggtctacccctgtaccgcctcttaaggaaggccgagcgcttcacttggacccctgaggccgaggaagccctcgggaacctgaaggcgctcctcacgaaggcgcctatcttggtgcccccagctgccggagaagccctcttggtctacgtcgctgcgaccactcaggtggttagcgtcgcgattgtggtcgagaggcaagaagaggggcatgcattgcccgttcagaggccagtctacttcatcagcgaggtactgtccgaaaccaaaatccgctacccacaaattcagaagctgctgtacgcggtgatcctgacacggcggaagttgcgacactacttcgagtctcatccggtgactgtggtgtcatccttccccctgggggagatcatccattgccgagaggcctcgagtaggattacaaagtgggcggtggaaatcatgggcgaaacaatctcattcgcccctcggaaggccatcaaatcccaggtcttggcggacttcgtggctaaatgggtcgacacccagctaccaacagctccgatccaaccggagctctggaccatgttcttcgatgggtcgctgatgaagacaggagccgacgcaggcctactcttcatctcgcccctcgggaagcacctacgcaacgtgctacgcctccacttcccggcgtccaacaatgtagctgagtatgaggctctggtcaacgggttgcggatcgccatcgagctaggggtccgacgcctcgacactcacggtgactcgcagctcgtcatcgaccaagtcatgaagaactcccactgccgcgacccgaagatggaggcctactgcgatgaggttcggcgcctggaagacaagttctacgggctcgagctcaaccacatcgctcggcgctacaacgagactgcggacgagctagccaaaatagcctcggggcgaacaacggttcccccagacgccttctcccgagatctgcatcaaccctccgtcaagatcgacgacacgcccgagcctgaggcaccctcggccagcccgaggtaccctcggcacagtccgaggcaccctcggctcggccgaggcacccttcggttcggcccgaggtaccctcggctccctgaggggtga

SEQ ID NO: 20313 - DNA, 252 bp, Zea mays
  Peptide Sequence Number=SeqID_62092
atgcggttccgcggctgcgcccgcgctctggcgagaaatcaacctcgccctgctgccggattcgcctcaccaagtgcacgaacagcttcaccacgcccctgggaggttccacaacccggcaacgcgaccaggtcggctagggggaaagctttccccgatccgcgggacgcgatcctcacggctctcacggcaaaggtggatatcgctttggttagagctgcctacacgccgatgaagaaaagaggaggatga

SEQ ID NO: 20314 - DNA, 1332 bp, Zea mays
  Peptide Sequence Number=SeqID_62093
atggaggcctggagcagagggggcgcagtcggagcagagggggcgcagtcggagcagagggccgctggagccgaggggacacagccgcgcgctggagaagggacgacgactactgtgcggctactgtggtacaggagatctggttgttttctttacaaacctgagatggaacggacatgctgcccctcatatacgatacgcttgaaggcaaatgatttcatttgttccaaagagcaagctcgggtacttaaaaagatacaaaggttccttgatggcgagctcgatccacagattggaagccctcagtgtaaggcaagtccaacaaagcgctcactgggtgaacctctgaattcaccaacctcgaaagtatcaaaggccacagctacatgcttccgaggtggggtatttggttctgttcaactccccaaagctgttgtgaagaccgttaaacctcaagtcaaaaggaaagttggagaagcagtgcaagaaaagaaagtaggagaagcagtgcaagctttggtttatacgtgtaatataagtttccaaatagtggcagcagttagacgggcattgcctaaagaaaatggtgctactcaaactgaagtaccagcagatctttctccaaattctgttgcagaaaagctatccgtggcaatggaacgtcttggagaactagctggttttgaagtaaaagcttgtaatgggcatctaaatttctatttggcctccaatcaggcaatgcagaaccataccagcgttgttgtacctgtgcaagcttcagacaaatctagtggttcaaagccaagctctgtgaaccaaactaatgcaaaatatcctctgaaaaggaaaaacctggagattaggttgagcacatctcattttgatcctgaggagtttgctctgtaccgaaggtatcagacaaaggtgcataaggagaaggcagttacagaaagctcatacaagagatttctagtagatacaccaatcctgtttgtccccccaaagactggtgataatacagttccaccgtgtgggtttgggtcttttcatcagcagtacaggattgatggaaaacttgtggctgttggtgtagttgatatccttcctaaatgtttgtcaagcaagtacttgttctgggatcctgaccttcctttcttatctcttggaaagtatactgctctgaaggagatagattgggtcaagacgacacaggagcactgtcccagccttcagtactactatctcggttattatatacattcttgcaataagatgagatacaaagctgcatatcgaccatcagaacttctatgtccactccgttatgagtaa

SEQ ID NO: 20315 - DNA, 171 bp, Zea mays
  Peptide Sequence Number=SeqID_62094
atgacaattgatgatgatgaacaaagtaagataagtaagcaagctgatgattatgagaggtccgaagttatttggtggggatcatatggtggtcttgcattcgagctccaaagtttagcaaaaagaattgtgagcctttgttgttcgacatctggctacgagcgcaattga

SEQ ID NO: 20316 - DNA, 615 bp, Zea mays
  Peptide Sequence Number=SeqID_62095
atgtcactacccgagcatgccaccgctgacctggacaccttccggacaatggacatcgtcgtcctagcggcatcccttgctgcggtcggcctggccaccccttgtgcaccgtcccggaccagcgcctccttgtcggactcctggctgccccctaagtgccagccctccctggccagcttcattccccatggcccccatagcgagctcgttgttggcggggcctcctacatcgccggcctcaggcccctccccgacgcacctcctacgaccatcccagcaacaacgctgaggctcctcgtcgcgctttccctcgctgcacccacctggaccgacatcgtcatgtcctccatgacgcccaccaccgactcctcgctggtcgctgctatcgccaccatccaggccgtcgtggctgcctcgcaggagcgccagcacgccacgtccctcgccctggagcatgagcatgccatgggcgtagccctgaccgcccaaatggccaccgcgcagcacctcatccttggccatcctccgatcgatcatgaggttcctccgctcacacgtgaggcccccctcggctctggactcgacgccgaccacatccctgctctccacgcctag

SEQ ID NO: 20317 - DNA, 210 bp, Zea mays
  Peptide Sequence Number=SeqID_62096
atgaaagtcaggaaagggcacaatcctcttgatgggagtcttcaggtggtcgtagcgagggctgaggccacacaaaggttcagcaccaagctcaacggtgatggtgtcgtggagctacgagaggactgtccatcaggaaccatgatggagacgacggggcgacgaggttgtcgaggacgtggtcggcgagagcttaccaccgaagcatga

SEQ ID NO: 20318 - DNA, 384 bp, Zea mays
  Peptide Sequence Number=SeqID_62097
atggtcaggcgtctttggggggggggcaagcccctcaccctccatcaaccgggctgctgcttgccctcctcttgccgtccccgtgacccctcgtctctcccgcaagggcaaccgcgggggtggcggctccacccggggtggtccctccagccgaggtggcagccaggcatggtcgtcattctacaacccctggaccgggaccatctccatgtggccgggccagtccccgagtgcctcccgtcctccggtgccggccctactgatagcacctccctatggcgtgcctgcgccgccctcataaggcgtgccatcgacggcttcggctccaccctagctcctgcccctgaggacccccacctcgattatgtggtccctgctggctag

SEQ ID NO: 20319 - DNA, 474 bp, Zea mays
  Peptide Sequence Number=SeqID_62098
atgagcaaggacaagaagggccaaggtttgccatgtcgctccagcgacaagcggaagcgcgagccgagtcctcccttggaggacttcggtgactctgagtactcggaggagttttcctctaaatccgaggggtcaccgaagtacgcttcccccctggcgtcgtccgacgacttggacgactcccaggggatagctgccgaggtgtggacgtacatccggtccatcgagcgcgccgggctcaagggctcggatgagtcagaagtctcctcaaacgaggggaactcttctgactcgtccgagaaaggaagcagcggcaacggcgacgacgaaggtgacggcagtggcggccacagcaacggaggtggcggtggcgacgacggcaacgacgatggcggcgagggcagcaacggtgacggcgacggtggcggcaagggcagcggcggcaaggtcagtggcaaagcgccactggcttaa

SEQ ID NO: 20320 - DNA, 147 bp, Zea mays
  Peptide Sequence Number=SeqID_62099
atggtagcagatgaggaagaatacaactgtaaagatgagttcgaacccaaggatgctctcactcccaatggtgctactggtggtggagaaaacatagaagctgtatacgaccctgatgagtgcgaagacttagtccaagatcgatga

SEQ ID NO: 20321 - DNA, 267 bp, Zea mays
  Peptide Sequence Number=SeqID_62100
atggcacagcaggcccggcccggtttttggccgggcttcaccgggcccgggccgggccgggccgggcggcccgtttggccatctctagttgttggtgaagcaacggacccatcccatcccctccagtgtccaggccatgtacgtgaccatgtgccggggcggctgcggctgcctggtccctgtctcctccggcctgactcgtttggtcggtcagtggcgtgtcgtatgcttgatgcgtgccatgccaccatgcatatgaatgaatga

SEQ ID NO: 20322 - DNA, 1347 bp, Zea mays
  Peptide Sequence Number=SeqID_62101
atgcggatgggcaagtacgagatggggcggacgctcggggagggccacttcggcaaggtgaggctggcgcggcacgcggacacgggccggcccttcgccatcaagatcctcgaccgccagcgcatcctcgccatgaagatccacgaccagatcaagagggagatcgcgacgctgaagctgctcaagcaccccaacgtcgtccgcctctacgaggtttccgcaagcaagaccaaaatatacatggtgcttgagtacgtcaatggaggagagctgtttgacaagatctatatgcaggcgttgaagggtaagctgacggagaaggaagggaggaaactgttccagcagctcatagatgccgtgggatactgccacgagaagggggtttatcacagggacctcaagccagagaatgtccttgttgatgcaaaaggaaacataaaagtttctgatttcggattaagtgcccttccacagaaccaacaaaaagatggtttgttgcataccacatgtggcagccctaactacatagcccctgaggtccttctgaacaaaggttatgacggctcgatatctgacgtatggtcctgtggtgttattctatatgtaatgcttacagggaatcttccattcgacgaccaaaatgtggttgtcctttaccagaagattctcaaggggaatgctcacattccaaagtggctctcccaaggtgcccaagatatactgagaaaaatcctggatcctaacccggttacacgcatagatgtggatggaataagggcacatgattggttcaagcaaggctatgctccagctatgccatttagcgatgatgaagaagatatcagcatggatgaagacagcctaaacatcaccgagcataatgacatccaagacaagatagcaatcaaccaaatcaatgctttccagctcattggaatgtcctcctgccttgatctatccggattttttgagaaagaggatgtttctgaaaggaaaatcagatttgcatcaaattattccccagcttatttatttgagaagattgagagcattgtcagaaaaatggggttccaggtacataagagcaacggcaagctaaaagtgatccaagactgcaagggactagcaaattcaagagggcaagagtcattattaatttctgctgaggtgtttgagatcaatgaatatctttatgttgtcgaactaaagaagtcatctggagactgctccctgtacagaaagttgtgtgagacgctctcagaggacttgggcacatgcaaaagccagcaatttttaaagcaggactctatcagacaagatataggtagatataatagtagcttttaa

SEQ ID NO: 20323 - DNA, 339 bp, Zea mays
  Peptide Sequence Number=SeqID_62102
atgacatgtgatgaagggtattttttgaactttccattgaaagaaaaaggaattggagaaaataagacttatcctttagctgacttcttaggacttgaaactggcattttggtggctatgatggaattggagctgaagaagctagaggaaactataaaaaatatacatgaagagatgctttatctgcgtgaaagggaagaggaaatgcaggacgtgaacaggcgaacgaactcaaggatggcttggctagggttcctctcccttggcgtctgcttatcagtggcaggtttgcagctgtggcacctgaagaccttctttgaaaggaagaagttgttgtag

SEQ ID NO: 20324 - DNA, 180 bp, Zea mays
  Peptide Sequence Number=SeqID_62103
atgtcggacggcacggccacctgcgtcgacatcatcctcgccatcatcctgccgccgctcggggtcttcttcaagttcggctgcggggctgagttctggatctgcctcatcctcaccttcttcggctacctcccaggcatcatctacgctgtctgggtcatcaccatgttttttttttag

SEQ ID NO: 20325 - DNA, 300 bp, Zea mays
  Peptide Sequence Number=SeqID_62104
gggaaagctgctgcaggcgccagcgccaccaccacgacgacggccagcggcaagcgcctgcgccccctgcgcctggtgcggctgctgctcctgctccccgcgcgccgggtggccgcgctggtcgcggagctcgtgcggcggctggcggcggcggaggccgccgcggactgccccgccatcgtcttctcctctcagtgggggctccccgtgctgtcgcactccgccagctgccggagctccaggctgcgggccctgtacctcgacaggaacctctccgccggcaccggctccccgtgctga

SEQ ID NO: 20326 - DNA, 147 bp, Zea mays
  Peptide Sequence Number=SeqID_62105
atggtagcagatgaggaagaatacagctgtaaagatgagttcgaacccaaggatgctctcactcccaatggtgctactggtggtggagaaaacatagaagctgtaaacgaccctgatgagtgtgaagtcttagtccaagaacgatga

SEQ ID NO: 20327 - DNA, 324 bp, Zea mays
  Peptide Sequence Number=SeqID_62106
atggggagtagctctctccgggcagaaatggaatcacgacttgtgggtggcaacgagattgatggttttggtattgactctggtaatgtccactacaaccagacaggacatgagtatgttgaagtgtactcacccttgctctacacaccaaaccgcccccaggttgtccgcattgcaaccactgctcaggagaagatgaagccgtggaaggagatttccaggagttccaagattacgacgagttctaggcgtgggttagcggcaaacccccagtcggctgcttgtgaaggccgcgtgtatctacgtttcgttttcgcactttga

SEQ ID NO: 20328 - DNA, 387 bp, Zea mays
  Peptide Sequence Number=SeqID_62107
atggcggcgcgaagcctagcggtttgtgggcgcggcccacccggtgaggtcaagaaatccctcccaaaggcacccagcaaatccctcggacacggccccaaggatgaggaggttacagacgcatggtgctgctacgacggctttgtaggattatggggaggctacgctagcgtcgccgacgtcctcgcgtggttcgtcctagtgctccagatgcagcacctccgagagtcacgagatggaaataccctcacctgcgactggactgtgactctgaaatggttctgctctcgtgtaccaagtgataggggttctcccctacttaacctctcgcagagggaagttgaaggagaagggtcgcatgcggcacgccaagagatgggcagctaa

SEQ ID NO: 20329 - DNA, 1215 bp, Zea mays
  Peptide Sequence Number=SeqID_62108
atgacgctcagcaagaagcaaggcgcaggcactgatcagcaggccttgctggatgctcagctgcagctctggcaccacaccatcgcttttgtcaagtccatggcgctcaaggccgccgtagacctccgcatagcggacgccatccacctgcacggcggctcagccaccctctcgcagatagtcaccaaggtcacactccacccgtccaagataccatgcctgcgacgcctcatgcgcgtgctcactctcaccggcgtcttcagcgtcaactccggcgccgttgtcgacgagcccgtttacgggctcacgccggcgtctcgccttctggtcggcccggggctgaaccagaccccgttcctgaccttgatgctcagcactttcttcgtgtcctccttcctcggcctcgacgagtggttccagcacgagacgggtccgtccccgttcgagctggccaatggccgggacatatggaccctgtccggccacgacgcgagcttcggcaagctcttcgacgacgggatggtcgcggacagcggtttcatcatggacgtcgtggtcaaggagtgcggcgacgtgttccgaggggtcggctccctcgtcgacgtcgccggcgggctcggtggtgccacccaaaccatcgcgaaggctttcccggacgtggcgtgcagcgtgctggacctctcacacgtcgtcgccaatgctcccaccgacaccaccgtgaagtacatcgccggcgacatgttcgagagcattccgtcggcaaacgttgtcttcctcaagtggattctgcatgactggggtgatgccgaatgcgtgaagatactgaagaactgcaagaaggctatagcgtctcaagaagaagggaaggtagtgatactggatatggttgttggagcagggtcatccgacgagaagcatgtggagacgcaaatcgtattcgatctctttatgatgtttatcaatggcactgagcgagatgagacggagtggaagaagatcattttcgaagccgggtttagccgttacaagatcatacctgttctcggtgttcggtcgataatcgagccccacagcccccgccaacatcccatccccgagatcaccctcacacgcctcgtctggacgattaacgccgccaccaccccattcctgcatctgcctcgcctagacgaacacccctccatgatctccctcagcgacgatgagagcacctag

SEQ ID NO: 20330 - DNA, 324 bp, Zea mays
  Peptide Sequence Number=SeqID_62109
atggccgccgggatgcatacatgcgttttgtggcgttggcgggtgaagaatgccaccgttcccgacccaattgctcgccggacttggggaggggccggtgttccgcgctacaccgtgggcaggctcctccgcgatctcttgcagctcttcggaatcgaggtttgggcgtcgggcgcactggccaccggcgtcgccgccgtgcggactgtttggcgccgccgtattcacgggcgcggagtgcgccgtagggacgatggtggtgcaccgttggatggtgatcgtgcggcccagtttagatcgacgcgtaacccttcgcgtgattga

SEQ ID NO: 20331 - DNA, 735 bp, Zea mays
  Peptide Sequence Number=SeqID_62110
atgcggcacctttggcaggcgaagcaggcgatgcttcacctccgccataatgaccgcgtcaaaaaaaggaaaggggatattccgaaagggatccttctccgtgaaggaagcgggccccgagcccccctactgatcagaggttcaaaggctggcccctcggaagggttcaacagccgcctcagagcactcgggcattgcgcccactactggcttgcccccgaagggttcgacagccgcctcagacgcagagtgagggatgaccctgggtacgttcgatacataaccaaggctcgggctacgctcccgaggaagctccgcctcgcccgaccccagggctcggcccccatctcggcctcggacgacaaactccgcctcgcccgacccagggctcggactcggcctcggctccggaagatggcgaactccgcctcgcccgacctagggctcggactcggcctcagctccggaagacgacgaactccgcctcgcccgaccccagggctcggactcagcctcggctccggaagacgacgaactccgcctcgcccgaccccagggctcggactcagcccttggcctcagacgatggtctctgcctcgcccgacccggggctcggactcgacctcgacctcggaagacagactcgacctcgacctcggaggagccaccgcctcgcccgacccagggctcggaccgaccacgtcacattggggccatcattaccctacccctag

SEQ ID NO: 20332 - DNA, 699 bp, Zea mays
  Peptide Sequence Number=SeqID_62111
atggcggacgatgtccggtcctatggaacgggagaacgcggcgctgagcgggcgcggcacgggattgagccgcccggcgcagagtttgagcgatcagctgcgccggttgtcgagcggctgaatgccggcgagctgcccactcggcgggaggtttcgagtgtcctattaatgccaccacctcctggtggccgaagaatattcagccccgtgtacatgaggtggcacgtcatgattataatatgttaccggtggagcaccgtagtgttgcgatgggtgcgggaactatgcatattgtatagctcctggttctgtgtacacatacccagacggtccggcgtaaggggtcagacagtctgcgactgggccgaacgtttccctcgttgttccatgaaagcatcaaaagatggatctggggtacttactacgggatctgcagtgctctttgcggaggcgtggatggtccgcaacagagggttggacggcttaggaactggctggtgttcagttcagaggaagcagaccagattccctgcgacagtaataaattttcattataaaccagaaacaacacgggcgaacccaagggttcatgactcatgggccgaagtcagggtgcatatggctttgctgcagctttgtttgtttggtcagtcaggactcaggataaaggcccatgctgtggacgaacagggttcatga

SEQ ID NO: 20333 - DNA, 1071 bp, Zea mays
  Peptide Sequence Number=SeqID_62112
atggggcacgaccatatgtctcgtataaagatgcatatggcagaaggttcttttggtgacaggaaccggtgccagcaacctgggtgcaatgaggttgtcgatggaagggtagtgtactgcaaaactcacagcggagagttgtcatgccaacagttcagtcacctccagagcggactggagagctcaggtttatcgcagtaccatgcactgagcaagagttacatgtcaagcacgaaggggatgatcgaggcatgttttgcaagaacgatagctgcagcaagcaagcacatgagaactcaatctactgtaagttgcatagcggtgttagcaagggctgcatggtccgaggctgtacaaagaggtgcacatggaggcacacctctgtgcattgggcatggaggcgggaaacggtgtgtgatccctggatgcccaaatgccgcgtgtggtcaaggcctcagtgaccgctgtgtgaggcatggtggtggcaggagatgtagattcgaagggtgtgcgaagggcgcacaggggaacaccgattactgcataaggcacggtgggggaaggcggtgcaagtttgaaggttgcacgaagagtgcgcagggacggacagatttctgcattaagcatggtggtggcagccggtgcaagttccaaggatgcggcacgagcgcaaaatggggaacagatttctgctctatccacaggaaggctttgttgggaggcgacaatgccgccgtccctgaagctttgcctgccgcttcagaaaaacgacgtcgtgccaagaagcccaagaaggcggcgaaactgtctgaggcctcccaagagaatgccacagcagcagcagctattgctggtaacagcactcaacatatgggcggtcttctcatagctatccctgttgctaaccgtgacatgttaaccaaagccgtggcagcgacggggcaagctgcaatagcctccgcacagatagtggcgccgctgtccatgaaatcgccgacgccatctggagcagcggcggctaccttgactgggagggaggcgggagcaagcagggagatgctgggtctgtag

SEQ ID NO: 20334 - DNA, 2269 bp, Zea mays
  Peptide Sequence Number=SeqID_62113
ggaaactctggtgctaataatattggtaatcatgacacttgctctagccaggagcagccgtcacaaacttatgtgtacaaagaggcatcagaagcaaacgattctgagattcagatggaagatgttggaaagttgtccgttgatcagacatctagtttggtgcttcttgactatgaagacgagggttccagacaatatttggtggaaaaaggacagactgagtatagagatatgaacagtaacgaagagcacacccccactggcattcagcctaacgagtactctgatgttgagcatcaccagcaaaaggggcagacagagaccaccagccaagagattgaaatggaggactatcctattcagcaggagaaccctttattcctgcaactccgtgcgagcctcttccccagcaactggagcagcactttcagggggcgacattccctgttccgtccgcgacgccgagccccggtgaaggccgagccctctgcatgtagccatggcggcaataatgaagcggtaggtatatttggggagcctggtttttctgtgaaagtgaagctcccagacctgtcacctacctctgtgaggaggttccttgagactagtagtgcattatactatgatggtatgaatggcggtatgcatgtgccgcacagtgaagaggaaatctgcggcatcgccattcttgaaggcgcggcagggccggggcaagcaacggcaacctcgcgcgctcatgtcgtctcctccctccggatgccaatgtctagccatgcccacgccggccaccgccgtcttttcctcctgacgagcacgagcacgagtcttgctttcgtcgccgccgtcctcctcctgatcgtcgacgcgtgcgcggcgtcgcggcagttctccacggtcgccatctcccacgcgcccaacgccacgctcgtctgcgcgctcgtcaccagcgccgatgacgcgggagcggggccaccaggctcttccaagctgcgctgcacctcgctccccgacggccagcagttcgtctacccctccgctgacatcccctacaacgccatcgccgccgggaccgacttcctgtgcggcctcatggcgccgctcggcggccacgccgccatgcgctggtggtccttctccgaggagttcgcggccaaccgctcccgccccgtcggccgccgcctctactggggcccctcgcttcgctcgctcagcgccggcggctcccacgcctgcggcctctccgacgaccacggccccagctgctgggagtggccgcgcctcgccctcccgaaaggcctcgacttctcccgcatcgcgctgggccacgacttcctctgcggcatcgacaagctcgataacaccagcatgagctgcttcggcgccatgaccgcgccgtcgctggctcccgcccccgcggccttcgcgaccatcgccgccggccaccgccacgcctgcgccgtcgacgcagagggtggattcggctgctggggcgacgacgacggcgacgtccccaacgtgccggcacacgagctgccggccgacatgctggccatggcactcggcaacggctccacctgcatcctctccggcatcggcagggtccagtgctggggcgccgtccaggtgccggaccagtaccggaacgcggacttcctggccatcgaggccgacgggggcgcggtgtgcggcatcctcaggagcaactactccgtcgcgtgctgggggaggaccgacagattcggcaccggcggtagcctggtctacaacagcaccatgcccggcgcctgcacgcacaagaagagctgcccctgcgacatcatctccggctccggcgcgctctgtggcagcggcggctccgagggcggcgaggagctcgccgtctgccaagcctgcgcggtgcggctgaacgcttctaggctcctcatcaccaacgcgtgggcggcgcccggcgccgcggtgctcgcggcggctgcggtggcgctgtacctcgtgtcgtacaggaagcgggacaacaagaagacgctgacgctgcgtctcggggagtcgtcgtcccggcggctgtgccgcgatgtggaggccacggccatgccggcgccgccggtcccgccgctcggatgcgaggagttcacgcttcgtgacctgtcgcgcgtcaccgacggcttctcggaggagaagaagatcgggagcggcagcttcgggtcggtgtaccgcgccaggctccccgacgggcgcgaggtggcgatcaagcgcgcggagcgcagcggcagcg

SEQ ID NO: 20335 - DNA, 240 bp, Zea mays
  Peptide Sequence Number=SeqID_62114
atgccggtgtccgatttccgaccagaaggtgttgctgaacgccgccgcgcgcagacaggaaaccttaaccttaatgggccggcagcccaacagtggatatgggtcgaagtggatatggttcatgacccatgggtcgaagtgcagatggctttgctgcagctttgtttgtttggtcagccagccaggataaggcccaagctggcgaacagggagagagcagagaacacatgtgcttcttga

SEQ ID NO: 20336 - DNA, 588 bp, Zea mays
  Peptide Sequence Number=SeqID_62115
atggctggatccatcgttgttgtggctttcccgaccggatccgtcgggcgtggccaccctgaccgacgcagacgtgttgttggatctagatgctggccattgatatcacggtacagagcatctgtgcgcacccagtctccaaaggtagagatgattgattctctatttaagccactggatgatgggaaggatgatggcataatgagggaacttctactagacttctaccaaaccagtcaacaaagaaagcctaagcagataatcatcttcagggatggtgttagcgagtctcagtttagccaagtactgaacgtagaacttaatcaaattataaaggcatatcagagtatgggacagggggaccttccgaagttcacagtgatcattgctcaaaagaatcaccacacaaaactcttccaagctgattcaccagagaacgttccacctgggactgttgtggactccggcatagttcatccaagacagtatgatttctacatgtgtgctcatgccggaccaattattgacgacccccgcgtcctggttgcccccgcgtcgggcgactcggacgctccccataatccctag

SEQ ID NO: 20337 - DNA, 654 bp, Zea mays
  Peptide Sequence Number=SeqID_62116
atgcagggacttgccatggcagggtcgatccacggcggatctgagccgcgagaaaggagggggagcgaggtagccggcggggcagggaagagtgccagtggggaggggatgtcatgtcgtggccggggaagcgcgccagcgccgaggaggaccagggccggccgcggcgaccagatgtggcgggtcgacgctgccagagagaggaggccggtggctttggttgccggcggccgggggggatccaggcgtcatggcggcccctgtccgaccgtgccctaccagggccacgcctgtgccggagctgaggctgcgcttggctggccgagcccacgctggaggtcgcgccgccaggggcgcatcatggaacccgcgttagaggtcgcatggcgcacacggctcacaagaggtggggaaggagaggagcagcatgacacgacggccacatggatccgactagggcgcagggcgcgagggtctgcggcccaagagagggaggtggctgggtgtcacgccagccagcctccactaccaccgccggcggcgcaggggcgaacagtcacagccgtgcccgcgccgcgagctagggagcagtggagagggttgtcgagctgcaccgttgaggctgagacgaagggcgactcgccaggaagctag

SEQ ID NO: 20338 - DNA, 177 bp, Zea mays
  Peptide Sequence Number=SeqID_62117
atggggtcgtcgcaaccaccacacgcgtcgggaacccaaacgcacttcccccggcacaccgagctcgtactgtctctcacctcatcggccgcggcacacaacgatgcccacccggccactttctcggtcgacgccgatctatggttggcgctggcagaggatgatgggaaggtatga

SEQ ID NO: 20339 - DNA, 165 bp, Zea mays
  Peptide Sequence Number=SeqID_62118
atggagaactcggacatcaccaagagcaacatgctcgcggacaaagtgaaggtcaatctcaatgtgcttggtagagaccggaactggtgtgttgaacatgcattccaaggaagtgatgtaattgcccaaggtccttcaaagagaattcctggtgaagagcactaa

SEQ ID NO: 20340 - DNA, 558 bp, Zea mays
  Peptide Sequence Number=SeqID_62119
atggaaggggagatgcggagcccaaatgggggcgtggcggatggaaggggagatatgagcggcgagggcccgactatgcctcgcccgcggaggatgccacgtgaggtgtggtggcgacggagggagagtgtcgaccagatcgagaacggaaccctttcgcgttggaggccaagatctaggatggcagcttcggcacctataccgggggaagcgatgaaggggatcgttgcggggcggcgatggaggagcaccaatggaaggggagatgtggagcccaaatgggggcgtggtggatggaaggggagatatgagcggcgagggcccgactgtgcctcgcccgcggaggatgccacgcgagcggcgcacgaggagcagaggggaacccagagaggtggaggcgccgtcgggtgtgtggaagaggatctgccgtcgccgtcatcgtcgaggatgaagcctgctacggcgagcgtgggcgaggaacagcgcatcgagcggcaccgcactacacccaaccccatccctatcaccattggctgcgttgggaggagtgggagatga

SEQ ID NO: 20341 - DNA, 549 bp, Zea mays
  Peptide Sequence Number=SeqID_62120
atggaaataaagaagggaatgtacttccaacacaatgaaaataaaatgatgagaaatttgaaaagtacagaacctaattcaatactggtgaccgagttttgttccgaggttgagcacatcgtcgtcgtcgtcgaggatgaagcctgctacggcgaggtccccaatgctttagcatctcaccttggcaacggcatgcagaagtctgatgtggcggtggcagtagcgcaagggagtgacgccgagcagtgtcgaggcggtggtgggcgcaacagcgggcttggagtccgcggagcgccaaccagcatccaggcgacgacgggcacaatagcgaacttgaggtcgcggcgcgccgagcagcgtggaggcggaggcgacgcggccacagtgatgggcagcttcgtggtgctctgctccctcgtgtgctgcctcgtcttcggcttcggcagcaacatgcgacggaccgtcatcgttcaaggaccccctggggagttcaccttcgcgcaactcgaggcggccaccaaggggttcgcactggaggccaagatctag

SEQ ID NO: 20342 - DNA, 174 bp, Zea mays
  Peptide Sequence Number=SeqID_62121
atggagctgctcctctcatctctccttcctccccatgcgcgcgaacagcccctctgctcggctccctgctcccacggccgcttcacccgtcggcagtgggcctcagcactccaatcctcggttgccggtcagtatgccccgatgaactacgccgccgtggagctctgctcttga

SEQ ID NO: 20343 - DNA, 147 bp, Zea mays
  Peptide Sequence Number=SeqID_62122
atggctcgatcacagaccatcaacgacatgttctgtcagtgtgatctcttcctggtggaggacactcgcatccatgatgtgttccacgtcggcctcctaaaaccttccacggtgatccttcggtggggcctccacctctgccgctaa

SEQ ID NO: 20344 - DNA, 135 bp, Zea mays
  Peptide Sequence Number=SeqID_62123
atgacgatttgtggagttggaggaagtgatcctattctagccaaaggagttacatccatggagcttaccatcaagaacaagactttgttcgtgtccttctttgtcatggaggtgaaaggacatcatatttcttaa

SEQ ID NO: 20345 - DNA, 1398 bp, Zea mays
  Peptide Sequence Number=SeqID_62124
atggagggccgcctcttcgataagcccttgaacccgaataagctcctcaaggagcaattcgtgagcaacctgacggggtcttccctgctggagatcgcggcgctctccactgtcgttccgataattctaggaaggagtcagcaaaagaaaaatgatgatcaagttcatactgttcgtaaagattggatgcagtacttctctacactaggtgtagattatctcactgttgtattgccaattattttggttttcacagtcttatcggaatgggtttttatgtgtgctatttctcttgtaatcctgatatccatttacatcatgtttaaaaggtctcagtttcatcttaaagatggattcagtcagctgcctttgctcagggcagacatatcttcttaccgtgtctcagtggttctggtgacatgtttgtgcatattagctgtggacttcaaaatatttccaagacgctatgctaaggctgaaacatatggtagtggcatcatggatcttggagtaggatcttttgtagtggctaatgcactggtatctagacaagcacgaaatatagcctcaatgagtttcaaggcagttctttgttcgataagtccactcttatctcttggctttgctcgcattatatccacatggggtgttgattatcaggtccatgtaggagaatatggtgtgcattggaacttctttttcaccctcgcagctgtctctatccttacatccgttgtcagaattcatccaaaacattgtggcttagttggtctgcttatccttgctggataccagatttggctgtcttctggattgaatgagtacctcatttctcacaaaagaagtgctgatataatcacccagaataaggagggcatttatagcatccttggatactggggtatgtttctaattggtgtttctttgggtttctatctgttcgttgacactagttcaaagggcaagaaccggaacactcaagtcatgcaaatctgggttcttgctgcttctttttggattttggcaatcatctttgatagctacattgagagagtttctcgtcgaatgtgcaacttcgcttatgttatgcttgtttttggccagaattttcagttgtttggtctattatttttgttcacgcttcaggttttatctatcctcacattagctgggtttgcctcatataaaaagaacttggttcttgaagatgcattcaatgaaaatatgcttggctccttccttctggcaaatatccttactggtctggttaatctctcagttaacacgctctctgcctcttccttcactgccttcatgattctgtcagtatacgcctttactttatgcatggttactggccttacccatttttgtggtgttaggatgaaattctggtga

SEQ ID NO: 20346 - DNA, 180 bp, Zea mays
  Peptide Sequence Number=SeqID_62125
atgggggctggggcaagcgggcatggtgggcctgaggtagtggcccggtgtgagctccggtgctccggcggccagaggaggcgatatgcactcagatcgaacgacgactttggctctaatatttataatatattttcgacccagttgagttcggacgaagatcacatgatatccgaatag

SEQ ID NO: 20347 - DNA, 1668 bp, Zea mays
  Peptide Sequence Number=SeqID_62126
atggctttgcagtgccttgtagactggaagggacagccagttaacccaaaaaggcatggtggggtcaaagccaccatgttcatctacttcctggttgtgatgacaaacattggaaacatcccgatgctgttgaacgtggtgagctacttgcatgggaagatgcacatggacatcgccgacgcctccaccaccgccaccaacttcttcggcgcagtctgtgtcttcaccttcctcggcgccttcgtctccgactcctacatcacgcgcttctacactatcctcatattcgccccgatcgagattttgggttacatgctgcttgcatgccaagcccacctgccgtcgctgcacccggcaccgtgcgacgtgaccaacagcagccccagcgagtgcaccacggtgagcggccggaacctgagcctgctgaccctgggcctgtacctgatcccggtcggcgagggcgccgtgcgggtgtgcgcggcggcgctgggcggcgaccagttcgaccgcgaggacccgcgggagctccgcggcgcggccagcttcttcaactggtacaccttctgcatctcgctgggcggattcgcggggctgctcttcgtcgtgtgggtgcaggacaacgaaggctgggacctcgccttcgcgctctccgccctcgtcgcgctcctcggcactctcgtcctcgtcgccggcatgccattctaccggcaccagaagcccacagggagccctctcacaagaattcttcaggtttttgtggcagctttcaggaagaggaatctttcagtgcctgaggattttgttgggacgcacgagatgaccaccggggaaacaggcaccatcgttgaagtgctggagaggacttcaggtttcaagttcctcgacaaggcggccgtgaacgacggcgacgcgcggcggtggtcgctgtgcacggtgacgcaggtggaggaggccaagatcatcctccggatgcttcccgtcttcgtgagctccgtcctgggctacctcccgatcccgctgctcctgacgttcacggtgcagcagggcgggaccatggacacccggctcggcgccaccaacgtgccgccggcgagcctcttcgtcgtccccatcgtgttccagatgctcatcctggtggtctacgaccgcgccgtcgtgccgtggctgcgccgcgccacagggtacgcgggcggcgtcacgcacctgcagcggatcggcgtcgggttcgcgtccaacgtcgtggcgctcgccgtggctgccgcagtcgagggccgccgcagggccgagggcggcgccgccgccgccgagatgtccgtgttctggctcacgccgcagttcttcctgctgggcgtgatggacgtcacctccttcgtcggcctgctcgagttcttctacagcgaggcctccgccggcatgaagtccatcgggggcgccgtctgcttctgcatcctcggcatcgcgtcgtggctcgggagcttcctcatccgggtggtcaaccgcgccaccgcgcaccacggcaccagcaggggcacagggtggctggaaggcgccaatctcagcgccggccgcctcgatttgttctactggcttcttgcgatctttgaactcgtcgccgtgcttctctacctgctgtgtgcgtggagatacacctataggacgaatctctag

SEQ ID NO: 20348 - DNA, 408 bp, Zea mays
  Peptide Sequence Number=SeqID_62127
atggagcggcttactggcgttggtagggttctggcgaagggtgaaggaagtccgacgaggtgttctggcttctctggcgaggcaattaccagcgctcagtcgtcggtggaagggtatgggcatgtgggagggcaaggccaagggatggggcttcttataggcgaggattcgagcacgggcgcagggtggagcgcacggccgagccgacagggctcatggcgtgcgcggcgcagtcaaagcgcgctcagctcgggtaaaacacgtggaggattgcttctgcccgtgttcaagcgcttgtttagctgccctagtgtgcctatctcagcaaggatctcatgtaggatctcttccgtgcgccaagatcttgcttttccatgtgagtcccgagccgtgatacactatgggtga

SEQ ID NO: 20349 - DNA, 432 bp, Zea mays
  Peptide Sequence Number=SeqID_62128
atggctaccaacaaaggcggcaagggaaagcatggccaaggtgagggaaagcaaaagcgccctccgactcctccgtcggaggacttcgctgtctcggagttcttggacgagcacttctctcagggcgacgactctccactgccaactcccctctcgctgtcgtccgattactcgaacgctcgatggggttgtcggtggcggagagggcctacatctgatccgtcgagcgatcagggggaagacatctacgagggcggcgatgggagcggctacgagggtggcgatgagggcggcaacatcggcaatggaggcagcgcgggcggtggtggtgcggacgacggcggtgatagtggttacgacgacgacgatgagagcggcggcgacagcgacaatgtcggtggcagggcaccaccagctttaatattagtatag

SEQ ID NO: 20350 - DNA, 519 bp, Zea mays
  Peptide Sequence Number=SeqID_62129
atggctgccaataaaggcagcaagggcaagcacggccaaggggagggaaagcgaaagcgccctccgactcctccgtcggaggacttcggtgactcggagttcttggatgagcacttctctcagggcgacgactctccattgccaactcccctctcgctgtcatccgattactcgaacgctcgatggagttgtcggtggcggagagggcctacatctgatccatcgagcgagcagagggaagactcctcggaggacttcaagggggtggactctgaggaggactccaaggaggactccaaggaggaggacatcagtggcggcgatgggagcagctacgagggcggcgatgtgagcggctacgagggcggcaatgagggcggcaacatcggcaatggaggcagcgctggcggtggcggtgctgacgacggcggtgatagtggttacgacaacgacgatgagagcggcggcgacagcgacaatgtcggtggcagggcaccaccagcattaatattagtatag

SEQ ID NO: 20351 - DNA, 231 bp, Zea mays
  Peptide Sequence Number=SeqID_62130
atggccatgatgggttcaacatcggaaaagatgtacctctgtccggtaccaaactttgggattgtaaatgataaagacgagaccggctttgcctcgggcataccaataccagaaaggccaacaggcaatgagagtggagagatggagagagtagcgtgtagcctctatggcaagaggctggacggtggtgtatctgtgctctcggttggcatgaacccggtctggtcttga

SEQ ID NO: 20352 - DNA, 357 bp, Zea mays
  Peptide Sequence Number=SeqID_62131
atggcgcgggcgtgctgggggcccaaggccccaagaagggggtcagggtggttgggggactgtgtcgagcacgagcgtggacacggcatcaacacagaggcgtcagagggtagcagtgcacggcggggtggctcggcggcggcgcgaactcactccagtgagcaatcgcgcgcaactgagagcgagaaagagaaaaatagagggtggggtggttggttacctcgagggaaggctccgagaccttggacggcggcagaggcacgacgagggctcgggtcgaatacggcggcgctgtggctgcgcggaggaggaacgatgtgcccaggcagagagaaccggagggggagagaggaatga

SEQ ID NO: 20353 - DNA, 684 bp, Zea mays
  Peptide Sequence Number=SeqID_62132
atggtgaggtcgccggagttgaggcaggcacgggctagggtggctccggggtcgccagagttgggaagagaggaagaggacgccacgacaaacgcaatggcagggaagaggccacgaatccacgggcagagaggggataacggcgggcggagctcggggaggcttggagcggtctctggtgagctggatggccgggaacacgacagcgggtctccggcggtggctggcgacgtgtgcagagcgcgagagagggtgaagctgcgcaaaatgaggcgagagatggtgcacactctccagactacccgtgtgaacaccacccgtgtccctccacctcagcaggatccttcgtacccggttgtgacggaagaagtccctgtggagttgcactaccttactgtaaggaatggtgtgatcttggaggacagttctgaagagattctagcgacacctactccatacccagcacctcatgcatttcctgctgaagcttcttcttcagcactacctatgctagtaactcaagcctctacttttggaggtgatgatcctgatgattctggtgatgatggaggtgacgatgatgatgaagaggataacaacgacaacaatggtgatgccaacaacgaacatgatcaagatgatgattttgttggaatgtggctattgtggagcactacactttga

SEQ ID NO: 20354 - DNA, 1449 bp, Zea mays
  Peptide Sequence Number=SeqID_62133
cccttcagggtagaggaggccttgctagatccggactgggtgttggccatgcaggaggagctcaacaacttcaagaggaatgaagtttggacactggtgcctcgtccgaagcaaaatgttgtgggaaccaagtgggtgttccgcaacaaacaggacgagcacggcgtggtgacgagaaacaaggctcgacttgtggcaaaaggttatgcccaagtcgcaggtttggatttcgaggagacttttgctcctgtggctaggctagaatcaattcgtatcttgctagcatatgccgctcatcattctttcaggttgtaccaaatggatgtgaagagcgctttcctcaacgggccaatcaaggaggaggtgtacgtggagcaaccccctggcttcgaggatgaacggtaccccgaccatgtgtgtaagctctctaaggcgctctatggacttaagcaagccccaagagcatggtatgaatgccttagagactttctaattgttaatgctttcaaggttgggaaagccgatccaactctttttacaaagacatgtgatggtgatttatttgtgtgccaaatttatgtcgatgacatagtatttggttctactaataaaaagtcttgtgaagagtttagcagggtgatgacgcagaaattcgagatgtcaatgatgggcgagttgaactacttccttgggttccaagtgaagcaactcaaggacggcaccttcatctcccaaacgaagtacacacaagatctgctaaagcagtttggaatgaaggatgccaagcccgcaaagactccgatgggaaccgacggacacaccgacctcaacaaaggagattccgattatgctggatgtaaggtcgataggaagagtacatcagggacgtgccaattcttaggaaggtccctggtgtcgtggaaatctaagaaacaaacctccgttgccctatccaccgctgaggccgagtatgttgccgcaggacagtgttgcgcgcaactactttggatgaggcaaaccctcagggactttggctacaatctgagcaaagtcccactcctatgtgataatgagagtgctattcgcatggcggaaaatcctgttgaacacagccgcacaaagcacattgacatccggcatcactttttgagagaccaccagcaaaagggagatatcgaagtgtttcatgttagcaccgagaaccagctagccgatatctttaccaagcctctagacgagaagaccttttgcaggctgcgtagagaattgaaagggaaaaaggtggacttggaccatgaaagacttccactgcactccgatgagaggccaaaaggctgtttcggtctggggcaccggactgtccggtggtgcaccggacagtgtccggtgcgccaggctgcctcgggcgaagaagccgctctcgggaatttgccaacggcgtacggctaa

SEQ ID NO: 20355 - DNA, 471 bp, Zea mays
  Peptide Sequence Number=SeqID_62134
ccgccgccgcctttggctctcttctccctctcccctctcttccccacgctggccgccgccagccaagcgcccccgcccgaccccacgcccaggccgaagccccgcgccaggacgccagccgaccgaccagccccacgcccaacacccgacggcacccaagccgagcagcctctctctgcctcctccctacccgagctcgctccctactctctctcactctcctcaccgtttgagccaccgccgccgtcgccggagttcgccacgccgttgccagagcccatggagctcgccggagctacaccacccaccgtaccaagccttcgcctagacacacgcccaagtactgtctgccgttcgtcgcgagtggactatgagttagacgagcctaacacgttcgaggatgaccagcaggacacgttcgagcaaggcaagtggattctccctctgcatattctatttgtacccaattaa

SEQ ID NO: 20356 - DNA, 1557 bp, Zea mays
  Peptide Sequence Number=SeqID_62135
atggaggatttggggctgtggaaccaggcgtggatgtgggtgctgtcccagaagcacatcctggcgtgggcgcacacggcggcgtgcggcagcagggagcgcctcgccttcttggtcgatcgccactggccggccgtgtcccggggctgcgccacctcctcgcgcctcacgctcgccgcactgcggcaatggcgtgggtgtatggcgcgcggggtgctggcggtggcgagcctcggccctgccgccgtcttcgtcatcctctggagcttcttcgtgtgcatgacctcgccggcgtgcgccctctacgcgcttcttagcctgggtgctgctgctgcagttgttcactatatgggctatacacctggccttctcattgttgggctgtttggcatattgattatgtggatgtatggctacttctggattacaggaatgcttctagttgctggaggttgtatgtgctctttgaaacatgctcgatatgtgacacctgttttgacgtcatatgctatttattgtgtggctgttcgtgttgggtggctcggagtcttcttgacattcaacctttctttcttgacaaatgatcttcttaataagttggcgcaaggatacgaaggaagcactgaagaaagccagtttgaagacatgaaggattctgatccagttatggatgagttctatcgtagttgtgaattcccatcggttcctgacagtgaacctgagaccgtgtcttctgcgaaaccatactgctcagcgcccatccaagatgtgttacatgtacaaaaagaagaacctcctagtaaaatagtgaaatctgattctagttcatcggatgagattaagaggataatggatggttcaaaccattatgaagttttgggtgtgcctcgtaatagaagcattgaccaaaaggccctgaaaaaagaatatcacagaatggtcctctctgatttcacaaagaaaaacagctatgatcagcaactgaggaaagaagaatcacagaaaatgaccccaagatcacgtgctgtctcgcaacagagtggtgtagagtttctctcagaagagtccagacgcatacagtgcactaagtgtggtaatttccatatatggatatgcacgaagagaagcaaaacaaaagcaagattctgtcagggctgcgatcagtttcatcaagccaaggatggagatggatgggttgaaaccagattttcatcctccatcaagatggaaataccacgagcctttgtttgtgccgagagcaaaatatttgatgtgtctgagtgggctacctgccagggaatggagtgtaagcctaacactcacggtccaacttttatggtaaacatggtcggcgcagataggatgcctcagagatcctacagttcccggtatcccttcagcttggacgcagagatgatccccgacgatgaattcgagatgtggcttcagcaggcactggcgtcaggcgtcttcgctgacagcccgaagcgcaggaaaagctggagcccgttcaaactgcctcaaaagggaattaaaagttggcgaaggtcgtcatga

SEQ ID NO: 20357 - DNA, 180 bp, Zea mays
  Peptide Sequence Number=SeqID_62136
atgccgacccacgaacgtcttccccgggccccggcgacgcttctcgaccgcaaaccagagacggggcgcaagtgcagcagcgtctccaccgtcggcggaaaatctgcggcggcacagacggcgacgctttccttcggtggcactgcgtggggcgaacgaggatacagcacaaggtattaa

SEQ ID NO: 20358 - DNA, 197 bp, Zea mays
  Peptide Sequence Number=SeqID_62137
atgtccacggcgtcgttcccaggtgtcaacacggtgttctcagagctatggtgtggtagcattcaattggtcgataacgggtgcctttccatgactggcactactactgggggggtaataatggagcatccaggccccaacaggataacccagaagatcatcgacgtcattcccagggccatgacttctggaaatgg

SEQ ID NO: 20359 - DNA, 402 bp, Zea mays
  Peptide Sequence Number=SeqID_62138
atgggcttaggaaggactctatcaagggagtctggctacaaatacaaggaggaatcctcctcctccatcaagtcacataggaagggtgacaagaagaaaaaaatgaagaaggtggtctactacgagaccgactcttcatcaccttccacatccggcgtcgagtctacaacttcaaagcgccacgagcgcaagccaccatattttgatggtgaggattattgtatgtggagtgttaaaatgaggcaccatctaacctcactccatgaaagcatatgggatattgttgagtttggagcgcaggcaccacaagtaggcaacgaggactacgactcggacgaggccgcccaaattaggcattttaactcccaaggaacttctatactcctcgcctccttgtgttga

SEQ ID NO: 20360 - DNA, 210 bp, Zea mays
  Peptide Sequence Number=SeqID_62139
atgagcttgcactcctccggatgtgttcatctacaacggagggggcgtaagagatccgggacggcgacggcggcgaaccagcttgggtggcgaacgacgcaggagctcaaggataaggatcagtggggagattccaccgtgggcacgacactagccactccacttcggtcaccaccattgccacgcagcatgatgggctcatgctcctag

SEQ ID NO: 20361 - DNA, 1479 bp, Zea mays
  Peptide Sequence Number=SeqID_62140
atggtgcatgtaggggagatgctggcctcggccgtcattaaggaagttgttcgcaggctgcctgcgctgctccaggctcccgtcaaaggtccggcaaagatgatccggagcttcagggaggacctcgacgagatgaaaatgacgctcgagtccatcaaggcaaccatggcggaagcagagcagcggtctatcaacgacgagaccgcgcggctgtggctcaaacggctcaagagggcagcctatgatatctctgatatgtttgatgagttcgaacacggcagcccaccgggcaagaagctgcagggccctagttggttcgagataatgtttagccgtgacatggctaagaaaatgaagaaaatgaataaaaggctgaaagaaatagcagagcaatggaaaaattacggcgggattggccgtgtatcatgtgagcccaaaaatgatgctgctgaggaacaagaaacaacttcaagttcatcatcagccgtggttgttggtcgtagagctgagaaacaagcagtcattaatatactgcttagctccaataacacataccctcaagaaactattagtcactgtactgttatccatggacttggtggtgttggtaagagcgaactggcaacatcagtgttcaatgacgaaagaatcaaggaggcctttcctcaacgggcatgggtttggttgggccaaaatttccgcgaaaaggatattggaagagctataatctctatagttgaatgtggatcttgtaatctcgagattcttgaatctatataccaacatctcagaaaggtgctcctgggtagatgtctcattgtattggacaatctctgggattcagttcacttagccaaactgcagggtgaactaggaagcaatgtttcgatcttagttacttcacgcagagaaattcaattgaatatgcccagatcgacattattccgcttggatccattgtcagaaagatttagccttgatttagttaaggaagttgcatcctcatattttcctgcaggtgatattccagaaactgcaatggaagaaattgtaaagatgtgcggaggtgtacctttggcccttaaatctgttgcgtcacaactgagaccagaaagaagcgttaaagagctgttgagtttaataagagctatctctccgcccaaatcagattatggaacaacggatatccaggaccgtgttcttgcatcccttaagctgacatatcacttaatgtccccgagtctcaagttatgctttgcttactgtgcaattttcgctaaaggcgatgaaattgatcgggaaggcttatgccaccaatggatcgctcttggactaactgaaaagatgtatgcagaggacagagtccgtgacttattgaccatgtcatttcttcgggatccagagccacctgcggctattcgtttcgttacggagaagtctttgatgaagaatgactcttttaacatttcagttacatga

SEQ ID NO: 20362 - DNA, 330 bp, Zea mays
  Peptide Sequence Number=SeqID_62141
atggcgggaatggcgctaacgccgattgagatggctcggacaggcggggaggcatttgcggagttgggatacgtgaaacacattgtggatgtcggacatggattccgaggcactcgcgctataattcaccggactgtccggtgtacaccggacagtgtccggtgctccaaggaagagcggcctccggaactcgccagcctcgggaaaacgcagcggctgctccgctataattcaccggacatgtccggcgtcaggcacgcccatgctggcacactggacagtgaacagttcatgtccggtgcgccaccggacatcaaggcgggcccagaa

SEQ ID NO: 20363 - DNA, 1578 bp, Zea mays
  Peptide Sequence Number=SeqID_62142
atggcgaagcacttggctgccatgtgcaggtgcagcctcctagtgcttgtactgctctgcttgggctcccagctggcccaatcccaggtcctcttccaggggttcaactgggagtcgtggaagaagcaaggtgggtggtacaactacctcctggggcgggtggacgacatcgccgcgacgggggccacgcacgtctggctcccgccgccgtcgcactcggtggcgccgcaggggtacatgcccggccggctctacgacctggacgcgtccaagtacggcacccacgcggagctcaagtcgctcaccgcggcgttccacgccaagggcgtccagtgcgtcgccgacgtcgtgatcaaccaccgctgcgccgactacaaggacggccgcggcatctactgcgtcttcgagggcggcacgcccgacagccgcctcgactggggccccgacatgatctgcagcgacgacacgcagtactccaacgggcgcgggcaccgcgacacgggggccgacttcgccgccgcgcccgacatcgaccacctcaacccgcgcgtgcagcaggagctctcggactggctcaactggctcaagtccgacctcggcttcgacggctggcgcctcgacttcgccaagggctactccgccgccgtcgccaaggtgtacgtcgacagcaccgcccccaccttcgtcgtcgccgagatatggagctccctccactacgacggcaacggcgagccgtccagcaaccaggacgccgacaggcaggagctggtcaactgggcgcaggcggtgggcggccccgccgcggcgttcgacttcaccaccaagggcgtgctgcaggcggccgtccagggcgagctgtggcgcatgaaggacggcaacggcaaggcgcccgggatgatcggctggctgccggagaaggccgtcacgttcgtcgacaaccacgacaccggctccacgcagaactcgtggccattcccctccgacaaggtcatgcagggctacgcctatatcctcacgcacccaggaactccatgcatcttctacgaccacgttttcgactggaacctgaagcaggagatcagcgcgctgtctgcggtgaggtcaagaaacgggatccacccggggagcgagctgaacatcctcgccgccgacggggatctctacgtcgccaagattgacgacaaggtcatcgtgaagatcgggtcacggtacgacgtcgggaacctgatcccctcagacttccacgccgttgcccatggcaacaactactgcgtttgggagaagcacgagtacaacgagggcgtccaccgagggtcgtgcccccgctcgccccctccacgcccacgcccgcgcccgtctgcgtccatccccttcgtcttcccaccccagatttccgcgctcgtgagagccacccagagattgctcccccctctgcccccgccaccgcccccgtcctcacgatgcccccgcccctctcgccattctcgcgtccgcgtcgcgccccatccccggagaactcgcgtcggcgccattcccccgcaatgccctgcgccctacccgcacgccatcatcgcgtag

SEQ ID NO: 20364 - DNA, 147 bp, Zea mays
  Peptide Sequence Number=SeqID_62143
atggaggaccgccggcgccggatgggcctcaccgtcgccgtccgcgtattcccgctgccgccggccggccgtccaggtcgcggcgcgggccatatgtaccttcaacttgaaggaaatgaaagtacaagcgtgacgacgcaaaagtga

SEQ ID NO: 20365 - DNA, 2469 bp, Zea mays
  Peptide Sequence Number=SeqID_62144
atggcggacgatcgaccgctcggcgacggcgcctcgggcctcggccgtcagcatgacacgagggggcgtgcctcgggcctcggccgatgtgacgctgtctggtctctggtgttgtcgcggtcgttcatgtactaccagttgctagctgtcactgcaggcgccgacgacgactggctgcagccccagctactagcaggccgctcgcgacactacggggccgggtgtgtcaacggacgcgcggggaggcaaccgtgcagtgcagttgagagcctgagaaccctctggaaactagcccgcccgacctggctggccccgacgacgacgtcgacccacaccaccacaccaggtcgcgcatggaggaggccccatgcatccgcagctggaactctcgggagcctccacctggccgacccgatctcgcgcagatacgagagggccggtgatggccctgcctccggggcttttttgctcgtcctcatgattggcggcccccgcctgcgcctggtggagagccggagccggagaccacacgacagccccagctggcgccccgcgggcaccgccgccgaggtcgcgcgcatgcatgcccggctgcgacctcgcccgtcctggcgccgaggacaagggtcggccaacgggggcaagggacccggggtgtcgctggataagaacttatcctcccgcggcagcatgcaggtcttgacagacttgccagcgtggcgctccttctataaataccaggcaaggcgttgcctcgacctccaccattcggaagatccatccatcaaagatttttcttctcggtccctctctctcgtccgtcctagccaccagcacataacaaagcaggcaggcaggctcatacagtacgctcaaagcggaaacagagcgaagaactcagcaggacagtcagctgcaaccgcaactggtctgcttgtcagcaggatcagttggatggccttgttcttcatccttgcttgcaccctcatttttgtagccatcgcctcctacgcccagtacgcgcgctggcagaaggggaaaggccgcctcggcggccatgagaaggcttcttcttcctcctcgaagctgcctcctggctccatgggctggccttacctcggtgacacccttcagctctactcccaggaccccaacgtcttcttcgcctccaaacagaagcggtatggcgagatcttcaagacgcaccttctggggtgcccgtgcgtgatgctggcgagcccggaggcggcgcggttcgtcctggtgacgcaggcgcacctgttcaagccgacttaccctcggagcaaggagcgcatgatcgggccgtcggctctcttcttccaccagggcgactaccacctccggctccgcaagctcgtccagggcgcgctcgggcccgacgcgctgcgcgcgctcgttcctgaggtcgagtccgccgtgcgctccaccctcgctgcctgggacggccaggtcaggagcacgttcgacgccatgaagacgctgtcgttcgatgtgggcatcctggcgatcttcggcggcggcgggctggacgagcggcgcaaggcggagctgaggaagaactactccatcgtggagaaggggtacaactccttccccaacagcatacccgggacgctctactacaaggcgatgcaggcgcggcggcgtctgcacggcgtgctgatcgacgtgatgcgcgagcggcgggagcgcggcgcgccgggcaccgacctgctgggctgcctgatgcggtcccagggtgacgacgacggcgcgcggcggccgctcctgacggacgaccaggtcgccgacaacatcatcggcgtgctgttcgcggcgcaggacacgacggccagcgcgctgacctgggccgtgaagtacctccacgaccacccgaagctgctggaggccgtccgggcggagcaggcggcggtacgcgaggccaccggcggcgggaggcggccgctgacgtgggcgcacacgaggagcatggcgctgacgcatagggtgattttggagagcttaaggatggcgagcatcatctcgttcacgttcagggaggccgtggccgacgtggagtacaaagggttccttatccccaaggggtggaaggtgatgccgctgttcaggaacatccatcacagcccggactacttccaggatccacacaagttcgacccttctagattccaggtggcgccgcggccgaacacgttcctgccatttgggagcggcgtgcacgcgtgccccgggaacgagctggccaagctcgagatgctggtcctcatccaccatctggtcaccgcctacaggtgggagactgttggatccagcgacgaggtcgagtacaggccgttccccgtgcccaagcaaggcttgcctgtcagattatggagagaaagcagtgcggcggtggacagaaatggccgccatgagaccgatgacgatgtggaggacataatagtttga

SEQ ID NO: 20366 - DNA, 1206 bp, Zea mays
  Peptide Sequence Number=SeqID_62145
atggcgaagggaagggcacacccgtcgaagcgacccacccaccaacttctcgcggctgtcctatccgttttcgttctcctcccgctgctcgtgccggcggcggcaactgtggctgtggcggtggcggtggcggaggggggcgggaagcagttggcggtcgggaaggacgagggaaactggtctcggagggggatgctggtggaggcgggaaattctgatccggagaagctgaaagagggggctgctgatgtgcagaagttatctgcagatgaactgctcgagcggcgtcaggagatcaaggagttgatggagaagttaaagatgccatcagacgctgacttaatgaaaatcgcaattgatgacttaaataattcttccatttcactggaggatcgccaacgcgcactgcaggaacttttagttcttgttgagcccattgacaatgctaatgatcttgaaaaacttgggggcctccttcctgtgattcaagagcttaataatgcaaatgaagaaatacggaccacctctgcatgggtccttggtacagccagtcagaataatgaacttgtacaaaaccagatccttggttatggagctttggtgaggttggtgaagatgggttattccacatctacagaagaagctgcaaaagcattgtatgctatatcatctttgatcagaaataatgtaaatggtcaagaagcattccattcagaaaacgggagtgcaatgttgcagcacatattggtcagcaacaatattgatgttaggctacagaagaaggcagtgtttttagtaacagatttggcagactttcagctaaattccggaatcgcgcaacttcctttcttgagtgaccgtctttttctgaagtcaatagtcgatatgttatcaaggtttgacctagaccttcacgaaaaagttgtcataatattctccttcattaatttgtgcctcaggcactcatttatatctgaagctcagattggtaaggtattattggccatcaagagtctgctgaaactttcctcaactgatgtggaggattttgagttctatgatctcgatagtgtactgctcagactaggggtacagttggaggacttgacaccagaggatcaaaaggagttcgctgtggaggttgatgccctccggagagaagttcaaacactcttccaacagaagctcaagcaggcacatagctga

SEQ ID NO: 20367 - DNA, 198 bp, Zea mays
  Peptide Sequence Number=SeqID_62146
atggcgctggtcgatggaaacaacgggtggtgcgaccttaatcgctcgccggagctcagattgggagccgcgccgccgcgtaccgtgtacaggggcattgccgtcgagaatcgagacgagcaagccactgtggaatctgaggttcaacaagtagagatagctgagcaggagctcattgaaggcaagttgtgcccttga

SEQ ID NO: 20368 - DNA, 198 bp, Zea mays
  Peptide Sequence Number=SeqID_62147
atggcactggtcgatggaaacaacgggtggtgcgaccttaatcgctcgccggagctcagattgggagccgcgccgccgcgtaccgtgtacaggggcattgccgtcgagaatcgagacgagcaaaccactgtggaatctgaggttcaacaagtagagatagctgagcaggagctcattgaaggcaagttgtgcccttga

SEQ ID NO: 20369 - DNA, 738 bp, Zea mays
  Peptide Sequence Number=SeqID_62148
atgaagctgctgttgtccaacccctacggcttcagcagctccgacgacgacggcgaaaccgacgtcttcagcagcgacggcgaggacgacgaccgcgccgccggccgcggcagcaagaggccgggcgagtcggcggcggagaccttcttctcctcgtcacgaagcttctcgtcggactcctccgagttctacaccaataagaagcagcacaagaagaagacgacgacgaaggcaaaggcgaagggaatgacgaggagtagtaacaacaaagagtcaaagactctgaagctttggtgcctggcggtaagacttctgaaagaaatgtggaagaaacgaaaatggctacaacatttcaattggggtaggagctactgtaggcagagaagaggacggaggttagcagatcttgtcgcgctggtggagatggccgaagccgtggagtgcaaggaggagtgggacctgtttgccgatgcgaacgacgacgtagggatcgctggatcagaggtcacagacgacaaggttcacctccctcaccacgcgcagcttcagcagccgacgagatggtccagcatggtgatttccctcttcaccactgagttctctcttcctcgcagctgcaggtcttctcggttgtttctcgatggatttctgtggttctattctacaatatatatttatgttctatctataaagcgctctggttcaattgaactagctgccgtgcgctggccaagttag

SEQ ID NO: 20370 - DNA, 696 bp, Zea mays
  Peptide Sequence Number=SeqID_62149
atgcgccccccccctcctctctccctctctcatttggatctcccgcgcaacaacctctcctctccctcttccacctctctctccccgtggtgccctaggatttggagacggcgatcaccggattttggaccccgaggtgagctcccctcccctcccctccccttctcctctctctcttcctctccctcctcttcttccccacgcgcgcgccctcccttttccccctgcccgcgcccgaccccgtccctgcccggcgcggcgatcccgcccccgcccgtccccgcccctgcccggcgcggcgacaccgtccccggcctccccccgctcgaccccatccccgtcccctcccccggcctcgcggcgatctcgcccgcccctcccccggccgcggcgatctcgcccgcccctgctcgcccgcggcggcgctcgctcgcccctgcccgcccggcggcgctccccgcccctcccccgcgcgcggtggcgatcccgccaaccaactcggctgccatggccggctcggccgcccccgcgccctgccccgtgcccgcccggctcggccgcccccatgcccgcccggctcggccgcccctggccggtggttatgagatcgatgattctggttatgactatggtgctggcgaagatgaagctgtggaaggagacttccaggagttccaagactacgacgagttctag

SEQ ID NO: 20371 - DNA, 768 bp, Zea mays
  Peptide Sequence Number=SeqID_62150
atggcggcgtcgcccgctctcgtctcgctgactcccgccgtctccaggcatccccacctcctcttctgctccccttgccccccgccgcgccacatccgcctcgcccctccaaccgccacacccgcctcggacggaaacggcctcggccccggccccggccccggtgtcttcctatcgccgcgcgcgctctcgcagctcgacgagctcgcggccttccgctacgagcacgccttcccgcacggcctcctcactgtgcgcgccctctcgcgcggccccgacgacgacgccgtggccgaggcgctcgtccgcctcctcgcctcctccttctccgagaccgtgcgctgggccccggcccagcggtacgcgcagctcctcacgttcgtcatccgcaggtacctccacgaccgccgcgggctcgctccgcacgccgcggtgctcgtggggttctaccgccccgccgacgccgacgccggcgccgacaacgccaacgccgccccggaggacgacgaaggggagggtggggatgaaggggagatggcgtgcaccgcggaggtgtcgtttgacgcggtgggcgcaccaggggccccgcccacgcccacttccgccgctcaacttcccctacttttgcaaaatgactgtgaagacccccctgagaagactgacagtatattggtctggctgagccttcaaaagcgcaagtacttgatgagcaaggaattaccccaagcttctgttgttagtgagacttcaaccaaaaactttgagtga

SEQ ID NO: 20372 - DNA, 465 bp, Zea mays
  Peptide Sequence Number=SeqID_62151
atgtggcctcgtgcgacgatagcggcgcgtgccgcgactgtgggggtcgaggaggcggcgagggggtgtcccgaagccgaaggtgggacgaagtggtggcgcggcgggggcacgacctccgcgcgactcaggctcggccgagacagccgccgatggagggagggagtaggcgaggtcctccggctcccgatgcaggaaggacgaaggggagcttgcggacgtcggcaaagtgcaggaatggtcaaagaagtggaggtcgtggagatggaggctgcggtagtggagctgaccgagcggttgggcgtgcggacggaggttgccgaagaagactgctgcggtcgctggagtatgggccgcccgaaacgtatgggccgcactaaaaattcagcccagaacgcctgtactgctgtgttgttgcgtcttgcaaagaaattagtaccatactggctagtaaaggagacatag

SEQ ID NO: 20373 - DNA, 243 bp, Zea mays
  Peptide Sequence Number=SeqID_62152
atggcgcctgaggctggactcggcggctgtcagcctcaccctggcgggtggcacagcagtcggagcagggcagacggcgctgttttcctgtcagatttcgaccgttaccggtgtattttccgcaccaaactttcgtttccgatgtttccgaaataccgatatcgtttccgtttccggagttacggtttcgattttgtttccgatagaaactatgaaaatgttgtggtattccaaaaactgtag

SEQ ID NO: 20374 - DNA, 780 bp, Zea mays
  Peptide Sequence Number=SeqID_62153
atggcgcggtcgagcgcggacgacatggagctgaagcgcgggtgcgaggccgggatcctcgccaagggggaccgggacaaggtggtgatgtgcatgcgcgtggccaagagccgcggcggcggcggcggctgggccaagggcaagctcacctcccgccacaacatggccaagccccgcgtcctcgccgtcaccgccaaggccaaagggcacaggaccaagacgttcctgcgggtgctcaaattactccaatggcggggtcctcgaggtgaccttccagccgtctctctcctttctttgctgccggcaaaagtgtacaagatcaagcatctccacaagatagaggtctcccaaaacgaccccagcggctgcaccttcgtcctggggtttgacaacctgagaagccagagtgtggcgcctccacaatggaccatgcgcaacaaagacgacaggaaccgcctgctgatgtgcatcctcaacatgtgcaaagagcacttgggaagcatccccaaagtcgtcggcatggacgtcgtcgagatggctatctgggcaaaggagttgatcgatctcaaagtgcagcaagtcgtcgtcctctcgcaactgaccaccgaggggagccatcaaacgacatcatcgacgggcaccacaccccagggctttccctatgggatgttaggcatcaacctcagcagttttgtccttgtcttaggcatcaactacctttgtacccttggcttcattttatgggagtttgagggtctacatgtccttttgatgaggtga

SEQ ID NO: 20375 - DNA, 1074 bp, Zea mays
  Peptide Sequence Number=SeqID_62154
atgacgaaggtctatgcttgtcgaaggtgttcaaaagtcaaaagtggaagtgagttcaccggagttctactctcactcttgtttggaatagtatcacattctcatcctctgtccttcctggaaaaatgtctggacagtggccgatcgggcaccttcattctagcatctgaaaacttgcagttggtcattccagtgcttcaaagtttagggaatcctgtaattggtgatggttacatggttgattcaatcctaattattgggaacagtgtcacatatcaagccttatcaagtcttatcaagcgtttgaagagtgacaatagggttctcaaaaaggaggtatcatgggccatgtcaaatatagcaacgagtagttttgagcataagaaacgaatatgtgctagtgaggcgactcttttgctgatgcacctactcaggactacaaactttgacatccacagagaagcaacatacaccctgggcaacatgtgtgttgttccagcacgcagttctaatcccctaagtataatcatgcccccaaatgaagttgttcaattggctacaaaatatcgcgaacaagggtctcaaactctaaacctcaaggttgggaagaacttcaattcagatatagaggaatacacatattgttcatttagtttcattggcctggatacaaatacattgtatgagatggtttgtccctactgtgattctgggttcgtggctgaattggatgatgcaaatgctctcatgagccacttcgatgggatggaccctgatttccatcgtgacccaaggttcgggatcatggaggcaatctctgtcgtgatgcagcatgatatggcagggatgaacaaggaggttaatgtcacaggaaggccaaactccttttcagacctggagatagagtttgtgatcaaaagtagggacaatccacccatgtcattggaggctttgctggagactatcagctgtctgccagttcatagttttttgtcatggtttgggatcccggtggaattggtgccatgtatcggcttgagggcaagccgatttttaagaaggggggaatgttag

SEQ ID NO: 20376 - DNA, 473 bp, Zea mays
  Peptide Sequence Number=SeqID_62155
atgatccgtttcgggagcctcgacttctcgttcgacagggaacgcgaggtggttggggccaaggaagcccgacctcctccatcgaggaatctcggcgcgaccgcgagggccagcggtggcccccgcatcgactacgccctcagaatgatcgttcgcttcgggagcctcgaattcgtcatcaaccaggagggcgatttggtcagggcggcgctcgcccgacctcctccgtccgaaagccctgacaccacctcagagaccctcagcaccctccgcccctgccccacgcgaccggccatcggccatggcgccttcccgcctcgactgcgccatgccctgacgaagatcgccgccctagtagtctgcggccatttccccacctctgatgacttggagttcatggggatggcagatagcggcggggacctcatcctcgatgcactctgcacagactttgtcacacccagttttggaag

SEQ ID NO: 20377 - DNA, 195 bp, Zea mays
  Peptide Sequence Number=SeqID_62156
atgtggcttgagaagggtggtgaagcagaggcagaggagtggaggcgacttgagtcggccccgctccgagctaacatggccctagaaaccatcgagcgcatgcttagtggttttggggacgcggtctcgattgctcgggcatcggggatgggagactttcacaggatgcaagaagtacttggactaaggaattga

SEQ ID NO: 20378 - DNA, 708 bp, Zea mays
  Peptide Sequence Number=SeqID_62157
atggcgcctcctgttgacgtggctggcctgcgccctaggttgggcgatgtggaagctcctccgaagccgaggtcgagtctgtcctccgtggccgagatcgagtccgagcccctgggtcgggcgaggcggaggccgtcggctgaggccagggcggagtccgagccctggggtcgggcgaagcggagttcgtcgtcttctggggctgagcccgagtccgagccctgggtcgggcggagcggagttcgccgtcttccgggacttagcccgagtccgagccctaggcctttgcagctttatgctgatgggggttaccagctgagaattaggagccttgagggtacccctaattatgactcccgacaggcactaatcagtgttgaaggtagaataaatcaaaggaggatgtatatgtttgagagtggtagggtgaccctgggccacaacgaccaactgtatgttacttcggtcaacttccaactttgctccggccggaaggcgggctacctcaagatcccgctacccacctctgtgaggtacgagggtgaatggttctatgtcaagaacctggacggcagtgtcacgttcttcaccggtcgggagcctgtgtctacggatgattggaaccatggggcagagccgggtctgaagggcgaggtggaacctctcttggtggcgctcaagacattaaaggatcaagtaccggcgtga

SEQ ID NO: 20379 - DNA, 243 bp, Zea mays
  Peptide Sequence Number=SeqID_62158
atgaatcacatgttatcgttgagaaggacttggtttctcaggggagaagaggaggacattgaggctcttcttggcaattatgttatggccattggtgaagcagaggctttttccgaaaggatgaagcgcgagcttgtagcgctagaatctgcaaatgtttatgccttgttggaaactgaatctgttgtagaagagcgtgggatccccttgacggcgccttgtagggtcaagttggcggactag

SEQ ID NO: 20380 - DNA, 2124 bp, Zea mays
  Peptide Sequence Number=SeqID_62159
atggacatggacatggcctcgtgtcgtcgtcgctggccgctgttgcttgctctcgcccagctgctggtcgtctgcggtggcctcggcgccaccgtggagcacaccttcgacgtgcgcaacgacctttccataagccagctttgccagccggcgagggccatcaccgccgtcaacggccggcttcccgggccgacgatccacgtccgcgagggcgacacggtggtggtgcacgtcatcaacaactcgccctacaacatcaccattcactggcacggcctcttccagcgtgggacgcagtgggcggacggcccagagatggtgacgcagtgccccatccgccccagcagccgttacacctaccgctacaacgccacggggcaggagggcacgctgtggtggcacgcgcacagctccatgctccgtgccaccgtccatggcgccattgtcatcaagcccaggaacggcgccctggggtaccctttccccaaacccgaccaggagcggatcgttatgcttggcgagtggtggaacggcaacgtgttcgacctggagcgcaacgccttcctcacgggcaacctggtgcctcaggccgacgcctacaccatcaacggcaagccgggggacttgcacaggtgttcgggcggcagcaaccgcaggcccagaaccttcaagctcaaggtgcggagcggctcgacgtacctgctccggatcatcaacgcggcggtgaacacgcccatgttcttcaaggtcgccggccacagcttcacggtcgtgggagccgacgcgggctacacggcgccgtacgagaccgacgtcgtggtggtggcgccggggcagaccgtggacgcgctcatggccacggccgccgcgccgccgtcgcggcgccgctactacatgatggcctccccctacaacagcgcgcgcccgagcctcccgttcaggaacagcaccgccacagccgtcgtggagtacgtcgacgtcggccaccagcagaacaagcagggaccgcggcggcggcggccggtgctcgcgcccatcatgccgccgcccaacgacacggcgacggcgcaccgcttcttcacgagcctggccgcgctcgtccgcccgggcgcccgtgcccccgccgtgccgctcgccgtcgacacgcgcatgctcgtcaccatcgggctggggctcgcggcgtgcaggcccggagcagacgcggtgttcgccggcagcatgaacaacgcctccttcgtgctccccgccgccatgtccctcctggaggcgcacttcaggaacgccacggcgggcgtctacacgcgggacttccccgacgcgccgcccctggagttcgactacaccaggccgccgcgcggcatgagcctcgcgacggccaagtcgaccagggtcaggacgctgccgtacaacgccacggtggaggtggtgctgcaggacacggcgctggtggcgcgggagagccaccccatgcacctccacggccacaacttcttcgtgctggcgcaggggttcggcaacttccgacgggaaaccgccgagaagcagtacaacctcgtcaacccgctccagaggaacacccttgccgtgccgacgggtggatgggctgtcattcgcttcgttgccaacaacccaggaatgtggatcatgcattgccacttcgatgctcatctgccgatagggttggcaatggcgttcgaggccaggccacagcccacagccacccgcccgccttacgcccacaccctaaccctagccgacgcggcggcggcgaaaccggccacaccgacggccgacgcgaccgcccaggcgcgcagccgcccagccggccagccgcccacacgtggcgtggaacaggcgccagccgcgtcctgccaggtgccagcggcgtttggtcgggcacggccgctcggacgtagggggcggtcctgccaggtgacagctgctctcactctcaggcgactcccgcggtccaccggtcccgctaggcgccagtcgcggtcccgcctagacagccaggcgcccagcccgggctcgcttcctgcacggctgcacggcaccctcgtccttgtcgcgccgaagaccctcgtcgtcaccctcgtcctcgtcgcgccgaagcaaccctag

SEQ ID NO: 20381 - DNA, 393 bp, Zea mays
  Peptide Sequence Number=SeqID_62160
atgcaggcggcgcgcaactgcaccacggggatgcaccctttcaacttcgacgcgtccagcatggagtcccaggtccacacgtcatgtaaccggcgcaccggttgctacgtgcgaaaaactgcaccgccacttgcgccaataccgcggtttctcgactgtggaactgggaccaggaaaggggatacttcgaaagggatccttctccgcgaaggaagcgggcccccgagccctcctactgatcaggggttcgaaggctggcccctcggaagggttcgacagccgccccagagcactcgggcttcaggctcattactgatcagaggttcaaaggctggcccctcggaagggttcgacagccgcctcagaccactcgggctccgcgcccactactga

SEQ ID NO: 20382 - DNA, 270 bp, Zea mays
  Peptide Sequence Number=SeqID_62161
atgatagaatggcgcaataacagactggagttgcaatctgatagtaatgtggctttgattaatgaggttgacaaattgcttgagctcctgcagattccacctgagtatgaggaatcattaactggaggatcatttgatgaaggaaatatggtcaagaacattgaagcctgtgactggttaaccagtgctataaagaacctaaaagagtccaacatagacccaatctatgtaaagttgcgtgctgtaggttccctctcttcgtacaaatag

SEQ ID NO: 20383 - DNA, 396 bp, Zea mays
  Peptide Sequence Number=SeqID_62162
atgggcctaggcccagatacctctattaagaatacatctcccaacccagttagggttagggtttcctattctaacttggtaccagagctagccgccggcgtcctcccctcggcgatcgtgctcccccctcctcacccctgccgccgatgccctctccccggccgcgcccgcgcccggctcggcctgtgccgcccctgctcgccgtcggcctccccagtccgggccaagtccgcgccgccccgagccgtccgctcctgctcgtggtcggcgcgcccgccccggatctcgtgccgcgccaccaccccggttcctgcgcccgctcgccgcgacgcctacggcggccaagtccgccgggtcggacagggggaagaaggcctcgccaacgcgcacaactga

SEQ ID NO: 20384 - DNA, 162 bp, Zea mays
  Peptide Sequence Number=SeqID_62163
atgaatcaccgggaacacgttgttctttgggttgtccgcgctgtcaccgaggacagagcaagaacccaaaaccctaccccctgctctttgaacttcactgttgactccagaaaccctaagttctcggagttccgtgaagaaaagttgtattcaagaccttag

SEQ ID NO: 20385 - DNA, 420 bp, Zea mays
  Peptide Sequence Number=SeqID_62164
atgatgtaccccctgcaacgtggtcggtccgagcccaaggtcgggcgaggcggtgactcctctgaggtcgaggttgaggctgagccctggggtcgggcgaggcggagaccgtcttccgaggtcgaggcggaggccgagccctggggtcgggcgaggcggagactgttttccgaggtcgaggttgaggccgagccctgggtcgggcgaggcggagaccgtcttccgaggtcgaggcgggggccgagccctggggtcgggcgaggcggagaccgtcttccgaggtctaggcggggggccgagcccctagggtcgggcgaggcggaggccgtcttccgaggtcgaggcgggggccgagccccggggtcgggcaaggcggagcttcctatggcgcctgaggctggactcggctgctgtcagtga

SEQ ID NO: 20386 - DNA, 531 bp, Zea mays
  Peptide Sequence Number=SeqID_62165
atggccgccgccgccgccgccctggtgagcagcaacagcctccgcgccccggcggccttctccgtcgtcgtccgcgcggcctcccggccggcgcctgtcgtcgcagtagtgacgccgctgcccgcggccaaggcggccgccgcccgcggcgccaggctgcgcgcgcaggccacccacaacgtcaagctcatcacgccggacggggaggtacagctcaagatgcccggcgacgtctacatcctggaccatgccgaggaacgagggttggacctgccctactcctgccgcgccggcgcctgctcctcctgcgtcggcaagatcgtctccggctccgtcaaccagttcgaccagagcttcctcgacgacgaccaggtcgccgagggctttgtgctcacctgcatcgcctaccccacctcggacctcgtcatccagacgcacaaggaggatgcactcgtcgagtcgtactatataacaacatgccgactaaatactgaagtggatgagagggaagaagagacaaaaagaagctga

SEQ ID NO: 20387 - DNA, 405 bp, Zea mays
  Peptide Sequence Number=SeqID_62166
atgatgaagcgtggtctttccgagcccaaggtcgggcgaggcggtgattcctccgaggtcgaggctgagtccgagccctggggtcaggcgaggcggagaccgtcgtccgaggtcgaggctgagtccgagccctggggtcgggcgaggcagagtccatcgtccgaggtcgaggttgagtccgagccctggggtcgggcgaggcggagaccgtcttccgaggtcgaggctgagtccgagccctggggtcgggcgaggcagagtccatcgtccgaggtcgaggttgagtccgagccctggggtcgagcgaggcggagaccatcttctgaggtcgaggtggagtctgagccctggggtcggccgaggcggagaccgtcttccggtgtcgaggttgagtccgagccctag

SEQ ID NO: 20388 - DNA, 393 bp, Zea mays
  Peptide Sequence Number=SeqID_62167
atggagaacaagcaacgaaaatgttgtcttaaatgttttctccaactgaaaaactgcaaagaacaacaacagtgtgagaaggaatcgcctgatgcctttaaattgtggatccactgctctatgaggagagtcaggtggaaatgtggaatgcagtcgcaaaaacgtataaccagggccacggccactgttcttaaggtgtcgcctaggcgacgcctaggcgtccaggcggaggtccaacgcctaggcgttcaggcggtggtccaacaacttgtctcgcgttaccgctttaaaaaccatggccacaacactgtcattttgtgcaattactttattattagatctagtaaacaggtcacaaacgccaacaaggcaacaaggaggtctgaagcctga

SEQ ID NO: 20389 - DNA, 1185 bp, Zea mays
  Peptide Sequence Number=SeqID_62168
atgagggaactacagggggctatacttgttggttcagtgttccagataatattaggatacactggtcttatgtcactgtttctgaggttaataaatccagtagtggtggcaccaactattgctgcagtgggtttggcattttttagttatggtttccctcaggctggcagctgtgtagaaatcagcatgcccctcattctgttggttcttctgtgcactttgtacatgagaaaaatatccttgtttggcaaccatatcttccttgtctatgcggtgcccctcagtgttgcaattgtatgggcttatgcattctttctaactgctggtggagcatataacttcaaaggctgcagctcaaacatacccagttcaaacatattgttggattcatgcagaaggcatttagagaccatgaggcgctgccgtaccgatgtttctactgcgtggaaaactgctgcctgggtgagggttccctatccgttccaatggggccctccaacgttccatttcaagacggttatcatcatgataatagtttctctggttgcttcagttgattcgctttcatcgtaccatgcggcgtcactgctggtaaatctaagcccaccaacacgtggagttgtcagcagagcgattgggcttgaaggggtttcaacgtttattgctggagtgtggggtacaggtaaaatcggagctctcctagcctctatacctcttgccttggccgcctctgttctgtgcttcacctgggcgctaattgtcgcgcttggtttgtccacattgcgatacacccaagcagcaagctccaggaacatgataatagttggatttaccctgttcatctccttgtcgatacccgcatactttcagcagtatgaacccagctccaacctaatcttgcccagctatcttcttccatatgctgcagcgtcaagtgggccagttcacacagccagcagcgggctgaactatgcagtgaacgcgctcctatccatcaacgttgtggtggctctccttgtcgcgttgatccttgacaacacagtgccaggcagcaaacaagagcgcggtgtgtacatttggacagatcccaaatccctcgaggtggatcctgctacattggaaccctaccgattgccggagaaggtttcgtgctggttcaggtgggcaaagtgtgtcggcatctga

SEQ ID NO: 20390 - DNA, 285 bp, Zea mays
  Peptide Sequence Number=SeqID_62169
atgatgagtaatgtcatctggagaaatatttatgctgaggaaggttcagaggctatggatgttgctgctgcccctgctgtgcagagattctatgttctctggaaacttcaaattcacaaccctggtgccggcaactcccagccccagcccaaagaagcatgggcgatgaactgccgtgattatagtgctcaacatttccttgagcaccacgatttccacgccgaggtaattgaggaacacgaacaccaggagctcggcgtcgccattgggcgacaagcatcatga

SEQ ID NO: 20391 - DNA, 927 bp, Zea mays
  Peptide Sequence Number=SeqID_62170
atggccgccgcatccacgctgatcggtgactgccccctcgagcgtgcagcgcggcggcgatgcccgagctcgcggcggaccacgggccgcgggggcgcaggcggaggcagcgcgggagcgggtgatgcaggaggcggcgacggcgaccgggtgccgccgttcatgggcaacaaccgcgaccacaacccgcgggagctgcgctcctgggcgcgccgcacggggttccacccctcggccttcttctcgggggagtccaactcctccttcgcctcctccgccgcgccgcaggccccgccgccgccgccgcctcccccggtctcctcgcgtcgcccgccgccggcacgggagcgggaacccgaaccggacacggaggacgaccttgttcccgcgccgccactggaattagagcgcggcgggcccgcccccgtccgcggacgcggcggacgcccgcgccgccgcatcgacctccgcggcgagctcgtgatcccaccgggcttcggccgcgaggaggcggaaccggacgcgggaaaggggcgcgcgcgcggggacgccaggaggaggaacttcggcgtcgagatggatcagacgccggccaatgcgggccggaacgggaacggagcgctcgcggacgcggagtcgaggaagaagtccgaggaggcggaggcggacgcgaagcggaaggcggaggaggccgaggcgaggaggaagaaggaggaggaggagagggacgccgagctggctgcgtactaccaggaacagtgggcgaacgaggatgagggagctgccgacgctgccgcggccgagacggccccgctgtatgaggcgtcgggactacggtgcggtgtaaccgataacccagggtggggtgagttcgctgctctcaaccttgttttgcttcatattccttattccattcagatgtactaa

SEQ ID NO: 20392 - DNA, 378 bp, Zea mays
  Peptide Sequence Number=SeqID_62171
atggctctgttggtgcgagttcatcgccaacaacctccgctccatcttcctgattccgctcggacttcaccgtggtgcataaaagccgaagctccgcgacccccttccctccatccaccaattcggggctgcaccgagtcgttgggagccccgcctggcatggaggagcacctgagcgccgccgattcctcgccgtcgctcctgcgccgccgcgcatccgcccctcgtcgtggccagtgctcaccactactcgatctaagctctgaccaatttgacttcggcgctctggggtggccgattggtgtctcgccggcgcgctaccaccgcgtgggcgcagggcgccgccgtgccctggtgttggtgagggggttgcgatag

SEQ ID NO: 20393 - DNA, 429 bp, Zea mays
  Peptide Sequence Number=SeqID_62172
atggcgggtggaaaagagctcgctagagctaaggaggggcgtctggccggcgatggcttgcaggttttgctgactggatcaagagatagagaggggagaaatctggtttgtctcactgccgcgcacagagagatcacagcactgagagaaaccctagatgacactggggtgtcacaagcactagcaccagcgtccgcatcaacagcagttctagaggcagtttcctcagcagcaagagtactgccagcacaaccaacaaggaggaaactaatctcagaggcagagcagccagacacctcaccttcctgctccagcaaccatccagaacaacaagacagcgccagcggaaggaagaggccgatgatgtttctactgtgggaacaaggccactgggcgtctcactgcccgaagaaagtagcccagcagtag

SEQ ID NO: 20394 - DNA, 276 bp, Zea mays
  Peptide Sequence Number=SeqID_62173
atggaaattaaggaaagagaaatgaaagatgtgaataaatgttgtcccaaaaactttgttttctgtccactaaaatatatcaaggcaataccaaacccacatgttatcctaaaggaaaacctaaatccaaaggactgtaatcttgctgacggagagtacatcctcgtgccggagcaaggagctgctcaggaggtagccccagatccagcacccgagcctgcaccagaggacctgcctgccactgctttggaaggcaagccccggttttatgcataa

SEQ ID NO: 20395 - DNA, 129 bp, Zea mays
  Peptide Sequence Number=SeqID_62174
atgggcgtgcctgacttctgcgcgcgctggcgcgcatttaatgcgtccgcagcggagcagccgttgcaaattcccgaggctgccaagttccagagccgcgtcctcttggagcaccggacagtccggtga

SEQ ID NO: 20396 - DNA, 441 bp, Zea mays
  Peptide Sequence Number=SeqID_62175
atgtgcgtgggaggctgtcgttgcccaagggcgaagctgacaacagtcaagttcagcctcaagcgcaacaggaatctccgcctcgcccgacccccggggctcggcctcaacctcggcctcggagggtggtctccgcctcgcccaaccttgggcctcggcctcaggaggaggtctccgcctcgcccgaccccagggctcagcccccgcctcggcctcagaaggtggtctgcgcctcgcctgaccctagggctcgacctcaacctcgacctcggaaggaatcgcgtcctcgcccgaccccaaggctcgccctcaacctcgaccttggaaggaatcgtgtcctcgcccgaccccggcgtcggcctcaggaggagtctccgcctcgcccgaccttgggctcggaccgaccgtgccatagaggatgcatcattaccctacccctag

SEQ ID NO: 20397 - DNA, 432 bp, Zea mays
  Peptide Sequence Number=SeqID_62176
atgatgatggattccgcggagcatcagaaggtgatggggatcgcgccggcggcggcgcccgcagcggaggcggggagaccgtgctgcgtcgagtgccgcaccaccgcgacgcccatgtggcgcggcgggccgacagggcccaggtcgctctgcaacgcgtgtgggatccggtacaggaagaagcggaggcaagagctaggtctcgatagcgccaagaaaccacaacaaaaccagcggccgccgccgccacagcagcagcagcagcaagaggatcactgtccggcaacaagtgcagtcgctgtcagagacaacaccaaaagcagcaggctccaagtggtgaagaaacggagggtcctgatgggagtggaggaggccgcagtcctgctcatggccttgtcctcctcatccagatccacgctgctacatggctag

SEQ ID NO: 20398 - DNA, 195 bp, Zea mays
  Peptide Sequence Number=SeqID_62177
atggtggctgctccgggtggaggaggtgtggcgcgggggtggtggtggctgcgcggcagcagctacaaggaaatgaaggggatggcaacgtgcgatacttccaccctgtatgccccctgtgttccacgctccctctctttgggagaaaagcttcgacacctttcttccagcgcgcttgctattcccgtgctctga

SEQ ID NO: 20399 - DNA, 1608 bp, Zea mays
  Peptide Sequence Number=SeqID_62178
atggatgcgattgtattgagccactttggcaggcccgatgatctcttaatgaagtaccagtacatatctgacttctttatcgcacttgcatacttctcgatccctttggagctgatatactttgttcagaagtcagctttcttcccctaccgatgggtactcatacagtttggtgcgttcatcgttctgtgtggggcaacccaccttataaacatgtggactttcactacgcataccaagaccatagctgtggtgctgacagtggcaaaagtggcgacagccgttgtgtcatgcataacagctctgatgcttgttcatataatccctgatctgctgagcgtgaaattgagggagaggttcctgaaagcgaaggccgaggagcttgatagggagatggggataataaggacacaagaggagacgggaagacatgtgcacatgctcacgcacgagataagaagcacacttgacaggcatactattctgagaactacacttgttgaaatgagaagaactcttggtttagcagagtgtgctgtgtggatgccatcacgctctggaacaacccttcagctctcacatgcactccataccaatgctccgcttggatcagttgttcctatcaatcttccgattgtagctaccatttttaatagtaatcgtgctgagagaataccacatacttccccattagcttcagtaaaggctcagaaaagcaagtacgtcccaccagaggttgttgctgtccgtgttccgctgctgcagcttacaaattttcaaataaatggttggcccgagctatctgcaaaagcctttgcagtgttggttttgatgcttcctccagacagtgcacgaaaatggcgaccccatgaactggagcttgttgaagttgttgctgaccaggtggcagttgcactgtcccatgctgccattttggaagagtccatgcaagcccgtgatctgctattggagcagaatattgctctggacgcagcacgccgagaggcagaaatggctatatgtgctcggaatgattttcttgctgtcatgaatcatgaaatgcggactcctatgcgggcaatcatttctttatcatccctcctgttagaaacaaaacttactgcagaacagcgggtgatgattgagactatactgaagagtagcgatcttctagaaactctttcaaatgatgttttggatatatccaagcttggagacggcagccttgagctggaaattgcaccttttaatctacatgccacctttacagatgtggttgatttaattaaaccagtagctgcattaaaaaggctatcggtaatggttcatttggctccagaattgcccacctgcgcaattggtgatcggaagaggttgatgcagataatactaaatgttgctgggaactccgttaagtttacaaaggagggtcatatttcagtttcagcatctatcgctaggccggattctctgagggacccatacgctcttgacttgcatccagttctctccgatgggtcttttttacttggctgtgcagcaaatctgatgccaaataatgctgcagagccgtcgcgctctaggcaagcaggtgtaacagttctttaa

SEQ ID NO: 20400 - DNA, 570 bp, Zea mays
  Peptide Sequence Number=SeqID_62179
atgtcatctgatatggttgagaagtttgataagtattggaaagaaattcaaggaccaatgggattggccaccattcttgatcctaggtttaaaactgactttctccttgggttcattgaaactcttaccggtgaatcgagtcaggcttgtatagagaaacttgacaaggtcaaagagtctctatatgagttgatgaaggagtatgaaacggaagaggatgaagataacacagagtcatcaacacctgcacttttcaattcaggtgtactatccacaatcagtgcacgtgttgctagtagaaggccaacaacaatgaggttcaaatctgagttagagaggtacttggaggatgagttggttccaatcggcacagaaaactttaagattcttgattggtggaaggtggctggtacacactatcccacattaaggaaggtggcaatgaagatactgcaagcttttggagttgtcttcaagaaattgaagatgatactaagggtcttgcactggtttgagttaaagactggatgtatgtgggcatcaatatcatctttggctgatatgacctaa

SEQ ID NO: 20401 - DNA, 231 bp, Zea mays
  Peptide Sequence Number=SeqID_62180
atggccacctggagggttggcccttcttcagtagggaaagcaaggataaatcctagcagcccgaatttcttcttccgatgcttccctgctgattccgaggcgctgatatggatccttcacatggattctgggaaagacatgggtagcaaatactcacaaattgaagaatcagccatgtccccaaacgatgcagttgccagtggtgtgatattgggatttctgggtgcataa

SEQ ID NO: 20402 - DNA, 357 bp, Zea mays
  Peptide Sequence Number=SeqID_62181
atggagtcaccggcggcggctcgctctgctctctttcttgtccgcggcgaggtgcccgcggtgctattcaagggtcagacggctagcgtattcggggaaagggagggcgagtggttagcaggggaaggacgattcccaggagcttctatttatcccccgacgcggttgaacgggtcgggcgcgcaaggattccgcggcggcggcgagctcacgcagtttgttacagcgcaacggaagcgcggggaagacagactgaccgatgggtcccgcggagtcagtgagacaatcccgagtccgcgcagtattggacagctgaccggtgggtcccgcaaatcagtgattctgcgccacgcgtga

SEQ ID NO: 20403 - DNA, 515 bp, Zea mays
  Peptide Sequence Number=SeqID_62182
atggacagacacacctggtcaatcgagtaccgttgcgtagtctatcagcatagtcgcgggttatacccggaccgctgggaggttaccttcttggtgcacctatgggaggacgacctccggagcgggatgactgacggtcttaacctgaagtgttacccctgccgctcgactggcagtactggaagtgtgattgtctcaccagtaggtgaaggcaatcctaggttgaacagcgtagtcaacctagtcattgtgctcaacacggagctggaccacactctagacgaggtgagcagggctcgtggtgagatcgcagagttgaaggcggagcacgcgaagtgccttcataaggactataattctcctgcccccgctaagacacagcacccgtacctggcgaagcccactagggcagctgccgcgccctccacctccctcctctctctatctatgatgcatgggacccacaccccagctgtcttcctcgcgggcgcatccctgcgcgtcgccgaccgcgc

SEQ ID NO: 20404 - DNA, 669 bp, Zea mays
  Peptide Sequence Number=SeqID_62183
atgccgcacgcgccccgccagccatcgccgccgggtattccgcccccaagcccgcgccccctcccgtctccaacgcgcccgccgcccccggctgcccgtgcccctgcagccctgcccccgcgacacgctctacccaccgagcacgcccgagcaggaagccgcggatcctaccggatcctgcccacacctgagcaggcaggtagggatctcgcccacgccggatcaggcaggcgtggatctcgcccccgctgtgcccccgatgcatggctccttgcccccaccgtgtcacgcctgcggggccacggatctcgccaacacgccggtggatctctcccttcccccgtcgtgccccaggccctggtgcgggagtccggggaagcgagcgtcggctcctttaggatcgggtcgtcgatgctgctgggccgcggggtgatgctctgtgtgctcctcttcagctctctgtggcgcctgcgggcgcgcgcgtacgccaccatctcgtgcgtgcgcagcgcggcgctgccggtggcggcgtcctggctgcgcctcaggaatacccacgtcctcctcctcatggtcgtcctcttcgccctcttcttacggaagctctccggcgcgcggtcttgggcgacgctcatgcgtcggtgcaggcaatacgaaaagctcacttaa

SEQ ID NO: 20405 - DNA, 144 bp, Zea mays
  Peptide Sequence Number=SeqID_62184
atggaggctgcgaagaagctccagtcttatttcatcagcctgcagcgtgaggatcaaccaactgcagaagagatgcttcgaaagtttatcttggttacttttgtggatggacatcttggtcgcttttatggttggcttttgtag

SEQ ID NO: 20406 - DNA, 399 bp, Zea mays
  Peptide Sequence Number=SeqID_62185
atggtacccgccaccgtgaccgtccatggcggatctaccgaaggggagaagaagagtggagtgagcgatggagaagaagccggtagcgtgaagaagggaaccttgagggagaagggggctgtggaaaacagggagggagaagggaacatacctcgccgacggcgacgactcgggatggaggcgaatgtggtggcggccgctcgggtggagatggggctcgggatggcacctgggatacggctgagcatgtctgctatcacatttaagaccgtatccagtcttgcaatcatgctcgttaccatggaatgtttagattcgggcaagaactacactttggctttgacattcgacgaggctccatttatctatagcatcgactatattgaagaaagccactaa

SEQ ID NO: 20407 - DNA, 324 bp, Zea mays
  Peptide Sequence Number=SeqID_62186
atggctccccgtggcgaggggcgaggtccaagccgaatcgactgtcgactcggcaatgcactcgtcttcacgccgacctacacgcgaacgacttcaagatctgcgacaaccatcatcgtcgcacgatcagcactgcagcgatgctcttggagcctgagcttagggagtgttcgggtgtccgccttctgccccgactgcgcgtggtccagtggccatccaactttaaggaagggaacccacaacaagacaaagcgttgggacaagagtcctcaggatgaagtccatgacacgaggccaccgtcggcgtgggaacgtggcgcttga

SEQ ID NO: 20408 - DNA, 2463 bp, Zea mays
  Peptide Sequence Number=SeqID_62187
atgcccccacatgacaattttgtagcacacaagcacccacgacttctgcagtctctttgctggttcaaagccattgtaaaacaccaaaaattccccagggctgctgtggtgccagtgaagctccacctcttgcagaaggtccctgatgtccagttctcaagagcatgggccaccgttctcgatgacctagcccttgtcccaacattcgcaactacagcaggggcaagatccttgatactggacccatccaaccacctatctgtccaaaatagagtattagacccatcaccaaccaagattttaaaagatgaaaagaaaatgccaaaagatgttgagaagactgaggtttctcctgaagaagagaagacatcttctaacaaaaccatggatatcgcagagacaactacacaagttgcaacaactctgcatgctgacttgatggcaaagggtaaaagccgtcgtaaactaggcattcaaaaatcactaactcaagaatgtaaacctgccgagggtgctggcgattctggaagtgataaattgtcttactcactaagtaatattattgatctcaaggacaaactctctcattgcttatcatcacgtttgctccgtagatggtgcatgtttgagtggttctatagtgcaattgattacccgtggtttgcaaagagtgaatttgttgagtatttgaaccatgtcaagctaggtcatgttccaagactgactcatgtcgagtggggtgtcatacgaagttctcttggaaagccccgtcgattgtcgaagcagtttttgcacgaggagagagagaagcttgcgcagtatcgtgattcagtcaggcagcattatactgaacttctatctggcgttagagaaggtctaccaaccgatcttgcgcgacctctagcagttgggcagcgtgttatagcctgccatcctagaacaagggaacttcatgatgggaatgttcttactgtcgatcataatcagtgccgggttcagtttgatcgacctgaactgggtgttgagcttgtgaaggatatcgactgcatgcccctacatcctctggaaaattttcctgaatctctcagacatcaaagtgccatcaatggatactacagccacttatcggaagcaaaatatgaggatcagatgaaagagttggctagcggaggtgcagcaagatccacatcgaatttgaatggtaccgatgcaaccttctataccccttctggtcatccgatgagtaccttaatgaagcaagcaaaggccaacacggcagttaatgaggttgcagttgcgacacaacagtcaatgtacaatcaaccatgcacactttcgcagatacaggaaagagaagctgatataagagctcttgcaaaactatcaaagaatgcagcagattattttataattcttcccctaatcctgctcctactccttaatcttgaaatccaccatgcctatcttgctcttcagctccgagaaccaaaggcgcccaagtggcttggtgaggatatccacgagctgtcggatggtctcgacgaactcgaggacaagtccttcatcgacacactcacaaagaaagtgatacttgatgttgatgtgcttgctccgattgtggaggacagtgttctttgcaagggcaatggagggctgattgttcaccatcggagtcggtcgacgagctttttcctgagcttgcccagtagccggcacaaccttactcattggcacacctctatgggcgttgtgatgtactctgtttcgcacgtcgacagtgccaccatctgcttctgcgattaccacgtgacaggggacgatctgaggaagacgagcacaccaaaggtgctcttctgcccatcaatgttgcccaccatgtccacgttgttaaggcctttcatccacaactctgctccgctagtcttggatggaggccatgacgataagttgcgccttgtgcttggcaatggcgccaccctagtcgtgcttcaccttgaagacccacttatgcccaattggcctccacctgagcagtggatcgatgagctcccacgtttcgttgtctttgatcgccttcatcttctcgagcgtagcccgccgccagtgttgatcgcactcagcgtcaatgaaggtgggtgttccttgacgctcatgagcagcaaactcattgtcgggcactttatttgccatgctcgagtcgcagactcgcagcagtgccgatcagaccctccatggtgcggaaacacttctttgctctggtggtgggtgccgacgtgggcatgcacatgtggtggagtcgtgaattgcactgggctcgacagaggaatcccttgttctgctgacataggggatggtggtggagttcttctcactagccattgggggcgggcttgtaggccatcatgggctagtgttgcctctggacttgtcgcgcccgcagttggcacttcatggcccgcgtga

SEQ ID NO: 20409 - DNA, 582 bp, Zea mays
  Peptide Sequence Number=SeqID_62188
atgtacaaccgactaaaaaccttggtgaaccaagtgtgcaacctcgggagctccaagtgggatgaccatgaaatggtcaaggttattctaagatcacttgtatttcttaaccctactcaagtacaattaattcgtggtgatcctagatataagctaatgtctctcgaggaagttataggaaaatttgtgagctttgaattgatgatcaaaggctccaagaagatcatcgagcaaggcgccacctcaacacccgaggtgcaacccgttgcctttaaagcgacggaggagaagaaggaagagtctacatcgagtaggcttcccatcgacgcctccaagctcgacaacgaggaaatggcgctcatcatcaagagcttctgccaaatcctcaagcaaaggagggggaaatactacaagtcccgctccaagaaggtttgctacagatgtggtaagctcggtcattttatcgctaaatgtcctttgtctagtgatagtgacaggggtaacgacaagagggggaagaagaaggaaaagaagaggtactacaagaagaagggcggcgatgtccatgtttgccgggagtga

SEQ ID NO: 20410 - DNA, 300 bp, Zea mays
  Peptide Sequence Number=SeqID_62189
atgaccgccatcgcagcaaaatcatcccaagggcctccctacactgaccactcccctactgcctttgcccctttcaggggcgacgtagatcgggtcgacgattgtgacacagaggtgtcgaggttgctgcagttcttggagaaaggggcttggcgtgggaggtggagctcatgtgatctgatgctgagcgcacaggccgagttcgacgcgaggttggagcacgggacgttcgtgcgcggcccggcagcaaggagtggcaacgacgacggcctggtgcaaggacgagcttgccggcgttga

SEQ ID NO: 20411 - DNA, 525 bp, Zea mays
  Peptide Sequence Number=SeqID_62190
atggcgcagccgaccgttgcagatctgggagccgttggcgcaccggacatgtccggtgcacaccggacagtccgattcacatttaagcacttgtgttggcactcaatcaccaaaatacttagaaatggcccaagggcacatttccctttcacgcacgcggcgcggggactaggctgtgttcagcgcccagagtcccatggtggttgccatggctggcccgccctgttaacgtgttctgggcacgccggcgaggtcgagttccgtgtggcatcgccaaggcggagttcaacgacattgcgcaggggcgacgtagatcgggtcgacgattgtgacacagaggcgtcgaggttgctgcagttcttggagaaaggggcttggcgtgggaggtggagctcatgtgatctgatgctgagcgcacaggccgagttcgacgcgaggttggagcacgggacgttcgtgcgcggcccggcagcaaggagtggcaacgacgacggcctggtgcaaggacaagcttgccggcgttga

SEQ ID NO: 20412 - DNA, 330 bp, Zea mays
  Peptide Sequence Number=SeqID_62191
atggctgaggatgaggcggggccacgtccgtcccgtgtactactactacagcacgtcctactactccttgtctctcgcggcctcggaggtgaaaggccttcccgccgtgactggttaactaggcaggacaaagcggcaatgcgtcgtcttgggttgggaaaggaatgctggaggcgccattgttggacgggggcacaggcgctggagctccgccatagccaaaggaacaagacggcagagtgcgctacgttgcgcacatggacgtcagagacgatacgcatcatcgcgcactgcggcctgcggtctgcggctgctaatcccttccagtga

SEQ ID NO: 20413 - DNA, 1062 bp, Zea mays
  Peptide Sequence Number=SeqID_62192
atgacgtcgggagcggcggcggtgggaggcctcgggcggacgccgacatggaaggagcgggagaacaacaagcgccgggagcgccggcggagggccatcgccgccaagatcttcacgggcctccgcgcgctcggcaactacaagctgcccaagcactgcgacaacaacgaggtgctcaaggcgctgtgccgcgaggcggggtgggtcgtcgaggacgacggcaccacctaccgaaagggatgcaagccgccgccagggatgatgagcccgtgctcgtcctcgcagctgctgagcgcgccgtcctcgagcttcccgagcccggtgccgtcctaccacgccagcccggcgtcgtcgagcttcccgagcccgacgcgcctcgaccacggcagcggcagcaacagccacacccccggccccgccgccgcagcagccgcagcggcggcggcggcctcctccctgctcccgttcctccggggcctgccgccgctccgcgtctccagcagcgcgcccgtgacgccgccgctctcgtcgcccacggcgggcgtcgcggccgcccgccaaggtccgcaagcccgactgggacgccgccgccgccgccgacccgttccgccaccccttcttcgcggtatcggggcggccaccacggcgcccgcgtcgcccgcgtacaacctcgtcaacccggccggtggcggcggcggcgcgtccgcttccgactccatggagctggacggggtggcgggcgcggagttcgagttcgacaagggccgcgtcacgccgtgggaaggcgagcgcatccacgaggtcgccgccgaggagctcgagctcacgctcggcgtcggcgccaacatctttgtcctggagacgagacctggtcgcccggactacctcgggtcgttttacgcgtccagactccagaccccgcggctgcagggagagcgacgggcggctgaaggggactcggcggcactcgggagcaccggccgtccgctagacaatcccgctcgtgcgccgtgccgcgacgcaactggaggctggagcacggtggttcaagctctcgactag

SEQ ID NO: 20414 - DNA, 354 bp, Zea mays
  Peptide Sequence Number=SeqID_62193
atgcccgcagccgagggagagggggcgcgagggcgaggtggcggccgcaacggtaggtgggagcgggcgcggcgcggggcaggggcaggtggtggaggcgcaccatcagcgtggccacggtatgtgcccgtgtgttacgacggaagtaaaaagtttgtatcaaacattgatacagatgaatctctcatgacaatgccacaaaacaaaaggttctcgatcacatctctgccaaaacatgtctcagttttgtcggcgtttcgagaccggagggtccctgggccgacgagtgaaatgtcgccgcgtgccccagcccagatgggtcggcgcgaggccgagcgcgaaggggggaagtga

SEQ ID NO: 20415 - DNA, 324 bp, Zea mays
  Peptide Sequence Number=SeqID_62194
atggatccatgtacacccgcgcacgtgactactgtactcggagcttcgctcggatcgcgtgcttcgccaagtcaaatgaacggctccctgtgccacgtggagcagtccacggaaagatccggtcagaaggcaggcacagggcgggcagcggccgcgaaagacgagactggttcctggctcgaccaaccagccacgacccccggagattgcaggttcaatggtccagtggcatgtggcctaacaatcaatcacagccgactgagaggtatcgaagcaaagctctgctcaagcgcaggcagagacttggaagcgatcagatcatga

SEQ ID NO: 20416 - DNA, 723 bp, Zea mays
  Peptide Sequence Number=SeqID_62195
atggaggcggagaagaagccgccggcggtgtccgacgtgggcgcgtgggcgatgaacgtcgtcagctccgtcagcctcatcatggccaacaagcagctcatgtcctcctccggctacgccttcgccttcgccaccacgctcaccgggttccacttcaccgtcacggcgctcgtcgggtggatctccaacgccaccggctactccgtctccaagcacgtcccgctctgggagctcgtctggttctcgctcgtcgccaacacctccatcaccgggatgaacctcagcctcatgctcaactccgtcggattctaccagatctccaaactgagcatgattccggtggtctgcctcatggaatgggtgctcaacagcaagcactacaccactaaggtcatatccgcagtcatcgtcgtggccgccggtgtcgggatttgtactgtcacggatgtcgaggtcaatgccaaggggttcatctgcgcttgcgtggcagtgttctgcacgtcgcttcaacagatcacaattggctcctttcagaagaagtacaacattggatcatttgagctgctgagcaaaactgcgccaattcaggcactttcactcattatactgggcccctttgtggactactatctaaatgggcggtcattgttgaactaccctttttcaggaggggcaactgttatgtttgggagcaagggaaacgaagaggattgtaggggctag

SEQ ID NO: 20417 - DNA, 297 bp, Zea mays
  Peptide Sequence Number=SeqID_62196
atgcagaggtattggctcatgttgcagaacaccgccagggagcaggaaagcagtatgaagaactgcagaatgattaaaagtcaagactcgaacgccgagaaactgaaggccgttgccacgagcaagtcgacagtggtgggcgggagagctggaggaagcgcgggaacgacaactgtccactacgggtggctcggctggagggcacgatgggaggtagatggcgagctgtatgcctcggtaaaaatgcctagcgaggcggagaagataccgatcaagatggcgaggagtggaagatag

SEQ ID NO: 20418 - DNA, 240 bp, Zea mays
  Peptide Sequence Number=SeqID_62197
atgggggaggtcgctatggggaagaaggaggagctccctgctcagccaaaacagagaagggaaggaagtggtgtgtgggagaagggagagggtgggctgccatttatagagccaagctctggacatgccagactgcaccagcagatggcagcacttgaggtgattcgagcactggttagagagataaagacccacgaaaattggtttgtcagtgggttagaaaacagtggaaactcgtga

SEQ ID NO: 20419 - DNA, 261 bp, Zea mays
  Peptide Sequence Number=SeqID_62198
atggagctccaccacacatcgatgcaagtgctggccaactgcaagtctgaatcaccacgtcttaacactgacctggacagtgctaccctagatctctcaagggtacatgaggagcttgaagatgcacatgcacagattgtagctctcgaagctcagcttgaaggaagaaatccacctgaagctcaagtctttaccatagatgtgtccccgccctgcaagaggattcgatttttgtttgagtgcaatgatcttatagaatga

SEQ ID NO: 20420 - DNA, 243 bp, Zea mays
  Peptide Sequence Number=SeqID_62199
atgcgggcctcagccgacctcgctggagtccgtggtgccgcccccaccgtggccagagacgcttcactggagagggcctccaacggcgagcccagccgagcgttggacagcgtggaagtattcaccgtcgtggccaagaaagagagaaaaccccagttcaactgcccggaggcaagttcaactgctaaaaaagctcaactgcagctgaagaagctcaactcagctgaagttcaactcagctga

SEQ ID NO: 20421 - DNA, 339 bp, Zea mays
  Peptide Sequence Number=SeqID_62200
atggcggccacctccgaggaggcaatcaagcagttctcggcgctcatggagcagcgtgagtcttcttctcttgtgctcctcctcttctttgcaaagaaccaggaaaagattcgccttttttcttcttcttggccactgaactgcagcaatttctttcttgcagtagaggagccgctaaagagcacattccagctaatggattgcttaaactggagagtacagaatgagattgacatcgtgttagctaaacccattctgccatctgatatatatagagttattcgggacacgttacttgttggattgacagggtactccaagcagggacaatctgtttaa

SEQ ID NO: 20422 - DNA, 483 bp, Zea mays
  Peptide Sequence Number=SeqID_62201
atggaaagctacgcttatgaacatggcaggcagagctacatgtgtttggtttgttctgtccgcaactccaatttatgtgttgatagctatcaagcagcggcaggaacactttattctggagtaatagatggttgctggggtatcgactaccgagtggaggatcttgcgcttgctgtggttactgcagtaccacagataattcaaaagcgaacggttgcagaagcacttcatgatgatcactggataagtgatgtgcatgaagggctgtctatggtgggcatgtatgaatacctccagctcagggatgttcttcggatttttggttcagagttctggaacaattgggattacagacatgtgtaccgagtagtgctgaaccaactttcacagtcctcagggaaagaacatcacctttgcagctttgctgctttgcgggagtgtgaggagtgtgaggtctccaatctttatgtcaaggtgttgtga

SEQ ID NO: 20423 - DNA, 555 bp, Zea mays
  Peptide Sequence Number=SeqID_62202
atgcagcacctcgagccctcgtgggaaacgccttccgacaagaaggcacccgggggcttctcgcacctgctggtcgccatcgacaaattctccaagtggatcgaggtccgacccttgaccagcatcaggtccgagcaggcggtggcgttcttcacaaacatcatccatcgctttggggtcccaaactccatcatcaccgacaatggcacacagttcaccgggaagaaattcctagacttctgcgaggaccaccacatccgtgtggactgggccgccgtagctcaccccatgacgaatgggcaggtggagcgtgccaacggtatgattttgcagggacttaaaccgaggatctacaacgacctcaacaagttcggcaaacggtggatgaaagagctaccctcgatggtctggagtctaaggacgacgccgagccgagccacaggtttctcgtcgttctttctagtctatggggccgaggccatcctccccacggacttagaatacggttcgccgaggacaaaggcgtacgatgaccaaagcgaccagaccagctga

SEQ ID NO: 20424 - DNA, 264 bp, Zea mays
  Peptide Sequence Number=SeqID_62203
atgccagaggaaactgtagtttgcatattccgcaagggtctccagaacacagaactatcccaagagttgatccagaagtccccgacaaccatgtttgtccatttccaagtgattgacaaatactccctaagcgaggagggcaatgcgccccccattgaggactacaacaacaagtacaaatccatcatggaggggcgatgcatctaccgtccccaaagcaaccacaaaacacaagatagcctgcacattagggattttgcctag

SEQ ID NO: 20425 - DNA, 339 bp, Zea mays
  Peptide Sequence Number=SeqID_62204
atggtcgatcttgattcgccaccaaagggtggcgtccctttgggggcagatgggtctaccactattgcgtcaatccctcctgcctcaacagatgccgttgtcagcaatgagtctgaaaagggggctatcgcgtctgcctctgtcaccgatggattgaacaaggaactcagaggccctgaagaagaggagccaggggaagtctaccttcctccgttgttagagagaggtatggggttgtcttaccgagaaggaggcctagcatcgggaggcattgaagatgttgaagatggctcatcgtgttgccggcgacgctcgggacgcagcaataaccgctcttag

SEQ ID NO: 20426 - DNA, 909 bp, Zea mays
  Peptide Sequence Number=SeqID_62205
atggcaggctcctctgaggacgggcggcgccgcagtgtcgctgatctacgtgatgcggctatcgcgaggcgctggggcgggtgtaagcaggctgcctcttccagttccagcgcccaatccgtccaatccatggccattgtcgttgcaaacccagaaattgtcttgcagccaacgcccttgccgacgatcgtgacacccaatccctcctcgccggtgcacatggagcccgcaacgcccagtccctcgtccgtgccgattgcctccacgatgaccaatgtttccaacgagagcagcagcggctttgccaagcccatgcacaatgatgcaacggagacagacaacccacccaccgaagccgtcacccacctagatgctgtgcctgcgctgccatcgccgcctccagcagaggtgcatgctgctacgtcatccgtcccaccgccgccgcttccaggtccccaaaatccgaacgggtacacatgcaaactgtgcagtgcgtgtttcccgacgcaccagggcctcggtggccacatggccgcccacaagacaagggagctcgccgccgttccatgcctccgcgacgccaagccggtaaaggagcacaggtgcgggacctgcggcgcagtgttcctcaccggatataaactcggcggccacatgaggaagcattatactggccccaagatcgtgcccaaaaagaagccgcgactcgacgatgtcgtcacactgcaacttctatcgccgagaaccgtcgagcctgcatctaggtcacccgtgccgggcagggtgcttctctttggcgtcgacatcggggcggaggcgtggatgccagcggcggtgcaaggagaagaagaaggctcgtctacgactgcgggccaggccccctcggagcccaccgatggggagcaatag

SEQ ID NO: 20427 - DNA, 894 bp, Zea mays
  Peptide Sequence Number=SeqID_62206
atggcaggctcctctgaggacgggcggcgccgcagtctcgctgatctatgtgatgcggctatcctggggcgctggggcgttaccggcaggcgacggcgctccgggtgttggagcaagcaggctgcctcttccagttccagtgcccaatcggtccaatccatggccgttgtcgttgcaaacccagaaattgtcttgcagccaacgcccttgccgacgatcgtgacacccaatccctcctcgccggtgcacatggagcccgcaacgcccagtccctcgtccgtgccgattgcctccacgatgaccaatgtttccaacgagagcagcagcagctttgccaagcccagcccacccaccgaagccgtcacccacctagatgttgcgcctgcgctgccatcgccgcctccagcagaggtgcatgctacgtcatccgtcccaccgccgccgcttccaggtccccaaaatccgaacgggtacacatgcaaactgtgcggtgcgagtttcccgacgcaccagggcctcggtggccacatggccgcccacaagactagggagctcgccgccgttccatgcctccgcgacgccaagccggtcaaggagcacgggtgcaggacctgcggtgcagtgttcctcaccggatataaactcggcggccacatgaggaagcattatactggccccaagatcgtgcccaaaaagaagccgcgacttgacgacgtcgtcacagtgcaacttctaccggcgagaaccgtcgagcctgcacctaggccggtgcttctatttggcgtcgacatcggggcgggggcgcagatgccagcggcggcgcaaggagaaggttcatctgcgactgcgacccaggccccatcggaggagcctcccgctggggagcagcagtag

SEQ ID NO: 20428 - DNA, 1554 bp, Zea mays
  Peptide Sequence Number=SeqID_62207
atgagcagcagtgaggctagcacgcaagaccatggcgtgccggcgctcgaggcgcaggatagcacggatgaccatggcgtgcccgcgctcgaggcgcccacgcccgaggctacggacaaggtactggccgccatggcgcgactggcgcgacgtcggaggctggagctaaggcggctggggcgcactgcacccgtgggggcggagggagaggtggcgatgcgggtgcgtccggtgtcgggcacctccgcggacacgtcccgcgagtcggcgaaggtggcgcccgagccgcatgaaggggcttctgcggtggcggggtggcccaagcccgtgtcgcacggcgcggtgtcggtgatcgggcggcggcgggagatggaggacgcggtcgccgtcgccgtgccgttcctggtggccgcggcgggggaggagggggacggcggcggggagaaggaggctgagatggagttcttcgcggtgtacgacgggcacggcgggtcacgggtggcggacgcgtgccgggagcggctgcacgtggtgctcgcggaggaggtggcgcgtctgcaccttgtgaagggcggcgacggcgcgcgctggagggaggtcatggaggcctgcttcgcccgcgtggacggtgaggtcgccgtcgtcgagggcgaggtgaacaacgccggccacacggtgggctccaccgccgtcgtggccgtcgtggggccccgtcacatcgtggtcgcgaactgcggcgactcccgcgccgtgctctcccgcggcggcgtccccgtgccgctgtcttccgaccacaaggtattaacaagtgtccagcacccgcactaccgcgccctccctcccaaaacaaattctctactagacttgcaatcaaggggacggcggcaagctgatagctcgccaagtgtcgcgcgcaggccgcaaaaggcaggcccccaaggcctcggcgccggcaccgcgccaacaaaccccctggctttggcgtgcggtcgtgtcgaagcggccgcgctcgtctcgaccgtgccgcagccagataggcctgatgagttggaaagggtagaatcagcgggcggcagggtcatcaactggaaggggtaccgtgtcctgggggtgcttgcgacgtcaaggtcaattggcgactactacatgaagccattcatatcagctgaaccagaggtgaccgttacggagcgtacgcacaaagacgagttcatcatcctggggagcgacgggctgtgggacgtcatgtccaacgaggtggcttgcaaggtggcgaggaactgcttgtgcgggcgcgcggcttccaagtaccctgaaaccgtccacgggagctcggccagcgatgccgccgcggtgctggtggagttcgccatggcgcggggcagcaccgacaacatcagcgtcgtggtggtggagctgaaacgtctgaagtggaagggtggtagacagaatggcaagcttatagaatccaaacggccccttactaggaggcaactcaagactcaagattatgcagcattactttacactgtttacaagacagcactaatgtag

SEQ ID NO: 20429 - DNA, 1524 bp, Zea mays
  Peptide Sequence Number=SeqID_62208
atgaggagctgggcgagggcggcgctgggcgtcgcggagctgctcgtcagcgcggccatccacctgggctacgccttctacatcttcggcaccgcggtcgccgccgacgtctcagcctccctcgtgaagggcctgatggccggcggcggcgtggccaaggacgtcgccgtcgatggtgaggacgaggccgcggcggtgctcgacgacggggccgtgccgcccatcgtgctggtgcacggcatcttcggcttcggcaaaggcaggctgggcgggctgtcgtacttcgccggcgcggagaagaaggacgaccgggtgctggtgccggacctgggctcgctcaccagcgtccacgacagggcgcgggagctcttctactacctgaaaggcgggcaggtggactacggcgaggagcacagccgggagtacgggcactcgcggttcggtcggacgtacgcgcgaggccactaccccgcgtgggacgaggagcacccggtgcacctggtgggccactcggccggcgctcaggtgatccggctgctgcagcagatgctccacgaccgggagttcgaggggcacggcgacacctcggagcgctgggtgctgagcgtcacctccctctccggcgcgctgaacggcaccacgcgcgcctacatcgacgggatgcgcgccgagaaagaaggcggcgggcggtggctgcgccccgtctgcctcctccagatctgccgcgtcggcagcgtgctctaccactggctggacctcccctggctgaagcgctactacgacttcggcttcgaccacttcggcatgtcgcggcgcgtcgtgggcgtggcggggctcgcggagatcctgctcgacgccggcagcggcggcgggcggcgggggcccttcgccacgggggactggatcctgccggacctcaccatccagggcgccgcccggatcaacgccagggtgcgcacgttcccggccaccttctacttcagctacgccagccggcgcaccgccaggtcgccgccaggcagcgccggcgccacggtgccgtccggggtgacgaggatccacccgctgctcttcatccgcgtcctgcagatgtgccgctggcgctaccccgccggcgctgacccgccgtaccaggggtacagggacgaggactgggaggacaacgacggcgcgctcaacaccttctccatgacccacccgaggatccccgtcgagcatcccagcgtccaggtggagaaggatgaggattgccgtccgctgcgcccggggatctggtatatatcgtgctccttccgtcgccgtccgtcccaaaaactcactgcttttcggtttcaacggcaactcgatcaaatgcatggggcgcgcaggtactacaagatcgtggaggcggaccacatgacgttcgtcatcaaccggcggcgaggaggcgtgcagttcgacctcgtctacgacagcatcttcgacaactgccggaaacatgtcttccggactgccccgccgccgacgctaccggtccagagctga

SEQ ID NO: 20430 - DNA, 324 bp, Zea mays
  Peptide Sequence Number=SeqID_62209
atggaagactcgcacccacacgacggacaccaagcagagaggctctaccttgatgaggaagaggtggggggggatagggttgaggggtggcgttgcaatcacttggggaagaaggagagggattggggcagctgcaagagtggaagagagaggggaggggcggccaaagggaaaaattgggtatcacaagtggaggcggggtgggcggtcgaggagcttcgacagggcatgaatttcatggggaaggcgccgcgggaccttcacaggatgcgaagagaattggaccaatacaatgaggatgcaacacctcaaaagaagacataa

SEQ ID NO: 20431 - DNA, 2166 bp, Zea mays
  Peptide Sequence Number=SeqID_62210
atggacgaggagtttgagaagggctcggggcccaagaggttcgagtacggccaactttctgtcgcgaccaagggcttctcggaggaggagaagctcggggaaggcggtttcggcgcagtttacagagggtttctgaaagagctggacctccacgtcgccatcaagagagtctcgaggggttcagagcaagggaggaaagaatacagctccgaggtgaggatcataagccggctcaggcatcggaaccttgtgcagctcattggatggtgccatcagggcaaggagctgctgctggtgtatgaactgatgcccaacggcagcctcgacacccatctctacaacccgactgttctcctaacatggccagtcaggttcaagatcgtgctcggcttgggatctgcgctcctctaccttcaccaggagtgggagcagtgcgtggtgcacagggacgtgaagccgagcaacatcatgctcgacgcgtccttcgccgcaaagctaggcgacttcggcctcgccaggcttgtcgaccacggccgtggatcgcacacgacaaacctcgcgggcaccatgggttacatggacccggagtgcctcgtcgccggccgcgcgggcccggagtcggacgtgtacagcttcggcgtcgtgctcctcgagatcgcctgcggccggccgcccgtggtgcccgagcaggaagaccagggcaggacgcgcctggtggagtgggtctggggcttgtacggacgaagagccgttcttgaagcggcggacgagcggatgggcggcgacttcgaccgcggagagatggagcgggtgatggttgtcgggctggcgtgcgctcatccggactgtagtctgaggccttccatcaggcaggctgtgagcatgctgcagtgtgaggtgacgctgccaacgctgcctgccaagatgcctactccaaatgctcctccaacaaggctccacaccgacattgagctactgtgccttagcgctgccggtccggggtcgctctctgtgggccgtggcggctgtccgatgggctgcaccgggtccaggcacgcgctgcgcggcggcgtccggggtggcagccggtcgccgcgcgcgcggagccgctccggcggcgtccaccacaccgtcgcgctcaagtcctccacgctggggtcgctcagcctcgaccgggaccgggacgacgacggcgctctagcaggcgcggcgaagacgctgatgcggcggcagaaacaacaagtgcgaggctcgccggccaaggcgcctgctcgcgagcccgaggtgatcaacgtgtgggagctcatggacggcctcgacgacgacggcaaggacgatgaggaggggggcgacgccgacgccgacgccgaggggcggcgggagaagtcggcgacagggtcacccgccgagttcgacttcgacccggacgtcatcgccgcgttccggaaggcgctggatgagaaccccccgccgccgccgtcggacgtccccggcaacgaggggtgtgtcgacaagaagcctgacggcccgggcggcgaggtgggcgtcaaggtcaagcagcgggagcgcgagatacagaggttccctggcatcgtgcgcgcgcgggtcagcgcgttccagcagaggatcgacgcgaagctgctcgccaagctggcaccgccgccgcccccggatagcgcccggaaggtggtgctgtacctgaccagcctccgtggcgtccgcaagacgtacgaggactgctggtccaccaggtccgtcctccggagctacggcgtgcgcgtcgacgagcgcgacctgtcgatgcactcggggttcaaggacgagctccacgccgcgctgggctccagccccaacgcgggcaggctcccgcaggcgttcgcggacggcaggcacctgggcggcgccgaggaggtccgccggatgcacgaggccggcgagctggcgagggcgctcgaggcctgcgacgtagtagtagcgcccccgccgagctccggcggcaagggcgttgtcctggacgcgtgctccggctgcggcggcgtgcggttcgtgccctgcgaggactgctccggcagctgcaaggtgttcgtcgaggaggtgggcacgttcaggcggtgccccgagtgcaacgagaacgggctggtgcggtgtcctctctgctcctcgtga

SEQ ID NO: 20432 - DNA, 111 bp, Zea mays
  Peptide Sequence Number=SeqID_62211
atgacgcaccaggctactgacatcgcggccccaggtgtcagcgcagtgtgggaggggggtttagctggactggctatgcgagtgagatgggtcgagacagatttttgttga

SEQ ID NO: 20433 - DNA, 270 bp, Zea mays
  Peptide Sequence Number=SeqID_62212
atggctgttggaagtgtgctgtcgcatggcgcaccagacagtccgtcgaccgttgcgtgtgaagtagccattgctccactggcacaccggacagtccagtgtgcaccggacagtccggtgaattatagcggagcgccctctaattttcccgaaggtagcgagttcagcttcgagtgccctggtgcaccggacactgtccggtggcacactggacagtccggtgcgccataccagggtgcctttaggttgtctcttgctctctttgtttga

SEQ ID NO: 20434 - DNA, 225 bp, Zea mays
  Peptide Sequence Number=SeqID_62213
atggcggcggacccaagcgccgccttgggcaccaaactacgtgggcgttctgggcatgagcgctggtctgggggctcacagggttcctcggatggtggccatggttgtctcggtcgaagtgatcattatgttaattggaacatggagcgaccacctgggaaaacagtgctaccacaagggtttatggacgctgttgaggactcgttctcaaatgctatgaattaa

SEQ ID NO: 20435 - DNA, 2580 bp, Zea mays
  Peptide Sequence Number=SeqID_62214
atgaagtacactcaagtcattctaaaaaagtttgggatgaaggatgccaaactcatcaagacacccatgggaaccaatggacatctcaacctcgacaaaggagaaaatgactcgatttccttaccaactccgcgtgcaccaaagcgtgttcctggaaacatcgcgctgcctctctgcaccatgctgtgcacgcgctttccgatcgcttcatctacctcgccaccgcgcttccgcccagccccagtcaccagtccaccgcgcccgcgcccccgatccagcgatatggctggctccgtagctccccacgctgtggtcctcggtcttctcctgctcgcggggctcgcggcggcgcagagggcgacgacgccggctgcggcggcccccgcgcccgaccccggctgcaacggcatccagctgacctacaacttcgtggaccgcaccaagatccggcccttcgtcagcgacaagaacaagcagccctacgccttccgcgccaacgtcaccgtgctcaactccggcacccgcccgctcaagtcctgggcggcactcgtcacatttcggctacggcgagatcctcgtcggcgtcgacggcgccgtgctcacggggcggcggcgacctgccgtacaacaccacggaggacgccggcaacggccacctcgttctccgggtacccgcatacagacctcctcacgcccatcgccaccgccggggacctgtcgcagatccaggcctccgtcggcatcgtcggcacgctcttcgccgggcccggcccgttcgtgccgctccccaccgcgctgtcgctggacgacccggcctacgcgtgcccggcggcgaccaacgtcactgctcgggtgctgtccacgtgctgcgtcctcacgccggaggccgaggccaacgccactgccatcgacgccaacaccaccgacccgaccaaggatttcctgccgcgcggcaccggcgacctcgtcatcacctacgatgtgctccaggcctacccctccagctaccttgcgctcgtcacgctcgagaacaacgccaagctcggccgcctcgacaactggcggctgtcgtgggagtggcggcgtggggagttcatctactcaatgaaaggagctcacccatcagaggtggacacctcgggctgtatctgtggggcgcctgggcagtactaccagagccttgatttttcgcaggtgctcaattgtgaccgcaagccggtgatccttgacctgcccctgtcccggtacaacgacactcagattgggaagattgacaattgctgcaggaatgggacaatcttgcccaagtccatggacgaggcacagtcgaaatctgcgttccagatgcaagttttcaagatgccaccagacctgaaccggactaagctgttcccccctgctaatttcaagatcgtgggtgcatcatcgctgaacccggactatgcctgtggccagccggtgcctgtcagcccaaccgcgttcccagacccgagcgggcttgactcgacgacgcttgctgtggcaacatggcaggtggtgtgcaacattaccacgacaaagggggccaagcccaagtgttgtgtgaccttctcggcgtactacaacgactcagtgatcccctgcagcacctgcgcttgtgggtgccctgcaaacaggcgagggccaacgtgcagcaccaccgcacaatccatgctgctgccaccggaggcgctgcttgtgccattcgacaaccggtcacagaaggcgttggcgtgggctgagctgaagcattacaatgtgccccggccgatgccttgcggtgacttttgtggcgtgagcatcaattggcatgtctcaacggactacaacaagggctggagcgctcgggtgacattgttcaactgggaggatgtcgacatggccaattggtttgctgccatcgtcatggacaaggcgtatgacggctttgagaaggcttactcgttcaacggcaccgcagtgggcaagaacacgatctttatgcagggtctggaggggcttaattacctggtgaagcagaccaacatgagtgggtccgactaccttgttcctggcaagcaacagtcagtcctctcattcaccaagaagctgaccccggggttaaatgttgttgctggagatggcttcccaacaaaggtcttcttcaatggcgacgaatgcgctatgccacagagaattccgatcagcactggattcagcacccgtctcagcagtggccttgctctggggcggagggcccagtatggtccagaaatcaaagtaaaaaaaagccctagtgtcttcgcatcgcgctcccgcacacagaccgaccagccgcagcccgtggcgcacctgcctgcgcccgccgcctccgtcatccactcaacctcgcccctcggccactgccgcgcggcgcccgcccgcctgccgcaccggccgaatcatccgacggcccttaagctgaggcggtgtggcctaagtagcagcgcggcggtcgccccgtgtctcgtccacttcggccccgacaggctgtccacggtggcgcgaactgcccctcgccggttcggccccgcccgcccgtag

SEQ ID NO: 20436 - DNA, 174 bp, Zea mays
  Peptide Sequence Number=SeqID_62215
atgaatggatcgtcggtgactggctccatctctggtttgcactgtacgcgaccgccgcttgagcagttcttctccaagagagccgaggccagggccgagggttcggtcatgtacccgagcctgtctgatggggaaactgtccaagtcatagtggttggagcggtggtgatatga

SEQ ID NO: 20437 - DNA, 705 bp, Zea mays
  Peptide Sequence Number=SeqID_62216
atggcgaaccaagcaacccaagatttgggcgcggtgcagtgtgaaatggaaggtgatcgttcctactataccaatcttattaatggaggtttcgatacttttgaagatataccagaaactccaattgagttgcagcatactccttcaattgagttgcagcagactcctccagtagtaagggatctgaacatgtcatccaagcaaaatcataaggcaaaaggtaaaaaatttagtgaggatgaggatagactgcttgtttcagcttggttgaatgtcagtacaaatcctactcaagggacaaatcaaactagaggaacattttggaaaaggatttacgtattgtatgaggagaacagaagaaatgatgagaagacaagaaattatgcagaacgtagtgaggggtcattgttgcatcgctggagttctattcaagacgcagtggatcaggctgagaaactattcaaatctcaagatgcccacaatcgtacaaactttgggcagattttgtaccttctggcaattgcaattcgatggaggagaatgtctgctttttgtgtccaaactggagaggctcggcgttcgtacggccaggttcgcggcactgcgcggcggtggccggacgaacagattggggcgtttctgttgcttgcgagggttttgatgacaggattaaattgcaatgtgggtccacctagattcaaatga

SEQ ID NO: 20438 - DNA, 1227 bp, Zea mays
  Peptide Sequence Number=SeqID_62217
atggactactttgatgcaaggcggaagcctcataatgttggtaaaatcattgcagccctggtcctcacaacactctgtatatttgttctgaagcaatctcctggttttggtggcaatagtgtgttttctcgccatgaacatggggttacccacgtcttagtaacaggaggagctggttatattggttcacatgctgctttaaggctcttaaaggataactatcgagttactatcgtggataatctatctagaggaaacatgggagcagtaaaggttctgcagggcttatttccgcagcctgggagactacaattcatctttgctgatctggggaaccagaaatctgtatcctcatttatgcttctaaagctgctttgcttgtgccttttctgcttatggagagttacatccaaagtcttcttttcacttaactggctgccagctgttgcttatgtgggagagagcacattggaaccccttaggtactatcacaatattacatcgaacacactactgattttggaggctatggcatctcatggagtccaaacccttatttactccagtacatgtgctacctacggagaaccagataagatgcctattacagaagccacacctcagttccctatcaatccatatggaaaagctaagaaaatggcagaggatatcataatagatttctcaaactcaaagggagctgacatggctgtcatgattttaagatatttcaatgttattggatctgaccctgagggaagattaggtgaggctcctaggccagaacttcgagagcatggtcggatatctggggcttgctttgatgcagcattaggagtcattccaggattaaaggttaaaggaacagattatcccacagctgatggaacctgcataagagattatattgatgtcacagatttagttgatgctcatgtgaaagcactcaacaaggcagagcctagaaaagtcggcatttacaatgttggaacaggaagaggtcgctcagttaatgagtttgttgatgcctgcaagaaggcaactggggtcaacatcaaaattgagtacctcaacagaaggccaggagattatgcagaagtatacagcgacccaacaaagataaacaaggagctcaactggacagctcattataccgatctcaaagagagcctatcagtcgcatggaggtggcaaaagtcgcatccgcgtggctacgggccaaactaa

SEQ ID NO: 20439 - DNA, 1272 bp, Zea mays
  Peptide Sequence Number=SeqID_62218
atgaatattcgacaatcactgttgcaattgaatgagtcgtcatcagacgatgatgacgaaattagtttcaccgagtatcatatctttcatcagccttcacacagtaaaagaaagcatggtgggtctatcctcggacatttagttaaatttcgagacagacaagcaggacatgcaagaatgtatcaagattacttagcggacaattctacgtttagcttaactgattttagacgaaggtatagaatgagtcgcgatctatttaaacgtataatggctacagtagaagatcatgatgactacttcaagttcaagttcaatgcagccggtacacctggattaagttgtttccagaaagtcaccgcggtatttcgtatgataacatatggagtagttgcggatgctacagatgagtatgctcgtatcggagaaagtacggttatagagagtctgaaaaagttcgtgaaggcaattattaaagtgtttggggatgaatatttgagagcacctaatgaaatggatacatctcggttacttgcaattggacaagaaagaggatttccaggaatgcttggttctatagattgtatgcattggaggtggaagaattgtccttcatcatggcacgacatgtattcaggccatttacatgagcctacaattatattagaggctgttgcttcacaaaatctatggatttggcatgtattttttggtttgcctgggtcgcacaatgatatcaatgttcttcaccggtcaccactattttcaaaacttgctgaagggcaagctccacaagtttactacaacatcaatggacatgactataccatgggttactatttagctgacggcatatatccatcgtgggcaacctttgtgaaaactataccagaaccacaagggaataagcgaaaatattttgctaaagcccaagaagctgtaaggaaggatgtcgaacgtgcatttggagttttacaatcccgttttgctattgttcgtggaccggctcgtttttgggatcaggaaacattaggcgacataatgaaagcatgtgttattatgcataacatgattattgaagacgagggtgaagtcgaccctgatgaacgttttcaagatggtggcgttaatgtgcagccttcccatgatcaacatcccgatttcgacgaatttatagagacacatcgaaaaatcagggacaaagaaactcatcatcagctgcaacaggaccttgtcgagcacctttggcaacatcattcagatcagtattga

SEQ ID NO: 20440 - DNA, 114 bp, Zea mays
  Peptide Sequence Number=SeqID_62219
atgaggtcctccaaggaccatccttaccctgcagcatccagtgtgggcgttcgtgacggctgggaagccaacgatgttgcggtggcccggcgggtaattgaggaccgccaatga

SEQ ID NO: 20441 - DNA, 573 bp, Zea mays
  Peptide Sequence Number=SeqID_62220
atgacgtcaggccaggcttggggcggaaacaaggagaactcacagacgccgtgcccgtgcaggcacccccgcctcctgtgtgtacctcctcaactggatcgcgccgcgctctcctggcaggtggcggatcggcgcgtggagtggagaagaagagagcaggattccatgcgaggtaaatgggggtgggctggggaacagagcagcaggatgcggaggcggcacccaccaacccaccgcggcaggcaggcaggcgatttccccctttcgtccgtcccctctcggctgcgcggtggcgtgacggtggcgcctgctgtgatgcggcttgccgcttgctgcagctgcggcttattgtatctgccgctctggctttgtttgattttgcacggcgattccggcccaaagattttaggtctagcttgcggttttgattttcattttggtgatgggcgcttcgaagaaatcggcgctctgccatcagcttatgctttagagatcagcattatgtcctttggagttaaggattcattgggcgcaccagaggtgcacccaataggtgtagcccccgagctttga

SEQ ID NO: 20442 - DNA, 1122 bp, Zea mays
  Peptide Sequence Number=SeqID_62221
atgctgtgggtggcgcgcctgtccggcttcttatccgccgccatggtgatggtggtgctgtcgccgtcgctccagtccttcccgcccgccgaggccatccgctcgtcgcagttcgacggcagcgtccgcttcccgggccagatcgcggggggcgccaggggggtcgccttccgccgcgccccgtcgttccgcaatgccgccgattgcggcgccggcgcgggcaacggcaccgccgccaatgtctgcgacccttcgctcgtccacacggcgattacgctcgacgaggagtacctgaggggctccgtcgccgcggtccactcggtggtgcagcacgccaggtgccccgagagcgtcttcttccacttcctcgtgtccgacccgagcctcggggacctcgtccgcgcggtcttcccgcagctccggttcaaggtctactacttcgaccccgggcgcgtccgcgggctcatctccacgtcggtgcggcaggcgctggagcagccgctcaactatgcgcgcaactacctggccgacctcctcgagccctgcgtgcgccgcgtcatctacctcgactccgacctcgtcctcgtcgatgacgtcgccaagctctggcgcaccgacctcggcggtcgcaccgtcggtgctcccgagtactgccacgccaactttaccaagtacttcaccagccggttctggtcggaccagcggttcgccgggacgttcgtggggcggcggccgtgctacttcaacacaggtgtcatggtgcttgacctcgagcggtggcggcgagcgggctacacgcagcgcatcgagcgctggatggagatacagaagtcgccgccggggcgcatctacgagctggggtcgctgccgcccttcctgctggtgttcgcggggcacgtggcgccgatcgagcaccggtggaaccagcatggcctcggcggcgacaatgtcctgggcagctgccgcgacctacacccgggacccgtcagcctgctgcattggtccgggtccggcaagccatgggcgcgtctgggcgcggggcggccgtgcccgctcgatgcgctctgggcacccttcgacctgtacggccccgccggcgccggcggcgaggagtcccggtaa

SEQ ID NO: 20443 - DNA, 207 bp, Zea mays
  Peptide Sequence Number=SeqID_62222
atggtgcgtggctggattggagaagcttcgaggaagcagacgaccggtggtggtcgtggccatggacggctgggctggctgtgcgcatggatggatgccctcgactcgacgacggctctacaatcgcctttgctggccctagaaagtggcatgtctacgacatcatggtcatatgctcgtcggggcccggggttctcgctgtgctaa

SEQ ID NO: 20444 - DNA, 1407 bp, Zea mays
  Peptide Sequence Number=SeqID_62223
atggacctgaagcgggcgctggacgtggaggaggaggtggtggacggcgacgaagaggagctcgccggctgctgccccgacgccaagcgccgccggacgtccgtcaagctcccgcttcaactgaagacaagcagcaaacggtacaggctgcagttccagggaaacctgccgcagacgcttttcacaggcaacagggtggaggccgagaacaggcacccgctgcggctagtcctgaccgacgcggccaccagccagacggtcagctccgggcccttgtcctcggcgaaggtggagctcctcgtcctcgacggcgacttcaacgccgacgagcggctggagcacaccgagagggagttcggcgagagcgtggtgttcgagagggaaggcaagaggccgctcctgtccggcgaggtggtcgtcgtgctcgacaggggcaccgcctccgtccgtgacatctccttcacggacaactccagctggatacggagccggaggttcaggcttggcgcgaggatgtcaagggctagttcgattgaagaacgggtgcaggaagctgtgagcaacccgttcctggtgaaggatcaccgtggagaagatacttatgaaacttccgtcctgataaatccagtgtacaagaagcaccatccacctgcattagccgacgacgtgtggcgcctggagaagatcgggaaagacggcgtgttccacaagaagctggctgacttcggaatccacactgtccaagacttcctcaggaacctggtgatggatcagtacggactgcgcagcttgcttggcagcggcatgtcgaacaagatgtgggaatccacggtggagcacgcccgggagtgcgtgctggacgacaggctctactcctactgcagcgggcacgggatcgtgctcctgttcaactgcgtctacgaagtcgtcggcgtggtcgtcgggagccactgcttcaccttggccgctctaactcccacgcagaaggcgttggtggcgaagctgcagcaggacgcgtacaagttcccggaccgcatagccgagttcaaggtgcagtcgcagagctccacggagcagcaggcacccgccgcggtcatccaggccccgcccgcgccggcgcctgtgcccgcgacgcagatgctcggtctcccgcacggtgtcgtccagccttgtgcagcaggctcgcacgatagcctgctgctgagcccgcagctactccagcaccagcagcagccgctcagcgaggcccagctggaggacgtgctacagtcggccagcgccgccgagccgtggttccctccgtttggggcggcgggcgggttcgacgcgcgggacccgttcgacgtgcagttcagcgggtcgcagccgtgcgggctgctgctctccagcaccggcgccaggttgtga

SEQ ID NO: 20445 - DNA, 996 bp, Zea mays
  Peptide Sequence Number=SeqID_62224
atggagggggagctgccattcttgtcgccaccgaggccgtcccgcgtctccttcgatggtcgctacggcttcggctcgccgacatgggtgtctcagctggggacgctgcgtgactcgccctcattgtgcgtctccgacggctgtgacggcggaaacggccgctcgtgcttcggctcgccgacatggggatcgccgctggagacgctgttcaacgcgccctcatcgctcgtctccgacagccgtggcgctggcaatggccccattctcagcacgcccacatcgccgctggagacactgctcaactcgacctcatcgtgcgtctccgacagccgtggcagtggctccgtgttcggtacgccgaagatggcgttgccgctggagacgcttctcgactcaccctcatcgcccatctccgacatccgtggcggtggcaacggctctgggttgagcacgacgaagcaggcgtcgccgctggacagcgagatggagcagaaacgcgatactcgcctgcgcgcgatcaccgagcgctacgatgactgctttcatcccgtctgcgatacactacagccgaactcgcggacctccgcctcgagcgcgcccgcctcggcgccgagaacttgcacctctccctcctcctcgaagagctcgatgccgctgaacagagtaagcaggcgtcgggcggtggctctgaccccgctgccgaacccagcgcaggctgaagctgcaagcaccccgaagagcatctccatacggtcgaaggacttcctctcgaagaagcagccgcagggcgtggccacaccacatcgcctccgtgttcgcccgtctccggcgatggaggtgagcccccaattcctacctttcattaccttcagtttcacaccgcacatactgttgcctgactgcctgttcacctggaaggaaatttacacagaagagcgcactgattccttgaaattggtattaacggggaagctttatgctacaattagatggtga

SEQ ID NO: 20446 - DNA, 336 bp, Zea mays
  Peptide Sequence Number=SeqID_62225
atgtggcaaccgaaggccctctggtctgggagcaccggactgtccggtgtacaccggacagtgtccggtgcaccaccggacagtgtccggtgcgccagaggactccaactcgaactcgccaccttcgggaatttccagaggcgactccgctataattcaccggacagtgtccggtgcgccaaaggtggtcagcctcaggaactcgccagcttcgggaaactccaacggctagtccgctataatttcaccggactgtccggtgtgcaccgggactgtccggtgcgactccggagcaacggtcttctccgcgccaacggctctctgccgcgcatttaa

SEQ ID NO: 20447 - DNA, 258 bp, Zea mays
  Peptide Sequence Number=SeqID_62226
atggcttaccggttagtcgtggccacgcgcgccggcggggagaacaactccgacgagggtggaatggcttctccgggcgcagatctttgcgaatttgggcaagatcgccgtgtaagatttgttcccctgactgagctctatcgtttgcgcatggagccgagcaatttcggctcaagggcagagagttgccgcctcgtcaatgtgtcactgtcacaaggtcgagttccaaggttatctagcgcactaaaacttatttaa

SEQ ID NO: 20448 - DNA, 333 bp, Zea mays
  Peptide Sequence Number=SeqID_62227
atgatgcgatcggacgtgcgcgggggcgacgcggaggaagaggtggaccggaagccggtgatcaagcctggcgtccacgtgacgctcaaggtgcaggacacggcggggccgacccaggagctgcaggcgctcatggacgcctactacgccagcgtgccggacgtcgcgtacggcacgggaaggttcctgtacgacggcgggcggctgacgggggcgcacacgcctgcggagctcgggatggaggaacaggacgagatcgacttcttcaccgagctgttgggtggtggcgggcgacgtgctgctgctgaacctggacgcccggtggtcgcgtaa

SEQ ID NO: 20449 - DNA, 381 bp, Zea mays
  Peptide Sequence Number=SeqID_62228
atgaccgtttgctaccgagatcctctggatccacctatccttgcgacctgtcgtggggctcatgacgccttgccacgcggcttccctgctccggctagatgtcacgcacttaaccgtccacatcgcatcaggtcagggatggccggcctcaggatgaagttcgtcgccgtcgccgccatggccgccgcgctcgtggcgtataagattctctatctgcgggactgcggccaacgaaggttatctagcgtgcagtatgaggggttcgtaatatcacactgcaccgctgtcatttctgcattgaaagaatttttaatggaacgctattttttcttcgggccgacgggccagtccagcttcgggcctatttccgctgtcacgtag

SEQ ID NO: 20450 - DNA, 1836 bp, Zea mays
  Peptide Sequence Number=SeqID_62229
atgcctcatctccaccactactcacccgtgctactgctcctcgccgtcttcgtctacctatcgacacgctacgtgcacggtgaccatgccgacggcggccaccaggaccttcccgccctgctctccttcaaggcgtacaacccgaacgccacggccctggcgtcctgggtcggccccagcccgtgcaccggcacgtggttcggggtcaggtgctacaggggcagggtggcgggggtcttcctggacagcgcctcgctggccggcaccgtggcgccgctgctcgggctcggccgaatcagggtgctcgccgtcaggaacaactccctgtccggcaccctccccccgctggacaactccacggcgagcccgtggctgaggcacctgctcgtctcccacaacaagctcagcggaagcctcagcatctcgctggccgctctacgcaccctgagagcagagcacaacggcttccgtggaggcctggaagcgctgcgcgtcccgatgctcaggagcttcaacgtgtcggggaacaggctcgccggggagatctccggcgacctgtccaggttcccgagctccgctttcggtgacaatcttgctctctgtggtccgcctctgccacaatgtgtccatgcgtacgatgctctaggccggtcatcaggtaactcgagcactagtgctactgccgctgaatctccggacgccagtgtgggtgtttcttctagcaacgggggattcagtaagattagcctgactgcgctcatggccacgggcattggcaacgcggtgctcgtcacggtttcgctggccatcacggtggccatgttcgtctacatgaggagaaagctccggtccgcgagtgatgctcccgacgcggggctgtgcttcgaggaggaagacaagagagcccagggggaagacaggtgccacaagaccggcgggctcgtctgcttcgagggcggcgacgagctgcggctggacagcctcctcaaggcatccgcagaggtgcttggcaagggcgtgtccgggagcacgtacaaggcggtgctagaggacggcgtcttggtggccgtcaagcgcctcagcgcgctgcagttccccgccggccggagcaaggcgttcgaccgccacatgcggctcgtcggccggctccggcaccggcacgtcgtcagcctcagggcgtactgcaactccaacggggagcggctgctcgtctacgacttcctcccaaacgggagcctccagtcccttctgcaagccaacggtgcgctatggaaatattatccaatctgcatgcagttgctgcaagagagaggaggcgcgaggaatctggactggacggcgaggaagagcatcttgttcggcgcggcgcagggcctgaactacatccacacgttcccggcgcgcccggcgctggtgcacgcgaacgtgaagccgtccaacatcctcctgggcgagcgcggcggcgcgtgcgtgtccgagtgcgggctcatgcgctacgccaccaacatccagcagtccatcgccccgcaggccacccggacgcggtgcccgcccgagctgttcctggagcgggacacgggcacgacgacgtcggcgcccgcgtcgagcgggtggcacgggtacgcggccccggagctggcttccggcgcggccgcgcgggcgacgcaggaatcggacgtgtacagctttggaatggtgcttcttgaggtggtggctggcgagggtagcgatgagacgatggggatggtgaagatcggcatgctgtgcaccgccgaggcgccggaggagcggcccacgatggcgcaggtgctcgccatgatgagcgagttcgtgtga

SEQ ID NO: 20451 - DNA, 1290 bp, Zea mays
  Peptide Sequence Number=SeqID_62230
atggcagcggcgagggcgtgcatcgtcgcgctggcgctggtggcggcgctcttcgtggccggatcggcggcggcagcggcggggaatgccggaggccggccgcagctgtcgctcaggcagcggcgccggcagctgctgcggcagcggcaggtgcgcagccacctcaagaggctcaacaaggcgccgctcgccaccatcgagagtccagacggagacatcatagactgcgtgcatatctccaaccagcccgccttggatcatcctttcctcaagaaccacaccgtccagcagcagctcttctacccctcactatggcagcagcactcaaacatgcatgctcccccggcccctttgcagatgcggcctgcataccacccggaaggtctgtacgacgacgagtccaaggttgcatcgcagcggaacgcgcagacgatcacccagatgtggcatcagaacggcaggtgccccgagggcacgataccgatcaggcggaccaaggaggaggacgtgctgagggccagctccgtcaggaggtatggcaagaagaagcgcaggagtgcccccaaccccatgtcggttgaccctgacatgctcaacgagagcgggcaccagccgaagatcgagcaggccaatgagttcagcctgtcccagctctggatcctgggaggctccttcggccaggacctcaacagcatcgaagcaggatggcaggttagcccagacctgtatggggacaacaacactaggctcttcacctactggactagcgatgcctaccaggcaacaggatgctacaacctgctgtgctcggggttcatccagataaacaaccagatcgccatgggcgccagcatcttccctatctccaactacggcggctcccagtatgacatcaacatcttggtctggaaggaccccaaggagggcaactggtggctgcagttcggcaacgactacgtcctggggtactggccgtcgttcctcttctcgtacctggcggacagcgcctccatgatcgagtggggcggcgaggtggtgaactcggagcccgacggcagccacaccagcacgcagatgggcagcggccacttccccgaggaagggttcggcaaggccagctacttcaggaacgtccaggtggtggactccaccaacaacctcaagccgcccaggggcgtcggcaccttcaccgagcagtccagctgctacgacgtgcaggacggcagcaacgccgactggggcacctacttctactacggcgggcccgggaagaactcaaactgtccatag

SEQ ID NO: 20452 - DNA, 543 bp, Zea mays
  Peptide Sequence Number=SeqID_62231
atgggtgccccggcgctaccatgcctccgcctgcgacaccgtgcccccgcccccgcttccgtcatcacgcaagctctgctgtcaatgtcgcccgactgccccatcctcagcgccccacccccgttcgcccctagatctggatcccgcccatcgtcggtgcctcctcccccgccccccagagacccgtatcccgccgctcccccgtcaaactccccagtctcctttttccccgtctccccctccaagcacgcgccaccgacctcctcggcgcctgcgtccaatgtcggggcctacgccagccggagccccaccctcatccgcctggcgccagcgctcgctagggcggacctcctggccacgatcggactaccccatgtttctgatgtagtggtggacattgtatgctaccagcgatttggccataatgaaattgatgagtcgtccttcacccaacctatggtgtacaaggtgataaggaaccatccaagtgcgcttgcaaacaatgttgttagagtctggaaagatctcaaaggaagatactga

SEQ ID NO: 20453 - DNA, 324 bp, Zea mays
  Peptide Sequence Number=SeqID_62232
atgccaagaagcctgcgcctggggagccaccagcagcacccgccggctctgaagctcagttcctctcaggagacgacggcgatcgcggcggcgatgaacacgggcaggccgacggcgaggatggacgtggaggtgaacgagtaccaacagtcgggccccaacaaccgccacgatccacccattcttggccatttccttgttcaaaggatctacgccctcgcgacatgcttggaggtttcagacttccagactcgcaggaccacgcagggactcagggagtcagggagccaggatgtcgcgccgtcacgggagcgggagggctga

SEQ ID NO: 20454 - DNA, 312 bp, Zea mays
  Peptide Sequence Number=SeqID_62233
atggcggagtccacaggacttataagctcacgcccccgtggatctcggtgtgccggtgccccaatccatgagctgcacgcgcacgtgatctccgccgtgatcccgccaggtgcggtgttcgttggaggagagatagctgcaaattccgggcccactagtcagtcaacgagcgcgagctacgcggaggaaggtgcgttcacttacacacgggtcccaccgcacagcggcataagcacgcgggagagggcgccagcgcgcgtgcgtgagatggggcagctgacacagaggtcccacatgtcggtgccggattaa

SEQ ID NO: 20455 - DNA, 255 bp, Zea mays
  Peptide Sequence Number=SeqID_62234
atggcacccccggacagtcccggtgcacacccggacagtccggtgctacagcccgagagcgcctacctgcggcctctctgcgcagaccgtccggttgtcccaccggacagtccggtgcacaccggacagggttatggtggttggggagcaccggaaggacaagaagggaggataattttgtcctggtttgggcaaggaggtggctttgttcctttcggtataaccgttaagagaaggatatcgatgatcgggtaa

SEQ ID NO: 20456 - DNA, 1116 bp, Zea mays
  Peptide Sequence Number=SeqID_62235
atggcagctttcgccgcgctgttcgaccccctgtactgcccggaggagcacctcgatctgtaccgcgacgaacccggcgagggtgcggacgagcagtggccgggccagcacggacagcaggagccggctgtcctcgacgacgagctgccggcgctgttcgaggcacaccgggccaaggagggggtggtgctggcggaggatggcgggtacggcggcgcagctgggcgtgaggccgcggtcggctgggtttcacgcgccgcggcgcggctaggcttctccgcgctcaccgccgcgctcgccgccgcctacctcgaccgctgcttcctccccgggggcgcgctccggctcggcgaccagccctggatggcgcgcctagccgccgtcacctgcttcgcgctcgccgccaaggtcgaggagacgcgcgtgccgccgctcctcgacctccagctctacgccgccgctgacgccgcggatccgtacgtattcgaggccaagacggtgcgccggatggagctgctcgtgctctccgcgcttgggtggcggatgcaccctgtcacgcccttctcctacctccagcccgtcctcgccgacgctgcgacgcgcctgcgtagctgcgagggcgtcctgctcgcggtcatggccgccgccgccggcgacggcggcgacggcgacggcgacacggagctcctggcgctcatcaatgcccccgaggacaagaccgccgagtgtgccaagatcatctccgaggtgacgggcatgagcttcctcgcctgcgatgtcggcgtgagcgccggaaataagcgtaagcacgcggcggcgcagttgtactcgccgccgccgagcccgagcggcgtgatcggcgcgctgtcctgcttcagctgcgagagctcgacgtccgccaccgctatggctgcggcggtcggcccgtgggcgccgtcggcgtccgtgtccgtgtcgtcctctccagagccaccaggtcgggcccccaagcgcgcagcggcggcgtcggcgtcggcgtcggcgtcagccggggtcgcgccaccggtccaggtcccgcatcagctaccccccgacgaggagagccgcgacgcctggccgtccacctgcgccgcgtga

SEQ ID NO: 20457 - DNA, 321 bp, Zea mays
  Peptide Sequence Number=SeqID_62236
atggcatactgcccgttcatttgtcatacggggcgtacacccggtatggtgtatctactgtgcattatccggtatacgggtcattgtagaagctctgatgctgagaacccccatgaccagggtcgactggactctcgaggcagtgggggcgcacctaggaccccgtttcgtctcgcagacttgctcgacggggacttggtcgacccggtccgcctcaccgacttgctcggtggcgacttggtcggtcgctccgcctcgcagacttgctcgatggggacttggtcggtcgctcccgatagtcgcatagaggggggtgaatag

SEQ ID NO: 20458 - DNA, 336 bp, Zea mays
  Peptide Sequence Number=SeqID_62237
atggcgcacgtcacacaagtctacttcatgttcgagctcctccatggacgcagggatcttccgcggttcagggagttttatggccgaaggcttctgctgtgtcaccacgggtcaaacagcgagggaaaacgcagagagagagagagaggagggagatggagccggatgtcgctgccgcgtcccacacggagagatccagaagaagatggagcttcggtgccgctagtgtcgtgggccgcgccgtgcgggagcgggaactgctttgccatggccgaggaacttcaccgggccgccgcaaccgcgctctgcaccgccgccagggagcttcgcgtgtag

SEQ ID NO: 20459 - DNA, 342 bp, Zea mays
  Peptide Sequence Number=SeqID_62238
atgggggtggatcagacggttggtggcagcgaaatcaaggccggggcggcgttggcggtgggcgaaattggggacagggctgtaggagatccacctgtgcccacgacgatggagcccaacacggaccctcgttgccactgctccattgcgacgcgacgagggcgaggttcacagccccctgcctttggcccttccttggctcttggtgctagaggcgcagagcgtggaggtgaggtgaggccgtcaggggacgagcaagtagggcaagccggagctttatggcttgagagcaactccaacaccgatcctatacatataaacaaattgaaatatagggcctaa

SEQ ID NO: 20460 - DNA, 552 bp, Zea mays
  Peptide Sequence Number=SeqID_62239
atggccgttccttcgcagccattggatttgcacgacgacgccgtaagatgcgaggtcggtgacggcctggtccgacctagtgctgagaattgggccaggccgggccagcccggcccaagctcatcgtgcttcgtgtcaaacgggttcgggtcgttttcgaagtcaactatgaaacaactgatgtctatcaacatgtacgaaaccatcgagcgcggaaaagcagtgcgtaatcgacctgtcgtcacggctgcgatggcctgggaggatgctagcagcgtcaccgacgacacccccgcgacagcgcaagagcaagagcaagagcaagccgtcgctcgacgtgggcatccgctgcgcatctgggcgctccagctgatgctttccggagcaactgtcgtcatcggcgcggccgccgcgccggtgccggtgccgccgcctcagctgtttctggcgctgatggcgtggctcgtcgagttggtggttcatgtttgttatgttagcctaagatactcactaatcaaacctgtactcccattttcaagaagcaaatgttga

SEQ ID NO: 20461 - DNA, 827 bp, Zea mays
  Peptide Sequence Number=SeqID_62240
atggccgcagcgcaggtggacgctggaggcacggcccggttggatgcgatctcgccgtgcgctacagcttacgatacggccgcccgattccccgtcgaccgccgcctcgcacccagttccgtcgacgtcgaggcgtcggccgtcgcgcgccgtgcttcctggaatcctggatgccccatcctcggcacgtcgtcggtcgaggtcgtggtcgtgagggaccaggtgccggcgatggagcataggtatgatcctacctccattaatcatgatttggtgttgatgggtcaaaccccagacgatgtggacgacgtgcacgatggtttggaggatctctttggttccactgcccctacccctaaccctacccctaaccctaccataaaccttggcgacgacaatgtcgttgccgagggcgaggctctccagatgctactgcctccactacggcaagcactgaggacttcaaatgctacccctggtgaaggtaagagcaaatatgcttgggatttggtgtttggtgcagatggcattggtagcagttcttcaatggcactgggtgctggtctgtgtgcctttggtgccagtagcagttctgggatggttcctgaactctcaagaaggacatctgctagtgctttgcttcatgcggcaagcactcctggtatttctggttctaaactagctgcttatctagatagtgacactgttcagaagaatggtggagatgctttcctgctaaaggactgggaggcagcagatgcaagaatgcagcacacaacagaagatgagatccttgaagagtccttcagagatttattcattgatta

SEQ ID NO: 20462 - DNA, 147 bp, Zea mays
  Peptide Sequence Number=SeqID_62241
atgaccggtggatctcccttgcaggccgacaagatctcagcactggaaaagcctgacgcggatgtcgatgttgccgcagaagtcgtgttgcgccacagtcgtgtcccggtgatgttggtgctcgaaggtgatgaagatgtcctctag

SEQ ID NO: 20463 - DNA, 3069 bp, Zea mays
  Peptide Sequence Number=SeqID_62242
atggccgtcatcaaggatgccttcctcaccgcctgcggccacagcttctgctacatgtgcgtcgtcacgcacctcagcaacaagagcgactgcccctgctgcgggcactaccttaccaaggcccagctctacccaaactttctccttgacaaggtcggatctgctgatcaccatattcattacttcgatttacgtaatccaagtgcgcctgtccatgtttttggggggcacaagaaagcagtatcgtatgtcaaattcttatctaacaatgagcttgcatctgcatcaacagatagcacgttacgtttatgggatgtcaaggataatttgccggtacggacattcagagggcacaaaaatgaaaagaacttcgttggattgtctgtgaacaatgagtatattgcttgtggaagtgaaacaaatgaggtttttgtttatcacaaggctatctcaaaaccagcagcaagccatagatttgtatcctctaacctggatgatgccgatgatgatcctggttcttatttcattagtgctgtctgctggaagagtgatagccccaccatgttagctgctaacagtcagggaaccataaaagttcatccgccagtccatgacccacgcgacgaggccacctccgacgcgtgggtgcggcgccacccggcgctcgtccggctgacgggcaagcaccccttcaactcggagcctccggtgccgcggctgatggcgcacgggttcatcaccccggcgccgctccactacgtgcgcaaccacggggcggtccccagggcggactggtccacgtggaccgtggaggtgacggggctcgtgacgcgccccgccaagctgaccatggagcggctggtgacggagttcgaggccgtggagctccccgtgacgctggtgtgcgcgggcaaccggcgcaaggagcagaacatggtgcgccagaccgtgggcttcaactggggccccggcgccgtctccacgtccgtgtggcgcggcgcgcggctccgcgacgtgctgcgccggtgcggcgtcatgcgcgccgcggacggcgccgccaacgtgtgcttcgagggcgccgaggacctccccggcggcaagtacggcaccagcctgcggcgcggggtggccatggacccggcgcgcgacgtcatcctcgcctacatgcagaacggggagccgctggcgcccgaccacggcttccccgtgcgcgtcatcgtgccgggcttcatcggcggccgcatggtcaagtggctcaggcgggtcgtcgtcgcgtccgacgagtccgacagctactaccactaccgggacaaccgggtgctgccgtcccacgtcgacgccgagctcgccaatgccgaagcgtggtggtaccggccggagtacataataaacgagctcaacatcaactcggtgatcaccacgccgggacacgacgaggtgctgcccatcaacgccctgacgacgcagcggccgtatacgatcaagggatatgcatactccggtggcggccggaaagtaacacgggtggaggtgacactggacggcggcgagacgtggcaggtgtgctcgctcgaccacccggagcgcccaaccaagtacggcaagtactggtgctggtgcttctggtccgtcgacgtcgaggtgctcgacgtgctcggggccaaggaaatcgccgtccgcgcctgggacgaggccatgaacacccagccggagaagctcatctgtaacctcatggtgagttaccgcttcatcgtgcttcctttccgggtcaacgcgtgccggccgcacaagggcgagatcggcctggtgttcgagcatccgacgcagccgggcaaccagccgggcggctgggatggcgcgtcagaagcacctcgagacgtcggagagcgcgcagggcacgctcaagaagagcacgtccacgcccttcatgaacacggccaccgcgcagtacagccatgtccgaggtgcgccgtccacaagtccccagactcagcgtggatcgtcgtgcacggcccacatctacgactgcacggggttcctcaaggaccacccgggaggcgcgacagcatcctcatcagcgccggcaccgactgcactgaggagttcgacgccatccactcggacaaggcccgcggcctcctcgagacgtaccgcgtcggcgagctcgtcgtcaccggcagcgactactccccacagaacagccacgccgacctcagggccatcgacgaggcccctgctgcagccgcgccgctgccggtgtcgaccgtcgcgctctccaacccgcgggagaaggtcaagtgccggctcgtcggcaagaagagcctgtcctacaacgtgcgcctcttccggttcgcgctgccgtcgccggaccagaagctcggtctccccgtcggaaggcacgtgtacgtgtgtgcgtcgatagacggcaagctctgcatgcgcgcgtacacgcctacgagccccgccgacgaggtcggccacgtcgagctcctgatcaagatatacttcaaggacgaggaccccaagtaccccaacggcgggctcatgtcgcagcacctggactccctgccgctcggcgcgaccatcgacatcaagggccccgtagggcacatcgagtacgccggccgcggcggcttcgtggtgaacggtgagcgccggttcgcgcgaaggctcgccatggtcgccggtgggacgggcatcacgccggtgtaccaggtgatccaggccgtgctgagggaccagcccgacgacgacacggagatgcacctcgtgtacgcgaaccggacggtggacgacatgctcctgcgtgaggagatcaaccgctgggttgccgcgtacccggcgcggctcaaggtgtggtacgtggtgagcaaggtggcacggccggaggacgggtgggaatacggcgtggggagagtggacgagcaagtcttgagggagcacctgcccctgggagacagcgagacgcttgcgctcgtgtgcgggccgccggcgatgatcgagtgcacggtgcgcccgggcctggagaagatggggtacgacctcgacagggcttgccttgtcttttga

SEQ ID NO: 20464 - DNA, 411 bp, Zea mays
  Peptide Sequence Number=SeqID_62243
atgctctcggcggcggcctacctcctcatcttcctcctacacctgtccgcctcgacgacctgcgatgccgccagccagaaccacgacgtgcattaccatccggcgatgatgatggcgcggcggggagggccgacgccgcagccgtcgcccagcagcgtggaggtggctggcgtcgtcggaggcgccccgcagccgcccgtgtcgttcgccgtggaggcggggaagcgggacaccggcgcggcgaggatgatggagccgtctccgatgccggcgccacgcggcgagggagcgtcgtcagagtcagaggcctctgcgacggagagcgcgagtgacgacgtgagcgtggactacgcggggcccaggacgcacccgcacgatccacctgctggccccgcaaagtcaattgattga

SEQ ID NO: 20465 - DNA, 2371 bp, Zea mays
  Peptide Sequence Number=SeqID_62244
aaataatgatgatgatttacttgctagaattgaagaattgaacatttctcttgctagccttaggattaaaaatgaaaaattgcttgctaaggctaaagattttgatgtttgcaatgctactatttccgaccttagaactaagaatgacatgttacaagctaaggttgtagaattaaaatcttgcaaaccctctacatctattgttgagcatgtatctatttgtactagatgtagagatgttgatattaatgctattcatgatcacatgtctttaattaaacaacaaaatgatcatatagcaaaattagatgctaaaattgccgagcataacttagagaatgagaaatttaaatttgctagaagtatgctctatagtgggagacgccctggcatcaaggatggcattggcttccaaaagggagacaatgtcaaacttaatgcccctcctaaaagattgtctaattttgttaagggcaaggctcccatgcctcaggataacgagggttacattttataccctgtcggttatcccgaggacaaaattaggagaattcattctaggaagtctcactccggccctaaccatgcttttatgtataagggtgagacatctaggcaaccaacccgtgctaagttgcctaagaagaaaactcctagtgcatcaaatgaacatagtatttcatttaaaacttttgatgcatcttatgagttgactaacaaatccggcaaagtagttgccaaatatgttgggggcaagcacaaggggtcaaagacttgtgtttgggtacccaaagttcttgtgtctaatgccaaaggacccaaaaccatttgggtttatgcatccgggggctcaagttggatactcgacagcgggtgcacaaaccatatgacaggggagaagaagatgttctcctcctacgagaaaaaccaagatccccaacgagctatcacattcggggatggaaatcaaggtgtcactgtctttagaagaagtgatgattcaatagcatttaagggtgtgttagagggtcagctatacttagtagattttgatagagctgaactcgacacatgcttaattgctaagactaacatgggttggctctggcaccgccgactagcccatgtcgggatgaagaatcttcacaagcttctaaagggagagcacattttaggactaacaaatattcattttgagaaagacagggaaaaatctcaaacccaagagaccttaaagggattcttgagacgggctcaaaacgagttcggcttaaggatcaagaaaattagaagcgacaatgggacggagttcaagaactctcaaatcgaaggctttcttgaggaggagggcatcaagcatgagttctcttctccctacacgccacaacaaaatggtgtagtggagaggaagaatcgaactctattggatatggcaaggaccatgcttgatgagtacaagactttggatcggttttgggcagaggcggtcaacaccgcttgctatgccatcaaccggttatatctacaccgaatcctcaagaagacatcttatgagctcctaaccggtaaaaagcccaacatttcatattttagagtctttggtagcaagtgctttattcttgttaaaagaggtagaaaatctaaatttgctcctaagactgtagaaggctttttactaggatatgactcaaacacaagggcatatagagtctttaacaagtcctcaggacttgttgaagtttcttgtgacgttgtgtttgatgagactaacgcctctcaagtagagcaagttgatcttgatgagataggtaatgaagaggctccatgcatcgcgctaaggaacatgtccattggggatgtgtgtcctaaggaatccgaagagcctccaaatgcacaagatcgaccatcctcctccatgcaagcatctccaccgactcaaaatgaggatgaagctcaaattgatgaagtagaagatcaagcagatgagccacctcaagatgatggcaatgatcaagggggagatgcaaatgaggaagacaaggaggatgaagaacaaaggccgccacacccaagagtccaccaagcaatccaacgagatcaccccgtcgacaccatcctcagcgacattcataagggggtaactactagatctcgtattgcacatttttgtgagcattactcttttgtttcctctattgagccacacagggtagaggaagcactacaagattcggattgggtggtggcaatgcaagaggagctcaacaacttcactaggaatgaggtatggcatttggttccacgtcctaatcaaaatgttgtaggaaccaaatgggtcttccgcaacaagcctgttagcatggtgtggtga

SEQ ID NO: 20466 - DNA, 210 bp, Zea mays
  Peptide Sequence Number=SeqID_62245
atggcaatggatgggactctggccgtggttgtctggctgatcgcgattcacggtggcggtctgggcgtctggcggatcgcggctgcggttggcgtccgacgatcaaagattaagagatcgctgctggctgcggagctcgcgcagcaggcaagctacgacgattaccataaggagaggacgagtactggtgcttactactacggccgatga

SEQ ID NO: 20467 - DNA, 813 bp, Zea mays
  Peptide Sequence Number=SeqID_62246
atgctgcccaagaaatcattgtcaggatatcagaaaagaaagaagagaaaacatgaagatcaattggttgtatcgcaaaagggtgctttacataaattctttggtgtttcaagtaatgttgatgtcaatgaagttgaagggcatgaatctgatcatgctcatgatgatgggcaacaggaccatgatcaacaatatgatcataatttaaatgctgaagatgtggtcattgaagatggttcaatggaagaaaatttaattgcagcaattgatgctgttgaggatagtatgatgcaggaaaatttgcagccctcatgtgatcatgaaaattcaaatgatgatgaacaagatggttctggtttatctatctttgatcctagaacatgggataatcttgacaacaacaaaagggatgtcttaactgaaagggggctggtaagagaattgaatctagtttttcttgacaacaacatgggaaaattttattcagaattaaaggtgttgcaagtgagtttattggattcttcaatgtcagcacctgagattctgaagtttgttatggatgcagattgttatccaaatgttacagttgtctatcgaattctcttaactgtagctgtgactgtagcctcagctgaaagaagtttctcaaaattgaagttgttgaagaactatcttagatcaactatgtcgcaagaaagattgaatggcttggctatgtgctctatcgagaaggatatcttggacactattgatttcaacaccgtccttgatgaatttgcatcaagaaatgcccgaagaagtatcttttcatga

SEQ ID NO: 20468 - DNA, 426 bp, Zea mays
  Peptide Sequence Number=SeqID_62247
atgatgtgcaggaaatctggaagtaataatggtgttgaaagaaattgggctgaccagatgatgaaatcggctccggcatatacaccaatgcaaactggtgtgcatttggcactgaagagcaagatcaatcccaaggtcagagtaacatggataacaacacatttggacagccgcgatcctacgaacataatcaggcttaactttgtcatgctcgatgaagaggtatgcatgcagtttggtgccattccaaacattgagagaaagggacaaagacaacacggtctgttcagtgaaacagcatccgttgcattatggggctcccacgctgacgatttcaatgctgacgaatacatgcagacaagagccactggttttcctttttcgttggtgaaggtggaggagatgggggtggacccaaggtgctga

SEQ ID NO: 20469 - DNA, 357 bp, Zea mays
  Peptide Sequence Number=SeqID_62248
atggcgcaccgcgaggcgaggctgaagacggagcttgctccggcgtgcggtgctagcaggcgagctcggctcggcgactcacaacggcgaaggcgatcaactacgagccaacgcggaggtgagactggcgcgctgggagacttgacggcagcggcgcagtgctgctccggcgcatgcagctgggcgagcgagacagctccaggcgcgataccatggcctgcggctacagccggtcggctgcggtgcgcacgggcccgaccctgccttgctgcgtccatggggttgtctgcgcggcggcctgagggcgttgggcggccaacgcggagccagcgagaggagaggaggcaggcagagtag

SEQ ID NO: 20470 - DNA, 378 bp, Zea mays
  Peptide Sequence Number=SeqID_62249
atggctaaaggatatgatatgggtgttcaagagctcaacgtgcacggcgagaacgatgaagaacgccgccgctgccaagatcgccaagaaacgcagcagaagtaccagcgaggagcagggacggcgaggcgcctccatttttatcttgttgctgtcgcggtggtgccggtggcggctgcttccaccaagtcaagtcaggctagagctctcgactggtcgtacaagcagctgcagctcgtcgtctcggagggcgcctctactctgattccatgcgctatggttgatgaaaaagatgggcggactgttgtggttcctgaagttggaatgacgctcgagttcgaggaagatgcttatgagatatacaatacacctatgccg

SEQ ID NO: 20471 - DNA, 258 bp, Zea mays
  Peptide Sequence Number=SeqID_62250
atgtggcccatgcaaccatgggacattgacattgttggcctctgccgacggctcaagacaacctcaagcatgcctttgtcatcatcaaaggtttcaccaagtggacataggcgaaggaggattaaaagcatacacaataagaagggcatgatcgtgacgaaggctatcgatgctccgaagctatgcgcaagggagctttggcttaatcgcggaaaaaggaaccaacttaaaggggaaaaggctattcagtcctcatag

SEQ ID NO: 20472 - DNA, 879 bp, Zea mays
  Peptide Sequence Number=SeqID_62251
atggggaagttggacagatttttggttctatgtacggggtggagaaggctaaggtgccacaggctggccacaagagggagattaggtgggggtttcgtcgaggaagttgagggtgaagccaccaagcttgttggtttggttacggacaacaaaattgctagaagtttggatattcgaaagagacctgttcaggcgggagcgggacaaccgctggagtcaagtggaaggcgggaaagcatgtgcggatcacctacgagctcaccacatgatcttgatgttgacaacgacaccttcatggagaagttgaccaggattatgggtctgcccgatgtcattcaaggcctaatgaccttttatatccatgttacatatgagtgtagctttgaggcattggcccacaaagggtgcagtgacaatagtcgtctagtgtcgaatgacttcattgttgaccacaacgtttacacagatgtctgctctgccgtgagacaagatcccatggctatggtggggagggctcacttggaggcagcaaaccttttggcgtcgcaacctccccttgtggtggctgcctcgacaaagccaatgacatcaatgacacatggagcgaagtctagcaaaggggatctatgtgcctacactagagagacaaaatgtcttcgacccgactttgaaggatatcatcaaggcggggacctcaaaagacattgtggtgacaaagatttcaaaggatcccatcgtgaggagggcgaggcatattgttatgtcggatcttatcttgatcctactgtgccatcacgtgactttgaatcatttcgtgattcgtttacaccattatgtgtgtcttcacttagatcttaccttgatctggttgtgccctag

SEQ ID NO: 20473 - DNA, 1005 bp, Zea mays
  Peptide Sequence Number=SeqID_62252
atgagcgacgacaggagaacggtagcgtacgatgctgaagccggcgacggtcatgagaggcaagggacggtgtggacggcgacgtcgcacattgtcgccgtggtggcgggctccggcgtgctggcgctgccgtggacggtggcgcagttggggtgggtgctgggccccctcgtcctggtgggcttctcctgcgtcacctactacacctccgcgctcctcgccgactgctaccgctacccggaccccgtccacggcgccgtcgtcaaccgccagtacgtcgacgctgtccgctgctacctggtacgtgaacctatgggccactctcgtcggctacaccatcaccgccagcgccagcatgatgccatgaagcgggcctctttctacggcctcggcgccgccactgccttctacctcgcgctgggctgcgccggctacgccgccttcggggacgacgcgccggggaacgtcctcacgggcttcgccttccacgagccctcctggctcgtcgacgccgccaacgcctgcgtcgtcgtacacctcgtcggcgcctaccaggtgttcgcgcagcccatcttcgcgaggctcgagagctgcgccgcgtgccgctggcccgacgccaaactcgtcaacgccacctactacgtgcgcgtgccgccgttcctcctgcgctccgcgtcgtcgccgcccaccgtggccgtagcgccgctcaagctcgtgctgcgcaccatcgtcatcatgttcacgacgctcgtggccatgctgctgcccttcttcaacgccgtgctgggcctcatcggcgcgctgggattctggccgctctccgtctacttccctgtcagcatgcacatggccaggctcaacatccgccgcggcgagctccggtggtgggcgctgcaggccatgagcttcgtctgcctcctcgtctccatcggcgccagcatcggctccgtgcaggacatcgtgcacaacctcaaggccgccgtgccattcaagaccgtaaattga

SEQ ID NO: 20474 - DNA, 150 bp, Zea mays
  Peptide Sequence Number=SeqID_62253
atgtcgtgtgcgttcgacgactactatatcaaggactatggcgtcatcttggcaccagagagactgatgggcacggatcaggtcaagacctcgcctaccaagggacgcagtctcacctcgcctgaccccggcctcgggcgggaacagtag

SEQ ID NO: 20475 - DNA, 195 bp, Zea mays
  Peptide Sequence Number=SeqID_62254
atgaagctgtggaaggagacttccaggagttccaagactacgacgagttctaggtgtgggttagcggcaacccccagtcggctgcctgtgaaggccgcgtttatctacgtttcttttccgcactttgatttgttactctgtggatgtcttggacatcttgatgtaattaaagtacctttccgctatttactttga

SEQ ID NO: 20476 - DNA, 216 bp, Zea mays
  Peptide Sequence Number=SeqID_62255
atgagggtggaatgggacgcccttagcttaataattagaggaactgggtgtagttcgctttgccgtcgtgccgttaatggggctcggtgtggtgatgaggatgatggtttcgattatgattatggtaatggttgtccatgttgcaaccactgctcaggagaagatgaagccgtggaggaagccttccaggagttccaagagtacgacgagttttag

SEQ ID NO: 20477 - DNA, 174 bp, Zea mays
  Peptide Sequence Number=SeqID_62256
atgggaagcttcgagaagggggagaagggagagggtgtcggtgttttggaaattggtgctctgtctctggtttatgctttggagatcagtattctgctctctggaattcaggattcattgggtgcaccgggtgcacccaatggtgtagcccccaagcttcgagtggattattga

SEQ ID NO: 20478 - DNA, 207 bp, Zea mays
  Peptide Sequence Number=SeqID_62257
atggagctgcaaaatgctgccgtgtccggtgcgccagccaaggcaactagcaaaccagccactgtcgggtttctgccaggcgcgctccactataattcaccggactatccggtgagccagcggagcaacggctccctgtgcgccaacggtcgactatgcagagctacagtggtgaacagtgccacggcagaagttagagggcactag

SEQ ID NO: 20479 - DNA, 468 bp, Zea mays
  Peptide Sequence Number=SeqID_62258
atggctccgcgcaggcagctcgcccttccatccatggctccgcacatttcgtttccgcgcaggcagctctccaccaccacgcgttcgcaatccctgcagaccgctcgccccgcagtctcgacccgcatccgcgtccgcgacatcctccaccctggatcgcggtgcctggctctctccgcgtctgcgctctccatggacggcgactccgcgacgtggattgggtaccccgaccccgctctctccatggaagtctgcgatagcccgatctccatggaagggttcggcacctccgccctagatctgcgtccgcgtccgctctctccatggaaggcgactccgcgcatagctcctgaccgtcgtccccgcacgcctgcgtccttgtccccgcgcgatggctgggctccaaccgcaagtcgccccgcccgatatagccgccatcgtgcacccccgcctgcccgcccgagatag

SEQ ID NO: 20480 - DNA, 315 bp, Zea mays
  Peptide Sequence Number=SeqID_62259
atggcggcctcggatacattcaaggtgcgcagatcagagggagaggagggtggggggatccgcggcaagaaatcaacagcacgcgcgacactttctggattgcgacctcggttccccgtaatcgcggatgagagggggaggagggttgggggatccacgacaccttccatctgcggcaagaaatcaacagcatccgtgacaccttctggattgcggcctcggttccccgaaatcccggatcagagagggaggagggtgggggatctgcgggcgttgattgcggagagccctcgtcagaaccgtgcaccaatataa

SEQ ID NO: 20481 - DNA, 1050 bp, Zea mays
  Peptide Sequence Number=SeqID_62260
atgattatgatgagaaccctttacaaggacatagcaaactataatcagcttgacaaccaggatgaggctcaggaagaaactggatggaagttagtgcatggtgatgtattccgacctcctgttcactcgggcctcctttgtgtttatgttggcactggtgttcagttctttgggatgacacttgtaaccatgatgtttgctcttcttggattcttatcgcctgcaaaccgtggaggactcatgactgctatggtccttttgtgggtgttcatgggtgtattggcaagatacacctcatctcgcctgtacaagatgttcaaaggcactgaatggaagaagatcaccctcaaaaccgccttcatgtttcctggtattatcttttcggtcttcttctttctgaatgcgctgatttggggtgagaaatcatctagtgtagttccttttggaacaatgtttgtgttgttcctcctctggtttggcatctctgtgccattggtcttcgttggaagtttcttaggattcaagcaaccagccattgaggaccttgtgaagacaaacaagattcccaagcaaattcctgagcaaacatggtacctgcagccaatttttgtaatactagctggtggcatattgccatttggggctgtctttattgagctcttcttcatcctgacatctatctggctgaaccagttctactacatctttggcttcctcttcatagtctttgtcatcctcattgtgacatgtgctgagatcacaattgtgctatgctacttccagctatgcactgaggattaccactggtggtggagggcatacttgactgctggctcttcaacactctatttgtttgtttatgctattttctacttcttcaataagtgggagattacaaagcttgtctcaggcatcatgtactttggttacatgctgataatctcttatgcctttttttgtgctgactggaaactaggatttgggatggaattccatggttttggtaggaacatgtgtagcctgttaggagcaagaactgttttcaattga

SEQ ID NO: 20482 - DNA, 654 bp, Zea mays
  Peptide Sequence Number=SeqID_62261
atggggcgacaatcgtgcgacggtgaggagcggaggatctggctcctcagtggtggtgtgtggcgtcggcaagtgggctgcagtggccccagcggcgtttgcggtggtgcgcatgccagtggatctggcgcgtcgcagcggctgctgccagggatggccgacgggaggtgcggtggtgcgacgggaggtgctgctgctgctcgaccaggaccgtgggcccaaccgaaggtggtggtggtcgacaaagctttgtggctgttgtggcagccggcgcgttgttggccctctgtatgggtctgtgtgggttgtctgggcgacatcggctgtggaggtgtgctttgtcctggggtcctggccggacgttgtactggggggttttcttgggcgaaagccttagcaacgatgacgtccttgggcgtcgcttcccctgttaagggcgtcatgttccctagctttgtcttccgtgggcgaaagcccgatccacctcggaccagtgacgatggcgtccccctatgtcactcccttcctgaaggcgtcgctactgaagttcatctcagccacatcatagccttcagtagttgctttcgtctttcgagtcctggtttgcgtgtggaggtgggggcttgcatcgtgaagtcgaagctgctacgttag

SEQ ID NO: 20483 - DNA, 444 bp, Zea mays
  Peptide Sequence Number=SeqID_62262
atgggtaagagcaagaaaggcagaagctccttgcaccattctagcgacaagcggaaacgcgagccgactcctccctcggaggactttggcgattctgagtactcggaggaggagttctcctccgagttcgaggggtcgccagtccacgcctctcccccggcgtcgttcgatgattcggacgattcccaagggattgccgccgaggtgtggacatacatccagaccgtcgagcgctccgggctcgagggctcggatgagtcggaggtctcctcggacgaggagaactcctctgactcatccgaggaggggagcgatggtgacgacgacagcgagggaaacaacgacgatggaggcgacgacgatggtgacggcgacggcggtaagggcgacggcaagggcgtcagcgacagtggcagcggcagcggcaaagcgctgctggcttag

SEQ ID NO: 20484 - DNA, 1926 bp, Zea mays
  Peptide Sequence Number=SeqID_62263
atgaatgatgtggtaacttcacaactacccgtctgtttatatagtgttgcagataacccatcaagtgttgcctctgcttcaataacacaatcaacaacagcaactatcaagtcagatgatcctgcatggaagcattgttatcgtccagatttaaagaagaagcattcactaaagtgcaactattgtgacaagttgatcaatgctggaattacaagagtgaagtaccatcttgctaacattgcaggctttaatgtttctaagtgcaagaaagtgccaactcctgttaaagaagacatggtggctttgcttacaaagaactgtgatgcaaaggagaaaaaagaaaggaaaaacaaagggaaagagatgaaattgatcttgataattcaggaggtgataggtcaagtgaagaagagagtgaaaatgggaatgatgttattgtgctcaagtcaacaaaagaaaagagaggagaggagggatagagcttgtgagtatatatgtcaattcttttatgaagctggtattgcacataacacagtcacccttcctagctttgctcatatggttgaggcaattggagcatttggtagaggtttgagaggtcctagttcctatgagatgagcggaccattcttgaaaaaatgcaaagaaaaggtgttggatagatttaagagccaccaagaatcatggcaactcacaggttgtacaattatgatagatgcatggacaaatagaaagggtcgggggggggtaatgaatttagttgtccatagtgctcaaggggtctgtttcttggattctgtggactactccgctatgaagaaggatggcaaatatatttttgatcttgtggatagatgcatccaagagataggagaggaacatgttgtccaggtggtcacagataatgctagtgtcaatacagcagcagcagcaagtctattggcagcaaagagaccctccattttttggaatggatgtgctgctcactgccttgatctcatgcatgaggaccttgcaaaaattggagctgttgagaaaacaatttctagtgcaaaacatgtgactgccttcttatatgctcatacaagagtgttagatttgatgaggaaattcttggggaaagatttggttcgttctggagtgactcgttttgccactgagtatttgaatttaaaaagtttgcaagataacaagaaggatatctcaaggatctttagatcagatgagctcaatgagttgggttacttgaaaaaggcgaagggcatgaaagccaacaaagtggtgagatcagaaggcttttggaaaaatgttgacatggccgtcaatttctttgagccattggctaatgcaaagaaagaaattgctatgaggtttgacaataatgaaaatagcttcaaagttgcttgggacataattgacaaaaggtgggacaagctgaaaactccactacatttggcagggtattatttgaacctttatttttattacccaaacaagtcagaaattgagcttgatggttcatttagagctgcagtaattgcttgcattaccaagacaattgaagatgaagaaactcaagataatataattgaagagctaaatgtatatcaagaacaacaagggacatttggacatgacattgcagtaaggcagagaagaaataagaacttcaatccagataaagatgaagaacatgggggtgcacaagttggagcaacaatacatgaaccacaactgtcgcagccacaaccaaaaagaaaaaggcttgtgcgccctaggaagaagaaaattaggagtctacattccctgttgtatggtggtttagagaatgaagccgctgtctcatcttcggaatctaaagataatggagatggtgacatttcaatgcatcaatattcagattcagatgatttaggagatgaatag

SEQ ID NO: 20485 - DNA, 639 bp, Zea mays
  Peptide Sequence Number=SeqID_62264
atggcgacctggttcggctgctccaggaaggcggcgcggggccagcacgtgaagctggtgttcccgggtggccacgtcgagctgctggaccgcccgacgctggccgcggacgtgatggcgcggcatccgcggttctgcgtggcgcggcccgacgtgttccgggagccggcgggcgcggtcgccgcgccggacgcggtcctggagctcgggcacaagtacttcatcgtgccgtgcagcaccgtgcggaggctgctcaagtactccgcccccgcaaccccatccctatccccatcgtcctcccgcggcggcagtagcggaaccgtggcgctgaagcggcacctcgcaagcgagagggggtacaaggtcggcggcaggagaaagtggttccggtgccttgtgggtggcagcggcggagcccaggcgcaatcgcagtcgcagaggcccaaccgtgaaggcgttggccacagcggcaaagacaagatggtgaggaagctagacatgaaagaaaccaataaggagaacggcaaggcgcccagtggagggtcgcccggaaggcggcggcggcggcgaggcgcctcgccgggcaactcggcatcctattcttggcagccgagtcttcacagcataactgaagagtaa

SEQ ID NO: 20486 - DNA, 297 bp, Zea mays
  Peptide Sequence Number=SeqID_62265
atggccgaggtgaaagcgaaactatggggaggttcttaccgacgattgtgcggagtagtgcctgaaccacagagacgtgcagtccatggtgggcccagcgctccggaacgtagccgggagctccccgccatccattggtcaggaattgacgtcgacagaggagcggcactccggggtggacgtggtcctgaagagcgaggtggactgtctcttggcggcggtggagacactgaagcagcagggttgtggcagaaccgcctagattattccagcttaagtgcccgagtcatgccttga

SEQ ID NO: 20487 - DNA, 465 bp, Zea mays
  Peptide Sequence Number=SeqID_62266
atgcgcctcatcctgcggtacctgttcttgacctgtgggggatgtgagacagaaaggaagttgtcttcccgaaccgaggaggccaagaggtcggcgcagaaggcaacaacggtggcggaggccaagaggggagagctctcccgtgtccatgagagcaccgaggcttcgatggctcaggcggcgaccatgcttgcaaactacaatgagcttgaggagcttcggtcggccatcgatggggtatgctcccacctctcgctctcgcctttgatggaaacaccactagtcgatcagctttgggcacttctcggtcatgtcgagcgtgtggtcgccgaggccgcctttcatggtagtagcatggctttggggcatatggtctcacatttcaatgagatcgatgtcgccatcgttgttgaaggctctgccaccagtcggggtgatgaggagctggacgtcatcgaagactag

SEQ ID NO: 20488 - DNA, 840 bp, Zea mays
  Peptide Sequence Number=SeqID_62267
atggcgcagtgccttacccggttcacatgctccggtgggcggagggattctgacaaggacgatctggcgtttccgggaattaggcctctagcgccttgtcctctgcccctccctaagggtgtcgtcgtcgagaaggacccgaggtggaaacggcgcgcgataggcgaaaccttggccacacacgtgaagagcatcaaggtgaagaaggggaagatggtctcccatcctacttacacggagttgaggagcctctccctttcttcttccataggttctgagggaacggacgccctggcgttggtgggcgacccgtcccaccatggtgacgctcaggatagttccactgtccctgttcagggggatgactggtcccatgatcccacagcgttcgtggcacccccagtgtcgtctgggcacctcacggcggaggaagaagctggtgaggaccattacctttcttcgttcaatgtgccgggtgtggatgcagaggagtggacccgcatcgagtcagcctctttgtgggtcaacgcgagcctagagattaacgagcatatgctcggcagctttggggaggcagggacgatcgccaaaacgtcgatgacgcgggatcttatcccccacgacgagcgtcttctcatgtggttggtggccagggccgaggtgctgcagaccgcccaacgagtgtctgagcagctgcgaaaggaggtcgcccgctctgaggcgatggagcacgagcttgttgggcttcgctctactgtggatcgcactagtacagataagctctatactgacggtcctaaacatatttacagtgacgtttttcgtaaccgccagtgctag

SEQ ID NO: 20489 - DNA, 741 bp, Zea mays
  Peptide Sequence Number=SeqID_62268
atgtgggatcttgtccaggtagtcgtgatggtcgaagatgattgggaacttcaaccatcggagataccgtgtggcggcgatctttgccacgtggacctcccggtgactgccttcgccgagcaagttgcctcgggggcgctaacctcacagtttgtttccgagaagagacggctcgagggaaggactgagcgccttcaaacacagcacactaaggcggtcagggataagtcggcggccgaaaataagagccggaacctcctcaagaagttaacggcattgcagaaggaaaaggaggacctcggccgccgacttactgatgagaaggaggatgcggaaaaaggtcgtgcggaggctcaggctgcccgcgcaaaggctcgagctgcccacaagcgcactaccgacctagagctggagatgaagaatatgcacggccgccgcgaaaggacggagtcttccactcacgctggggttgaacaggcacacacacttttcgtggatgtgtactgtgaccttggcgcgcagaccgccccctttgacgaatcgggggaggaggtggggatctgctttctagggtggttgcaagatgagctagagtcgctctcgtctatcgtgatgggtctcatgtcctacgtgtctctcgttacttgtgagggggctacaaatgttttgtcccaagagggatgcaggcatttcgaagtcttcgaccaagcaaatgaggacttcgatcgtggagtattctag

SEQ ID NO: 20490 - DNA, 468 bp, Zea mays
  Peptide Sequence Number=SeqID_62269
atggacttaaccagtggatgctcgccaagcgagtacctaccccagaaaacactatctaagtgtcaaattaaagctagtgcttttggcaaccaaaccccacagccaaacagctgcatgtctagaggtagaggagtagactcctcacaccggggccatactacaaggatgtgccatgtcaccattcagaaacagaaggaaatagcagaagctgcagctcagcagaaccagccgaagcagatttacggagtccaaaaagtcgccgaagcacaaaaagtcgttcttaagagtcacaagtatctccgaagctacaaaaagtcgttctacggaacgcagcataagtttgccgaagtcgttctacggaacgcagctggctcaaagggctctgggggaggagatagttcagctgcggtagaaaatataaattatttcgaggtcgcaaaagtaaacatcaaaagtaaaaatcgttaa

SEQ ID NO: 20491 - DNA, 1587 bp, Zea mays
  Peptide Sequence Number=SeqID_62270
atgcatatcgacgcacactaccccaagtgctttgtctactacctcatactcggctcatggctcctctcctgtcttctccacttcgagtacttccacctctcgcgctcctcctttgcagcaccccgctccgctgctctgatcgtactgcccatcgcgccggatgcaagcttccttcccaccccgaccgtcgaggcttacaacaggcagcgatcaacatcgtcgtcggtggtagcgtcaccttcgcagtcgtcatcacaaccatggtgcgagggacggtatgtcttcatgctggacgtgccatcacgcttcgatatgctcagggactgtgttgccggctcgccattgttcgacgacatgtggagctggtgtgcaatcacggtcaatgctgggcttggccccaagattggccccgtcgccggcaatggcagcgacggcgacacagatatcatccctagcaccggctggtacagcacagaccagtactcgctggaggtgatcttccacaactggatgcggcggtacgagtgcctcaccgacgaccagacagcggcgacggcggtgtacgtaccgtactacccggcgctggagctgcaccagcacctgtgcgggttcaacaccacagtacgcgacggcccgtcggaggcgttcctacggtggctatcttcgcagcccacgtgggcggcgctcggcgggcgcgaccacttcatggtggccgccaagacaacgtggatgttccggcgggagccaggcggccgagacgaagggtgcggcaacaacttcctcggccagccggaggcccggaacattacggtgctcacctacgagtccaacatctgggcgccgcgggacatcgccgtgccgtacccgagctacttccacccgtcgtcggccggcgaggtggtcgcgtggcaggcgcgcgcgcgggccgcgccgcggccgttcctgtacgcgttcgcaggcgcgcggcgtatcaaggggcagctggccatccgcgaccgcgtcttcgacgtgtgcgaggccgcggcgcggcgcggccggtgcgggatggtggactgcagccatggccttgagggcagcatcacatgccggtcgccgcggaagctcgtctccctcttcacctcggcccgcttctgcctgcagccgcgcggggactccttcgcgcgccgctcgtccattgacagcgtcatggccggttgcatccctgtgttcttccaccggccgtccacgctcaaggcgcagtaccgctggcacgagccagagccgggtagaaccaacagcgacgaccgccggtactacgtgctcatcgactccaacgacgtgctggaagggagagtggacattgaggaggagctgagcaggtacacggatgacgaggtcaccgccatgagggaggaggtgatcaagatgatcccgagattcctgtacaaggaccccagggtgaggttcgagggggacatgagggacgcgttcgacatcatcattgacgagatgatagccaggatgaggaggataaaaaatggagagcaattgatatggaagggcgatggcgaggatagggatgaggatttgattgccagcgattcatga

SEQ ID NO: 20492 - DNA, 144 bp, Zea mays
  Peptide Sequence Number=SeqID_62271
atggacgatgggttttcgaccaagtttggcctaaaaactcgacaatggtggttccgtcaggaattagaggaggcacgtggcgtcatcacagaggatttgtggaaaaccatcgagttcttgagttgtggttgggtttcaggatag

SEQ ID NO: 20493 - DNA, 345 bp, Zea mays
  Peptide Sequence Number=SeqID_62272
atgccgacctcctcttcttctgctgccgctacgccgccggtcgacgcctcgtcgccggtcgacgcctcgtctgaggagacgccgagtactttggtggcggaggagttacgcgccggtgattcggtggattttggcgtgtcgcggatgtcatcggtccgcgtgcaagatatgcagcggctgggttactttggcggcggagttgcgcacgtcccggggacggaggaagtccccgagccggagggcgagttggttgtgttcgaggcgttcttcgccgccggtctccgcctgcctgcgcaccggtttgttggagaagtcctacgcaggtttaacgttcagatacactag

SEQ ID NO: 20494 - DNA, 147 bp, Zea mays
  Peptide Sequence Number=SeqID_62273
atgactgacaggagcggctcggaggtggatgaggtcagtgcgggcatctctgccaccggcggcgcggtggaggtcgggagcgggggcggcatggtggagaggcaaaaatttcaaacaagttgtattgatgtgactggtcatgggtaa

SEQ ID NO: 20495 - DNA, 201 bp, Zea mays
  Peptide Sequence Number=SeqID_62274
atggtagcgagacaaagggcgcacgcccattatgtgtcattgccgattggggcccgcacgtcggcgcagggttacagcggcagtggtcaagcgggccgtgcgggggaagaggtgtactgggccgcgaattcggttttggcccagaacggtccgaattcaaatttgaatccaattttaaatgtgaacttatattcattttga

SEQ ID NO: 20496 - DNA, 288 bp, Zea mays
  Peptide Sequence Number=SeqID_62275
gagcgctcaattcgagctgagaacccctggggtctcaggaatttctcgccggagttcgggaagccgcctgcgctgtggccttgccttgctcccctcttaatcaccgctgccggaacgatcatcctggccatggcctccgccgtggtggggcgcggcgctgccgtgcgcagttttgtttgggtgaaggtagcagcgaccgtcgagttgggtacaacctctgcagagtgtaaaactggtataatagccgagctcacggccaagagcagctcaggactctcgcatgattaa

SEQ ID NO: 20497 - DNA, 462 bp, Zea mays
  Peptide Sequence Number=SeqID_62276
atgtcgggcaccgtgggcgatgggaagtcggtggggcgcttcttggtgaggaggtggagcatctcattcgcggcaacggagattagagaggaggatgcgcgcgaggcgcagcggctgaagctcgtggcggtggcgtccatcttggcgtcgggcacggcgggggtgctggtcccgctgctgggccgctccgcctcgacgccgcgcaccaatggggacgtcttctttgccgtcaaggcgttctccacgggggtcatcctcaccaccgacatggtgcacatcctgcccgcgcccttcgacgctctcgtgccagcctgtggcaacagcgccaggaccatcagtttcccctacgcggacctcgtggccatgtgctccaccatggccaccatgatggttgactccaccgccgtggcttactaccagtgcgcgcacttccgcaaggcgcgccccgtcgatggaggctag

SEQ ID NO: 20498 - DNA, 246 bp, Zea mays
  Peptide Sequence Number=SeqID_62277
atggcggatctacggccgaagcaaactatggtgagcgattcaccattgtacagctgccatccgcacctgagcgatcaacgaacggcttcactgccgggtgagcttggttcgaccccgcgccgggctcgagacggcgcggatatgctccaggaagtaaataggggcgtggatggtggccgaggtggggttgatgagctagccggctccgaggaaatcgctgcggacgttgcgcgcaagcgatggtag

SEQ ID NO: 20499 - DNA, 180 bp, Zea mays
  Peptide Sequence Number=SeqID_62278
atggatgtcgaatcccctctctttagtgcctttctttgcagcccctgcgtcgccgtgcatgtaagcttagatatgttgtatgttcctctattttattgtggtaattgtgcttatacgaggtggtgtctaagcgatacgatgcgatgcgaatggtttaaaatactaggttatgagaaataa

SEQ ID NO: 20500 - DNA, 456 bp, Zea mays
  Peptide Sequence Number=SeqID_62279
atgggcaagagcaagaaaggtggcggttcttcgcgtcactcgggcgacaagcacaagcgcgagccgactcctccatcggaggacttcggcgactcggaatactcggaggaggagttctcctccgagttcgagggctctccggctcctgcctctcccccggcgttgtctgatgattcagacgactcccaagggatcaccgcggaggtatggacctacatacgggccatcgagcgcgtcgggctcgagggctcggatgagtcggagtactccttggacgaggagaatccctccgactcgtccgaggagggcagcggcggcgacggcggtgacggcgatgacgacggaggcgacggtgacggcggcggcgacagcggcaagggcggtgacgacagcggcaagggtggcagcggcgacggcggcggcggcagcaagggcagcaacagggccagtggctaa

SEQ ID NO: 20501 - DNA, 201 bp, Zea mays
  Peptide Sequence Number=SeqID_62280
atggagagtcatgatctccgggcagaaagggaatcacggcttgtgggtaaagcgcaacctcagcagagtgtggcaatgagattgatggtttttggtattgactctagtgatggtttaccttgcaaggttaaaaactcgactcaaatcgtcttcctctctcagctaatgaagcttcttgatccattgtactgcattgagtaa

SEQ ID NO: 20502 - DNA, 1215 bp, Zea mays
  Peptide Sequence Number=SeqID_62281
atgcaggcaagcattgcagttgcagaggcgctcgatgccgggaagctcacgcctcagcccgtcgccgacgcggccgacttcgcagttgccggtctcgccgtggccattggcacgcttgccgtcacagcgtcgttcatgcttgtctccttcgacgcgcgcgcggggcagggccaactgcgtcgtatcctcgacctcggtccatcactatgtggaccacgcttgttgctcgtcttctttgtggggctcctggccgccgccgagatgctccgcctcccattcttccacggcgccatgctgccgccgcgccaccacgtcatgccatgcctcgcgtacccgctcgtcgcccatggcatcgccgagccagggttgctcgcatgtgtgctcctgctgttgcgtgtgtctgtcggtggcgcgcggctgccagcgtctgcacttgtcgtgccgctcgcctgcttgccattcctcaccgtgcatgttctcgtgctcgccacgccggccaccgtcgccgcctacccaggccagctcgcccatgccgctgatggaattgggcactgcgcgtacccgacgtacgccgccacgctgctcctcgccctcatcgcggtgttggcgctcgccctaacctcagtgtgggacatgcaccagtacacgtcccccaccgtcggcctcgttgggtttgtcgcggtggcggtagccgcggaggcaacacttgtcatcctcgtcatgctaccgcactttagggtcgccatcatacttaagcatgctggaaatgagcgtgttctccaagaagacatttccaccttctctatgaagcagtggcggatccacagtgagggcaaggaagagagccagccgccatccaggctccagccgttcgccaggaaggcagaaaaccgcagctgcccaccaggcgccagcgcccagcagccgcaagctccgccgccgttcgcccaggcgcccagccagccggcggttctcttccaccgttcgaccagccgccagcgtccagcggcttgcgggctgcggccccgccgttcgcccagcggccccgccgtcgaggccaggactcaggagcccaggacccagccaccgagcggtaaatcctttggtccttctggatctgcctctgcgctcgcaaggcctttaaacctcacagaaatattgggtgaagcaaatgagaaggttttttcagccactttcaagaggctctggcactaa

SEQ ID NO: 20503 - DNA, 558 bp, Zea mays
  Peptide Sequence Number=SeqID_62282
atgaaggcgcgatgccccgggcaacctatgccccatcacccgctgtacccaatgccacacgattcaaggagcttggcaaaagaaataggcattcttatcggtgacccaggtgtagatgacgcccgccgcagagaacggaaacgcacggccatcctcaacgtggtcgaggcatcaagagtatcctgcccccaggcctgcccggcaagagcgcgacccccgttgagcgccccgacgaagcaccacgcgatacccgacgcttcccaggttccctaccacacggtagtagacggcggggagaagagcacgatattatatggttcccggagcccgcacctggcagccagctggcggactggtggttgcaatagaacccgatcctcccgggagaccgatacggcgctcacaactaaccgagaagatctacagcaaccacggtgtaggggaatgacaagaggaccccatctgtcagcgtcgggaaaaaagggaagggagcgcgtggaccgcacggtggtgcttggagtactgggccgggtagagcgggtttggggaagatggtaa

SEQ ID NO: 20504 - DNA, 153 bp, Zea mays
  Peptide Sequence Number=SeqID_62283
atggcgttcgccagccctcgacggcgctatgaaggcggaatgccccgggcaacctatgccccatcacctgctttacccaattccacacgatgcaaggagcttggcgaaagaaataggcattcttaccgatttcaaagatcaaacaaattatga

SEQ ID NO: 20505 - DNA, 456 bp, Zea mays
  Peptide Sequence Number=SeqID_62284
atgactactgaaactggaacttaccgatggatggcaccagagaaacttctaattgttactaaatgtggcaaaaaattatccaatcttttatatttagttaatattctatatgcaaggtttcagaggggtttgaagaggaagcccatggagatcttcaagaagctacgcaatgcagtgaagctagattttctagatgaagtccttgtgtcttgtttagatatttttgctttcttggtgattactagctcatttttaccttttctaccttctatgatatcaattccaatccttcttcatataaaaggttgtgaggaactcaagaagaagcttcagtctatggtgtccaatgaagaaatcatgagcattctcctccatattgggttgaatgagaagatgcaacaatacaagatacattggcttaaagacaatgggaacaaccggtcagccatgttgtga

SEQ ID NO: 20506 - DNA, 393 bp, Zea mays
  Peptide Sequence Number=SeqID_62285
atggcttataagctgaagctgtcggactccacttctattcgtacagtgtttcatgtctcccaattgaagccatcagttcaaccatcttgccttgtcagtgcttctcttcctgctgttgcttcgagtgtccgaatgagtaatgcagtgtcggaccatctctcgatggggccgtcagtgggtggcctcctgaacgcaacgtgcggcaacgccattgagcttatcatcgcgctgttcacgctcatgcatggagggcaaaagatcgaggtcgtcaagtgctccctccacggtttcgtcctctccaacctgctgctggtgctcggcacgcccctcttctgcggcggcatcgtcaacctcggcgacgagcagctatacgatagggtgcttacgtactag

SEQ ID NO: 20507 - DNA, 150 bp, Zea mays
  Peptide Sequence Number=SeqID_62286
atggacatgacagaagttcctgttgcaatagcaaatattatctcaaccgacccaaccactaagatgagttgtaacaaaaaatcaacattgaaccaaggttctacagcagcagcaggaagaggaggtggaagcaaggatcagattgcttga

SEQ ID NO: 20508 - DNA, 219 bp, Zea mays
  Peptide Sequence Number=SeqID_62287
atggaggaggcgccagagatggaggagggtagcgcgccgccgtctcctattccgctagctagggctccgattctccctcggcagttggttgcctgctgcttctactcacgtggtgggaattgggaaaaaggaagctgggctgggccactgggcaaagtgaagtgggccactaggccgaaatttcaatccagccagcctgatcgttccgggtgtaattaa

SEQ ID NO: 20509 - DNA, 291 bp, Zea mays
  Peptide Sequence Number=SeqID_62288
atgctgaggatcccaagagatctcatcgagaactccctgaatatcaatcctacggcaagaccaatcgcccagcgactccggcgttttgatgaggagaagcgcaagaccattagcgaagaaaccacaaaactcttggcaatcgggttcgtgagggagattcaccacctagtgtgggttgtaaaccctgttctcatgaagaagaagactgggaaatggaggatgtgcgtcgactacacgagacttaacaaggggtgcccaaagggccattttcttctcccatgcatagactag

SEQ ID NO: 20510 - DNA, 231 bp, Zea mays
  Peptide Sequence Number=SeqID_62289
atggcgcagaggcatacacccacaacgaagagtggctccacggcgaatcaatgctctgacgagcaattcacggagcctcgaatcagggcgaagtgccctaaccaggctctgaggacccaacatcaggggatgaagcacctgtcaaggtggccccacccggcagcaaaatgtcacgagcggatgtggcacgatgtgcggccggcaaggaggcccggtctggcagcgatatga

SEQ ID NO: 20511 - DNA, 420 bp, Zea mays
  Peptide Sequence Number=SeqID_62290
atgcaagatgttgcacggcgtacgcttttgccgtactgctcgttgttcagcggggtagctgacggccacctaaattactaccctcgccgctcgaccgacagtgctggaggtgtgattgtctcaccagttggtgatggaaatcccaagctaaacagcatgatcaacctagtcgtcgtgctcaacactgagctagaccacgccattgacgagttaggcaaggctcgggcagagattgcggaactacgtgttgagcgcgcggcgcgccaccaccaggagggtggttcccctactcctgtcaggattcaacaccctttccgctcgccgccccgtggtcgctatacttatggcacccctaactgcaggacccagatagatttcgagccagagattgacagagtcggagtctataataatgtttaa

SEQ ID NO: 20512 - DNA, 294 bp, Zea mays
  Peptide Sequence Number=SeqID_62291
atggagggaaaggggcgctgggcagatgagggtgctggtcctgggcgtttcctggcgctggcaaggaagagcagggggcgccatggccatggaggaaatggagctgctgcgtcgcccatggacatggagctcgcgaggtcgctctgggagctcctgcgcgcagaggaacatcagggaagaaaagggcgccgctgctctctgcatggagcagctcatgacagaagctcggctggagcaagtcgcgcgagggagaggagctcagcgctggcttgcgtgagagcctgcgcttcctga

SEQ ID NO: 20513 - DNA, 459 bp, Zea mays
  Peptide Sequence Number=SeqID_62292
atgggcaagaacaacaaacgcaagcgtgagccaactcctccatcggaggagtttggtaactcggagtactcagaggaggagttctcctctgagtccgaggggtctccggcttccatccccctgcgtgagtcgtctgacgactcagacgactcccaggggcttgcggcggaggtctggacgtacatccgggccgtcgagcgctccgggctcgagggctcggatgagtcggagtactcctcggatgaggaggactcggacgacgacggcgaggacgaggacgacgacgacgacgacgaaggcggtggcggcggtgacggtgacggcagcggcaggggcggcagcggcggcagcaaggacggtgacggcggcggcagcaggggcggcagcggcggtggcgacagcagcagaggcagcaccaggggcggcagcagcggcggcagcaacagggccagtggctag

SEQ ID NO: 20514 - DNA, 180 bp, Zea mays
  Peptide Sequence Number=SeqID_62293
atgcggtcaccgtggcataccggttcacaatttattttgggtcgtggatcgctgattggacgacttgaaataaacggtgaagagcaagtactgctggagaaggactactacgatgaattcgatgaaatccaggggtcgtctcccagtcaactattggcaccgaggagatatttatcttag

SEQ ID NO: 20515 - DNA, 1653 bp, Zea mays
  Peptide Sequence Number=SeqID_62294
atggacaagcgcggcagcttcggggggacctcgtccgacgacgtggaggcgccgctgctcccgccgcccgcgcgcgacgacggggcacaggagttgcggttgccgccgtcctgggtgcgcgcgctgctcgcgcacaggtatccggccgtggcggctggccccgcggcagcagcggccgtgtgcgcgctcgtggacctcgccgtcggcgggggcgcccacgcccaccaccaccgagaggcgcgcaacatgctcgcagtgctcgcctgggtcttcctctggtgggtcacgggcgccgtgccgctggccgtcgcctccatggcgccgctcttcctcttcccgctgttcggcgtctcctccgcggacgccgtcgccaaggcctacatggacgacgtcatctcgctcgtcctcggcagcttcatactcgctctcgccatcgaacactaccaaatccaccgccgcctcgctctcaacatcacgtcgctcttctgcggggacccggtgcggccgccgctgttgctgctgggcatcaccggcaccactttcttcgtcagcatgtggatccacaacacggcgtgcacggtcatgatgatgcccgtggcgacggggatcctgcagaggctgccgcgcgggggcgccggggccgggaccggggcgcacgacgaggtccgccgcttctccaaggccgtggtgctcggcgtcgtgtacgcgtcggccatcggcgggatggccacgctggcgggcaccggcgtcaacatcatcctcgtcggtatgtggtccacctacttcccggagcaggagcccatcacctttagctcctggatgtccttcggcctccccatggcgctcatcctcttcttggcactctggatcacactctgcctcatgttctgctccaacaacacgggaaaggcactctccggttacctggacagaagccatctcagaagagagctcagcttgttaggtccaatggtatttgcagagaagatggtcttggcagtgtttgggggtctaattgtgctatggatgactaggaaccttacagctgacataccagggtggggggctctcttccacaacaatgtcggagacggaacagtcaccatcatgatggccacgctactcttcataattccaagccggaagaacaagggcgagaaactgatggactgggacaagtgtaggaagctccagtgggacattatcctcctcctgggggcaggattcgccatcgctgaaggcttcaggtcaagcggcctgaccgacatcctctctgacgggctccggttcctgaagggcgcagagacggtggtcattgtacctgtggcctgcatcgtcagcggtgtcgtcacagagttcacgtcggacgacgcgaccacgacgctgctgctccctctgtttgctgaattggccaaggcgatcgatgtgcacccagcgctgctcatggtttctggagcagttggggctcagctttcgtacttgttacctactggatcaccgtcaaacgtaattgggttcagcactggccacattaccatcaaggatctcgtcaccacagggcttcccctgaaacttgtcggaatcgcggctctgacagtcttgatgccaactctaggtaacataacagctgcacaaatcatgtcaaagaactag

SEQ ID NO: 20516 - DNA, 294 bp, Zea mays
  Peptide Sequence Number=SeqID_62295
atggcgcaccggacagtccggtgcgccaccggtgcgccaacggtgcgccaccggggcctagatgctttcagcttgcttgaaggtaaagacgtgaatgcggttacaatccagcgtgaacagtacgggggtattgttcgcctatttataggcaatcatatagctttgtacgatatcgcatccatatcctcaaagattacatacaaggtttacaaatgttacagggacaatattgtcatttcaattagcagcttgaacaacaccttctccctacgtcgcccttccgcgtcaacatga

SEQ ID NO: 20517 - DNA, 261 bp, Zea mays
  Peptide Sequence Number=SeqID_62296
atggccgtcccagctccatggccgagctccctgcgcgcagccgcgcactcctctgctcggtcctatcctctgccgacgctcctcccctactgctcgactcctcaccggcgacaatggtcgcgctcgccccagctcagcttcggacgtgcgcgctcctctgctcgccgtggtcgacgtctctccatctcccagcaagctgcgctccacctcgccctatctcggcactccggcttcagctcgctatggcgcccatctccctag

SEQ ID NO: 20518 - DNA, 204 bp, Zea mays
  Peptide Sequence Number=SeqID_62297
atgactccactctctgtgcagctgagggcgctcctggcccacgtggaggacaacatggtggaaggcacactttttgggagcaacatggcttggacccttggtgatacgtactccatctttgtggggagtaccgcctctacgctgaatgctaggaagaatggtgtgcatcctattgctctaaaggaagtcctacataaactctag

SEQ ID NO: 20519 - DNA, 2553 bp, Zea mays
  Peptide Sequence Number=SeqID_62298
atggcggatgtgtgtagactacactggtctcaacaaagcatgtccgaagggtatcaccagatccggatgaaagagtccgaccaactcgcgacttctttcatcacgccgttcggcatgtactgctatgtcaccattccgttcggtttgaggaatgcgggcgcgacgtaccagcggtgcatgaaccatgtgttcggcgaacacatcggtcgcacagtcgaggcctacgtcgatgacatcgtagtcaagacaaggatggcttccgacctcctctccgaccttgaagtgacattccgatgtctcaaggcgaaaggagtcaagctcaatcctgagaagtgtgtcttcggggtgccccggggcatgctcctggggttcatcgtctccgagcgaggcatcgaagccaacccggagaagatcgcagctatcaccagcatgggacccatcaaggacttaaaaggcgtacagagggtcatgggatgtctcgcggccctgagccgcttcatctcacgcctcggcgaaagaggtctacctctgtaccgcctcttaaggaagaccgagtgtttcgcttggacccctgaggccgaggaagccctcgggaacctgaaggcgctccttacaaaggcgcatgtcttggtgcccccagctgatggagaagccctcttggtctacgtcgccgctaccactcaggtggttagcgccgcgattgtggtcgagaggcaagaggaagggcatgcattgcccattcagaggccagtctacttcgtcagcgaggtactgtccgagaccaagattcgctacccacaagttcagaagctgctgtatgctgtgatcctgacgaggcggaagttacggcactacttcgagtctcatccggtaactgtggtgtcatccttccccctgggggagatcatccagtgccgagaggcctcgggcaggatcgcaaggtgggcggtggaaatcatgggcgaaacaatctcgttcgcccctcggaaggccatcaagtcccaggtgttggcggacttcgtagccgaatgggtcgacacccagctaccgacggctccgatccaaccggagctctggaccatgtttttcgacgggtcgctgatgaagacgggagccggcgcgggcctgctcttcatctcgcccctcgggaagcacctacgctacgtgctacgcctccatttcccggcgtccaacaatgtggctgagtacgaggctctggtcaacgggttgcggatcgccatcgagctaggggtcagacgcctcgacgcccgcggtgactcgcagctcgtcatcgaccaagtcatgaagaactcccactgccgcgacccgaagatggaggcctactgcgatgaggttcggcgcctggaagacaagttcttcgggctcgagcttaaccacatcgctcggcgctacaacgagactacggacgagctggctaaaatagcctcggggcgaacgacggtccccccggacgtcttctcccaggatctgcatcaaccctccgtcaagatcgacgacacgcccgagcccgaggcaccctcgactcagcccgaggcgccctcggctcagcccgaggcgccctcggttcggcccgaggtaccctcggcccccggggccgaggcactgcacgtcgaggaggagcagaaaggggccacgcctgatcgaaattggcagaccccgtacctgcaatatctccgccaaggagagctacccctcgaccaagccgaggctcggcggaaggcgcccgggggctacacgcacctgctggtcgccatcgacaaattctccaagtggatcgaggtccgacccctgaacagcatcaggtccgagcaggcggtggcgttcttcaccaacataatccatcgcttcggggtcccaaactccatcatcaccgacaacggtacccagttcaccggcagaaaattcttggatttttgcgaggatcaccacatccgggtggactgggccgccgtggctcatcccatgtcgaatgggcaagtagagcgtgccaatggcatgattctacaagggctcaagccccgaatttacaacggcctcaacaagttcggcaagcgatggatgaaggaactcccctcggtggtctggagcctgaggacgacgccgagccgagccacgggtttcacgccgttcttcctggtctacggggccgaggccatcttgcccactgacctggaatacggctccccgaggacgagggcctacaacgatcaaagcaaccaagctagccgagaagaatcgctggaccagctggaagaggctcgggacaaggccttactacactcggcgcggtaccagcagtccctgcgacgctaccacgcccgaggggtccggccccgagatctccaggtgggcgacctggtgcttcggctgcggcaagacgcccgagggaggcacaaactcacgcccccctgggaggggccattcgtcatcgccaaagttctgaagcccggaacatacaagctggccaacaatcaaggcgagatctacgacaacgcttggaacatcaaacagctacgtcgcttctacccttaa

SEQ ID NO: 20520 - DNA, 222 bp, Zea mays
  Peptide Sequence Number=SeqID_62299
atgtcgatcccgtgttcccagtcacttacgcccgaattggtcaacggctactacgatgagctttacgagcatacagagctgctaaaacaacacttgaattggacagagtcttacaagagggggttggccacggagcgcggaggacttaggcttgccggtgacagaggaaaggggaaaactggtgttgcggcggctctgggtgaaattgggggtggaaattaa

SEQ ID NO: 20521 - DNA, 294 bp, Zea mays
  Peptide Sequence Number=SeqID_62300
atgaagccaattgtgggctcgaagcgtctctccaaggtgctcatgaacgaggaagcggccacaacatcatttcgaggtgtggacttccaaaggtccttcaaagccattctcgggaggtcatgctatgctaagtttatggacatccccaactacacctacctcaagctaaagatgcatggtccacgcgggatcatcacgacgtctgcctcgttcaaagcggcctacacctgcgagcttgcctcaacgctggccataacaagagagttggtcgagctccagaagactgtcccctag

SEQ ID NO: 20522 - DNA, 1038 bp, Zea mays
  Peptide Sequence Number=SeqID_62301
atgcagagccggcggccggagcacggcagctccggcgagctcgacgtgttcggggcgacgagttactttgccggcttgccggcgcctggtggtgaccactgtcgtcgtcctagtagtgtaacagagctgtgcttccaagccaataagcaggtggagcttgacacgacgaggagcgtgacacggcacggccctccacagcagcagcatcagcatcagcgcgctgggtggcatgatgatcacgcatcgtcagagcgccacgccaccgacaagctcctgcagctgcaggtagtagtggccgccaacaagcggcggccttcatcggcttcgtcaggcaagagcaagctcgccgccctcttgagcttcatggtgtcgccgtcgccgagagctagcttccgcaaggagaataataggcaggaggccctgccgtcgccgtcgtcggctaggatgctgcggcaggcggaggccgcacgcggcggcggcgacggcgacggcgaagagccagagcctgctagtaatattgatggcagcgcgacggcggcctccccgccgccgccgccgtcgtcctcgcgcgagagcagcgcgcagctgcaaggcctgttcggcgcgctcgacgatgatgacgacgacgagtttgacctgggcgtggcgacgggggacaggaggctgcagggcatcacggtcgtgaggggcggcggcggcggcggcgaggagaggtgggtggtgaggtgctgcgtgcccggcggcggcggcggcagcgcctgggacgacgaggagcgccgcgagaaggcggtcgacgcagagtcatcaagtgagcagagcatcaagcaggacgagcagctggtcgtcgttgaggctgagcaggctgaacaaaacatcaaggacgtggttgttgaggttgaagttgaacaagcaggagatgttgatgatgtcgacgacgacggtagtggtaatgttgacgaccctgctcacagtcacagtgacagctgggacagcgattctagttctgatctgttcgatttggatctcgagcacagatga

SEQ ID NO: 20523 - DNA, 480 bp, Zea mays
  Peptide Sequence Number=SeqID_62302
atggagggaacagcggcttcgcctcctggctattggttggtgcctggtggtgtcacaagatgcagcccgggcaaaattacatttatgtccctgacatttactgttaaccaaaaggttgggcgaggtggaggctcctccgaggtcgagatcgagtctgagcccccgggtcggacaaggcggagaccgtcggctgaggccagggctgagttcgagctctggggtcgggcgaagtggagttcgtcgtccttcggggctgagcccgagtccgagccctggggtcaggcgaagcggagttcatcgtcttctggggctgagcccgagtccgagccctgggtcgggcgaagcggagttcgtcgtcttccggggctgagcccgagtccgagccctggggtcgggcgaagtggagttcgtcgtcttccggggctgagcccgagtccgagccctggagtcgggcgaagcggagtttcctatgacgcctga

SEQ ID NO: 20524 - DNA, 1623 bp, Zea mays
  Peptide Sequence Number=SeqID_62303
atggcgcttcttcttcatccccgcctcccgtcccatcctttccgcgcggcagcccaccaccaccacgccatctcggacgcctcttgcttccttaccctccacggccccggaaggaagcgccgcatgctgctcgcggcggtcacgtgccgcgcagccagggtcaaggagcccgctccgagcgcaggcgcctcgcctccgccgccgccacaggcgctgacgaaggaggcgcacaagtacttcgaccacgccgtggtcaccgtccgcgcgggcgacggcgggcacggcgccgtgctcgccatgccgccggcgccctccgcggacgccgccaagccccgcggcaggttcaaccggggcgagaagaagagcaagaaggtgtcgtacaagcgcaactacgacgggtccgtggcgctgccgacgggcgggcacggcggcgacgttgtggtgtacgccgacgaggccgaggagacgctgctgcggttccacgagaaggcgcggtactgcgccaaacggggagggaacgtgggcgccgctggcggcacgctcagctcgcggatgcacagcgggttcgccggggagacgctcaggatacccgtgcctgtaggaactgttgtgaaacgcaagaagggggctgttctggcggatttggctcatcactgtgatgaagtgctcgttgctagaggtggacagggcggaatcagcttgattgatgtgcctgagtacaagaggaggaaagccatggctttatccccaaacatcatgcgagatactagtgacaaacttaaagatttcgaggtgattttactgtctactattgtcaagtccaaagtattaacgcatggtcaacctggtgaggaagtaagcttggagttgatcttaagggtagttgctgatgttggccttgtgggacttccaaatgctggaaagtcaacacttctatcagctataacacttgcaagaccagacattgctgattatccattcactacattaatgcccaatcttggccgacttggtggagatcctgctttaggggcgttacagttttcctcagaagcaacattggcagatttgccaggtctaattgagggcgctcatctaggaaagggccttggccgcaatttcttaagacatttaaggagaactagagtaatcgtccatgttgtcgatgctgctgcagatgaccctgtcaatgattataagattgttagagaatattacaatgttcatgatctatctgatctgcttgttaccctagcattaatagaattaaggatgtataacccccaatacctggagcgaccttatgttgtggtcctcaacaaaattgatcttcctaaggcccaagatagactatctgcactggtcttagagatatcttcaattggatgtgaagaagggcatgagcaaagtggcagcaaagataacctaaatggacgagtaagtgatcatcaggtcttatcagaggctaaagctgaaggtgttgaaaaggagctcggggactatccaagacctgaagctgtcgtggctgctagcgtattgaggcatatcgggatcgacgagatgctgaaggagataagggcagccctgagaaaatgctttgatcacaagttaccagaacattga

SEQ ID NO: 20525 - DNA, 717 bp, Zea mays
  Peptide Sequence Number=SeqID_62304
atgccgaccgtttgggtcgctagacggtcgccacgcccgcggtccagcgttggcatccgtcctgcaagcctgcaacccaaccttgaaccttgcctgttcttcttcgatttattagcccagcgttctccctctctcgtgggcgtggcgacgacttggaggccatcgctgccgccctacgccaggtgcccagatcatctgcggccccttcgccggcgacgatcaccatccatcagagaagacggtgtaattctggacttctctggtccacattttgtatcagttgacaattttgcattcggagctgttgcgcgctacattcaagtaaactgcgatgagtgctataagcttattgaacctgaaggagatgccacgtgggacggcgcgctgaagaaaggcacgcaggagttccaaaacaggaactacaacctgttcacctgcaactgccactcctttgtcgcaaacaatctgaacaggctgttttattccggccacgacgaatggaatgtggtcagcttggctgctgtgatgttcttacgaggccgctgggtgagcacggcatcggtggtgaagaccttattgccatttgcagttgtgctttccatcggtaccttccttggcggcacgaccttcctgaccggccttcttgctttcgccgctgcgatgactgtctggttccttgtgggcacctactgcatcaaaggtctcatagagttgtga

SEQ ID NO: 20526 - DNA, 171 bp, Zea mays
  Peptide Sequence Number=SeqID_62305
atggcgactgctaccaaaaggcgctctagagagcttgcaaggttgctcggcatggacttctcggactttgtttgggcaccccgttcctgggtgcccaacaagaggcttgatcctggattggacttcgttcttctgcctcttggctatgagaatttccctttgtttttgtaa

SEQ ID NO: 20527 - DNA, 342 bp, Zea mays
  Peptide Sequence Number=SeqID_62306
atgaggtcctcgacgcttgcagttgcagcagcggttcttgtcctctccgtgctcgtcgcgtccggtggcgcggcagcgcggcgaccggtggtgatgaggcaggggcagggcggcagcagccctggcgccagcgccgtgctgcaggatcgcgtcgccatggcggtgcagtcgacgagcacgaattcctcggcgcagccgtccaactgcacctacgggcacaactccggcggcgctgggcctgttggccgatctcgtagcccatgggcttcagcccctaccgacacaggtctagtttccatcattgctcgcttgctccacttccaggttttagatccactctag

SEQ ID NO: 20528 - DNA, 213 bp, Zea mays
  Peptide Sequence Number=SeqID_62307
atggctctggtctctgaaggttcaaggatggatgcttcaactggggtgacctcgaccacttcatcaccaattgccccaagaagagcaaagcaggaggctggcacgtgtgaccaccactctggccggcacaagggcaagcgggagtactcctccatcaagtacaagtacaagggaggattcgacaaggaggcgctcaagaagaagtacctctag

SEQ ID NO: 20529 - DNA, 522 bp, Zea mays
  Peptide Sequence Number=SeqID_62308
atggcgcgtgcacgcggtcggtccgcggcggggtgtgaatccgcggcggcttgcaactacggcgaggaattgcaggggctcgggtcgatcctcatgtttggcactccacacacacaatccacacacgcagtagagcgcccaagacccaaccccgaccacccaacgccggtgcaggagcggggcaacaatggcgggcggtggccttccctctcgggtctgtttgctcgttcacgggaagggggcggctggcttcgtggggtcttggggttccgagttaagcgtccgcgtttatacgcgcagcccaggcggggtggaggttacgccaccggcgaaatcggcccggtcgttggcgccagctggatccgcggaggagatggtatgactgcgattccgattcgaacggcggtggaagacgtgcagatggatgggatccgatgctcagtggagcggcgagttcacgtagtgggcgcgggggaggccgagtcaatccgctcctgtggattcgcggcggaggactgttag

SEQ ID NO: 20530 - DNA, 561 bp, Zea mays
  Peptide Sequence Number=SeqID_62309
atgtccgatgacatgtggggcctacgcgccagggtcttcctcctcctcggacttccctcatcgcctaacaaaccccgaacgctgctcaatcccgccaagatcggcaccgttgcggcaagggagggcccgccgctccctctcctccttggaccacgcccagccgccgccatggatctggctgcgtcgtcgtgctcggataggaagggggtaattggagctcagtgccgtggttgtgctcccttggcctccattgccgcgctggggggagagaaatccgtgtgccgctacttgctcgtgaagccacttggcctcggctggtggctcgagggaaactcaccggcgtgcgctggcatcagttcgggagacagtggtgaccggtgtcgcagatttcggatctcgccagaatggagttgctgggcgttggcgtcgggtggctgtgcggcatggatgaaggacgagctcgagcggagatgcctcttagagcaggatgaccctgggcagtatggtcttggcgccatgtgcacccatacttgggaagatcatctcgtatcgggcagttag

SEQ ID NO: 20531 - DNA, 1998 bp, Zea mays
  Peptide Sequence Number=SeqID_62310
atggcgtcctcgctgctctcctcccccgctaaacccaccatcaccaccaccaccaaaacgaccccggccccaagacccgcccgctccgcccatgtccatgtcctctccgccgcccgctgcctccgcctccgcctccgcgcgtcgtcgcagcatcctccgcctccgcccaccccgcggtcgcggcggccggattacgtcccgaaccgcatcgacgaccccaactacgtgcgcatcttcgacaccacgctgcgcgacggggagcagtcgccgggcgccaccatgacgagcgcccagaagctcgtcgtcgcgcgccagctggcccgcctcggcgtcgacatcatcgaggccgggttcccggcctcctcccccgacgacctcgacgccgtgcgctccatcgccatcgaggtcggcaacccggcgccaggacccgccggggaggaggacgccgtccacgtgccggtcatctgcggcctctcgcggtgcaaccggaaggacatcgacgccgcgtgggaggccgtgcgccacgcgcgccgcccccggatccacaccttcatcgccaccagcgacattcacatgcagcataagctcaggaagacgcccgaccaggtggtcgccattgccagggagatggtggcctacgcccgcagcctcggatgcactgacgtcgagttcagccccgaggacgccggcaggtatagtgctgttgccaaatcagttgttatccttgccatcttcgttcaatttttagctgcattttacgaatctgaaggggaagtcataaaagctggagctacgactctcaatatcccggacactgtcggatacaatcttccttatgaatttggaaagttgattgctgatataaaggcaaacactcctggaattgaaaaggctatcatttccactcattgtcagaatgaccttggtcttgcgactgccaacacactagcgggcgctcgtgcaggagcacggcagttagaggttactattaatggtattggtgaaagggctggaaatgcttctttggaggaggttgtcatggcaattaaatgccgcagagaactgttagatggtctctatactggaatcgattcccgacatatcactttgacgagcaaaatggtgcaagagcatagtggacttcacgtgcagccacataaagctattgttggtgccaatgcgttcgctcatgaaagtggaattcatcaggatgggatgcttaaatataaaggaacatacgaaattatatcgcctgatgatattggtctaacacgtgcaaatgaatttggtattgttcttgggaaactcagcggaaggcatgctgtgagatctaagctagtagagcttggatatgaaatcggtgacaaggaatttgaggacttctttaaacgctacaaagaggttgcagagaagaaaaagcgcgtaactgatgaagacttagaagcgttattgtcagatgagatattccagcctaaggttatttggtcccttgctgatgtacaggcaacatgtggtacacttgctttatctacggcaacagtgaaattggtagcaccagatggagaggagaaaatagcatgttcagtcggaacaggtccagtcgatgcagcttacaaggctgttgacaaaataatccagattccaacggttctccgagaatacagtatgacatcagtcacagaaggcattgacgcaatcgcgacaactcgggttgttgtcactggagatgtgagcaacaacgccaaacatgccctgactggccagtccttcaaccgctccttcagcgggagcggggcatccatggacattgtggtgtccagtgtcagagcttacctgagcgccctgaacaagatctgcagtttcgctggcgccgtgaaagccagcagcgatcaaatcggcatactttaccagatcgccacaacgatccgtatctctgagactttgagcaggccgggtcagcacgatcacacggcaatctactcctcccctacttgctag

SEQ ID NO: 20532 - DNA, 1737 bp, Zea mays
  Peptide Sequence Number=SeqID_62311
atggcggcggccaacaatgctgctagcggtggcggcgacgaagcgaggtacccgctgaacgcagagtcctaccgcctgctgtgcaagatcgggagcggcgtgagcgcggtggtgtacaaggccgtgtgcctgcctctgggctcgtcggcggtggtggccatcaaggcgatcgacctggagcggtcgcgcgccgatctggacggcgtgcagcgggaggccaaggccatggcgctgctgtcccacggcaacgtgctccgagcgcactgctccttcaccgtggggagccacctgtgggtggtgatgcccttcatgggcgccggctcgctgcactccatcctgcgccacgggttccccggcggcctgccggagccgtgcgtggccgtcgtgctcggggagacgctccgcgcgctgtgctacctccacggacaggggcgcatccaccgcgacatcaaggccggaaacatcctggtggactcggacggcgccgtcaagctggccgacttcggcgtctcggcgtccatctacgagaccatccggcaacacgcgtctgcgtcggcctcgacggcggcggcagtggggaccggctcgtcggcgtcgtgctgcttcaacgacgtggcggggacgccgtactggatggcgcccgaggtgatccactcccacgtcggctacggcatcaaggccgacatctggtcgttcggcatcacggcgctggagctcgcgcacggccgcccgccgctctcgcacctgccgccgtccaagtcgatgctgatgagaatcaccagccgcgtccgcttcgaggagagcgtcggcacgggcaaccgcagggacaagaacaacaagttctccagggcgttcaaggacatggtgtccgcctgcctctgccaggagccggcaaagcggccgtcggcggagaagctcctccgccaccccttcttcaaggcttgctcccgtcgctccagggactttctcgtccgcaacgtcctcgccgccgtcccaagcatcgaggagcggtgtcgcaaggacgacgaagcgggtaatgatctctgcgggtgtgtcggcggcggcgcacgctgcgtgtcgccgtgcccccgtcacgccgacaacgtcgtcgtcgccaagaaccgacggatcagcggctggaacttcaatgaggacaacctagagtttgatccgacgaccgaggagcggccggtggaggcggagaagaggtgccttccattcgattttgatgaaggggatgaccaggtggagctacacgacagcaactccgctggagacggagatggagatagaggacggccgccggcgcagccgcagcatggagatggcgacgatcacgttcacgggaaggcggcggaggcggtagggcttaagcagcagcagcaagtggtgactcagcagctgatgaccgtcctgcagagcctggagatgcaaagggacatggtgacgcacgtgttgcaacgcaccgccggccgcttggatgacggcggcggcaatggtgatgtgagcgtgaccgctccaagggaggagagggaagagatgctgctggggtacgtccggcagctggagcatagggtggaagacctgaggaaggaggtcgaggaggagatggcttggaacgcccggttggagaagatgctgcaagagagagttatcattagcgacgatgacaagaagatgaactcatctaagacgtcgtcatcagctgagctgagagcagttgatgaaaacatatga

SEQ ID NO: 20533 - DNA, 222 bp, Zea mays
  Peptide Sequence Number=SeqID_62312
atgttgccactatctgttacactagtggcactactggcacaccgaaggtatatctcatatctgcctttggctcacatttacgagagggttaaccagattgcagcactgcactgtggtgttgccattggattctaccaaggggaatatgatcacctagtgcaaaatatgcattgggcacttgagttgctttggacaattcaaagagtagctgtacaccagtga

SEQ ID NO: 20534 - DNA, 375 bp, Zea mays
  Peptide Sequence Number=SeqID_62313
atggcgtccatctcggagcccgctgctagggagaagcccatcgtcgtccgggtcaagcgcaaaccttcgcaaaaccgcccggacgctttctggctagagattaatgagaggccggcaaagaaggcggcgattgatttctcccgcctttccatctccgaaccctcctcgtcctctgccagtgtcaaagcttcagaggaaccacgggttaagaaaattcttgtccagcacatcgagacagtacaccactctgaagctgtcgaagatgttttacaatctcttttgcttgttgactcaaattccaaggagacaaagagcaagacaaaggagtggaatgacagaatcaagcaagacaaagcactaacatttactacctag

SEQ ID NO: 20535 - DNA, 549 bp, Zea mays
  Peptide Sequence Number=SeqID_62314
atgtcatcgaagaagaactactataaggagaagttgatgcggcggaaagaggagaaaaaagaagagccagagacacccaggtaccgcgatcgtgctaaggagcggcgtgaagatcaaaacccagattatgaacctacagaacttggttcgtttcatgcagtggcacctcctgggaatgatttgaggctggcagatgctcacaagatctcaattgagaaaagcaaatatctcggaggtgatttggagcatacacatctggtcaagggcttggactatgctctacttcataaagtacggagtgaaattgaaaagaaacctgaggcagaggatgggaaggatacaaagtcaagggcagcaaaagaagatcaggcagtctccttccgcaccgcaactgcaaagtctgtgtaccaatggatcataaagcctcaaagcataattaaagagaatgaattgtttcttcctggccggatgtcatttatttacaacatggggcatcatagcctcataattgctaaatacagtactttctctgtcttcatgttctattag

SEQ ID NO: 20536 - DNA, 285 bp, Zea mays
  Peptide Sequence Number=SeqID_62315
atggaaaatcaccttgaaaattcctttgcactgttttgtgggaaggccttgaattgcttggactgtggaggtgagggttcttcattgattgctgctggtggttctgatcccgtgttgaggtggccgctggcgtctgtggactcgcatgaagataaggagaagggcaaatggatgatatgttggttattacaggttttatgtgcggactggtggaaaggggacagtgtgataagtggcggagctgattccaagctatgtatctcatctggtattcaaatcgtgtga

SEQ ID NO: 20537 - DNA, 315 bp, Zea mays
  Peptide Sequence Number=SeqID_62316
atggccggtaactcgggcttcggcggcagctcgacctccgggaacggcggcagctcgaccttgggcagcggtggcagctcgacctccgggaacggcggcagttcgaccttgggcagcggcggcaagtcgtgctctggcactggcaggtccggcacggtcaggtggggctccccctccttgggcgtcgcctcctcctccagccttcgcgccgcgctgctcacggcggcgcaggaaaggagcagcaggagagcgagggaggacgcggtggttcccgaggcccatgttgatcgtaacatacgagcagactggcgttag

SEQ ID NO: 20538 - DNA, 417 bp, Zea mays
  Peptide Sequence Number=SeqID_62317
atgatgctttcccttgtcctcctcatggcgctgctgctctcgtgcagcagcattagcggagcggcgcggctgctggaggaggtggcgcccaaggaggagtacccgcaccctgccacgctggagctgcccaagcccgagctgccgccgcaccccacggtgccggagctgcccaagcctcagccctcagatgccgtgcctgaactgcccatgcctgaggtagagcaccccgccgttccagagctgccaaagcccgacgtgccggcgcaccctgccgtgccggagctaccgaagcctgagctgcctcctcaccccacggtgccagagctgccctacccggaagttccggaggtgccaaagcatgagctcccaccgaagccggccgagaaccactacccagtgccagagactaagccatga

SEQ ID NO: 20539 - DNA, 228 bp, Zea mays
  Peptide Sequence Number=SeqID_62318
atgtccaaactacttaagtttgaccaagtttataaagaatattgtcagtaccttatgacaccaaataggatgcttagtgggtcaactgtagggatctttccttctacatacgacctgtgggactcgctttttgaaaaatggtccctaatagcttatggtttacttgaaaagttcatgaatactccgacaacagaattcaaggtgatattccagaacaatcatatctaa

SEQ ID NO: 20540 - DNA, 2106 bp, Zea mays
  Peptide Sequence Number=SeqID_62319
atgcccatcaacacgaccccgacgacgcgctgcgccgccgcctctccgcgttgccgctgcccaccgcgccccgccgacattcgcgagctcttcctccaggcctcctcgcggttcccgctctcctggcgccccgtgcaccgcctcctctcgcacctttccaccctccaccgcggcgccggcgccggcgacggcgacggcgacagcgacagcgacagcggaggcggtgggttcccacactccccagccactgccgcccgcctcctagacgtcttagccaagtccgggaacatcgacctcctccactccacgctcttctcactgccccgcagcctcctctccgccgcggcactccgcgccgccgtgcgagggctcgctcccgcccgcgaggtcgggaaggtagccgcgctcgtgacgctcttccccgagtgccaccgcgctcgggtcctcacgttcgtcaccgacgtcgcgtgctcggagccgtgcaggctccctgacgtcgcggaaaaggcgatcaagcgcgccgagcaccggcacggcgtcgcgcgcacgggcaggtgctgcgacctgctggtcgttgcgtactgccgtgcggggtctcttgcggacgcatgcagggtgtggaatggcatggagaggcgcggcctcgagccgggtgccgcggcgtaccaggagatcgtggtaaccatgttcaagaataaccgcgtagccgacgccatgaagttgttcgacggaatgcggaggagcggagtgcgggacaacggaggcgggtgctgccgcgcggtggtgtcatggctgtgcaaggaagggagggtatggggcgcgtacatggtgttggcagaaatggtaaaacgaggtctggaagtggatggtgaggtgctgggagatttggtgtatgggctgatgtcgaggagaagggtgagggaagcatacagggtgttccatggcgttaaggagaaggagattgctctctatcatggattgatgaaggggttgctgaggatcaaacgagcaggggaggccactgaggtgttcagggagatgatcaccaggggatgtgaaccgaacatgcacacttacatcatgttgcttcaggggcaccttgggaagaggggtcggaaggggagggatccattggtgaattttgagagcatatttgttggtggcttggtgaaagccgggaggacattggaggcgaccaagtttgtagagaggacaatgtggggtggggtagatgtgccgagatttgactataacaagtttctgtactatttctcgaatgatgagggagccgtaatgtttgaagaggtcagcaagagattaaaggaagttggagtaattgatcttgcagacattttgtcagcctatgcataccttgcgtcattgaatgagccagatttcgttgagcttgcactgcatgagtacaagtctgcgattaacatgacagagcagtttgctgcattagcagcattatcccaaaatccaggccaagttcgtgatgatgccctcttggatttctataacaagtggcagcatgaatacttggttgtaagcaagtggtttgctcttcaagctacttcagagattcctggaaatgttgcaaatgttcagaagctgctgtctcaccctgctttcgacctgaggaatcccaacaaggtgtactcactaatcgggggattctgtggctcacctgtgaacttccacacgaaagatggttctgggtacaagttcttgggtgagatcgttttgcagcttgacaagataaaccctcaggttaatgccaacaccgggactgacactactgcaggcttctctatcaggaggtttaggattccggatggacagcacgttctgcatctggacgctgtcagcttctcttctttcgaagaagcccagggagccctccatgatcagcttcccagagccaaaggagggggcaatgccgaaggcgaataccccgcctttgcccttgctcgaaagaaggagctcttctccagggccttcaccgcggcagtgggcgtggcgttcctggccgcggcggggcagcggagcgagccgatctggtggagccggatgccgcagaagcagagcaccgtgtcgcacgtctga

SEQ ID NO: 20541 - DNA, 390 bp, Zea mays
  Peptide Sequence Number=SeqID_62320
atgagcagagatgatatgccccaagcccttgagcacgccgataggcacgcaaggccgccaatttctcatcaaacacattggacccgtgctgggttcgacattctgccgccatcctcctgcatgaatggcttgtcgatgcatggcgatattggcaaaggaaatggtcctttactaaccaatttccccaaccatgatgattccgaacgtcgagcctccgtccgccttgtcggtgtcgtgacctcctcctgcaacaaggcaagggcacaggcagagttcaaagaagatgactgttgcactataacagcagcacgtatatcatcatggatcccatcaacggaacgaccatacatgaccagattgtccgccaatgtcgtgaaccgttacacataa

SEQ ID NO: 20542 - DNA, 630 bp, Zea mays
  Peptide Sequence Number=SeqID_62321
atgtggacccacagaacagtgccggaggggatcaacagtgaaccgctggattcggagggacagagaagaggatcgacgtgtagaggggcgcatagagggaagcgctgtgggccaaggggaggggttgtagccgctaccaaggggagggggctggtgagcggagaccgctgcggccagccttatgcagatcgatctggatcgttattcctacttcacacgttctcatcactagcaagtggtgatgaaccccgacacgcaaatcatcctcgacgagatcgcatggtgcttctccgagaacgacaccaagtggtatcggcgcacggcggaacaagacgcgcgctgggaaaccaccttcaaggagtttgcggtggatcagaaggctcgagtccaagttctggagaaggcatcggggtgttcgatgattggcgtatgagcctggaaggcagggtggaagaccttcgtctcgaggtcgggaagttgtcgaagaactgggagcgcgccgtcatcgacaaatcttcagtgatgacgggcgtgatggctccttcaccagtggctgccgagcgctcatctaccggactgacagatgcatcggcccaaaggcaccgcgtttatctacaacaccagagataa

SEQ ID NO: 20543 - DNA, 363 bp, Zea mays
  Peptide Sequence Number=SeqID_62322
atgggagacaagggcctcggctgggagcatccatgggaggggtctcggcgagcagcaggaagatccggtcaggcgcgaccgagcaagggtgtcgcggcaagggagcagagacagtctagcgagctgcagccgaccatggatggagcaggcgctggacagtcggccccggtgactgaggtcgacgcgagcacaaaaagggagaggcatcaggcgctggctgaacgcgtggagaagaaggagcgctcggccatggagacgaggtggagcgcgcagcagaggagcaagcagcgggcgcggcagacgagcgcggcgaggaagctccgagctgtgcgcgagcgagcagggagtcacggcgcgacgtga

SEQ ID NO: 20544 - DNA, 519 bp, Zea mays
  Peptide Sequence Number=SeqID_62323
atgccctctgctcctgtctaccacattccaatttgtgcatctagaaaagattgtctccagtttggtggtgttgttgcaaatgaattaccactactgaggatagggcgtggccgtggaaagcgagcttcaaagggttcacagggatctattcgtttagttcatggatgtgggcatggctacgtttcgagctcacaatctgatttgcttgatgtggatttgaaccttaactccacgcccaccaacgatgatgatgtcgaagaaatgatgcataacaacacgtttaactacccattcttttacatacatgtagggccattcaaactggaaacaaataaaggtccaccagagcatgaagaattgttacatgaaatgtttggtgccattgttgtggatggatctagtgcatgcacacccggtgaagtgtttggagggaatgatgaagaagaggttgctatggatgttatggtggagatgattgtgatagatttgcatcacctgctactagttcctatactctaa

SEQ ID NO: 20545 - DNA, 225 bp, Zea mays
  Peptide Sequence Number=SeqID_62324
atggaggaggataggggggataggccgcaaagaaagaatgcatcatctcttcctcatatgtcaaaccccgtggaggctcgtaagatgaaggaaaagctgatgaagatgaaggaccctcaaacagaggagaagaaggagaacacgactctccccaaggacgttcatttgattcccacccttgggaagaacggtcatcctggaaagataattaaggatatgagctaa

SEQ ID NO: 20546 - DNA, 321 bp, Zea mays
  Peptide Sequence Number=SeqID_62325
atggagctggatacgccaggtatggagagcgagactgcgacgcagtttggcgcgcaggtgagtgtcatcggtgttcaccagagacccgtcgggtgcgattggaaggaggaggttggggatcacagggaaaggatgatatgtgccgaggggggacgatttgatcatgccagttggttgacgacgagggatttctgcgcaaaaatcgcgcactcgttacgccgctgccgtgagcgtcgcacggtctgttgtggggagaagaacgagctgacaagattcccaatcacaaacataatattaagggctttacagatctccaaatag

SEQ ID NO: 20547 - DNA, 351 bp, Zea mays
  Peptide Sequence Number=SeqID_62326
atgagagtagtcggtctgaggccgaggtcgggcgaggcagagacttctcctgaggctgaggttgaggtcgggcgaggatgtgactcctctcgaggccgaggccgaggcccgaggttgggcgagacggggaccttccccgaggccggggctaaggccgaggcctggggtcgggcgaggtggagctccctgtcgcgcccgaggctgaactcgggagaggtcacgacttactgttgctattctgaccctggtggttggcacaatagccagagcggggcgaacaacgctgttttcctgtcagatcggtcagtaaaggggcgaagtgactgcggtcacttcgaccttgccgactga

SEQ ID NO: 20548 - DNA, 396 bp, Zea mays
  Peptide Sequence Number=SeqID_62327
atgtctcacaaagataagtatcgtcatcgtcgacctatcagcatcgacagaatcccgattgtccttagtttgaagaaacacccctccggctctgttgctggaaggagcatgcatcttgagataaattgctctgctggtgaatcctatagtagtggcgataatgatgatccatacatgcatcaccctgggcggcagggcgatggcttgttagacgaaagtcaggctgaggcgctgcgcaggaagggaatggcaacgcctcagcgccaccacgatgacatcgccgtgggcggcgctaacaatcgacgccgcgttcccacgagcgcggcctgtgagggtcatggcggtgtctgggctttcccactcgcttctcccatgtcgcagatagattgccgctga

SEQ ID NO: 20549 - DNA, 2517 bp, Zea mays
  Peptide Sequence Number=SeqID_62328
atgacatgccgggaagtggcagcctcgctgcaccgatcgcttgccaagtttatcgtgcctgacaacccagagaaaatcctgtcgcttgtcgctgccaaggcaagccatcatagagctcttggctctgcggacctcacatgtgccctgcaggcatgcagggggcgaggcaaccgatggccgcttgtgctggagatccacgcgacatcagtcgtgcgtgggcttggggctgaccgccttataggcaacttgctgatcgatctgtatgcaaagaatgggctcgtgtggcaggcacggcaggtattcaaggagctttcttccagggaccatgtctcatgggttgccatgctgtcagggtatgcacagcgtggtcttggaaaggaagctttcaggctttacagccagatgcattggactgctgttattcctacgccatatgttctgtctagtgtgctgagtgcttgcactaaaggaaaactttttgctcaaggtcggatgatccatgcccaagtttacaagcaagcattctgttcggagacctttgtgggcaatgcacttattgcactttacttaggatttggatcctttaagctagcagaaagggtattttgtgacatgctgttctgtgatcgagtgacattcaatacattgatctcaggacatgctcaatgtggacatggtgagtgtgctttgcagatttttgatgagatgcagttgtcagggctcaggcctgattgtgtgacagttgccagtctgcttgcagcctgtgcttctgtgggagatcttcaaaaggggaagcaactccattcatatttactaaaagcagcacatgatatcttcaatctgggtgataggacaaacgtggtactgtggaatttaatgcttgtggcatatgggcagattagtgatctagcaaaatcttttgaaatctttggtcagatgcaagctacagatatgtattctaaatacagatgtcttgataaagctcgaaaaattctggaaatgcttgaaaaaagagatgtggtttcttggacctcaatgattgctggatatgtgcagcatgacttttgtgaagaggctcttgcaacattcaaagaaatgcaggactgtggagtttggccagataacataggactggctagtgctgcaagtgcttgtgctgggatcaaagcaatgcgccagggcctgcagattcatgctcgggtttatgtctctggttatgcagctgatatttcaatttggaacacgttggtaaacctgtatgcaagatgtggaagaagtgaagaagctttctctttgtttcgggaaattgatcacaaggatgagatcacatggaatggattgatatcaggttttggacaaagtcgtctttatgaacaagctctcatggtattcatgaagatgagtcaagcaggtgccaagtacaatgtgttcacatttatttccgctattagcgctttagctaaccttgcagatataaaacaaggaaaacaagtacatggtagagctgttaagacagggcacacctctgaaactgaagttgccaatgctttgatttcactatatggaaagtgtggcagtattgaagatgccaagatgatcttttctgaaatgtcactgaggaatgaggtttcatggaatactatcataacaagttgttcacagcatggacgtggactagaagctttggatttatttgatcagatgaagcaagaaggtgttttagctgcttgcagtcatgtggggtttggtgaggaaggccttagttacttcaaatcccagtctaatgcgtatggagttaatccaatacctgaccattatgcctgtgttgtggatattcttggacgagcaggccaacttgaccgtgcaaggagatttgttgatgaaatgcctatcactgctaatgcaatgatttggcgaacacttctcagtgcgtgtaaagtacacaagaacatcgaaattggggagcttgcagccaaacatctcctggagttagagccccatgattcagcatcatatgtcctcctatcaaatgcatatgctgttactgggaagtgggccaacagggatcaggtcagaaagatgatgaaagacagaggaattagaaaagaaccaggtcgaagctggattgaagtaaagaatgcagtccatgcattctttgttggtgatcggttgcaccccttgtccgatcagatatacaagtttttgtctgagctaaatgataggttatccaaaataggatacaagcaagagaaccctaatttgtttcatgaaaaagagcaagagcagaaagaccctactgcttttgtccatagtgagaagttagctgttgcttttgggttaatgactttgcctccttgtattcctcttcgagtgattaagaaccttcgtgtatgtgatgactgccacagttggatgaaatttacctctgaagtcacaagaagagaaattgtattacgagatgtgtacagatttcaccattttaacagtggcagctgttcatgtggagattactggtga

SEQ ID NO: 20550 - DNA, 327 bp, Zea mays
  Peptide Sequence Number=SeqID_62329
atggtagaatcctactgtgaccgccaacgccgccgctcaccgactttccaccgcgccagctcgccaccacaccagcctccacccacggccggacaacccactgtctaccgggtcgtgacgccggacgcccaaggcgcaccccgtctgcctccgctcccccgccctccctccaccactcccccccggctcttccgagggcagaggcctgagcccttaggctccgctggtactgctcccttccccctcaattcctggccgctgggtgctggctcccttgattctgggcttgatgaggacatggaagatgcaaatacagtacctcactag

SEQ ID NO: 20551 - DNA, 122 bp, Zea mays
  Peptide Sequence Number=SeqID_62330
atgaccaggcagagcgccgccgtggccagcggttgcttccgtgcctggttaatcggggagagcgtggtggagggattgccagcaatggcgctgccactgtccgttatcgaccgccgtgaccg

SEQ ID NO: 20552 - DNA, 234 bp, Zea mays
  Peptide Sequence Number=SeqID_62331
atgaccaggcagagcgccgccgtggccagcggttgcttccgtgcctggttaatcggggagagcgtggtggagggattgccagcaatggcgctgccactgtccgttatcgaccgccgtgaccggttgatcttcgatcatggggccgtgggtggtctgaagttctttaaatccagttcgtcggatcttgatccgatggcggtcctcgcgtaccgcttcagtgccagagtgatttaa

SEQ ID NO: 20553 - DNA, 147 bp, Zea mays
  Peptide Sequence Number=SeqID_62332
atggctcgactgaggcttgaaacaggagaggaggtttgttgcaagcctggcttcgggaaatctctcatgaagatgttgtcccacttgtcagagatacgcagtagcatagcccactcgcccacaatccgtggaaagaagcttggatga

SEQ ID NO: 20554 - DNA, 1203 bp, Zea mays
  Peptide Sequence Number=SeqID_62333
atgatgaacggaatcatcagggagacgaaggccaccgaggaaggcaaggacctgctcgacatgctgctcgactggatgcgggagcattggccgctagcggaggacgatgacagcaggatcagtgacactgacatcgccgccaaggagtgcgaggtggacaggaattgctttaaagacaagcttatcctccctaagtcgtccctcgataaacataaacataaactgtacagtctatataaacccgtcaccctcctcatagacccagccgcgtcgcgccgcacaagaggtgagggcacgcgcacggcgcataagagctgggggttgccaagtgttcatccacaaccacaaacatcacgaatggatgctcccgcggcggccgagggctgcggcaagcacattgtgctcgtccacggcgcgtgcctgggcggctggtcctggtacaaggtggccaccctactccgcgcggcggggtaccgcgtcgacgcgccggacatggcggcgtcgggcgccgacccgcggccgctgcgggaggtgcccacgttccgggactacaccaggccgctgctggacctcctcgcgtcgctgccagacggggaccgcgtcgtgcttgtcggccacagcctcggcggcgtgaacgtcgcgctggccgccgagacgttcccggacaaggtctccgccgtggtgttcctctgcgccttcatgccggactgcacggcgcggccgtcgcacgtgctggaaaagggggaactgatcattgtgtccatctctcgccctttggtcaagttcattgaggggaagtggctggactggatggacacggagatgaaaccccaggaccaggatggcgagggcaagctccccacctccatgctgttcggaccccggatcatccgagaaaagttcttccagctctgctcgcccgaggacctgacgctgtcggcgtctctgatgagggtgagctccatgttcgtggaggacctggcgctccggcaaccctacagcaaggaaaggtacggctcggtgcgcagggtctacgtcgtgtgcacggaggactacgccatcgtggaggggttccagcgctggatggtggataacagccccgtggacgaggtgaaggagatcgcggcggaccacgtcgtgatgctctcccggcccgacgagctggtgcgctgcctcactgacatcgccgacaagtacgcttga

SEQ ID NO: 20555 - DNA, 309 bp, Zea mays
  Peptide Sequence Number=SeqID_62334
atggccgatgacctgaaggtgctgggcctatggacgagcccgtttgtgatccgagtccgcatcatgctcaacctcaagggcctggcgtacgagtacgcggaggaggacctcggcaacaagagtgcgctcctgctcagctccaacccggtgcacaagaccgtgcttgtgctgctccacgcgggtcgccccgtaaacaagtcccagatcatcctgcagtacatcgacaaggtctgggcggggactaggccgaccgtgctgcggtgcgacccctacaagcatgcggtcacgcggttctgggtggccggatag

SEQ ID NO: 20556 - DNA, 1677 bp, Zea mays
  Peptide Sequence Number=SeqID_62335
atggccgctgggtccgaccgtccgagcacgttgccggtgctgggcctgggagtgggcgatggggatattaagtgcagagatatcagagagaaggaacctggagtatacgttcctgcgtggttaacaccacctagaaaaaaaagtaaaaatagagttgaggtgatttctgggaaatacagggggggtgaagcaaaaaaacctgaaccaggtcactttaattcgcatcacccacccgagttggcaaaaggtgcccagccccttcatacgagtgagacaaaccctaagtctcccactctctcacatctcagccgcttcgtcggccatttctgggggaaaccgcgaagatcctttgcaagtgtggtaaaaaacccccgcgcgcccaccacggtggtgaagatgcaacctagaggagccgggaggcggggaggtgttgcctctcgaggtactggtcgcagatcggcgcgggagaatgtgtggagaagggtggaagaaggctcatcaagcgctcacagacaggaagctgacccgacagatgaagagaagatgaagggagaagaaccccatcagcagaacccttgggaacagcagagaaaaaggcccgaaggaaaaagcggaatagattggaggcatgttgctgaggatgaggattttaaagaagagaatatcaaaaaagagttgagagttccttggggtctctttatatatgattttcactttgaaagggaaattcaggaagaggacccccatgacaatcgtggtagtggcatcaaaattgatgatcaagatcagaataatgctaagagaacaaagtttgaaggaaacccctggagtgaagggaaaaacaaaggcaagactcaagaagggtataacaataatcagcaaaaaggaaaaaatgaccagcccatgcagcatagatatatgaaggctccccctgctccaccagctgagaaaaacatgtggaatctgaataaaggaaaagatatcatccaagatatttcaactgaagagaatttgactaaagaaggaagagttcaaattacagacagtgaagaagaggatacaagtgaccttttaggggaggaattgtttgctgcaggtatgaacattggaatgtatgatacacataaaaaatgggatactggtgaaaaggatgaagatgcaaatgagagggcaacttatgataaaaaagaaaccacaaaaaagggcaacatggtcattgaagaaatagtggatgaatttaaagatgaagaagaaaagaatgaaattctggtaagcactcaggatagtgggatcatgcttggatcacaagaagaggttgatcagaaagaagaagctgagaaggatatgatgaatcctaaaaacaaaaagcatgctgaagaaaagatgtgtactaaaaaagaagatagaagggttagtgaaagacttaagaaggacgcaggaatcagaatcgaggagaagaacagaagaatagctgctaaaaggaatttggaaggtaaattttatgcaacccggcaaaaagttgatttttcttctcttaatgatattgctgacttagcatttaaggctggtatcaaaataagagatgacaatttagagagtattgatttagtcaaggaaatggaaatagcaaatgaatgtctagctcaaaaaaatagagctagaaaaagacaagggtaa

SEQ ID NO: 20557 - DNA, 2646 bp, Zea mays
  Peptide Sequence Number=SeqID_62336
atggaattcgtggcgtccattgtcgacacggtgttccggccgctcaaggactacttcgcgcggaccgtcggctacgtcatgtcctgcggcgactacatcgacgcgatgggcaacgagatgaacgagctcaagagcaagcgcgacgacgtcaagcgcatggtcgacgccgccgagcgccagggcatggaggccaccagccaggtcaagtggtggctagagtgcgtcgccctgctcgaggacgccgccgcgcggatcgtcgacgagtaccaggcgcgcctgcagctccctcccgaccagccccccggctacaaggccacctaccacctcagcaagaaggccgacgaggctcgcgaagaggccgcgggcctcaaggacaaggccgacttccacaaggtcgccgacgaactcgtccaggtccgcttcgaggagatgccgagcgcgccggtcctcggcagggacgcgctactccacgagctccacgcctgcgtccgggacggcgacgtgggcatcgttggcatctacggcatggcgggggtcggcaaggacttcgatctcaacgacatcccagagggatcatcggcgaccgggctcggcgtgtcatgggagaaccggacgctcaaggagcgcgccggtgtgctctacagagtgctcagcaagatgaacttcgtgctgctgctggacgacgtttgggagccactcaatttccggatgcttggcatcccggtgcccaagcacaactcccagagcaagatcgtcttgacgaccaggatcgaggatgtgtgcgaccgcatggacgtccgccgcaagctcaagatggagtgccttccctgggagccctcgtgggagctcttccgtgagaaggttggcgaccacctgatgagcgctagccctgagatccggcaccaagcgcaggcgctggccatgaagtgcggcgggctgcccctcgctatcatcactgttggccgggcgatggccagcaagcgcactgcaaaagagtggaagcacgccatcactgtgctaaagattgccccatggcagctccttggcatggagtttgatgttcttgagcctctcaagaagagttatgataacctgcccagtgacaagttaaggctctgcctgctatattgctcattgttcccagaggagttctctatttccaaggattggatcataggctactgcatcggtgaaggtttcatagacgacttgtatactgagatggatgaaatatacaacaaggggcatgaccttcttggtgatctcaagattgcctctttgctggagaaaggtgaagatgaggatcatatcaagatgcaccctatggttcgtgccatggctctgtggattgcatcagatttcggcaccaaggagaccaaatggcttgtccgtgctggagttgggctgaaggaggcaccaggcgcagagaaatggaacgatgctgagcggatttctttcatgcggaacaacattcttgagttgtatgagaggcctaactgccccttactgaagacattgatgctgcaaggaaatcctgggctggacaagatatgtgatggattcttccaatacatgccatctctcagagtgttagatctgtctcatacctctatcagcgaattgccttcagggatcagttcattggttgagttgcagtacctggatttgtataacacaaacatcaggtcacttccaagggagctaggatctctatcgactctgcggttcttgcttctctcgcatatgccgctggaaacgatcccaggtggtgttatatgcagcctcacaatgctgcaagttctgtacatggacctcagctatggagattggaaggttggtgcaagtgggaatggtgttgattttcaggagcttgagagcctgcgtaggctcaaggcgctggacatcacaatacaatctgttgaggctctggagcggctgtcacggtcatatcgcctcgctggttccacaagaaacctactgataaagacatgctcgagcctgacaaagatagagcttccttccagcaacctgtggaagaacatgactaacctgaagagggtgtggattgtcagctgcggcaacttagctgaggtaatcatcgatagcagcaaagaagctgtgaatagcaatgcgcttccccgttccatcttgcaagctcgggcggaacttgtcgacgaagagcagcctatccttccaaccctgcacgatatcatccttcagggactgtacaaggtaaagatcgtctacaaaggcgggtgtgtacagaatctagcatcactgttcatctggtattgccatgggctggaagagctgattactgttagtgaagaacaagacatggcggcaagcggtggcggaggacaaggttcggcagcgtttagagtcatcacacccttccccaacctcaaggaactgtacctccatggcttggcaaagttcaggaggctcagcagcagcacatgtacactgcacttccccgcgctggagagcctgaaagttatcgagtgcccgaatttgaagaagctgaaactctcagctgggggactcaacgtgatacaatgcaacagggaatggtgggatgggcttgagtgggatgatgaggaagtcaaagcttcttatgagccattgttccgcccattgcactga

SEQ ID NO: 20558 - DNA, 288 bp, Zea mays
  Peptide Sequence Number=SeqID_62337
atggagaacttcaaccctttaagtgagaatggagagcagggtacggggtgggcattcacacccccaaccacggaaaacatgttgtgggtatgcattggtgccagcttcactctaccttggttttattgcattgatcatttgggttgggcggcgctaccggagctaaaggggcggcagcacactgggagcgcggctgcgccagatcggcgacgcgatgggattgcgtccagagggtggcggctgtgcataaatgatgttcctcactctcccacctgcatctatccatga

SEQ ID NO: 20559 - DNA, 426 bp, Zea mays
  Peptide Sequence Number=SeqID_62338
atgacttggaagcttgttaagaagaaagaaaattcacccagcgaccagcgagcaccagcaagacggaggaggccgcggatgtttcttggtgaaccagtccacctgccggggccatcttctgggctgttacgcttaagcgtacttgttcaaagtcaaagttttatcgtttcgcaggatggaattgtaaaactggacatatgcgataaagaatgtcgtccaccgaatcagagcggcgcaccgcgcacggtcttcccatgtgtttttacagtagttacaacactggacctcgaaaagaagaaatcccagaaggaagcagaaacagagaaaataaagaagaaatctgacagcgataaagcttgtaggaaagaattggaaaatgataaatctcctaagagggattcagcaaatgagaaaaaggcaagctaa

SEQ ID NO: 20560 - DNA, 1029 bp, Zea mays
  Peptide Sequence Number=SeqID_62339
atggcattgaggcggcggctgttgctgctggtggtggtcgtggcggccgccgtcgctcgctgccgggcggacgaccccgcggtgagcatgctgctgccgggactcccggtcgccggcctcgccgtggggttctacaacgagaagtgcccgcaggcggaggacctggtgctcgccgagatgcggaccctcgtcgacaaagacgagaccatcggcccggcgctgctgcgcttcatgttccacgactgcctcgtccggggctgcgacgcgtcgatcatgctcgtctcgcggaacgggactgcggagagggacgccttcccgagctacggcctccggggctacgccgagatcgagcacatcaaggccaagctggaggacgcgtgcccgctgaccgtgtcgtgcgcggacatcatcgtcatggcggcccgggacgccgtgtacctgagcaacgggccgcggtacgccgtggagaccggccgccgcgacggcaaggtgtcggcggagtacgacgccgacaacgacctcccgccgccctcctccaaaatcgtcgacctcaagacctacttcagcttcaaggggttgggctggaaggacctcgtcgtgctgtcaggaagccacacgatcgggagggcgcagtgcaccacgttcgcgtcggaccggctgtacaactacagcggccacgtggggcaggacccgtcgctgaacaaggcgtacgcggcgcagctgcgggagatgtgcgagccggggctcgccgacgacaccaccatggtggagatggacccgcgcagcccctacaccttcgacctcagctactaccgcaacgtgcgcgccaaccggggcctcttcacctcggaccaggccctcctcgacgacccgtggaccagcgcgtacgtcgagcgcatggccgacgcggcgtcgcccgacgaattcttcgccgactacgcggccgccatcaccaacatgggccgcatcgaggtgctcacgggtgacaacggcgagatcaggagcgcctgcgccgcgtacgttgactag

SEQ ID NO: 20561 - DNA, 351 bp, Zea mays
  Peptide Sequence Number=SeqID_62340
atgctgcacctcgggttgtggttgttgttgctgctattgctgcccttcctgggacagttgtggccaggaggtgggggaatcagagccgccagcaggatcggcgctagcaagaggtttggagacaggggtcccatcgctatgacgcagcctacaccatcgctctccaccggactcgccaagagcgctagggatggagctgctgctagagagccccttccccttctccaaagggctagggccatgctgaggccgccctacctagctgtggcccctcacttgacacacctggtttatggaccccacggtgcgggtcacctcctagctgacaaatcaccagaacattatcattga

SEQ ID NO: 20562 - DNA, 1158 bp, Zea mays
  Peptide Sequence Number=SeqID_62341
atggtgccgacgcatggcgatacagccggaccgagctccagccaggatgacccggcagccagcgtgaagaagcgcaacagcaacaggcctcagtatcatccgtttactcagcaacagcttccagcttgcaagcctatacttgcgcctcagacggtcatccctgtactcctgtttgtgggcgtagtttttatcgtgattggccttggctgcattgcagcctcaaacagggtggttgaagtggtctatgagtatgagacttcatgcataccaagacacatgcttggcaacaaagtcgcctatatccaaaacccatctatagataagacatgcacatggattctcaaggttcctagggatatgaagcacccaatctacgtatattaccagcttgacaagttctaccagaaccacaggaggtacgtgaagagccgcagcgacaagcagctgagagatcccaaggaggccaacagcacgcagcagtactgcaagcccgaagctaccaccgagcacgggagcgccgtcgtcccctgcgggctcgtggcctggagcctgttcaacgacacctacagcttcgcccggggcaacaacagggcgctgagggtccacaagcgaggcatctcgtggaggagcgagagggaacacatcttcgggaagcaggtgttcccgaggaatttccagaaaggagctctgatcggaggaggcacgcttgatccaagaatacctgtgagtgtactacagtacctctggaactttattactggggaaaaaaaacagggctgtgatgaagtcgaaattccacagctgagtgagcaagaagacctgatcgtgtggatgcggaccgcggctctgccgacgttccggaagctgtacggcaggatcgaggcggacctccgcgccggcgagctggtcacggtgacgacgcagaataactacaacacctacagcttcggcgggaagaaggcgctggtgctgtccacggccggcgtgctgggaggcaggaacggcttcctcggccgcgggtacgccgtcgtcggcctggcctgcctgctgctggcgctgctcctcaccatgctctgcctcgtcttcccactgaaagaggaacaccttgcgctgcagtaccctttgctccggcctgccacggtgaccatgcatgcctag

SEQ ID NO: 20563 - DNA, 297 bp, Zea mays
  Peptide Sequence Number=SeqID_62342
atgatggtgccttggagccacgagaggaccacattgtccatcaggcaccatgatggaaacggcgaggatggcgaggatgagacgatgcgcggtagccatctgggcggtcagggcggcgcccatggcacgctcttgctccagggcgagggacgcagcgcgctcgcgctcctacgaggcagccacggtgcctggattgtggtgatggcggcgaccaacgcggagtcggtggtgggtgtcgtcaacgtgggagcagtgagggtaaagcctggcggggtcgacggagacgctgctgcgtag

SEQ ID NO: 20564 - DNA, 570 bp, Zea mays
  Peptide Sequence Number=SeqID_62343
atggcaagttcgcgctgctttgagaacccgccggtgctggagccggccagcggaggaggcgaggtggttgacgacttcggcgggcagaaggcctacgtcagcggctccgccgggtccaaggccgccgtcgtcctcatctccgacgccttcgggttcgaagcgccaaacctgaggaagatagccgacaaagttgcttcgctcggttacttcgttgtggtgcccgatttcctgcatggggatccatatgaccccagcaataatgcccatagcaatcctggaacgtggatacagtcgcacaatccgcaaacggcattcgaagaggcaaaaccggtaattgcggctataaaggagaagggtgtgtcgagcatcggagctgcagcaaaggtggttgtggaactggcgaaagttcacgagatccaggctgctgtgttggcacacccttctttactaactgtcgatgatatgaaagatgtcaagtgccccatttccatacttggagctgaaatcgacaggtcagccccgcctgaattgctaaagcagtttgagcaagttctttcagcgaaccccgag

SEQ ID NO: 20565 - DNA, 660 bp, Zea mays
  Peptide Sequence Number=SeqID_62344
atgaccggtgaccaggtagggacacttgcagatccatcattcccacataaaatgtctttggagtttatagctaccattgcgtcatctatttggtgtgaaatgaatattcgcaaagagaggtttaaacaagaatgggatttggtgattgttaatgctttgactgcagcttgttgcaacttgatggttcttggacttttagcaccatgccgttcatatgcgagtacatctcgatttgacttccaaaatgcaattgagaaacttccgaacaacatatttgagaagagctatcctttgagagagtttgatctagcaaaacgaatcagtgcattcttttataaagctgctgagcttagtctggtcgggtttgtagctggctctgtgcaagggggtatgtcaatagtcttgtccgcaagaaaagaaaggaggttatcggtgactattccctctatcagcaccaatgctcttggttatggagctttcctaggactctatgctaacttgcgttatcaattgctatgtggagtagaccaatatatggtcaagcgcttcgatgttttgggtgtggcaatcttcttcagcacagcagcaaggaaaggtgcacatcattatactaagaagcagcagcagcagagccttttagtccgaaccatgtcgggatag

SEQ ID NO: 20566 - DNA, 204 bp, Zea mays
  Peptide Sequence Number=SeqID_62345
atggcgagagtagcgtgtaccctccgtggcaagaggctggacagtggtgtatttgtgctctcggttggcgtgaacctggtctgcatacccttgagagtcttttctttagtcgggttacgagtcactttgattgtgattgatgttaagcgccggtgggcacaaccttcttataggtctaagtacctctcctatacttcttattga

SEQ ID NO: 20567 - DNA, 309 bp, Zea mays
  Peptide Sequence Number=SeqID_62346
atgggcgaggtggagggagaagagggcgagtgccatgggaagcaagggaccgggggcgagctcggctggggtcttggtgaggtcatggcgacttctggggaagaggcgcaggctgccaagctcgaggaactaccggtggaggcagtactgctcaccagggttgtagggatgtcacggagtcaccgagagcagacaggcgtcttcgtcatcttaaccgccgtgtgtcttctcgctcgtcgctgcgtgatcatgcagcatgaggtcacgaccggcgtgccaccgcagcggagagagaaagagaggcagtag

SEQ ID NO: 20568 - DNA, 858 bp, Zea mays
  Peptide Sequence Number=SeqID_62347
atgtcgcgccgcccggatacagggcggcgtccggctcggggacaggacaggacgggacggacgcctttgccgatgtcagtgattcctcgctgcttcacgattcaccgctggaacaagagcacgcgtgctcatcctgtagttctattcccacgaatcagcagttggagaaatcttcggctggagttagagagggggtgcatgctcatatccctagattcaaattctgcattagtgatttgtttggatattgaccgtaagcaccttctcatccagattgagccaaagggtgtgaactcatctcggtccattgacatcgatcagcaatcggagaagcacaagagtatgtcaagagtgtcagcttcagtggagagagagcttgttcatgaacaacccactgacgacgatgcgtctgcgctggcgtatttggttcgacgtcggtgtccaaacacgtatctctttttttatggacatgcactggaggaccgtgttgttcggatgacttttatagctaagccgacctattccagtaggagaaaatacctcaatgacttgctagatgctgatcttgtgagcctgagtcgaggtgacaggaaaagatggcataacatgcgggctgctgctgaggctgctgctgaggcagctgctcaggctgcgaggctgctgctcaggctgagcctgctgaccatgcaggccatgaagactaaacctgatggtgctgccggttctgtctgtagtttagagctgcagtcgcttatctactttctactaattctagatctttgtgaacttaggacattgtgcttatcatgccgaatgtttggtgtttctaaatctttagacattgtgttgctgttttaa

SEQ ID NO: 20569 - DNA, 813 bp, Zea mays
  Peptide Sequence Number=SeqID_62348
atggtacaccaatggaaatgtcgatcagatggggatgagttacgcgatggcgtatccattcggcatgtgcgggatttattcaccatgtggatgtggcgggttatatttcgcgtcaatatcgagacagaagctcagcagcacgagtcttcacgcatcaatggcggcgcgctgatcaagactatcaatattcgcgtagagaaccctagcctgcatgattcagccattaaagagctggaacaagagcacgcgtgctcatcctgtagttctgttcccacgaatcagcagttggagaaatcttcggctggagttagaattgagccaaagggtgtgaacttatctcggtccattgacatcgatcagcagtcggagaagcacaagagtatgtcaagggtgtcagcttcagtggagagagagcttgttcatgaacaacccactgacgacgatgcgtctgcgctggcgtatttggttcgacgtcgttgtccaaacacgtatctctttttttatggacatgcactggaggaccgtgttgttcggatgacttttatagctaagccgacctattccagtaggagaaaatacctcaatgacttgctagatgctgatcttgtgagcctgagtcgaggtgacaggaaaagatggcataacatgtgggctgctgctgaggcagctgctcaagctgcgaggctgctgctcaggctgagcctgctgaccatgcgggccatgaagactaaacctgatggcgctgccggttctgtctgtagtttagagctgcagtcgcttatctacttttctactaattctagattcttgtga

SEQ ID NO: 20570 - DNA, 168 bp, Zea mays
  Peptide Sequence Number=SeqID_62349
atgcctgaggagtttgcggtggcaatagtggcgatggaggccaagacagcggcacaacagcaaccccacggaggaggaggatccacacctaagctaggccttcgtgccgaagttgtgttccacatgatcaagtacatggagaagctgagagcacctagaggggggtga

SEQ ID NO: 20571 - DNA, 513 bp, Zea mays
  Peptide Sequence Number=SeqID_62350
atggacgcgccgtcgtcggggacatggtccgacacgttgtgggcgcgcacgggctgcgtggccgaccccgccaccgggcgcttctcctgcgccacggccgactgcggcacgggcgacgtcgcgtgccagggccgcgggccggcgcctccggtctcgctcgtcgaggtcacgctcgccgcgccgggcagcggcaggccggacttctacgacgtcagcctcgtcgacggcttcaacgtgccggtgcgcgtggcgccctcgggcggcggcgggcgactgccgccccgcggcttgcgcgggcgaccgtgcaagagcgcgtgcatcgcctacggcagcgcgcgctactgctgcaccgggcagtacggcacgccggcgatgtgcggcccgaccaactactcgcaggtgttcaagagcgcatgcccgtcggcctacagctacgcctacgacgacgccaccagcaccttcacctgctccggaccttccagctatgacgtcaccttctgccctgcgaactaa

SEQ ID NO: 20572 - DNA, 1986 bp, Zea mays
  Peptide Sequence Number=SeqID_62351
atgggcgtgctcttctcatgccccgtggaggaggaggaggacgtgccggcaggagctgcagctgcccttccggcgccgtgcaatgccgccgtggagccgccggccctcaagccgtcgctgcagggctccgggaagctccggttcgagcgctcgctcggcagcctgatccggcgggagcagcagagccccagcgcgcgcctgcacgtggacgtcgacgtcgacgtcgacgccgccgccaagcaggtccccgccacgtccaccgtagcgcccgtgccgccggtcatgcccagggagctcgcgcggaccaggttcgccgacgccgcgcccgcgcccgcgccggagagccccaagcacgaggcggcggccgtcacggtgcagaaggtgtacaagagcttccgcacgcgccgccgcctcgccgactgcgccgtcgtcgtcgagcagagctggtgggagctgctggacttcgcgctgctcaggcggagctccgtctccttcttcgacatcgagaggcaggagtcggcggtgtccaagtgggcgagggcaagaaccagagctgccaagttccagttcttcccacaggagattactgacggcattcgcaacaaatcgcatcgagatcaggttggcaaagggctgtccaaggatgacaaggcccagaagcttgcgctgcagcactggctcgaagctattgacccgcgccaccggtacggacataacctccactactactacgactgctggctgcggtgcgagagcaaggagcccttcttctactggctggacgttggagaaggcaaggaaatcaatctcgagcggtgtccgcggttgaagcttctaagccagtgcatcaagtaccttggtccgaaagaaagagaagagtatgaggttgtgatcgaggatggcaagttcatgttcaagaaaagcaggcaaatcctagacacgtccgatggaccaagagattccaagtggatctttgttctaagtacatccaagaatctgtacgttggacagaagaaaaagggcacatttcagcattcgagcttcctcgctggaggagctacatctgctgctggtcgactagttgtggaagatgggatcctcaaggctatttggccacacagcgggcactaccgcccaacggaagagaacttccaggaattccagagcttcctcaaagacaacaatgtcgacctcactgatgtcaagatgagcccagatgaagacgacgaggagttttggagcaggctcagaagcatctcttccgactgctgcgccgtcgctgacaaacccgaagaagatcaacaggccgcagctcaagaaaccagcaacagttgccaggcacctcaagtcactgaatcgaccacacctgacgaagtctctccctccccgtcccagcaggaagaaaccagcaagagtctcagtcccactgcaactgtcacgaggcaagattcatcagaggacgccgagacctcaacgacaagccaccgtgccctgttcgaagatggtcaggaggaggaccacgctgccgcggccaccgccgccgacgacaatacagccgtgccgagggagaagatcctgcagaggatcagctccaagaaggagaccaagtcgtaccagctggggaagcaggtgtcgttcaagtggaccacgggcgcggggccccggatcgtgtgcgtccgtgactacccgtcggagctccagctccgggcactggagcaggtgcacctgtctccgcggagcggcggcgccgccgcagccgcaggggccggtagggcggcctcgtcccggttcgcctcgccgcagcggtgcggcagcccggttgcggcgagagggcgccgcgagcctctggcgtcggcggggtgcggcagggcggcctcgtcacggttcgcgtcgccgcagcggtccagcagcccgatggcgagagcgcgctgcgagcagctgacgccgagggaggcgttccggacgcacctgatggccagaggttaa

SEQ ID NO: 20573 - DNA, 501 bp, Zea mays
  Peptide Sequence Number=SeqID_62352
atgggcgttgcggtggaaggacagcaacacagtgggctgacgcttacggacacggagcacgctcagaggcacgggaaggcgcggatttatgggattttggaatccggtgaacagccgtcacatgccggtatgggcacaggcaaaccacaacagcgagaactgaagagaagggcactgaccggacaaacggctggtcgtgctgacgagcggacggagccgtcccctccatcgacgaccgccacgctcaccgcagcgcacggaggccgcagcgcggagctcgggaagcgcgccacggacgcgccggccgccacggacgcgccggccgcgacggacggccgccacgaatgcgctggcctcgccccgagccgtagaaacgcagatccaggcggaggcccccaggtccgccaactccaacggctcggcgagcggcccgccgtggtgtcctgctgtgcagaggcggaggcccccaggcattcacgtggtggaattgaattgatctaa

SEQ ID NO: 20574 - DNA, 2034 bp, Zea mays
  Peptide Sequence Number=SeqID_62353
atgtcctcctccgacccggacgacgcccccgacgggggcgaggactcgcccctcttccgccgcagcggggggccgtcctccggcggcaccgttggcgacgtccccgtctcgcagtcgctcatcaaggcggcaagcaacgtgtgcttctccctcttcgtgctcgccgtccttgtcgtcaccgtcgtcgccgtcacataccagccgccggacccctggctccagtcctccgccgccatcaccacctcgctctcccgcgtcctccccaactccaccttcctcgtccccgacgactcgctcctccccaccggcgaggatttcaactcctccaccgccgtcccagccccggtgcgggatgacgatgacgcggctgcggccgtcagcgccgcctccgccgcggccgcgggcaacaggacctgcgacccggacgcgccgctgaactgctccgacccgcgcgtcctcgccgccgtcaaggcgttcaacgccagggccttcttccggaagtccatcgtgtttctcagctacgaggcgccggtgtccggccccaagcctggccagtgcgatgtcgcctggaggttccggaaccgccgggagaagtcgtggcgccgctacagggactaccgtcgcttcagcctcgcctcgggcgatggctgcgctcttgacatcgtcagcgtcggcaagttccgctcggggacgaatgcagctcgccggccgtatcctaagggctcgaagtcgaagaggccccgcgtgtcgccgccgcctgtcgatgcggagatcaatgacacaatccctgtcgtcggatcagaggcagagttcaagaagggaaagtacttgtactacatgagaggaggtgaccattgcaagagcatgaaccagttcgtctggagcttcttgtgtggactcggcgaagccaagttcctcaaccggacgttcgtgatggatctgaacatctgtttgtccggggcacacacggtcgacgggaaggatgtggatgggaaagatttccggtactatttcgatttcgagcacttgaaggagagtgtgccggtggtggaggaaggggacttcctgaaggattggaagcgttgggataagaagaagggcccaggacggatcacagtgcggaaggttccatcgtacaaggtaacaccaatgcagctgaagagggacaagagcaacatcatctggaggcaatttaatggccatgagcccgagaattactggtaccgagtttgcgaaggacgagctgccaaagtcatccaaaggccttggtatgctatctggaagtccaagagactgatgaacattgtgactgagattgcaggtaggatggattgggattacgacggtttacatgttgtccgagggtggaaggcgcagaacaagcaaatgtatccaaacctggattccgacacgtcgcctgatgcgctcgttgataaggtgaccaagcttgttaagccgatgagagatctctacatcgcaactaatgagccattctataactacttcgacaagctcaggtcacacttccatgtccatttgcttgatgattacaaggagctttggtcaaacactagtgaatggtacaacgagacaacaacacttagtcggggtaaaccagttccattcgacgcctacatgagggtgattgtggacactgagtcatctgagtcactaaggagcagctggaacaaaaagctcaaggtcaccagccagcatccattcaagttgaggacagagtcatctgagtcactaaggagcagctggaacaaaaagctcaaggtcaccagccagcatccattcaagttgaggacagaggacctgtgcgtgttcgccagtcctctaacacggcagatctacacgagcgtcatgaacgatgagtcaatacacatgaatccggtgcagagacggaaaacaatcgaaacaaaaggaatagggatcccaagaaaagtaacagacgacggcgacggagtcgacgagaaggacgagaagaaaggagcgtctgccagtcaggggaaaaggaagacaacagcatag

SEQ ID NO: 20575 - DNA, 705 bp, Zea mays
  Peptide Sequence Number=SeqID_62354
atggccaatgatggagacgatggacaaagccaggattatctcttcaaaattgtcctgatcggggattcctctgttgatcattctgatatgaatgtcgtcacgattctggtgggtaacaaaaccgatctgaagcatgcgcgtgaggtgagcaccgcggaaggacaagcactggccgaggctcagggcctcttcttcatggaaacctcagctttggattcgtcgaatgttgcagcagcttttcaaactgtggttaaggagatctacagcatactaagcaggaaggtgtttcagtcactagagcagaagaaaagcgagctgcagtcgctaagcagcgggaaagccgtggtgctgcaggtgattgatctttgtcgatatacccaggacacgaggactgcagctatggagggcgatcggattgtgagacattcgggagcatttaacgcaaagggtgagtcagacagacagtcaggccttgccaaaggcgccacggcgaactccgctccgcccgaccccagggctcggactcgggctaagacccggaagacggcgaactccgctccgcccgaccccagggctcggactcgggctaagacccggaagacggcgaactccgctccgcccgaccccaggactcggactcgggctaagacccggaagacggcgaactccgctccgcccgaccccagggctcggactcggggctaa

SEQ ID NO: 20576 - DNA, 966 bp, Zea mays
  Peptide Sequence Number=SeqID_62355
atgtcgtccgtgccgtgggcgaggctcgtgtttggattgctgctcctcgttctgctcggcttcgcgttcttcaagtggggcctcccgtttctctccgagaaggtgatcatgccaattattgaatgggaagcaaaatctttcggcctccccgtgttagcggtggtgatagtcgtttctctagcggtcttcccggtggtgttgctgccctccggtccaccaatgtggctaaccggaatagttttcggctacggtttcggcttcctgatcatcatggtcggggtgaccatcggcatgtctataccttactggatcggcctactgttccgcgaccgcctaaacgtaatgtctctaagcttccatctgatcatgagcgctacgattcggtgtatttccttagcggctggttggttggtcccgatgccctggttcctagttttgctacccttcttctctcacctgttcgttgacgcgcagctctggctggagaagaaatggccacggcagattgctctgatcaaactggtaggtcaagggagctggttccagcagttccgcgtggccgcgttgctcaggatctcgccgttcccatacgcgttgttcaactacgctgtaaccgtgacggagatgaagttcgtcccttacatatggggttcggttatcggaatggtgcctgatgtgttcatcaacatctacagtgggcggctgatacgcacgttggctgagctgaattatcggaagcaccggatgacagcagtcgagatagcgtacaacgctatatctgtaattgttaccgtcgtctttgcgattgtatttacagtatacgcaagacgagccctggacaacatggaacagtccgaagtcgcctgcgctgaacctgtcgtcggtgaccctgctggatcgaccgagtccagggatcaccttcagggatgttcgactgcacgttctgtaccaatcgatgttgtgtaa

SEQ ID NO: 20577 - DNA, 471 bp, Zea mays
  Peptide Sequence Number=SeqID_62356
atgggccttctcgaggtgctcacggcgagggaccgcctgctgccgcgctccgcgtgccggtaccagcggctgcgcggcggcgagctcggcggctcgtcgccgtcgacgggagcaagcgtcagggcgaggcggccgctgcggctgcggctgcggcggagggcgtgcaaggcgggagggagatggggggccaccaccacgactgccaacggcggcggcaagcggctgcggctgcgcctggttcggctgctgctcctgcttcccgcgcgccgggttgccgcgctggtcgcggaggtcgtgcggcgtctgctcgcggcggcggtggccgctgcggactgccccgccatcgtcttctcctcccagtgggggctccccgtgctgtcgccgcactgcggcagcagcagcaggagctccaggccgcggggcttctaccttgacaggagcctctccggcgccggctctggcgtactatga

SEQ ID NO: 20578 - DNA, 618 bp, Zea mays
  Peptide Sequence Number=SeqID_62357
atggggaatcaagggccctggttcaatgaactaacgcaaaacggtatccgatgttctgggccatcggatcaaaggtgggaggccaagattgggcgcctaatagttccaaccagccaaggggcggcgtcgctcatgcccgcgatagcgcagtcgccggaggctaggtgggctggggacctaggggttctagggctgtctggacaggccagggccattgaggaaaacccaatgaacactgtggtggagctccggtttgcgagaacaggaccaaggttcatatgtgctaagtggttgagaagtgcaaatcaagaatcaagggacactaccaagaaaagtggaaatgaattggagaagttttggccgagtttagccaaaccagcactagcctgtggtgcaccggacagtgtccggtgcccaggctggcccggtgacgaactcgtcgctctcgggaaaaagacagtggcgctgcggctaaaattcaacggactgtccggtgtgcaccggactgtccgggtgagaggctccaacttgtggagattcctcacaaatgggaaaacaagtctaaagaagaaaattgtggtattcaagtggatcgttggatcacttgaaaggggttga

SEQ ID NO: 20579 - DNA, 141 bp, Zea mays
  Peptide Sequence Number=SeqID_62358
atggccatgatgggttcaacatcgaaaaagatgtacctcagccaggtgaagaagcagcaaacttttgttgcttttgttccaaggtggtaccgaaagaagagaatcaagattaaagctgcaggaggaaaggccctcagttaa

SEQ ID NO: 20580 - DNA, 318 bp, Zea mays
  Peptide Sequence Number=SeqID_62359
atgcatgatctaatcggcaacctcatcggaagggtcgtggaagcatacatcgataacattctcgtcaaaactaggaaatccgagggtcttgtatttgatcttgggctaacattcgaaagttttgtctgcgagattaacgcaggacatcgaaggagcaaaacgaaacaaaaacaaaccaagccacccttcggaatgcctttgcctaaagaaccaagcgaaaccaaggtcttttgtcctgttaagatctcaaactcgttcaattcctttgggagggaccgaaaaacttatgataggattgttgtgaactatggagtttga

SEQ ID NO: 20581 - DNA, 357 bp, Zea mays
  Peptide Sequence Number=SeqID_62360
atggcccagaacgtttttggcgaggaccagcccgcggggaggtcccacaccctcgcttcgccgtcgtcgtcctcggagcacgacacccggttttttctttcacctgttggtcacggccaccgcgacgagcggcgtggcgttggtgcagctggcggagacgggctcggggacggacagctcgcgggcgggcaccggggatcaccaataaagaaggcggatagaaccagcgcccatggctgggcagacgtggggagctgcaagcctgcaacgaacgtggtgccggtgccgacggccacggcgaggccgttccgcggcgtgtttggcgaccggggagtcgtccacgacgtcggccggtag

SEQ ID NO: 20582 - DNA, 123 bp, Zea mays
  Peptide Sequence Number=SeqID_62361
atggacgacgagactccgatgctcgcccgccgctggcttgtggtgcgtgcttgcgaggagacggtgcagccaggcgctgcggaaacgctcgtgcacgtcgcgctcgcggcgctgctgggctag

SEQ ID NO: 20583 - DNA, 444 bp, Zea mays
  Peptide Sequence Number=SeqID_62362
atggtgtggcgtctggcgtggcagatatggatggcttattgggttttcctctcggtgcagggtggacctgtggcacagtcgccggcggggcgaaggatcaagacaagctccacgaggccagcagtaaggagcggcacacggggagggggcaccgctgtctctgcctctactcccaccagttcaggcgtccgtggcgccgggctccacggcgatcattgtgacgagcgacgtgcgacttgccatcctcaaaggcttcgtcgtcgtcgacccgctcgccacaatgcggccgccgactatgcctacggcacgcgccgcgacctggactcaaccgtcactataggtctcatgttcgttttgcaaccgacaccagatattctgcgtgctgcgttcctcagtcccagccggctagcccaggccgcacgaacaccacgcggacataattaa

SEQ ID NO: 20584 - DNA, 321 bp, Zea mays
  Peptide Sequence Number=SeqID_62363
atgtggatagaattttttcatcttattcaactgcaattacgggaattctcatatactttttacctgagtacttccaattatctccaatatatgctgctgaaaattgtggtaacagcatggaggggccaacatccagcagttttgagaacatttagccagaggcttagcaggggtttcaatgatgctgtcaatgggtttccagatgacggttggtcactgatgagcagtgacggtgttgaggttgttactattgctatcaactctactagtggtgctactggattgccctctcaggatatctattgtgcttacagctggtaa

SEQ ID NO: 20585 - DNA, 4071 bp, Zea mays
  Peptide Sequence Number=SeqID_62364
atggagcatctgttcatgcaggctttcgagagcagggaccgggtggccgcgcaggtgcagcagcaggccgacttctactcccagaccctcgcctccagcctcctcgccgccggtcaccagcccccggaatggctcatcccttccaccaccctgccccaagagctgaatggcaaaccaattgttctgactggaagacagatcacaacaccagctatcaataggaccgtctttctgcctctagctattcctagcactctgtccacaaaatcaggggatccaaatggatatgatggctacccaaacactaattgcactgctatgggtactaaccaacatgaagaggagcatcaagagcagtcttcacttgcccaggagcttactgagtcttgcactgcagacaaaatgttttcaaggattcagcgttccaggacaaggcaaatgcatattgaagatcgtgtgcatggacaggatcaagctgcaaagagcggaagctgtgatgggatgcataggtctaaccttaagactgtggggtcaaacagagctgctgcatcatctttgatgccgtgtgatgatgtcccaaaccttgctgcaacaacatcagatccaggccagggtagtggtttttgtgccattcaagggaagtcaattgacttcttgaagtgcaacaacaatcctgaagaccaaggagttaagttagatggtttcccgccgttgattgtggagaacaaaattatctgttctgatagcgatatcggggtcagtaacaactgttctattagagattcactgggtgcgccacttccagatttctctaagccaaacactgcagatagtgtatgcctatgccaccgaattcctgaaactcacttactggttgagccaaaaatacttcaatttgatgttgctgaatcagtttgtatgaatccttccagtgaacaaacaggtcagcagcaggaatctagtctgaaaagtaaccatcttgatcttgcttttacaaatccttcaagtgaagacccatcttctaccagttctcagggacctcattctatgggaaggttgttgcttaatcatgttaagtcaagaaatttgaaccctgacagtgaaccagtggagcagcaccacaaatatacttcagaatgtggccatcctgatcttactagtatgcattctccaaataagaaaccatctctgacgtgtcctgttgaagcaccgaattctatgggtgaaccattacttcataaggatacagaacatattcctgaaaccaattctttgggaagagcatactccaagttcagccaaccacttaaaatagatacatcaaacagtaatgaaaccaattgttctgtggtcaactcactgcttgataatgatacattgcaggccactgaggatactgacaaactgaaatctcatgtctcacctccatacagtggacctttgcagctacctacccaactagctgatgcaaggtttggggctcatacatcaccaggaatactaccgaacagtttgttaggggtggatgggtgtaatcacctttcaaatttgcaaaaaaatgacacaaatagccgttgctcccgatacaggtctgctgtaagcctagagctgcttccacctcaaaattttatttccactgatgcttgtcaatcaaggctcttgtcttatagaacacaaagtaatgacaaacattccagttctgttgcttctgctatgaatgcctctaaatctgcagatagtaagttacctcaggaacagtatttattggtcagaccatctttggaatttaatggaagtatttcagatgcggaaactcccttgggccgttctcctctgggcatgcaaaatgaaatgctccaagcagacccagtatatgactcagccaattgctctccaggaattttgggtgatgatgctcatgtcagcaaagcctatggtggttctgctgataacagaaagaacatatctgtggttccgaaagttggccccatcagttcatctagaatcagagatatgcaaataacagaaaagaatgtggtcgcttcatcagaaaaaaacaatggaaaactgcaagaaggaaaagcacaagagacccctcatcctaaggatgatgtgcaagtaaatgctgattcatgcacagctgaaaacattgagaaaatgaagtctccatgtacgtcagaatcatgtgaggagaacaacaagcaccaggaggatagaggacatgctcagaagaagtcagctgcagatgtcgtccagatcaatgggggtatgtcatccaaaagaaaacgaatgaagtgccaagacattgcatttcccagttctcaagacacaaatccattatttccgaaccaccaagatggcattggcacccatgtcgtaattgcagaaaaaatctcaatggaaatacaaccttctgatccttacatcctaagaagtacaggatttgatgacttcatgcttctcaaatctgagacaaagaatgatgcagtgaaccacagtatttcagttgcaagtgatgttcaacaaaacgagagttcttctcccaagctaagaaataggttcagcctagctgaggttgctctctgtaactcgtctagagcaaaggctttatcacctaattttagttgtgatatcagcagcaggaatgtagctgaagaaatggacctccaaaactatcaagcacagttacaaaatacttttgatgttgctacaagttctattatgcctagcagatctgatatttctcttgatagtgtggagctctgcagtcaagaggaaaatacttacttaaaaggagagggtttaagtgtttctaattccaatgtggaacattcacggatggctcctcagatggatgaaatattgtctcagagtgtgatactgaatccagcaaattatctcagcactgattcaacaaatatattcctgaattatgccttggatcaacatggtaaacatgcaccttctccagttaagaaattaagttatggctctggcgtagaagctgataggaaatttagaagtgaagatctaacaggatgtttgctatatgatggtactacctcaaggaaaaaggatagtgactctgtgaaatttaatgatgcaatgccacaatttgagagctttgatttttctcttccattggatagctcaactactgaagaaaaggcatttgggagtgttcatgattccatacaatttggtacatttaattcagatcccgctaataaacatgagatgagtgcagtaagtggcatgtatcagctattggcaactatgtcagggaaagctacaaactgcttgtttaatgatgatgaaaggcaacccggtgaaagtattgatggtagtgtaacagatatttttggttcaagtggattgggacataagggttctttcattactcctgattttgcagcgtcatgttcttcaaatgctgcgaacaaaaaggataatggtgaaaatccattgaccccttctgttgaaaagtattgtctggggaaactttcagaaaaaaatggatctgtttcggagcatatgggttcgattcctgagcttttatgcttccgaattgatgaagacaatgacattgcagaaggaaatgattaccgagagatattacctagatccataggcaaccaggagcaatcaggaaggaaagcacttcaggatatcactggactatgtcaaagcattgggaattctgcctcttattcgataggtatgagtatggatacaggtgacacagacatgactgtagaaacttgcagcagtgaactcaatcatcatccagatctcaggaatgatggtgataacaagaagcctaaagaaagttgtggttctttattaaaaaaaggagggaaaatgtctcgctcccttcataacagattaagcaagacagaaacaaggcacatgaatgaagcaaatcctggaaagcgttctaagcctagtaatattgttgctaatgtggcatcttttatacctcttgtgaagccaaaggtgcaaccaacagcatgtggtaagtctcatttgtttacgtccactctttcatactccctctatcccaacatatag

SEQ ID NO: 20586 - DNA, 591 bp, Zea mays
  Peptide Sequence Number=SeqID_62365
atgggatggatctgcttgttggatcaaatccaaaggccgagattagatcgcgtttcaaatgaaagggtatgtaactgtgatccttggatcttagatcaacagttaagaaccgcccacgccaagatcacccctgggcccttagatccacatccaacgggcgtgaccagacccatgaagggggtgtttcctgcttttaatcacagacacccatcacgagatgaacggctcccatcctacccccaatacagcgccaagcaccagggcggcgccaccacacccaacggcggagggatcactggagatggccacaccgacgttcagtgcgatggcaaggctctcggcgacgcgatgcggaccggcagcggcaccaactccgacgaacgattacggccgccgcagaccgattacttgcgtgccaagaagggcaaggcgaccccatggctacgattttatgtacgagcgcggcaacagcctgatccaccaggatttgcggcgaccgcaaccacctacgccgagatccccggctggccgatgcacactaatgggaggggagcggatgacagggcggatgggaggttatgcgccagctga

SEQ ID NO: 20587 - DNA, 198 bp, Zea mays
  Peptide Sequence Number=SeqID_62366
atggccaacgtcgagtacggcctagagcggatcaatgcggagagaatcaacagtagaacacttttatggctgattggctacagttcggctctattgtcatatcatttagtatccaagttcctaatgaagattttactatggttcctttctaattcactgtttgaaaattatgagttgaagctatcatttgattcttag

SEQ ID NO: 20588 - DNA, 342 bp, Zea mays
  Peptide Sequence Number=SeqID_62367
atgggatacagggaggccaccacacatattcagttcagcttctatcgtccagctcctgaggacccagttctagtgccagatccagtgttagatatcagggctgaggatgaggctttcagacagttcgagactcagggtgccattgccgattcttcttctgatgatgctgaggacccgggcatccttccaccgcctcttgtgccacctcgctcacatgatcatgaggtcggtagttctagtgctgctcctactgcccctacagctattgaccctgctctggccgctatccttcagtctctttctcagcagcaggctcatctagcagcagagcaagctcagtag

SEQ ID NO: 20589 - DNA, 252 bp, Zea mays
  Peptide Sequence Number=SeqID_62368
atgggccgaccctctattagccctatcggcacggcggcctacggggcgaagatagtgcatgagtcttcgcgggggcgtcgaccttgggcacttcgcttgtgcggctcgaccttcaagaccttcatggtcttcggtcttgaatatgctggtgtggggagtttgagcgagggggacgtgttcgccttcgtcccaacatttttccctccgagggaccagttcgaccaagtcagctggtgccgaagactgccataa

SEQ ID NO: 20590 - DNA, 786 bp, Zea mays
  Peptide Sequence Number=SeqID_62369
atggtggtcgaggcagaacttggcgagaaaggggatgacatggggtcggcatccatggcgggaataggaattgtgttacgagcagagcgcatcataggctcccagccgcgactgtgcgcgaggacaagggtgcacggaagtggggttcgggatctgctagcggtagagggtgctcagcgctggaggaactcgcctaggagatgggagtgccgagctccaaggactggaggaaggggggcagaaactgtgcagggcaccggtcacgcaggaacaagggggcgtcgatcttcatggaagatggccagccatggggggcctgtaggactggccgagatttcaccaacgacgggaaaatcggccaccaacgcggccatggtagaggcgagctcggacccctggaggttactgcaggccgggtgcttggagaaaagagctcaccacggccaccaggacgagattcggcagagaggcaagctgctcgagctcggacgcaggcttgcgcgccatggggagagggaaagatcccagctgctggcgaggtgcgccagtgaggccgccatgggagaagaagctcctgcgcgctgggggagaagggctctgcgcttggttacttctgcagaaagctgggcgtcgagtggaggaatggagcagagaatggagatggcgccctggctcctgttatttacaggcgacgaccgggtgcggcattggtggcttggccggctgctgctggttggctggtaccaggcattggccaagagcctggtggctggctggttgatttaa

SEQ ID NO: 20591 - DNA, 447 bp, Zea mays
  Peptide Sequence Number=SeqID_62370
atggagctccgaggggctggagccgaggggaggggaggcgccatggatgagctcggtgctcaaacttgcctgttggccgatgccggagggagctcacgtgcctggggaagggaacgcgcgtgggggagctcagggcttgcgcgccatggggagagggaaggatcccagctgctggcgaggtgcgccagggaggccgccatgggagaagaagctcctgcgcgctgggggagaagggctctgcgcttggttacttctgcagaaagctgggcgtcgagtggacgaatggagcagagaatggagatggcgccctggctcctgttatttacaggcgacgaccgggtgcggcattggtggcttggccggctgctgctggttggctggtaccaggcattggccaagagcctgaatttggtggccagccactggccaggggctgggatgcggtag

SEQ ID NO: 20592 - DNA, 4392 bp, Zea mays
  Peptide Sequence Number=SeqID_62371
atggaccgggagatccaccgggtgacgagccttcgtcgggacagctcgctgtggcgccgcggggacgatgtgttctcgcggcagtcgtcccggttccaggacgaggaggaggacgacgaggaggcgctgcggtgggcggcgctggagcggctgcccacgtacgaccgggtgcggcgcggcatcctggcgctgcacgacgccggcggcgagaaggtggaggtggacgtggggcggctgggcgcccgcgagtcccgcgccctcgtcgagcgcctcgtccgcgccgccgacgacgaccacgagcgcttcctgctcaagctcaaggagcgcatggaccgcgtcggcatcgactacccgaccatcgaggtgcgctacgagaacctgcacgtcgaggcgcaggtgcacgtcggcgaccgggggctccccacgctcatcaactccgtcaccaacaccatcgagtccatcgggaacgcgctccacgtcttgcccagcaggaagcagccgatgaccgtcctccacgacgtgagcgggatcgtgaagccccggaggatgactctgctgctcgggccccccggctcaggcaagaccaccttgctcctggcgctggcggggaagctcgacaaggacctcagggtctcggggaaggtcacctacaacgggcacgggatgaacgagttcgtccccgagaggacggcggcctacatcagccagcacgatctccacatcggggagatgactgtcagggagaccttggccttctcggcgcggtgccaaggtgttggcaccagatatgaaatgctgaccgagttgtcgaggagggagaaggcagcaaacatcaagccagatcatgatattgatatctatatgaaggcctcagctatgggtggacaagaatccagtattgttacagactacatactgaagatattaggcttagaggtctgtgctgatacggtggtaggaaatgagatgatgaggggtatttctggtggtcaacggaagcgtgtcacaacaggtgaaatgcttgttggtccggcaagagctcttttcatggacgagatctccactggactggacagctcaaccacataccagattgtgaactcgctgaggcagaccatccacatcctcggcggaactgcagtcatttccttgctccagccagcgcctgaaacgtacaacctgttcgatgacatcatactcctatctgatgggcatgtcgtataccagggcccccgtgagcatgtcctcgagttctttgagttcatgggcttcagatgcccagccagaaagggcgttgccgactttttgcaggaagtgacatcaaggaaagaccaggggcagtattggtgtcggcaggacaggccataccgttttgtgcccgtgaagaaatttgcagatgcattcagtacattccacgtgggccggtccatacagaatgaactttcagagccgtttgacaggacccggagccaccctgctgccctggctacttcaaagtttggtgccagcaggatggaattgctcaaggccactattgatagggagcttctgctcatgaagaggaacgcatttatgtacattttcaaggctgttaaccttactgtcatgtcgtttatcgtgatgaccacatttttccgtaccaacatgaaacgagatgcgtcgtatggaagcatctacatgggggcgctcttctttgccctggacacaatcatgttcaacggtttcgctgagcttgccatgactgtcatgaaactgccggttttcttcaagcagagggatcttctcttcttcccagcgtgggcctacaccataccgtcgtggatccttcagatccccatcacgtttctggaagtcggggtttatgttttcaccacatactatgtcattggattcgatcccagcgtgatcaggttctttaagcagtatctgctgctccttgcactcaatcagatgtcgtctgcgcttttccgcttcatcgctggaataggaagagacatggttgtgtctcatacctttggccccttagcactactggcttttcaaacactgggtggctttatacttgcaagacctgatgtgaagaaatggtggatttggggttactggatttctcctctatcgtatgcacagaatgccatttcaacaaacgaatttttagggcacagctggagcaaaattgaaaatggaacaaccgtgggaattcgagttcttcgaagtcgcggtgtctttactgaagcgaagtggtactggatcgggctcggtgccttggttggatatgctctcctcttcaaccttctctacactgtagctcttgcagttttgagtccattcactgattcccacgggtcaatgtctgaagaggaattgaaagaaaagcatgccaatttaaccggtgaagtggcagagggccacaaggaaaagaaatctaggaggcaggagttggagctgtcccactcccacagcgttgggcaaaaccttgtgcatagcagtgaggattctagtcagaacaggaagggaatggcgctcccgtttccaccattgtcacttaccttcaatgacataagatactcggtagacatgccagaggcgatgaaagcgcaaggagtggcagaggatcgtttgctgcttttgaagggtgtcagtggttctttcaggccaggagtcctaactgcactgatgggtgttagtggcgctgggaagaccacccttatggatgtcttggccggcaggaaaactgggggctatatcgagggagacattaccatctcagggtacccaaagaagcaggagacgtttgcacgcatatcaggatactgtgagcaaaatgacatccattctccgcatgtaaccgtgtacgagtcactcctgttctctgcatggctgcgccttccttcagacgtcaacttagaaacaagaaagatgttcatcgaggaggtcatggatcttgtagagctcacatcactgaggggtgcactcgttgggcttcctggagtgagtggcctgtcaaccgagcaacgcaagaggctgactatcgccgtggagcttgtcgccaacccttcgatcgtcttcatggacgagccaacctccggtctcgatgctcgcgcggctgcgatcgtgatgaggaccgtaaggaacaccgtcaatactgggaggactgttgtgtgcaccattcaccagccgagcattgacatattcgaagcatttgatgaggtgaccgattcctcttgctatgatgttgctagagaagatcatcttttcctaatgaagagaggtggagaagagatatacgtcggcccagtgggccagaattcgtcaagactgatcgagtacttcgagggaatcgaaggcattagcaacatcaaggatgggtacaacccggccacgtggatgttggaagtgacctctagctctcaggaagagatcctcggggtcgatttcagtgaaatctacaggcgatcagaattgtaccaaaggaacaaggcactcatcgaggagctgagcgcgccacctccaggctctagcgacctcaacttcgccacgcagtactccagatcgttcttcacccagtgcctagcgtgcctgtggaagcagaagaagtcgtactggaggaacccgtcctacacagccgtgaggctgctgttcaccatcgtcatcgcgctcatgtttgggaccatgttctgggacctcggacgaaagactaaaaaacagcaggatctgttcaacgccatggggtccatgtacgctgcagttatatacattggagtgcagaactccggttcggtccagcccgtggtggtggtggagcgaacggtcttctaccgagaacgagcggcgggcatgtactcagctttcccgtacgcatttggacaggtggcgattgagtttccctacatctctgtccagacgctgatatacggagtgctggtgtattcgatgatcgggttcgagtggactgctgccaagttcctctggtacctcttcttcatgtacttcacgctgctctacttcaccttctacgggatgatggcggtcggcctgactcccaacgaaagcatagcagccatcatctcgtcggcattctacaacgtgtggaacctcttctcagggtacctgatcccccggcctaaaatgcctgtctggtggaggtggtacagctgggcctgcccggtcgcatggacgctctacgggctggtcgcctcccagttcggcgacatcacggaaccgctggaggactcggtgacgggccagagcgtggcgcagttcatcacggattacttcggcttccaccacgacttcctgtgggtcgtcgcggtggtgcacgtaggcctggccgtcttcttcgcgttcctgttcagtttcgccatcatgaagttcaacttccagaagagatga

SEQ ID NO: 20593 - DNA, 4167 bp, Zea mays
  Peptide Sequence Number=SeqID_62372
atggacgcggcgggggacattcagaaggtggcgagtatgcggcgaggggacagcggctccatgtggcggcgaggcgacgacgtgttctcacgctcgtcaagggaggaggacgacgaggaggcgctccgctgggccgcgctagagaaactgcccacctacgaccgcatccgccgcgcaatcgtcccgctcggcctcggcgacgaggcgcccggcagcaaggggctcgtggacgtcgacgtgctcagcctcggcccgcgcgagaggcgggcgctgctggagcgcctggtccgcgtcgccgacgaggacaacgagcgattcctactcaagctcaaggaccgcatcgacagggtcggtatcgacatgcccacgatcgaggtgcggttccagaaccttgaggcggaggcggaggtgcgcgtcggcagcagcggcctccctaccgtcctcaactccgtcgtcaacacggtcgaggaagcggcgaacgcgttgcacatactgcccagtaggaagcagatcatgcctattctccacgacgtcagcgggattatcaagcctcgcaggttaacacttttgttgggtccgcctggatctgggaagaccactttgttgctcgctttggccggaaggcttgacaaagatctcaagttttcaggcaaagtgacctataatggtcacgagatgacagagtttgttcctgagaggacggccgcatacatcagtcagcatgacctccacataggagagatgactgcggctgcactgggtgggcaagatgctaatgtggtcactgactatattctgaagatattaggactagatatatgtgcagacacaatggtaggggatgagatgctcaggggcatatctggtggacaacggaagcgtgttacaactggtgagatgctggttgggccagccagggcgcttttcatggacgagatctcaactgggcttgatagttcgactacatttcaaattgtgaactcgctgaggcagtccattcacatcctcggtggcacagctgttatctccctactgcagccggcacctgagacttataacttgttcgatgacatcatactcctctcagatggtcaggttgtctatcagggtcccagagaagaagtggttgagtttttcgagtctgtaggtttcagatgccctgagaggaagggtgtcgctgatttcctgcaagaagtgacttcgaaaaaagatcagaaacagtactgggcgcgacctgatgagccctacaggtttgtgtctgtgaaggaacttgcgactgcattcaagtcatcccacacagggagagctttagcaaatgagcttgccgttccgttcgataagagcaaaagccacccagccgcactaaccaccacaaggtatggtgtgagtggcaaggagctgctcaaagcaaacatagaccgggagatccttctcatgaagaggaactcttttgtctacatgttcagaaccttccagctgatggtgatgtcaatcattgcaatgactctcttcttccgtacgaagatgaagcatgacacagtgaatgacgggggtatctatatgggcgcactcttctttggtgtgcttatgatcatgttcaatggcttatctgagctggcgctaactgtcttcaagctgcctgtattcttcaagcagagggatctccttttctttccggcatggtcctacactatacctgcatggatcctcaaggtacccatcacatttatcgaggttggcgtaatagttgcccccaggttcttcaagcagtatctgcttctgctagcagtcaatcagatgacagcagcactcttccggtttgttggtggggtatcgaggaacatgattgttgctaatgtcttcgcatcgttcatgttgctggttgtcatggtgttgggaggatttattctacaaagagataaagtgaaaaaatggtggatctggggctactggatctccccaatgatgtatgcacaaaatgcaatttcagtgaatgagatgttgggtcacagctgggacaaaatattgaatagcactgcatccaacgagaccctaggtgtgcaagtccttaagtcccgtggagtattcccagaagcaaagtggtactggattggctttggtgctatggttgggttcaccatactcttcaacgctcttttcactcttgcccttacataccttaagccatatggcaactcccggccatctgtatccaaagaagagctgaaggagaagcatgcaaacatcaaaggggaggttgtggatggcaatcacttggtatcagtcaaccctgtaactgattcagcaatcatggaagatgattctgcctcgactaaaaagggaatgatcctcccatttgtcccgctctcggtcacctttgacaacatcaaatactctgtcgacatgccacaggaaatgaaaggacaaggtgtacaagaagatcgtttggagctcctgaaaagtatcagtggatcttttaggcctggtgtgctgactgcactgatgggcgtcagtggtgcaggaaaaactactttgatggatgtgttagctgggagaaagacaggtggctacattgaaggagacatccgcatttcaggatacccgaagaaacaagagacctttgcacgtgtatcaggatactgtgagcaaaatgatatccactcgccacaggtgacagtctatgagtccctgcttttctcagcatggctccggcttcccaaggacgtcgattcaaacaaaagaaagatcttcattgaggaggtgatggagctcgtggagctcaaaccactgagaaatgctttggttggacttcctggagtgaatggtctgtcaactgagcagaggaaaaggcttaccattgctgtggaacttgttgcgaatccatcaatcatctttatggatgagccaacctcagggcttgatgcccgagcagctgcaattgtgatgcggacggtgaggaacactgttgatactggtagaactgtggtctgcacgatacatcagcctagcattgacatatttgaagcatttgatgagcttttcctaatgaagcgtggtggggaagagatctatgctggtccacttggacataattcttcagaactaatcaagtattttgaggagattcaaggggtcagcaaaattaaagatggctacaatccagcaacatggatgctggaagtgaccacaatttctcaggaacagattctaggtgttgatttcagtgacatatacaagaaatctgaactctaccagaggaacaaggccttgataaaggaattgagccaaccagcaccaggttcaactgacctgcatttctctagcaagtacgcgcagtctttcaatacacaatgcgtggcttgcctgtggaagcagaacctgtcatactggaggaaccctccttataataccgtgaggttctttttcactggcataattgctctcctccttggcaccatcttttgggacctaggcagcaaagtgtatacatcacaagatttgttaaatgccatgggatcaatgtactctgcggtgctgttcatcggggtcatgaattgtacctcagttcagccagtggtggccgtggagcggacagtcttttaccgtgaaagagctgccggcatgtactcagctttcccatatgcatttggccaggttgtcattgagctcccatacgcactggctcaggatatcttatacgctgtcatagtgtactccatgatcgggtttgagtggacagttgctaagttcttctggtacctcttctttgggtacttcacgctgctctacttcacattctatggaatgatgaccgtcgggctgacgcctaactaccacatcgctgcgatcgtctccgcggcattctacgccatctggaacctcttctccggattcgtcatcccccgaccgaaagtgccgatctggtggaggtggtactgctggatatgccccgtggcgtggacgctgtacgggcttgtggtgtcacagtacggtgacatcatgacggagatggacgacaaaaggaccgtgaaggtgttcgttgaggattacttcgacttcaagcacagctggctggggtgggtggccgccgtggtggtggcattcggggtgctctttgctaccctgtttgcctttgccatcatgaagcttaacttccagaagagataa

SEQ ID NO: 20594 - DNA, 876 bp, Zea mays
  Peptide Sequence Number=SeqID_62373
atgactaacgatgtacgatggaacttctaccggcaggttccaatatacgatagacctcaagatctctcgcatttgttagatctcaagaaagcaggtgcaacagactttgtcctagaaaatgctgagaggaaggagggagagaaaaacagtatcgttacgttatgtttcttcttccattctcaagatgagaaagcaggcatgactgcgacgggatcgagaaaattgccattgctacaaccccccaagtacaagcagtgtcctgtcgcgatcgagacagtaggtgcgcatcaaatgcgagaaacagctaggtttatagtaacaaccaagaagcgcgcattctcaaatctcaagagaccgaggcagctggctcagtggcggacccagaaattagctaagacccggaccgaaagcgaagctgagcgaattaatcaagaaagcgaagccgagcgaggagctacatacatacagtatgcaggctgcagggactgggctgaggcgcggcggagaggcgcccaaatcccaattgctaggcgcgcgcggctggctggcgggcgccggctcggtggacgcggactgggcgtctgggctgccggctgggccgctgccgcgctggccgctgggcgagcgctcggcctcggcggaccctggacgcggacgggacaggcggacagcggacgggacggcgccacggcggtcagtggtgcggcgcgtggcggacgggcagtggcgcgtggcgcggcggcacaatggggggctggggccacgggcggatggggacaaggcgcggcgcgcgacggacgggccggacggcgcgcggcggccatgggcctgggtccgcccctgatagggctagtagagatagagttcgacttataa

SEQ ID NO: 20595 - DNA, 612 bp, Zea mays
  Peptide Sequence Number=SeqID_62374
atgcatgattcacgcgcggcggtgggcgatgtgaacgaagcccgtagcggaggtgacagccgctatcgatcggtaagcacgagcaccacgtgccgccagcgggttttcatgctgaacacctcttctgtgtccgtcgccgcgctgatgcttaaggcaaggcgcgcgacgcatgttgttggggaggacgacgccgacgccgacgccgacgctgccgccgcgccggcacgggcagtaattgttgcggcggccgaaccgaacggccccccattgtgccgccgcgccacgcgccactgcccgtccgccacgcgccgcaccactgaccgccgtggcgccgtcccgtccgctgtccgcctgtcccgtccgcgtccagggtccgccgaggccgagcgctcgcccagcggccagcgcggcagcggcccagccggcagcccagacgcccagtccgcgtccaccgagccggcgcccgccagccagccgcgcgcgcctagcaattgggatttgggcgcctctccgccgcgcctcagcccagtccctgcagcctgcatactgccaaggctggcagctagagacggagttgagaattttatgcgccggactgatgcgttgaaatga

SEQ ID NO: 20596 - DNA, 2835 bp, Zea mays
  Peptide Sequence Number=SeqID_62375
atgactcccctgctcctcctccgcctgctctgcctcgtccccctcgtcaccgccgcctgcgccgaagccaaactaccggcagatttcaccacgctcctcgccgcgaagttctccctcgctgaccccggttccgcgctcgacgcatgggactcaaggctctctccgtcgccctgccgctggccgcacatcctctgctccaaccgctccgtctctgatgccccggccgtcgcctctctcctcctctccaacctctctcttgcgggcgccttcccgtcctctctatgctctcttaggtcgctcgttcatctcgacctctccttcaactccctaactggacccctgctgccttgcctcgctgcgctgccgtcgctcacgcacctcgatctcgccggcaacgagttctcaggccaggtgccaggagcctatggcgcaggtttcccttaccttgccacgctcagcctcgctggcaacaacctctacggcgcattcccggggttcttgttcaacatcaccacgctccatgagctcctcctcgcgtacaaccccttcgcgccgtcgccgctgccggaggacgtctccggccccacgcagctcagccagctgtggctcgccgggtgcggcctcatcggtgaaatcccgccttcgatcgggagcctcagcagcctcgtcaacctcgacctctccacgaacaacctcaccggcgagatcccgtcaagcatccggagaatggacaacgtcatgcagatcgagctctactcgaatcggctcaccggaagcgtgccggaggggctgggggcgctcaagaagctgcggttcttcgacgcgtccatgaaccgcctctccggcgagataccagcggacgtgttccctcgctccgaggctggagagcctgcacctataccagaacgaactgtccggccgcatgccagcgacgttgggacaggcgccagcgttggcagacctcaggctgtttcacgaaccccggctctgtgcaacgccgggaagctggagcagcttctgatactcaacaacgagctgatcggtcccatcccggcagagctcgggcaatgccgaacactaacgcgggtgcgactgccgaacaaccggctgtccggacccgtgccgcagggcctgtggtccctgccgcacctgtacctcttggagctcgccgggaacatgctatccggcaccgtggacccgaccattgccatggcgaagaacttgtcgcagctgctcatttccgacaacctcttcactggcgcgctgccggcgcagatcggcaccctgcctgctctgttcgagctatcggccgcgaacaacatgttctccgggatgctgccggcgtcgctagcagatgtttctacgcttggtcggcttgatttgaggaacaactcgctgtccggcaatctgccgcaaggtgttcgacgctggcagaagctgacgcagctggaccttgcccacaaccacctcacaggaaccatcccgccagaacttggcgagctgcccgtgctgaactcgcttgacctgtcgaacaacgagctcactggcgacgtgccggtgcagcttgagaacctcaaactgagcctgttcaacctatccaacaaccggctcagcggcatcttgcctcctctgttctccggctccatgtatagggacagcttcgtgggcaacccggccctgtgccgcggcacgtgcccgagcggccgccaatccagaaccggccgtcgaggtctcgtgggccccgtcgccaccatcctcactgtggccagcgctatcctgctcctaggcgtcgcgtgtttcttctacacgtaccaccggagccacaacggtggacaccccgcggagcctggcggcggcgacggcggcggcaagcccaggtgggtgatgacgtcgttccacaaggtggggttcgacgaggacgacatcgtgggctgcctcgacgaggacaacgtggtcggcatgggcgcggcgggcaaggtgtacaaggccgtcctgaggcgcggcggcgaggacgtcgccgttgccgtcaagaagctgtggagcggtggcggcaaggcaacgggcagcactgccaaggaaagcttcgacgtggaggtggcaacgctgggcaagatccggcacaaggacatcgtgaagctgtggtgctgcttccacagcggcgactgccggcttctggtgtacgagtacatggccaacggcagcctcggcgacctcctccacggcggcaagggatgcctcctggactggccggcgcggcaccggatcatggtcgacgccgcggagggcctcgcgtacctgcaccacgactgcgggccaccgatcgtgcaccgcgacgtcaagtccaacaacatcctcctcgacgcccagctcggcgccaaggtcgccgactttggcgtcgccagggtcatcggcgacgggccggccgccgtcacggccatcgccggctcctgtggctacatcgctcccgagtactcgtacaccctgcgcgtcacggagaagagcgacgtgtacagcttcggcgtggtgatgctggaactcgtcaccggcaagaagcccgtcggggcggagctcggggacaaggacctggtgcggtgggtgcacgccggcatcgagaaggatggcgtggactcggtgctggacccgaggctcgccggcgagtccagcagggacgacatggtcagggcgctccacgtcgcgcttctctgcacgtccagcctgccgatcaaccgcccgtccatgaggatcgtcgtgaagctgctgctcgaggctgcgccgcgcgcgcggcctctggagagcaagccaaaggcggccgaggaggaaccgcttgatgtctga

SEQ ID NO: 20597 - DNA, 486 bp, Zea mays
  Peptide Sequence Number=SeqID_62376
atcgaggtgaagcccggttggaagaagggcaccaaaatcacgttcgccggtaagggcaaccagcagtggaaccagctccccgccgatctggtcttcgtggtcgacgagaagccccaccccgtgtaccggcgtgacggcaacgacctgttggccgaggtccgtgtgacgctcgcccaggcgctgggcggcacggtcgtcgtcctcaccgcgctcgacggccgcgagctcgccgtcgacgtgggcggcggcggcgaggacgaggacgatgaggacgacgcgcccgtggtgtgcccccggctacgagctggtgctgcctggcgaaggcatgcccatcgcgcgcgagcccgggcgccgaggcaacttaaggatccgagtatccattcattcgatactcatctgcttccagttcgactttctgtaatcgaatatgagctttttcgagttgttcaagggtccctttacgcaattcttccgaatttcgaatag

SEQ ID NO: 20598 - DNA, 315 bp, Zea mays
  Peptide Sequence Number=SeqID_62377
atggctcccaagaaagcgactttcaaggccaccacctctctggatgacacggcgaaggcaaccctcaccgagaagaaaggcaaggcagcccctgtcggcgaagttccccaagaggcacccgaaaacgatggagcagtcaacaacaagcgacctcacacagagaacccacccatcctcgaaggtattgttcgcaagtccagctctgaaggcctccctcgaaaccctctgccaggttttaccccccggaaggctcacgatatcatcgaggatggcgtggtcctaggcatctcagccgaagaccagctaaaattatga

SEQ ID NO: 20599 - DNA, 432 bp, Zea mays
  Peptide Sequence Number=SeqID_62378
atgcgggggtggggctcgctgcgccactctacgccaagatccgcttcgtggggcggcctcggcctccagcgccacgggcacgacgccaccggatttggcaagatcagaaggctggtggccaaggtggccctgcagagcgatgatgacgagctcgtcgctatgaacgaccccctcatcagcaccaattacatgtactcaaagcaggttgctccaaccatgtttttttgggccaccatttttgactggactgccattggagataggagtgtgcatccaaatagcagtgttatggtgaaacagagttttctccacgttgggaaagctggaagagtcttttctactcagttttatgctaacagtggtgttcatgttacgtttgcagatatggacctcggtggttatgttttctccacgttgggaaagtcttattaa

SEQ ID NO: 20600 - DNA, 231 bp, Zea mays
  Peptide Sequence Number=SeqID_62379
atggcgtggtcgtcatcagtgatttctaacgagcaacgtgtgcggcgcaaagaactccgggcttggtggaacggcggtgagcgaagtccaaggacgagtcggcgcgagcaacaacatgtacaggggcttcgaatggaacggaatcagcggcggcggtcgggaacatccggcgagggtgttacaaaatctacccccctaaaaaatctcgtcctcgagattaaggaaggctag

SEQ ID NO: 20601 - DNA, 375 bp, Zea mays
  Peptide Sequence Number=SeqID_62380
atggcgtggttgtcgtcagcgatttctaacgagcaacgcgtgcggcacaaagaactccgggcttggttgaacgacggcccctgtatttctgtttctttactacgccaagtccacgatggtgaacggcggtcagcacgccatccggcgagcctgaaccggccggaatacacaacgactgatgccctaactcggttgacacctatttctacccctggcgactctaatctgaccctcaattgcacaaatctagcccggagcctttctgcccacgacaacggcgaaactcgaggggaaatcaaggtgttcttggtgattcaaggcggtctagctcaatcaaatgggtctacgagcaacaggagacttaagggaggctag

SEQ ID NO: 20602 - DNA, 528 bp, Zea mays
  Peptide Sequence Number=SeqID_62381
atggctcaaagcgacgtggtaaaaccgcctaaggcgtggcgtgaccaagggaacgacggcagccacgacgacgatcacgcggccatgtcgccgggcaagtgggtacggggctggctcccggtctcatccacggtgaagatcttttcaccccgagtcgttatccgtgcgccaatgggcatgaatcgcatcgccgacgcgaatctaggtgctaaaggttcaacacaaaccaataaaaagatcaaagttaagggttcaaaagaaaggagcaaaagaaaccgaagagaaccctggtctggcgcaccagatagtgtctggtgcaccaagggcgatcgactcaaactcttcacctttgggtttctggagagtcgctccgctataattcaccggactgtccggtgtgccaccggagcaacgactatcgagcgcaacggtcaactccaacggtcgactgcaaacgagaacagtgcgctgacagtttcacgcagagtcagaacagcgccagaaggcgcaccggacagtgaacggtga

SEQ ID NO: 20603 - DNA, 345 bp, Zea mays
  Peptide Sequence Number=SeqID_62382
atgtcgggaggatccgccaagaaggagatggaaacagacacaagccgcgggaaggctccatcaatggagtccggtgcccaaggaagggaggactcacctccccgagtcaagtcgcatctgagtggcgacaagatgaaaaagatgaagaaagtggtatactacgaaaccgattcttcgtcgccatccacctccggctctaacgctccgtccgtcacttctaggcgccatgagtgcaagaagtttagcaaaccaccagtttttgacggtgaagattattgtatgtggagtgataaaatgatgcatctgttgggggccttcgtcttccgaaggtcctcaaaaacatga

SEQ ID NO: 20604 - DNA, 723 bp, Zea mays
  Peptide Sequence Number=SeqID_62383
atggcagcactggaaacttcgttgagatctgaaaggcagcaaaatgatgcaatcatgaaacaactagctgaatctcagggggaaataggagagctgcaaaggaagcttgaagatgctgatgccagaaatgggcttcttcaagattctttacagagacatgaagaaaatatggcagcactggaaacttcgttgagatctgaaaggcagcaaaatgatgcaatcatgaaacaactagctgaatctcagggggaaataggagagctgcaaaggaagcttgaagatgctgatgccagaaatgggcttcttcaagattctttacagagacatgaagaaaatatggcagcactggaaacttcgttgagatctgaaaggcagcaaaatgatgcaatcatgaaacaactagctgaatctcagggggaaataggagagctgcaaaggaagcttgaagatgctgatgccagaaatgggcttcttcaagattctttacagaggttccattattaccttgtaccgatatccagtgtgatgttccagttgccctgttatccttctgtcaaaatcacacatcatgttagtgaactcatatgggtaaactattgccctcccaaagctatctctgaaccagagggtacagcttatcctgttgttttttccatcctttcttcttgtccctatccctatggagtaaaggttgaaacaccagcaaagttcgagcagaagtga

SEQ ID NO: 20605 - DNA, 1299 bp, Zea mays
  Peptide Sequence Number=SeqID_62384
atggctgatctggatgccagaagaacagagatgcgaaacaatgcagcaaaaggcgttcagagtcaattccgtactcatgttgctcgtgagcagttcctagtactacgggacacatctatttatttgcaatctttcgttagagccagattggcatgtaagcaacatgaattcctgagacaacaagcagcagctttgagaattcagaaaaatgcacgatggtattttgcctggaaaacttattaccaactacgattgtcagccattacattgcaggccgggctaaggtccatggcagctcgtaatgagttcacctttagaaagaaaaataaagcttcagtccatatccagtcccagtggcgatgccaccgagattactcaaattatatgaatttgaagagagccgcactaacatatcagtgtgcttggcgaagaagggttgctaggaaggagctgaggaagctcaaactggctgcaagagatacacaggctctaaaggtggccaaagagaaacttgaggaacgtgtggaagagctaacaagtcgcctggaccgcgaaaagaaactaagggctgatttggagaagtctaaagcagatgaagtttccaaattgaaagaagctcttcatgagatggagcagcgagtagaagaagttctgctagtagctgaacgagaggagaatgataaaatgaagaaagcgcatgctaatgctctggaaacaaatgaagagttaaataaggaagtcagtgatgcagatgaaaagatcaaacaatttagtgatactgtaagaagactagaagggactgtaagcgaacatgagggccttttgctaactgaaaggcaacaaaatgaagcagctaatgctgcacttgctgaatctcaagcgagaaatgaagcactggtaagcaagcttgaagatgctgtgaaacaaaatgatctcctccatgaagctgaccaaagatttcaagaagctacaaaaaatttggaatcttcactgacatttgagaagcaacgacatgaggcaaatttgatagaattagctgaagcacgagaaaagattgaagaacttcaaagagaagttggggacactgatgaaaaattcaccctgcttcagactagtatacaaagcgttgaagaaaggttaagagagaaggatgctctattgacaacagaaagactagaaagtgaagcaactaagaaatcactaaatgaatctgaggatagaaaccaggacttactactgaaaattgaaattgctcagaaagacattgctcacttccaagaaaccgtccgaaggtcatga

SEQ ID NO: 20606 - DNA, 288 bp, Zea mays
  Peptide Sequence Number=SeqID_62385
atggggcaagtgaaggctacacttacgactacggcagtagctgtctcagagtctgctttggatatatgccaatcaaatttcggatttttttaccatattttacatattcgaacggccccttatacacgtttggatttttcccgttccaccaatagtgcaagtgaaggctacacttacgactacgacagtagctgtctcagagtctgctttgggtgcgttgtggcccttgtgggtagtgttggattcagattagacacgcatgaaacgaattcgaatgtcactatttaa

SEQ ID NO: 20607 - DNA, 273 bp, Zea mays
  Peptide Sequence Number=SeqID_62386
atggctcttcagataatgcgagattctaaaactggaaattctatagtccatgagtcctttgaattatctgatcaagcagtaaaggccatgaacaaccaacatttttgcaaccatccaatcattgtttcttatgcttacaagaaaggcacgaaaggtgacaccatggcacaccagcaggttgaaattcatttaggacaacctcaccaaatacggatacaccttgcatacaatggacaccctcttgtagttaagcccattgctcactctacttaa

SEQ ID NO: 20608 - DNA, 252 bp, Zea mays
  Peptide Sequence Number=SeqID_62387
atggatccgatcagtctactagtgaagaagacactaggcgagaacccagaaataatggagatccgcatggaacgaagaggccgttccagcatatgggctctggcacggctcagggagctcaagaagatcgtccctgacgcccaggacgccgccgacgtggacgtgctgctccgccggacggccgactacatctgcgccctcgagctcaagctgaccgtcctgcggagggtatcagccatctacggggtgtga

SEQ ID NO: 20609 - DNA, 324 bp, Zea mays
  Peptide Sequence Number=SeqID_62388
atgggcgcggacgagccggcgcaaccgcgtactcccagagccagagacgccgagatcgagaagcggacagcaggattgcaagaacatggcagcctgaagggggagttttcgagtttggtgaccatgcgtcacgggctcaccggaaggctacgaaaaccgccgcttcttggcattgccgtgcctatgcataaagaggagagggcgagaagaggtagcgagtggcaccgcgcacgaggcaggggaaaggccaacagcagtgggaacgccaagagcgaacgagaacgaggagaggtggcgacgagggagaggaggggcagcggctga

SEQ ID NO: 20610 - DNA, 1659 bp, Zea mays
  Peptide Sequence Number=SeqID_62389
atgcctgaatttcatgtgccggaggtggaggacattcaggggtggctgcacacggcgtacctcgcctggatgtcattccgagctgactacatccgacggccgatcgagttcttgtccaaagtttgcattctgctatttgttgtccaatcgttggatcggctcgtcttgtgcatcgcatgcttctggattaagctcaagaaaatcaagccaaggcttgaaggggacccattccgggagggttcagggtatctgcacccgatggtacttgttcagattcctatgtgcaatgaaaaggaggtctatgagcagtcgatttcagccgtctgccagctagattggcctagggataagtttctaatccaggtgcttgatgattcgagcgacgagagcattcagatgttgatcaaagcagaagtttctaagtggaaccagcagggtgtgaacattgtctatcggcatcgggtgttgaggactgggtataaagctgggaacctgaactctgcaatgagctgtgactatgtcaagaattttgaatttgttgccatttttgacgcggacttccaaccaagcactgattttctcaagaaaacaatcccacattttgatgggaaccctgagcttggattagttcaagcccgttggagctttgtgaataaggatgagaacctcttgacccgccttcaaaatatcaacctttgcttccactttgaagtggagcagcaggtcaatggtgtcttcctgaacttctttgggttcaatggaactgctggagtctggaggatccaagctttagaagaatcaggaggctggcttgagcgaacaaccgtggaggatatggatattgctgttcgggctcacctgaatggatggaagttcatcttcctgaatgatgtgaaggtcttgtgtgaagttccagaatcttatgaagcatatcggaaacagcaacaccggtggcattctggcccaatgcaccttttccggctgtgctttccggacataattactgccaagatctcctcatggaagaaagcaaatttaatactattgttctttcttttgaggaagttgatacttcctttctattctttcacattattttgtgtcattcttccattaaccatgtttgttcccgaggccgagttgcctgtgtgggtcatctgttatgtgccgatttgcatgtccttcttgaatattctgccatccccaagatcatttcccttcattgtaccatacctcctcttcgagaacaccatgtctgttaccaaattcaacgcaatggtgtccgggctgttcaaactcgggagctcctacgaatgggttgtcaccaagaagtctggccgatcatctgaattggatctcttgacatcggaagaaaagaataggaagtgcaccacacttcctcagctccagaatcaattgcctgaaaacagtgagctggtcgagatcaatgtgcgaaaggaacagcgagagaaggtgccaaatgacgccaaaaggggtaacaagatctacaagaaagagcttgctctttctctgctcctgctcaccgctgcgactcggagcctcttgtctgctcaggggattcatttctacttccttctgttccaggggatgtcattccttgccgttggcctcgatctaattggtgaacagataagttga

SEQ ID NO: 20611 - DNA, 168 bp, Zea mays
  Peptide Sequence Number=SeqID_62390
atgacgctgaacatggaggaggctaggagagatcgggacaggatgacagcgtcggaggatcttgggttcgccactaaggtgagaaatggcaaaggcatcagcatcaaacattaccattatttagccatagattacatgaacatgagcacaccgttgaaaggattctga

SEQ ID NO: 20612 - DNA, 225 bp, Zea mays
  Peptide Sequence Number=SeqID_62391
atggccgcgccgagcttccaccggtcgtcctgtgcgccgaccgccagcacggacacgcgtggcctgaggccacagccggccttgctacaggcaccggcgggcaagccagggacgcagccagccctggccaacctctgccggctcagccgaagccgacctccgtcctccccaagcggtggtggcagccctgcgtacatgcagtttgaagatgttgtcatactctag

SEQ ID NO: 20613 - DNA, 609 bp, Zea mays
  Peptide Sequence Number=SeqID_62392
atgggtcggcacgagacggagcacaaagggggtgagaaacagcaaaaggggaaactcgcggccttcgtgttgtcctgcgccctggtcgggccctggggttgggcgaggcagagttcatcttccgaggtcgaagctgagtccgaaccctggggtcaggcgaggcggagtccgtcttccgaggtcgaggctgagtccgagccctggggtcgggcgaggcggagttcgtcttccgaggtcgaagctgagtacgagccctggggtcgggtgaggcggagtctgtcttccgaggtcgaggctgagtccgagccctggggtcgggcgatacggagtccatcttccggggtcgaagctgagtccgagccctggggtcgggcgaggcgaagtccgtcttccggggtcgatgctgagttcgagccctggggtcgggcgaggcggagcttcccatggcgcccgaggctggacttagctgctgtcagcctcactctgtcgagtggcacgacaatcgaagctgggcaggcggcgctgttttcctgtcaggtcggtcagtggagcggcgaagtgactgcggtcacttctgctctgtcgactgaggagcgcgtgtcaggataa

SEQ ID NO: 20614 - DNA, 399 bp, Zea mays
  Peptide Sequence Number=SeqID_62393
atggcacacctcctcatcctctttgtcgtgtcgttcggtgagctgtcacaacacctcctcctcaatgggccttatgaggtcatcgaagggctgctggtcatcagtaggagtgcctccatgggtgtcttgataatgttggtggtggagacgttggtgtcaaagattcaacataaaaccaataaaaagaacaagacaagagtcaaaagaaaggagcaaaaagaaaccgaagtgctccctggtcgggcgcaccggactgtccggtgtgccaccggacagtgtccggtgcaccagggaagattgccttcaaactcttcgccttcgggtttctcaggcgcagcccactataattcaccggactgtccggtgctccaccggacagtgtctggtgctccagagtga

SEQ ID NO: 20615 - DNA, 372 bp, Zea mays
  Peptide Sequence Number=SeqID_62394
atgacgaagagggtcttctccgcgaagagcttggatcctctcaggagggaccccgtcgaggaggagagttccagaggttatcttgtggtcggtgcaggtagatttgattggattgattgtgggggcttcaatcggtcgtaccccttcatctatataatgaggggaggtctggacccgttacaagttggttcccgagcttatcccatgagttttgctaacaaaccccgcaagaaatctggaacccaaattgattttgcgcactcgtggaaggtgatcggagttgcttcgttggccgattgcaaggtacacagatgttgtggtctcttgtcactaccagactatccggctggtctccagactgttcgagcataa

SEQ ID NO: 20616 - DNA, 1152 bp, Zea mays
  Peptide Sequence Number=SeqID_62395
atggcccatgtccgcgagtacacactgaaggcgctcccggagccaggggcgggggcggcgcccgcatccaccaggaaccacaccaaccctggcttcctcttctctaacggcgggttctccggaaacatgtaccacgactacactgacgtactggtgccgctgttcatcagcacgcaccagtttcgggagcgggtgagcgggatgaagccgtggtggatgggcaagttcacccccttcttccggcagctcacccggcacgacgtgatcgacgtcgacaacgaccgagaggtgcactgcttcccaaggatcgtggttggcgccaccttccacagggacatgggcgtggacccgcggcgctcgccgggccacatctccgtggtggacttgaagcgcgccctgcgcgccgccttcaggctgaagcgcgaggcggcatcccgcggcggcgtcccgcagcggcgccacggggcacggcaaaccgcggctgctcatcatctcccggtgtggctcacgctggttcctgaacgagcgggagatggcgcgcggcgcgggcgacgccgggttcgaggtgcgggtggcggagcccgaccagccacggacatggcgacgttcgtggcgctggtgaactcggcagactccatggtgggtgtgcacggcgccgggctgaccaacatggtgttcctgccctgcggcgtcgtgctggtccaagtggtgccgtttggcgggctggagtggctaacgggcgtcacgttcaaggagcccgcatcggacatggaggtgagctacatggactacaacgtgcgactggaggagagctcgctggtggaccagtacccgaggggccaccaggtgctcaccgacccctatgccgtgcacaggcagggctgggacgcgctcaagacggcgtatctggacaagcagaacatccagatggacctggacaggttcagggccacgctgcgggaggccatgatgtgtggtaatggagtctgttgcttcgctcgatttatagccgagattgaaaatctgcaggggacaaatagatcactgctgaacaccgccgtacctgcagttttgatatgttggtcatcattgaagagcgaggtgcagatgattgcttcaaaggtatatcatactgccttggtcctaaaataa

SEQ ID NO: 20617 - DNA, 870 bp, Zea mays
  Peptide Sequence Number=SeqID_62396
atggaggctacagcggaggcgctcacgcaggaggaggtccttcgccggtgtcggcgtcgcgcggcccggctagctggtgtgtactgccgaatctactgggccatggccaaggaggtgcgcgcgcggcaccggcagtacgtctggcatctcgcccggagcccactggaggcagagcagccgtcggcgcctctggaggtctcgtcccggcggcggtcggggagccaccaaagccggcactggtgtcaaaggaggtgcgcgcgcggcaccggcagtacgtctggaatctcgcccggagcccactggagacagagcagccgccggcgcctcctggaggtcccgtcccgatggcggtcggggagccgccgaagccggcaccggtgccgaggaggaagaaatgcgggttcacagggtgcaaggtgtggcacccgtgtggctggttggcccttcggcatcgccgtccgcgcgccggtcaaccgctccgcgctcgtgctccccttcccttccctccccaccaataccagcacctccccagatctgggcgtgcgggcggagggcgggatgaagtcgtcgctgaggagccggcaggagccgcggcgggtcagcaacggcgtaatcatcggcgccatgctgctgtccctctgcgtcctcagtttcgtcaaggccagatactgcgccacccccctcggcaaggccgaggaccagctcgaggagcagatgaacgccagcatccggatgcagccggaggagtcgtccaagaagaagaagggcaagccggcgtgctacatgacaagcaagcggtcggagcggtgcgacgcgtccgacgacatccgggtggatgggaaccgctccaccatctacgccgcgggatag

SEQ ID NO: 20618 - DNA, 315 bp, Zea mays
  Peptide Sequence Number=SeqID_62397
atgaaccctctgcccatgcatgagaggtgtgggagctttggcatggcaacgttccatccaaaagtcactaaaagcaggtctaggggtgctttcagttttgcactacgagaaagtcgacttttagaaaaagctgcttcctggatccagccctttggttggcttttggcttttagggggcaaaagccaaagccaaaagccaaaccaaatacacccttagtacagtggaggcgctccgactttcttggcaactgcaagaagcagcccactgagcgttaccacacagcaagcagcccactgggcccatggcgtcagtag

SEQ ID NO: 20619 - DNA, 505 bp, Zea mays
  Peptide Sequence Number=SeqID_62398
atggcggcgcggttgaggactgacgagacacgttttgctgagtttgggcataaaaaccacccagcgctacggatgtcgtgttttgctgagtttgggcatcaaaactcggaggtggcggttccagtgggaattggtggcaacacgtggcatcacaacgaagggcgtggtggcggactcgcgaggcacaagcagtggccaggcgtcaccgacagcgtcctacaacccaaggcgcgatcatccgcggccaccgccgcccgaggcacgagcggcgatgctgaccgcctgcggcagcatccgatgacgacaacctcatccaatcttacgcgtctcgggcatcctatgaccgccttcgattcggtggactttgaggcatcctctggtccagtggctcagggtcgtcctccggtgatgacctcctcgattcgtgtttatgccttccattattgtgttttatgcctactacttacaccatttatgcattctattgaggatttttatgatggtg

SEQ ID NO: 20620 - DNA, 1287 bp, Zea mays
  Peptide Sequence Number=SeqID_62399
atgactgaacaacccaaggttgttaaagacaatgagagtctagtagcatctgagttatccccagagacaaatgatggtgataaaaagcagctaacagagtctggcaatataactgctgacgaatcatcaaaaccaatcgatactaaacctgcttctgttaaaccaaagaggggccgacctccagcagcaaagtctcaggagaaaaagcctgttggaaagaaacaggcatcaaacctaaaatctccaaaacttgatcctgtcactgattctgtagggagagctaccaggcaactgaataatgatgttgcaaagtcttcatcaactaaggctgttgatggagaatctgggaagaagcaacataaaaccagtatgaaatttcagaaagaagatgccgcctctgataaagacaccgatgatgatattagtttgaaggaaatggtgtccccaacaaggattgataaatcaaaaggccaacaagaagatagagggacgtcatcaaaaaggaaacgtctgctggaagctcaagatacccctgtatcgaagaaaaacaaaatgcttgacaaaaaccttattggctcaagaattaaagtttggtggccagatgacaaaatgttttatgcgggtgttgttgaatcattcgatgcctcgtcaaagaagcacaaggtttcgtatgatgatggtgatgttgaggtactagctcttaagaaggaaagatgggagttcattgctgaggaacaaggcgctgatcctgatgtggcatctaatatgccacgtggcaggaaagctaaagggagctcggttcaacaaatggagggaaaaacaggaacacctcaaagtgatgttaagaattctcccaagaagagagggcgcccaaaaggtgtgcgctccagcaataatatgccaaatgctgatagctctgtgactccagccagactgaagggaaaaagtgtcgagaaggatactgaagagacacctaagactggcagtaactctaagaaggaaggtgcaaaaccctctcgatctactggaaaggctaaggattctgttgtcaaggcaagcagcaaggatgaggctgatagcaccgacaactcaaaggatgctgctgccagtgaagacaaggattcaaaagatgaagtgaaatccagtgaagctatcgatggatccaagacaaatggcctttcaaccaaaaggaagccagatgagaatgaaggtgagtcatcagaggaggagaaggcgtctactaaaactactaccagaaagaagcgcagaagaaagagccgcaactag

SEQ ID NO: 20621 - DNA, 309 bp, Zea mays
  Peptide Sequence Number=SeqID_62400
atggcgcctcctgttgacgtggctggtctgcgccctaggttgggtgatgtggaagctcctccgaagctgaggtcgagtccgtcttccgtggccgaggtcgagtccgagcccctggttcgggcgaggcggagaccgtcggctgagtttgaccatttccagcatttgcgtaatgaggactctagggagaagcctcgtagtgagaccctggccattcaccttggaagtgaatacggggtggagtgcgagccctggggtcgggcggagcggagttcgtcgtcttctggggctgagcccaagtccgagccctag

SEQ ID NO: 20622 - DNA, 393 bp, Zea mays
  Peptide Sequence Number=SeqID_62401
atggcctggctggtcccatgcagtcgcgtcctgcgcttctcagctcacgcgcgtacgcagactgtgaccatgccctccacctgggcccacgcggcagctgcaggtcccaagaaatccggtctcagaaaccgcctcccgctatgcgctcgtgcttccacgatcgaagcgagaaaggaggcagcagtttctctgatccgctccccctgcacgtctcatctcctgtgcagcgcccttgctatctcggcgcccgcggcatgcacatcgtcgcctgaccaaagccacactgcaccggagcctcgccacaccgcagacgtcgacgccggagagcccttctccggtcagcccatcgtctccggttgcgtgaacttcgtaaggatgtcgtgcacacgttaa

SEQ ID NO: 20623 - DNA, 396 bp, Zea mays
  Peptide Sequence Number=SeqID_62402
atgcggagttcgtcgtcttccgaggctgagcccgagtccgagccctggggtcgggtgaagcagagttcgtcgtcttccggggctgagcccgagtccgagccctggggtcgggtgaaacatagtttcctatggcgcctgaggccggacttggctgctgtcagcctcactctgtcgggtggcacagcagtcggagcggcggcgcgcgtcaggataaggtgtcaggccacctttgcattaaatgctcctgcgatacggtcggtcggcgtggcaacttggccaaggttgcttcctggtgaagactgggcctcgggcgagctgaagctttgtgctgatgggggttaccagctaagatttaggagtcttgagggtacccctaattatggtccccgacagtag

SEQ ID NO: 20624 - DNA, 471 bp, Zea mays
  Peptide Sequence Number=SeqID_62403
atgttgtcttcttctctgggcacagcaacacggcggcgcgcgtccaccgtggcggcggccacggccggcgaagcaaggccccgacaccccaacgctcaagacaaaaatccaaggattgctatacggtgtgtacggcatggtgatcacagtggttgtcttcttaccgtgattcgtgcagcgcagagcctttacatcgatgcatggcggcatggccggtctccggtgagcaatggagcgcacaccgaagccgcccgccccaaccgtccaccggggcacgggactcgggtaagcgcggcactcatcggtcgttctccaagcatagcgcaaccacgcaagttttggagcacgcgggatggcggccatgtcgcaagctccacatacggtgagcaccaaatctgccacaacggccacaaggagacttcccgacgtcgattggagggtcaaggtggtctcggggctcccgatttatag

SEQ ID NO: 20625 - DNA, 162 bp, Zea mays
  Peptide Sequence Number=SeqID_62404
atggccggggccgagcgcggccgggggccggggccggtgatgatgggtacagaatttctcgtggtgtccgcagtggaacactacgatgtcagtgtgccgcctttcttccccaactcgtgctctccgggtgctacaggtgcctctgctcaccgccacctgtag

SEQ ID NO: 20626 - DNA, 1800 bp, Zea mays
  Peptide Sequence Number=SeqID_62405
atggcctctccacaccccccaccccctcccccaccccaccatcacgctccacctccagccatctccaacccctcccctcccaacaccatcatcaaccatagccaaggcctctcgctgacttccaccccggactcggcgaccacctcatcaacctcccggcgtttctctcaaggcgacgagcctttcagtttccaggctcgacaaggtggacgttcaaagacccaacgctggagtgacgactcctcgtctggtggttcgtctcataagttttgctcctttaaagaggccctcgtatcaggatccaggcgcctccattctcttgtcacgactagttcaagtgccccagagggtgtgaaagacaagaaggagaaggctggtgtggtggagcagaagcagctagtggaatcacttcgggacgagcttggctggcaggtggttgagcgcaggaagaagacccagcgtgtgcatcttcctcgtcgagggtcccttgtggatctccgaggcaggtgcttcaactgtttttcttcctcccatcttgctgcagcgtgtcgacgttccacccgatgctttcgatgctttgacttcgggcatcaggtgagctcttgccccacgagacctgtggcacgtacgaggcagtgtggcggattgaagcaagaaaagaaggttgacagaatccctgtctggcagcggttgactaggatggtgggggacgttcctcttaggacggatggtcagggctcaagaccaaggaagtcggtctggaaaaggatctcaccactgcaggagggggggatgccggaatatatatctccttcatctgtgcaaggtgctagcgttggaggccatgaaggattgcgatgcaagcgaaagaggaaccgttccaagcgcggacgaggagaaaagatgacgattgatcaccctcagcaagaagctccggtgtcggttattggagcagcaagcccggacccatccctgttgtttggcaacaattctgaggagtttgactccacacttaactccaactgcgttctggattactcggatgatttggcgagggaggaaattgctctccgacgagctctatttgtctctgtggctggaacacgcccaatggtccttgcttcagaagttgtggacgaagttgcacgccagttcgatattgcagtgaagaacatgtcaatccagcgaacaatgccagaagacttccttctgttactgcctgatgaagatgctgcagctatggttttcaacgatggaaaggcactgcgggggcctcgtttcaccttgttgttcaagaagtggtcgagatttgctcatgcttccgcctcgtctttgtccaaattagtggatattgaaattagaggcattcctgagcacgctcggtctcgttctacggcggagcatattctgagaaattcatgctggataacagaggttcatcaaaattcaggatctgagagagattttgcatccttttgggtgcgtgcttggtgtttaagcccggaacggttgtgcagaaaattggatctacatatccttgagcctggagatgttatccatgagaagagatgcttaacatacaaaattgatatctcatgtcgcctagttgatctccacccggcgaactcagctgctccacctatacccccggagcccttccaggaatcggaggaagatcaggatcaagatgagcaggagccacatcgtcgtcactgcggtgatgctaacgctgctggggatccacggcggtctctccatcttcgcctgggaccgcgccccccccttgggccgtacgcatga

SEQ ID NO: 20627 - DNA, 417 bp, Zea mays
  Peptide Sequence Number=SeqID_62406
atgctccttcgtcagtcttcagatcttcaaggccaagaaattgttaatacgaactttggaggtgatactggagacgcatttgaagcacatgaatggagatatgttcggacatttaacgtttttggacaaggtatcagaatttttgaagatattagtattacaaacccaaaggttggaaaggttatacttctgaaatctgttggggtggtcagtgcaaaccctgataccgtgtttgaagtggtcctcgatcttgataaacataagcgatatgagtgggatatgttgacagctgatttggagttggtggaaagaattgatggatactacgatgtggtttatggaacctatgaacccaaatatttaaattggaggactgcaccattttataaattaaaaagggaggttacatggtcatga

SEQ ID NO: 20628 - DNA, 432 bp, Zea mays
  Peptide Sequence Number=SeqID_62407
atggcagtatggtactgcaagatagagcagacagtgggtgtacctacgtggccggtctttgttgatgctgtcagccgtcagtttgcggcaaccgcttccttgacaacccctgctgttacagcactagcagcatcagaaccttcaacagcccctgctagtacatcactagcagcttcaggcatctccacaattatccacgctgggggttggctgcatcagctccagtggcagcaccgacaacttcaccgaacaaggatgccctcccatctgcaattgagacactgccatgccagttcctccaatccagatgttttcagccctggggaccgtggcatcactaccttcgtcccagctagcgaaggcccaggattaatcttgatggtcatcgtcctcgagttcggagatacgcacaaggcttggggaaatttgtaa

SEQ ID NO: 20629 - DNA, 318 bp, Zea mays
  Peptide Sequence Number=SeqID_62408
atccgccgccggcagatacccaagccaccctcaagcccaaccttctccctcggcacctccccccacctacctcacatcgggtccatcccaattccactggaccctgccgccattaggcgcaaccgggtccgcttcgcgtcaccccatccccgcctcacactgccaaccaccagggccgcgcccgccattactcccccctccctcgctctgtacagtgggatcctgcggagctacgtcaagatccgggaccccgtccgctgcctgagctacgcccgcgtcggccataagggactgcagagcggcattgcctcgcagtag

SEQ ID NO: 20630 - DNA, 708 bp, Zea mays
  Peptide Sequence Number=SeqID_62409
atgggtccacaaactctcccccagccgggaagaacccttcaaggtgagggaagtccaggtcccagtcgaggcttcctcctgggggccgttgccaactcttttaggtatgctggcatccagcctcaacacgtcaagcctacatcccaggggggcctgggtcgcgccaaaagcgtgcagccaccaacttcatggcgtcctgtacgaccttccagacggctcgtcggcggcggtggcctcctcgacgcgtgtgccgagacaaaggagcccgcattgttggaggcgacgtcggggccattaaagccaaagagttggaagcgcggcagcacgtggcgcctagcggcctggccgctgaaagggagccgaagctcgaccagttcatggaggcgtgccacgaggccactgcaggaggcaatgaagtccatgcgaaagatggagccgcagctcaactcgctttccacctccgcaaagttgatgaacatccttgaaatggagcactggcagaagagcgccacctcccacgaggccgcgctcctccagcaacagcaagaagaaaggcaaggtcggcagcgccaacacataggagacgaagagcacggactccccggtggcaagatcgtcgaggaggatggcaccagcgtgaatccttccgccgaacgccaacgtgctccatccaagcagacggcgcaccatgtcgagtgcccgctatag

SEQ ID NO: 20631 - DNA, 281 bp, Zea mays
  Peptide Sequence Number=SeqID_62410
atgccctggctggcccacgcgctgctcctccctctcgcgcgcggcacccccgcccacccgctcggcccagcaggcgctctccccttcccaggcctcggcccagcgaccaggtcgcggcccccaccagccccgcgcgtccccagccgcacgttcgcgcgtgggagtgccgccgccgccaggaacgtgcccacgaccgccccacgaaccgctcccagctgcaaattttttctgctgcagcacctttttctctacctttcgccccacgcatctagaaatggcgg

SEQ ID NO: 20632 - DNA, 339 bp, Zea mays
  Peptide Sequence Number=SeqID_62411
atgcaggcggcatgcaaccgcgccaggtggacgcgcttctccgactcccgatacgccagcatggaggcccaggcccacgcgtcgcgcaaccggcgcgccggatgccgcatacaaggaccgggaaagggggataccccgaaagggatccttccccgtgaaggaaccaggctccgagcctccctactgatcagaggttcgaaggctggccccccgaagggttcaacagccgcctcagatcgcgtgggccctacacccactactggtcagaggttcgaaggccggccccccgaagggttccacggccgcctcaggctattcgggctccgcgcccattactga

SEQ ID NO: 20633 - DNA, 873 bp, Zea mays
  Peptide Sequence Number=SeqID_62412
atggccttcacctcgatgtccgaccacctcgctgtcgcgaccatgggcgcggctgccgccgcggagctgggcacgcgtgccgtcgggctaggtgcgacctctgcgctaggcgtcatcgggctggacgtggccatcgccgccggactgggcgccgccgccgcagggctgagcatgagcgccgctgcgaccctaggcacgggcgtcaatgccaacgccgccaccctgggcgcgcacctggccgccgccgacctggacgggaccctagccaccgtcgacctcactgttgtgagcagggccgccgccgctgcagccagcgccccttcctcaccagcgcggccgaccagctcaccgccgtcgcgtccttctctgccgacccgtacgggctcctcccctcagcacgcagcgaactccccatgggtggccccccttacatcaacggccttggccccctcccttgcctccctcgctgcccaacagccacgcatcccgcgttccccgccgggttttcccgcccaccaccctgctctcgctgctcccgcatggaccgacatcgtcgcatccttgtcggctcctccgcccacctcctacgtgttggttgcggccatcgcaaccatccaacccgaccccccggtagcccatgatgctcccacagtggcttctgaggctccgcacgcctctgggctcgacgccaacaccatcgccgccctccacattcagtctcttgtgtccgtagtgttggacccgggggacctctccatgagcgagtactgccaccagatgaagggcatggcggactctctccgcgacctcagcgagcccgtcgccgaccgtaccttggtgctgaaccttttgcatggcctcagcccctactag

SEQ ID NO: 20634 - DNA, 600 bp, Zea mays
  Peptide Sequence Number=SeqID_62413
atggctcctaacggctttttgtcgagcgtcgcatttcgcggagagcttggctctcggcaaagactcctttgtcgagtgtctttctatgccgactgttccacccttggcaaacaaggctcattctggtggagagacattcttaaaattcaagaatcttataaagagttagcttgggtggagattggagatagaaaaacaacacttctgtgtcatgacaactgggatggcatgtgcaagtctgcaagattcccagaactttggtctttcgcttccatcaaagacatcactattcaccaagcaagaacggcaacctcgcatgagatgttccacactcctctgtctgttgaagcttttgagcagtttcatgctttacaagacttattggcaaatcttccgcaacatgatcagagaggcaaatggctctgcaatggttcctctagcttgttttcctcacagaaggcctatactcacatgtctggcaaccagtggacccacatgtctggcaaccagtggacccacctcatcttctcctggttgtggaaaacaaaatgtcagcctaaacacaaggtcttttctagttactgcttaaagatagattaa

SEQ ID NO: 20635 - DNA, 468 bp, Zea mays
  Peptide Sequence Number=SeqID_62414
atgcctgccccccattccaatcgcctgtgctcgcgaccgacacttcagccacgacccccgccccccttgtcggcgccggcgcccaagctccagatcgaggctcccgcatcgaccgctaaccccttctccaactcgctcctcaccgctctgaagccgtccgcgtccgcctccgaccttcccgagggcgcagacaatcgccacattgtgttcccatccgtcatcaagcgcggcaaggagcccgtgcgcttttccaaggacgacggtctgctccagctcgcagccgtcgatggctgccacaccaccgttgtggcttgcgtgcctgatctattgaaggttgctctaaattgtattgacaatgttagagatacttatgggaccttgggcgttgtcaaatcaaaggatgctgacgttgtgcaaatctcttatattccaaagtttattggggcatcatacatttccagaagatga

SEQ ID NO: 20636 - DNA, 258 bp, Zea mays
  Peptide Sequence Number=SeqID_62415
atggtgtgcttgccacaacagcagataaggttcgtggctgcggtggcgcttatatcttctttgatcggcgccgccgcaggcgagaccgcggcgcaggagctgcggcaaggtctctccgtcgctcacgaccagtcctactcgcagttccagccggtgctcgccgaccccacgggtgtcttcgcgctcgacttcctccgtgtcaactccaccatgctggaccttgccgtcgtccacctcccgtctgccttcccactctag

SEQ ID NO: 20637 - DNA, 447 bp, Zea mays
  Peptide Sequence Number=SeqID_62416
atggatgcgggcggcgctgttcctgcccacggtggcaaagtcaccggagttggggcgggtgtaggctctagggggtttgaggtcaccgaagttggccaggaccggcgagaagggcccagcgaactcactggtgggacttcggccacgagaccgagaccagagacaagagaacgacggagggaatgctccgggcgggtcggggtaactccagcgaggaatctcggccacggggaggggcaatcgggcgcgctaaggctcatactagctccagtgaaggaaggggaatgccatggatcaaagcagggggctcaaaacagggccaatttagccggacaccacgcgagtgcgggattcaactcaaatcaaatcacaattaaaattcaaataattcaaacatgtgcatcaaacaagcatgatacaaacattcatatttaccctaggttttaa

SEQ ID NO: 20638 - DNA, 381 bp, Zea mays
  Peptide Sequence Number=SeqID_62417
atgggctgtgagaagcaaggttattttaccttggatgaatggagagctggtttgaaagctcttcgagcagacagcatcagtaaactgaagaaagcatttcctgaactggttcaagagtgtaaccttgcttaccactttcatgtgttctataaatccaggttacaaggccgtcaaatttccaggatttctacatatatgcatttcgttattgcctcacagtaccaaaatgactacaaggtgataaacatggatcagtggatgggatttatgcggttctgtaatgagataaacttcccatcacttgacaattatgattcagaccttgcttggcctttgattctagacaattttgttgagtggctaagagaaaataaaagctag

SEQ ID NO: 20639 - DNA, 1245 bp, Zea mays
  Peptide Sequence Number=SeqID_62418
atggctgggctgaccacatggagatggttccggttcaggggttgtagaacgacgaccacgtcgggcaccgttggggccacctcgggcagaaccaccgattggtatcagtgctgggagcctgacgaggagctcaaggtgtgggattggtatcagaccacagagggagtctgccatgcccttcatccgacgatattacttgctgacgaagtggttcctctaggagaacatgcggaacgaggcatcgagctcaacagtgagggtgccaatgagctacgagaggacaacactgtccatctggtgctaggatggagacaatgggccaaggacgtcgtcgatgacgtagcgctggagcgtgaggagcacctgatcacgccaactgaatgcattgacttatcaacaaaaagcagagataatgttccagaaacttttgcaaagagtatattaacaagggatacaagtaatgtgattgattcagatggccttcctcggcttggacaggctgtacatccaaacgagcaatactatagcgtccataatagccttacaaatgtgataaggcctgtcaaactaaaaggcacagagccagcatttattgactatgttgctgtcaacgggacaggttcaaaatgtggcctgcagaaggcgaacattcgtctgcgtcgtgtaagaaaccctataatcggtgacaagttcagcagtcgacatgggcagaagggtgtttgctctcagttgtggcctgacattgacatgccattctctgcaaatactggcatgagaccagatctgatcattaatcctcatgcatttccttcaagaatgacaatagcaatgcttttagagtctatggcagctaagatatcttggtttttgtcttcacaggctggaagtctacatggaaagttcattgatgcaacaccttttgcaaactcactcaaaaaggacaaggactccgacaagcctaattcgattgtggacgaattgggtcccatgcttgcatcttatgggtttaattatcatggaaacgaagtcctttatagtggagtttttggcactgagatggactgtgagattttcatcggacctgtttattaccaacgtcttcgtcatatggtctcagacaaattccagcgcgctggcatggactacaaaccctgtgcaacgccagtagacacgaaggccaaggtctccggcgatggtgcccctactagcgaccccactgcctaccagtcttgccgacgctcttag

SEQ ID NO: 20640 - DNA, 189 bp, Zea mays
  Peptide Sequence Number=SeqID_62419
atgccaggattgatctacttcatggaggtcatcaagcttctgccaatgttgctaggcgagggcactgaggcaacaaccacggtcatggccaaggcagagggtgtggtggcccttctggtggtcatggccatcaaggtggggacaattggatgggatgtgtacatccttactctcaccggcgctgggtga

SEQ ID NO: 20641 - DNA, 759 bp, Zea mays
  Peptide Sequence Number=SeqID_62420
atgggattggtacgcaattcttttcttaaacgtggtgctggatacactgacaaagcagtggtcataagatgtgtccaacgtgaccagtccagtgtgacaataaagttgtattacatcctaaatggaagtgcaaggcttggattttggttgggtggcagagagtttctgcttcctgttgggattgttctcaaggcccttattgatgcaagtgaccgggaaatctttacaagcttgacttgctgctacagtgataaacatggaagaggaaagggagttgtcagtactcaactaattggtgaaagggcacaaatagttcttgacgaagtcagaaatctgtccattctgactcgcacacagtgtttggtgcatattgggcaatacttccgatctgtgatggaaggatttgaaaatgatgactatataactgtagtgtctaatgttccctttgtgtttacattgacatttatgctgcagaaactttatgctctggtagatcaaactgcttcacctgacaatcccgacgcgctacaataccaggaggctctattgcctgggcacttattcacagtttttctgaaggataggcttcaggagtggctaagaaagtctaagcgtttaatccttgaagaggctgcaaagaacaaaggttttgaccttggtaatgcggtagagcggacccaagcttcggtggcatatgatcttggtgtggagcaacttgaactggaggtggaggcgcacatcatggccttaggcctctag

SEQ ID NO: 20642 - DNA, 663 bp, Zea mays
  Peptide Sequence Number=SeqID_62421
atggacccacatgtcattgactcatgtggatccacatggccgatccaagccgtccgtctcctcaccaagcggcccggatccctcctctccggccaccccaaaacacgcccgacgccagcgccaccgaaatcccccaacccatgcagcgcaagcattaccataacctcctcgcatatcggcccgcgctgctgccggaagcagatcggagcagcctcttcggctcttggcgacggatgttgctcgcttcgtttaccacgaccagatctgcgatggcttctgctcgcctcgctcgctacccaccagatcccggcgcctcccccctcgtcgctcaattctgctccgccgcgctgcgatcgatccgctcccagacgacgatcgcccggcgcggatcagcagccgccggggctgctccggcgtcgcgaatggccgcgctcgccgggccgacaagcagcgcagatcgtggggctcgccggcggcaccggcttcggcctcgtcttccgtggggacggcaggcgcgaggcggtgccctgcccgccgcggactgcctctgggagttcgcttccgttacggcacctgccatcctggccgtcggtcgggggctggcgttctcgtgaatcccgtggtgggccgggggcagaagcggtaactcgccgggccaggtag

SEQ ID NO: 20643 - DNA, 1731 bp, Zea mays
  Peptide Sequence Number=SeqID_62422
atgggctcatgcattactagttctgctgatcctggcctgaagatcagcatgaaaagagtggagcatgtcttatcccaagaaaatgacaaaaatgttaatgaggaagaatctctctctgatcaagagtgtgaatttgatccagttgattggaatgatgatgagaagtcaattttcattgaggcaatgaataactacggaaaggatttttctcggatctcgtcttgtgtgaagagcaagtcatatgaacaatgcaaagtgttctttagtaaggctcggaaatcacttggtttggatttgatccatcaaggggcagccgatgttagtatgccagctagtgataccaatggagggaggagcgatactgacgaggcctgtgctgtggaaatggattcagctatctgtaggaagcagtcttgttcaaagattgtgcaagatgtttgtcctactgaaggagccattttagggcctgactctgttttaatctctaagcagacagaaggagatatatcaaataggtgcattgttgatgttaaaattgaggaagatgataaggaagctgataaaaattgcagcaatgttgatgataagaggtccagtgatagtactcatcaagctggccctatcaacatcaattgcccagaaagtacagataagctgcaaggaactgatgatgccgttgaccaagtaaacatgcatagtagtgtcctcaactcttcaaatgagcatgcaatggccatgcactcagaagtgagatccagtttacactctgtagatgtacttcaaacagacaaagctgaaggtactggtactgatcctagccaggtggaagaatgttcacatcatgctgtctacacaccgatgacagctgggaattctggttcctcagctttcttaacttcagatagtggtatcaaggacaatgttcacatctcaaacatgtctggtgcctccactgttagtcctgcattcacttcaaactatcaacattctctgccaggagatatgcccctgtcgaaaccaaagccactagtaacctcccttaccccaaaggatttaatgcctgtgcagttcagttcagttcttcctgatcccactgcatttcgttttgagggcataaagcccaactttgaggacagcagtggcaacaaagtcagcagtgccctaggagctaaagacatttgcaagtacccagcttttaaagacccatctgataatgagcatgacacattgtttcgtaatattgatggttatatgaataatcatctgacaactgaattgccagttttttctcaaagaactgcaagtggcactgtgagtacttcgcagacaaaattccagaatggcaggtccagcagcgtgtgccttccaaacagttctgaggggattcaatggcccaggaaacctgaagaagtaccggaagattctttgaggccttgcgctcgcaatgcaaaaactgagggtggtgagaaacaaaagcgacctggtgatgtcaagttatttgggcagattctcagccatcagccaaccttgccaagttctggctcgttgtgtaatggtagccagagcaagcctccctcaccaaagattgacaaaacatctgtgagattgaccaacaatcccaagggatcttgtagttttttcttccaggcctggtgtcagtccacatgtgggtctggaggaaagatcagtgaggagctacggccatctggatggaagcacgatacagcctga

SEQ ID NO: 20644 - DNA, 765 bp, Zea mays
  Peptide Sequence Number=SeqID_62423
atgtacaaaggtgccacaaagtttgaacttaaattgaagtttgaatttggaaaggaggaaaagataaaagaaaagaaaataaaaagaaaaaggaatgaaacccctaactgggcctcagtaaccaattcggcccacccacagaaacccactgcgcggcccacccgatcttcgcacagcgcgcgcacagctgactgtcatgtggggcccttgggcagtcgctcacgcactcttctgcgctttctttcgttggcgctctatgacaggcagggtccaccggcagtcacctcgcacgtgcgccgtttcactgccccgtgggacccgtttgacagaagcagattccccgagagcgcggactcggtctctgttcatcttctcccccaaattcgcgtcgagctcaacagaccgcgtgcatccttcggaactactccaatctcccccgcctacttctaccgagtctatctggcgacctccccaagcgcttccccttccccatatcaagtcattggagctccggccgaacaccgcgcgtgtgcagagagagtgagacagggcagaaatcgtccgcgagtgccggggtcatcttcgtctaaaggccaggcactcgagtggtgtccaggggctttgcggggtgtcgagcgaagatttcacggccatccgaggaggaaacgaccgcagtggcggcctgaattcaccgtcggagcttcgtttccgccgcggttcggactcaaccgtggccagagcgcttcacaacgtgatcactggtaa

SEQ ID NO: 20645 - DNA, 348 bp, Zea mays
  Peptide Sequence Number=SeqID_62424
atggcgtcaggcttgaacccgcccctggcgttctacgactcgccgaggcccataccgcgcacgttctgggcgaagccggacatgggcggcgtcaccacagaggtgacggcggagccgaagatctgctcccggatgtcctcgaaaccgtggttggggtcagagtcaacgcagctggccgaggatgtggccaaaactgcggttcaccatcaccacgaccaccaccgccttgatcagagagtggatctcgtgcttccgccggcgacgcttcagcccgaggtgcgagttcgtggttggcatggaggggaaagagatggcgagtgtgccccacctgccatgtttccactatga

SEQ ID NO: 20646 - DNA, 441 bp, Zea mays
  Peptide Sequence Number=SeqID_62425
atgcccataccgcgcacgttctgggcgaagccggacatgggcggcgtcaccgcagaggtgacggcggagccgaagatctgctcccgtatgtcctcgaaactgtggccggggtcagagtcaacgcagctggccgaggatgtggccaaaactgcggttcaccatcaccacgaccaccaccgccttgatcagagagtggatctcgtgcttccgccggcgacgcttcagcccgaggtggtgcacacccagggcagtgcccagagacaaccaactccacaaggagcgctacgaggagtagcaccccggggccacggcgagcgggatttactgccatggcgacaacgagtgacaagcatgcgcggcgcaaacaatcgagtccccctcgacccaactgcgaagactctacgatgtcgcatgctagtccctgttgttgccgtcacctag

SEQ ID NO: 20647 - DNA, 378 bp, Zea mays
  Peptide Sequence Number=SeqID_62426
atggccacaaaggaacacattgcacaacatggattcactgggattcacaggatttggaatttggcacaaaaagggtggaagagggggcttcactgggctgaatcagagagaagagagatgagtgaaggcaaggctgctcaccagagggagaagggacgagcgcagcggctggaggtcgccagagcatggccggagacggtggacgccggtgatcagagaggagagggtggtcgccagagaatcagagagcagagagcacagagggagaagaaggcctctggctcggtcgcgggctggaggcgtttttttaaaacgtggtatgggcgcaccggacagtctacagtgcatgtccggtgcacaccggacagcgcacggtag

SEQ ID NO: 20648 - DNA, 201 bp, Zea mays
  Peptide Sequence Number=SeqID_62427
atggttcaaaggaaccacaacaaggggaaaggaaagccaaaatctaacaagcccaacaaaactaccaacttcaagaagaagaagaacaaggctgaattgacatgtttcgcatgtggcgaggcgggcgcctcgggaattattccgtgctattggggaatggtcaccatgcctctgttctggcactggcacggtggattctga

SEQ ID NO: 20649 - DNA, 837 bp, Zea mays
  Peptide Sequence Number=SeqID_62428
atggccgcggccggcgatgactccattggcgcgccgaggcgcgcgagcaagaaagggggaagaggaagaagaggagatggatttcacaatgcagtacctagaggaacaagaaccaaccctaagatcacgaatcaaggagaagcaggtcaggcaaaaaatgttgggcggctggtgcgccctcgtgaacatctcgggcttgttgacaaagtggagatcgaggaagacgccgatgtcgggggcacgacgcggatgggcgacatcgatgggcaaggaacttgtgtgattcagggggagggggacaacgcggatgggcgacatcgatgggtggggaccttgcgtgattcagggggagggagctgttgcgcgcggcgggggcacggaggggctaagcagggggaaggcggggatgacgcggcagcagacgtaggtggcgggctgccggggaaggaacacccgctgagcttccattgcggcggcagtggggaggacacgcagatccgcgtgggggaggaccgcgttgattgcagcggtggtggggagaagggtgggagatccgcgggcgttgattgcttgcggcgcggtgtgctggcgctgatggtggggcgggtttgggggcagcgcgtgcgggaggacgatcgcggcggcagaacagtgttcaggatatcagaagttggcctttatcttctgccgaatcttgcttgtgtgcaagaaatggttgatacatctacaatgcagggttataatacttcagagatgatcaagattatggacggcaccagggagagcgatatttatagtttgggagtgattagaaggtcgcaaatgataagttactaa

SEQ ID NO: 20650 - DNA, 1581 bp, Zea mays
  Peptide Sequence Number=SeqID_62429
atgatgggagaagcaggggaggaagaatcggcggccgcgccggcggaggtgagccgacaagcggagctggatgagcagcgatgcctggcggaggcgctggacgccctcagttcgttggtctccgcttccttgtccgcgacgctgttcccgctcaagtggcagctcaccagggaccggctccacgcctgcctcgccgacaccaccgtccccgcgggggacgagagcggcgaggacaggcgcgacgcgttcgtgaacctcctgcgggacgtcgcggcgaccgctcgggaggcgcgagagctggtgccgcgtagccaggggcggcagtacggcggcggcaagctgcggctgcgcagcgacctcgacgtcctggccgcagccctcgacgcgcacgtggcgcggctggacgagatgcggagggaggccgcgaccgcgctcagcgaggtgctgcgcgacgacgagaagtgcgtccgcgtcgtggcgtccgacgtcgcggacggcgtcggcgtgctcgtcgcgctgctcgagtgccccgacgcccgcgtccgggaggacgtcctggaggcggtctcggtgatcgccgggtccgacgcgcacaggggagacctggtcgtcggcggcgtcatcgcgcctgtggtccgcgtcctcgacgccgccgccagcgccagcagcgaggcggccaaggagagggcggcgcgggtgctctgcaaactcacggagaactcggacaacgcgtgggccgtcgccgctcacggcggcgtcacggcgctgctcgacctgtgcacggaccacggagcgagcggcggcgagctcgtgtgcgcggcgtgccgggtgctgcggagcctcgcgggcgtcgacgagatcaggaagtacatggtggccgacgctggggccgtcccggtgctcgtgtctctctcgcagagggccacggacgacgcggcgcgaatccaggcaatggagctcgtcgtcgccatcggctctggggacagctcagccagggaggccgtggtccaggaaggtgccatcgaggtcctcgttcgcgcgctcgacgcctcctcctcctcgaaggtgcgggaggtggccctccgtgccatcgacgggctctgcctctcgccgcccacatccaccgaccgtctcctcgccgccgggttcctcgacagcgtcctctccctcctccgcaccggagacaccacgctgcagcactgcgccctgaaggcggcgcaccgtctgtgcccggtgtcggaggagatcaggaaggcgatgggcgacgccggattcatgctggagctggtgagcgtcctcggcgcgtcgtccaagtcccccgaggcgcgggagatggcggccgagtcgctctgcgccttggtgtccgtgcaccgcaaccggaagcggttcgtccaggaggaccgcgacgacgtggcgcgggtgctgcagctgctgggctccggcgacgaggagaagctcacgccggcgaagcggttcctgctgtccacggtgacgcgtctcgcggacagcagctccggccggaggaagatcctgacctcggagcacgtcaggcacaaacaacacacacctacctatcagtag

SEQ ID NO: 20651 - DNA, 498 bp, Zea mays
  Peptide Sequence Number=SeqID_62430
atggctcgactgaaaaaagttctgatcaactcaacgccgccatcctcctcagccgcgcgaggatttcgccccgctcgccacgccttcacaatcgcccaacgccaaccacctcccctttcctcgcaagcccttctcccaaatccgccgccaccctcatccccagtcggccgccccttgcccgtgcaccctgcccctgctcgcaccgacaccgccgtcctttttccggcggtcaccaccaagcaccagcatacaacggatgagaacatctgtgaggaggcgacgtggcaaccagccccgaagcagggcctctcggcgtggtacgagcccttcccgccggcaccaaacgtcgaccccaacgagcgctactccctggacgagatcgtgtaccactccagcttgggaggcctcctcgacgtgcggcccgacacggtggtgctggctcgcttctcaggcgcctattggcgcgacctcttcgattccttccccgagtgctcgtga

SEQ ID NO: 20652 - DNA, 1539 bp, Zea mays
  Peptide Sequence Number=SeqID_62431
atggccggcggcgtggtggtgagctccggtgggggcaaggactaccccggcaagctcaccatgttcgtgctcttcgcctgcatcgtcgccgccaccggcggcctcatctttggatacgacatcggcatctctggtggcgtgacgtcgatgaacccgttcctgatgaagttcttcccgtcggtgtaccgcaaggagcaggaggcggagcggaaccagagcaaccagtactgcaagttcgacagccagctgctcaccatgttcacctcctcgctctacctggcggcgctcgtggcctccttcttcgccgccaccgtcacccgcgtggccggccgcaagtggtccatgttcggcggcgggcgtcacgacgtgggcatgctcatcctcggccgcgtcctcctcggcgtcggcgtcggcttcgccaaccagtccgtgcccgtctacctctcggagatggcgccggcgcgcctccgcgggatgctcaacatcggcttccagctcatggtcaccatcggcatcctctgcgccaacctcatcaactacggcaccgccaagatcaggggcggctggggctggcgcgtcagcctcgcgctcgcggccgtgccggcggccatcatcgccgtgggcgcgctcttcctgcccgacacacccaactccctcatcgaccgcggctacaccgacgccgccaagcggatgctcaagcgcgtccggggcaccgacgacgtggaggaggagtacagcgacctggtggccgccagcgacgagtccaagctggtggcgcacccctggcgcaacatcctgctgccgcgctaccgcccgcagctcgtcatggccatcgccatccccatgttccagcagctcacgggcatcaacgtcatcatgttctacgccccggtcctcttcaagacgctgggcttcgcggacgacgcctccctcatgtccgccgtcatcacgggcctcgtcaacgtcttcgccaccttcgtgtccatcgtcaccgtcgaccgcctcggccgccgcaagctgttcctgcagggcggcacccagatgctcgcgtgccagatcgtcgtgggcagcctcatcggcgccaagttcggcttctccggcgtcgcggagatccccaaggggtacgccgccatcgtcgtgctcttcatctgcgcctacgtggccggcttcgcctggtcctggggccccctcggctggctggtgcccagcgagatcttcccgctggagatccgctcggcggggcagagcatcaacgtgtccgtcaacatgttctgcaccttcatcatcgcgcaggccttcctccccatgctctgccgcttcaagttcatcctcttcttcttcttcggcgcctgggtcgtcgtcatgaccatctttgtcgcgctcttcctgccggagaccaagaacgtgcccatcgaggagatggtgctcgtgtggaaggcgcactggtactggggccgcttcatccgcgacgaggacgtgcacgtcggcgccgacctcgagatgccctccgccaacgccaagctcggcggcatgcagtag

SEQ ID NO: 20653 - DNA, 429 bp, Zea mays
  Peptide Sequence Number=SeqID_62432
atgaggtttgcggtggcgaacaaggcgtacattgcggtgacgctgggcgccgccatcgagctcaaggagcaggtggccaagccttgctcctcggccgcgaagcggggcgcgttgcggttgtcggcggccggcaagatcggcggcggcggcggcgccgaggagtcgctaaggatgatcatgtctacaactgactgtgccttggaggttgctaagtggccgacaacacctgctactgttctcggcttctcactgagctccgagactcctctacggaacctcgtgttcatggattggatggatgctcgtctgaagctacaaaagctaaaatctgacatcacggtagactacgagacaagctcgtctaggattgaattgaatcgcttgttcatctctggtttctcgctgggcacggtggtacagtacgagtag

SEQ ID NO: 20654 - DNA, 348 bp, Zea mays
  Peptide Sequence Number=SeqID_62433
atggcggcgcccagcgtcaccgcaatgtacgccttgttcgccaccgcaaacctcatcctcttttttttccctgcgttccgaagaaactacgactctgcctggactctcaagaacgtcagtgcgcatgtagatggccaacggtttcgcaggcagctcggaaaacaggtggccgagcggaccactggttccgtcaaacagggagctcgtgcaggcaccgaatccatgtttctgaaattagtgaacgtctctgtcggttcatcctggtcgcagtttcgagtccgtctgcaactgcaagtctgcaacgcagcgcaggcggccacgcagcaagtgtctgtgggaacaatgtga

SEQ ID NO: 20655 - DNA, 438 bp, Zea mays
  Peptide Sequence Number=SeqID_62434
atggcgttcgagaagatcaaggtctccaacccaatcatcgagatggacggcgatgagatgaccagggtattctggcagtctatcaaggacaaggcatttaggctagatgatgacaacatattttttcagcttatcttcccatttctggacctggacatcaagtactatgatttggggatactgcacggtgaagcaactgatgacaaggtcacagtggaggctgcagaggctactctcaagtacaatgtggctattaagtgtgcgaccattactccaggtgaaactagaagaacgtatgaagctagacttgttgcaatttatagacatgtaagagaggatggagttgagggacaacctatttctgtttcaacagaacaatttgcaatgacttccttgttgataacaataattgatctgggcctcttccaccagaattag

SEQ ID NO: 20656 - DNA, 306 bp, Zea mays
  Peptide Sequence Number=SeqID_62435
atgcccggcataccgagggatgtcaccgagcactcgctggacatccgagccggagcccgacccgtcaagcagcctctgcaacgattcgacgaagaaaagcgcagagccataggcgaggaggtccacaagctaatggcggcagggttcaccaaagagaaggcacccgggggctacacacaccattgggaagggttgttcgtcatcgccaaaattctgaggtccgggacgaacaagctggctgacagtcagggcgaggcctacaccaacacttgcaacatccaacagctacgtcgcttctacccttaa

SEQ ID NO: 20657 - DNA, 672 bp, Zea mays
  Peptide Sequence Number=SeqID_62436
atgaggcccgatctggtgagcacgacaaaaaggagggcgtcgctgccgctgctccgagcagcagttcttgctgctgaggcagacgagcacgacggaggccggggaaactcaacggcgacgatctgggcgagcgcgacacaagagaccagagaaagagacgcgctgacgaggaagcaggaagccgtgatgaaggagctcggcgtgcagactaggcgagctgggcgcgcggcaatcagagagcaggaacccgggcgcacgcgcagggaaacggacaccgcggcgggccagggaacgacactggacgaagcctgcgacggccggaccaacccagaacacgagcagggcgcaccgcagctggagggcgagcgccatggggaacgagcagagggggacgcagtccgagctgggaggaggcgagcaccagagatgcatggtggcgttcgcagagcttgccagcggggaagaagacgatgggagaggggagcccgagctggagatagaaagaagcttcggccatgggggatacagggggctggggcgagctcggggaggaaataccgcggcgcgcaggaaaactggacgctgagcaagaacacggcagggaggagctcggccgggcgccatggggcgagctcggggaaggtccacggcggggttcgcggcgtaggatga

SEQ ID NO: 20658 - DNA, 744 bp, Zea mays
  Peptide Sequence Number=SeqID_62437
atggaggaacgcacgcaggggcgtcggggcctgggcgtccatggctgctggccaagcagaggcgtcggccatggggactgctccctgtgcctgcaccagggaaggagcagtgggaaggaagatgaacaggcgctggctgggagatgcggtgccctagagaagaggaggtgccatgggagagaggagccaagccccatgcttgctgccgtggagcagggaggaagaaagggtatacggggtcctacggatattgggggccctgagcggtggcataccctgcacaccctcagggctggccctgcagaggatgagggcgaggggaggtcgatgacggcgagagagagactcggcaccagggaggaacaacgccatgggagggcttcggtagggcgcttgctgggagatggagatgcggccgagcccctgggaggaagaggatccgggcgtgcacgggagctggagagcaagccaggcgcgcgacgcagggaggagcaaaggctgagctcggcggccatgggagcttcgtggctggaaaaaagctcgaccagccatggcgagcagggagaggatgaagccccggccaaggagaagcagggggcgcgcggaagagaggaagctgggcgcggctaccaggaagcagaggcgcgcgccgaggacgaggtgacggacggcgcatgggggatgggagctcgaagccgagctcaaccacacgggtacgacagacggaggtggaagacgagctga

SEQ ID NO: 20659 - DNA, 192 bp, Zea mays
  Peptide Sequence Number=SeqID_62438
atggatgctggccgtcgctgccctccctggtgctcgacaaaatgggtgacctacctcattctcgaccttgctgtggtggtcggtcacgccatggtcgtggatgctctacattctcgctatcgcgtctttaattgccgttggaaaggaaggtttcaggtttcggagctgatgaacatcagtgaaatgtcatag

SEQ ID NO: 20660 - DNA, 563 bp, Zea mays
  Peptide Sequence Number=SeqID_62439
gctccctccacgggacaacccccgcactttgtcgaccaggtcccctactcgaccccctgtcgtggctcctgcggcccctcttcaggcttccactgtctatggtggtcgtcgcccccgctagggcggatgtggggggccgcagctccacccgtggaggttccactgggcaggggtggtggccagggctggctgtcgttctacatcccctggaccggcaccttctccatgtggtcgggttagtgccccagtgcctctcgtcttccggcgccagcgccggctctcttgactacgccacactacaacgcacctccgtcgcctacctacggcatgcctccatacgacatgcccccaatgaccccaccttcggttccgcctacaaggacatctaccacgacaccatggacctggccacctggaccccactcgctcgatgtgaaagcgtcaagcccctctacacgctccgaccctcttcaacggcacatctccaccttccgtcctggtctccaccaccacttccacgtattggcatcgtcgtatcggccacccaggacctagcgttatga

SEQ ID NO: 20661 - DNA, 1977 bp, Zea mays
  Peptide Sequence Number=SeqID_62440
atggagacgagggaccggatgttatggagaacaacggctgggaatggagagcggcgaagtggtctgtgtcgagtccagaggcgtggggagcctctgcgtgggcggaggtgcgttaagggccaccagggaatgcccgtggatgaggcgctgcgtggtggccatctgggcagtcagggcggcacccatggtccgctcgtgctccagggccagggacgcgatgtgttggcattcctaggaggcggcaacaacttcctggatggtggcagcgaagagcgtggaagacgcagggtcccgaggccagtaatgaatcggacctcgtcgacgggggagggtgaaggcctcgatgctccaaggggacggtgcaacgacgagggggcccgggagttccgcgacgtcgctggtggggaacagtgccccgcacgggcggtggtcgcgtccttgcctctttggggcatggagcggggggggggagacgagggccacacccacggcggccgtggaggcggaggtcggttggggggccacgcccacggccacaacggtgggatgggaggcggagctggtgcgtgggtctgccatccgggcatgggcaggagagaagagacggagacggctaggcctgggatgccagcggcagcgaccggagggagagaggaaggggaggggcgacgacggccggtggctggagggcgagacgaggggagcagcggcggcggccggcggcaatggccggagagggggaggaaaggggagcagctgcggcggccaggtgctggcagcggcggctgggagggaggtcatcatcctccatccactcttcttagcactgcttccagctactcccccttggtccccttctccaagccatctctcctccttaaccacctgggcgcgggcaacttggtcgctgatggaatcagtggtgtcactggcgtagcgtcgcaggttgtagaaggcgtagaggacactttaggcagtatcgtagaagcaatcgaccaaggagtcaaggatgaggaccaactggatttgcccaagtacgtgtgtttcaagggagataacggtctgtacctgagtgctcgaacggttgaaggccatccctacctgcagtttgcatcggaagacattggtgacccaagtgtgaggttcatcacctacaaccacaaggtgaacggcaaacgggtggtgcgcttcaagtcgaaccatctcggcaagttctggaggcggagccccaactggatctgggccgacaccgacgacaccagcaccaagaactccgacaccctgttcgaggtcatcaagatcgacgaggacggtgtgtacgcgctccggaacctcggcaacaaccacttctgccacaggctgacctacgacggcaaggagagctgcctgaatgccacaattccgaccatcaggaaggaggcgcacatcaagatcgaagaagccgtcctctcccggaagatctccaacatcgagtaccacctcaagggcgccaagatcttcgacaagaaggccaagaccctcatcactcgagaggcggtgaacggcaccagcacggacagcaagaccaccatcaccctcaagtatagcgtcatcaagggaaagctatgggattcgagcaagtccatgaaactgggggtcaccaccacaattgaagctggggttcctgtggtcttacccgcaaccattgaggtccagagcgagttcaactccacctacagctggggcgagtccatcatcgagaaagaagagtactccaacgcctacgaggtcgttgtgcctgcatactccgtcgtcacggtcagcgtactcgccacacagggcatctgccaagtccccttctcttatactcaggaggacgttttgactactggagagaggaaggttttcaagtttgatgacggcatcttccgtggtgtcaatagctttggtttcaagtccgaggtcacggaaaggaagctctccaaggacgacgactga

SEQ ID NO: 20662 - DNA, 186 bp, Zea mays
  Peptide Sequence Number=SeqID_62441
atgaagaagagtctcgtcttgcctcagaaaactgagctgtctcctccggagccatacaatcctgacgctgatccagccctgaagagtactcttgttgaaatcagaatagcaaatgtagcaattgatgaagctgtgaataggcttctaaacgaagatgctgagagagtcctgaaggaggatgattaa

SEQ ID NO: 20663 - DNA, 177 bp, Zea mays
  Peptide Sequence Number=SeqID_62442
atggcaagtggtggtggcaaggcccatgcagctagggagtggctcatcgaagctactgacaataacaagcacaacaaccttcttagttgtgagctgaatcttcccccaaagctttgtccccctctgcctcttggggctagtggtcaaaaggagctttgtcgcgtcccaaatgactag

SEQ ID NO: 20664 - DNA, 183 bp, Zea mays
  Peptide Sequence Number=SeqID_62443
atgacgaagaataacatggttgtgacgaacatggaaaggtacctgttcatatgttacacttggaaaacattgttagatcatgtttttgaggaccttcggaagacgaaggcccccaacaccttcctcttctggtttcgggcttctcttggagagagcccttcttggttggtgtccagtggctga

SEQ ID NO: 20665 - DNA, 252 bp, Zea mays
  Peptide Sequence Number=SeqID_62444
atggcccaagggcacatttccctttcagagtctcatactgccttggaagaggcaaagaaagttgaagaagttgtagaacgtgaaagacttatatccgaactttctcctcctatggggccatatgaccctgaggccgatccagctatgaacggggctcttgaagtaatcagaatagctaacaaagctgttgacgaagctgtgaataggcttttaaacgaagcccctgataatgttctaaaagtggatgattag

SEQ ID NO: 20666 - DNA, 2037 bp, Zea mays
  Peptide Sequence Number=SeqID_62445
atggagacgacctcgcaggacgaatcagaaagtgacgagcaagatcagccgttggaggcgaagccgctgcggtcactagcaccgatgctgccgctgcctatgaaatatgacgtggcaactcaatcaaccgacccgatgctagttttcgtcacgccattcaggccctgcacgtcgccagaaccgtctgcagctcgtcagcccttaccaaagtcaccagctcctctcagggctactccagtttcagctgcatttcccatgccacgacccggcgccggaggtgatcctctcgaggcgactccagtctcagcagcggcgccggcgtttcgcatgccacggcgcgaagatgaatcatcggaagaagaatacaatcccttcttttgtggtcggaaaaaaccaacccggctgaagacagcaggcaagaggactcatcagcaggctgagtgctccaatgcacgtgacatgaagcgcaggccaacacagacaagcctcagtctcaacaaggagctcgccacctttaccccatcctcgtcaagcgacccaactgaatctgtccaagagacactgacgatgtttgactcgctccggcgccgcatactccaactggacgaaaacagagaggacgcagcaggcaagcgtgcggacttgaaggccggaagtctcatgatgcagaacggcctgaggatcaacaacctcaagaccgtaggacccgtacccggcgtcgaggtcggagacatcttcttcttcaggatggagatgtgcgttgtcggtctacacgcgcccgccatggccggaatcgactacgtctccgctaggcgtggcggaagcggaaccgacgaggttgtggcggtcagcgtcgtctcgtccggcggctacgagaacgacgacaccgactcggacgtcctggtgtacacgggccagggaggcagtagccggcggcgcaaggacaagcacgaccagaggcttgaacgcggcaaccttgctctcatgaacagcatggagaggaggagcgtggtcagggtcgtgcgcggcgcgcaggacccgttctgccgctcgagcaagatctacgtctacgacgggctgtaccgggtggaagggtcctggacggagagggcgagggatgggttcagcgtcttcaagtacaagctgagaagggagccggggcagcgggacgggatctcggtctggaagatggctgagaggtggagagcagatcctgtgacgagaagccatgtcgtaagcgcagacatgtcgtcgagcgccgagaagctccccgtgtgccttgtcaatgacgcagacgacgacgacgagcagagagtgccagggcgcttcaattacgtcaccggggtggagtatgagtatccaaggccgctcggcaagacgaagccatgcaagtgccccagcgtgtgcctgcccagcgacgaccctgactgctcgtgcgcacggctgaacagcgggcaccttccgtacacggcctgcgggctgctcgtgaagcgcgttccggtgctctacgagtgcggccccgagtgccggtgctcaggaaactgccgaaacagggtcgcgcagaaaggcgttcgtctcaggttcgaggtcttctggaccggggacgcctgcgggtggggcgtccggtcctgggaccccatccgcgccggcgcattcgtctgcgagtacgctgggcaagccgtcgatgtgagcacgggtggcgaggaggatgagtatgccttctgcgccagcggcgagggttggaggtggtggaacctgggagcggggttggttgaggaagcaagcgacggtgacgcagcagagaacctggaggagaggctgcctgttatgataagcgcgagaaggtcaggcaacgtggctcgctttctgaaccatagctgctcgccgaacctgctttggcagcccgtgcggggaaatttccgaacgcttgcagactcaagccatgcttctgtggctccaccagttgccgaggttctttctgacgaaaggaaccatggtgtagtaaagcaggttctggtgttccctttgtatatataa

SEQ ID NO: 20667 - DNA, 1026 bp, Zea mays
  Peptide Sequence Number=SeqID_62446
atggcgatggcggcggagggcgcggcgagcgagccagagctggtgtcgatcccggcgacgccgcacggtctgtcgacgccggagggcgcggccacgccgaccggagcgggcgggggcggcggcggcaggagcaagggctccgggaccccagggcgtcgcgtggtggagggcctgcgcgggtacctggaggacgtgggccacctcacgcgcctcgacccgcgcgacgcctggctgcccgtcaccgagagccgcggcggcaacgcccgctacgccgctttccactccctcaacgccggcctcggcttccaggcacttctcctcccgctcgccttcccggacctcggctggagctgggggataatttcattgactattgcttatttctggcaactgtacacactgtggatcctagtgaagcttcatgaggctgtgccaggcaggaggtacaacagatatgttgagcttgcacaggcagcatttggcactgcaactgcactgatccttgttggaggggagaccatgaagctgttcttccaaatagtgccaccaggagggatgctggcggcactctacgccttccacagccatgacatctcgcagggcgttctcgcgacgacatgcctcctcgtcgtgctcaactgcctcagcagcttccaaatttactccatgccggtgtttgacagctttgaggcctactacaccggccgcaccaaccgcccgtgctcggcatgggtacggtcagggttcagggtcttctacgggttcctctcgctgttcatcagtgtggccctgccatttctctccagccttgccgggctgctgggcgggctcaccctgcctgtgaccttcgcctacccgtgctttatgtggatctgcgtcaagaagcccgagaggttcagcttcagctggtacctcaactggggccttggtctgctcggcacagcgttcagtctggcgttctcgctgggtggcgtctggagcatagttaacaatgggatgaagctcaagttcttcaagcctaactag

SEQ ID NO: 20668 - DNA, 207 bp, Zea mays
  Peptide Sequence Number=SeqID_62447
atggccatgatgggttcaacatcggacaagacgtacctctgccgggtaccaaactttgggattttaaatgataaagttgagaccgggctgccttaccttgactccctcaagccagcatatccttgggagtcttttcttttgtcgggtggtacccaaagaagagccccagcagtgaagtcgtgggaggatgttggcctcccactttga

SEQ ID NO: 20669 - DNA, 372 bp, Zea mays
  Peptide Sequence Number=SeqID_62448
atgcccgacggcgaggggctttctccggggtgcacgagctacggccaccaaggcggagtcatcgggcaacacagccgcaacgaatggatgaagaatggggagaaaggagggagtattgggctcaccgtgggtgacgccgaatctaggttggcttctcaatataagttaagtcttcttgaaccacgagatcctcggttggcaatttctcttctgattctcccaaacaattctgatgttctcttcggcttcaatcaaaatatccaggccgaacacctgcctttcaccgggctggtcccaatgcaacagagtgttggtcacttgtttttgattgttgtgaaccaaaaacgaggcaacacaattgttaaacattaa

SEQ ID NO: 20670 - DNA, 291 bp, Zea mays
  Peptide Sequence Number=SeqID_62449
atgggagggagagaggatgctgtatcgggcgggcagcagcggtctccaagggcagaaggaggggagaattgccgccacaaagaagaatctggcgcaccctcgtctgagccctggcctgattcttggctgggtattaggcgttgtgggtgtgagattggagcactggggtaccgtgacacggtgctccggcaagccctcaaccgtgcggggcggaggagcggctattgccggcggctatgggtggaagatgacctgtgtgttgtgggatcatggacgaacggtggtgattaa

SEQ ID NO: 20671 - DNA, 783 bp, Zea mays
  Peptide Sequence Number=SeqID_62450
atggactccactgcgttcctgggatttgtggtggcccgccgcaaggagtgggacgcgctgcgggcagaggtgtcagccgcgctcaagctccgcgtggatccgaacaagttcttaatggatgtcatcaccgacttcttccccgtggaccaccgcgaggtccggaaccccgccgacctggcctgggcctgcgtgctcatccttgaggccaccgtgcccgcgctcgccaacccggacccagacatcggccccgcgcacccgctcgtgctatgtgcggcgcgcgagcacgcgtggggcatggctagggtgtggagggtgccaagccacccaacgccacgcgtttctacagcacgacgccacttcaccgtcgtgttctcgcggagaagaaggacacgctgttgtaccgcaggattgtcgtcagcttctcctggcgccaatagatgccatgacttgccctcactcttgcccttgaggaagaaatggccgttggagctaaggatgacctatgtatcaactacagtcttttctgaacttgagcagcttgatcttggtactgtcgagaccgatgttgatgaggaagtcgaagataaggtaatgctatacgtggatatgaaggtcaatggtgtacatttgaaggtaatgctatatggaggtcaatggtgtacatttgaagtttttgtcgttgttgtggtgctcctagcagtcacctgcttgtcaaactttactaagtccaattatgaatgtaccttcggctcgaagaaaagcaggggtacaagcgtgacgtga

SEQ ID NO: 20672 - DNA, 240 bp, Zea mays
  Peptide Sequence Number=SeqID_62451
atggcggacgcagagcgcgtcggagcacgcgacaagcccgcgctcgacctaggtcactttaatttttttgatagtcaaaacatgtcaagattgttaaaaattattgaaagggcccaccaaagatttataacattaaataagctatacagtatacacaacttagcaaccgaagctagctccaagccaccatacaatggtcttatttacgtccgagagtcactggtttggcatatgttgtag

SEQ ID NO: 20673 - DNA, 471 bp, Zea mays
  Peptide Sequence Number=SeqID_62452
atggaccgtgctaaagcctcagctaaatcagcgatactggcgaacctggaattgcagagagagggctctttggcgccgcatgccgcagttctgaacattcatgcggttaacgctggtgatagtcggagcagttatgttattatgtgcgtgcatgaagtaaagattagtccctccatccaaacggcgccttattctacggaactgaagtttgcacgactcgtgttcgatgcaaatggttatggacctactggtgtaaaagaatcggaaccctgtatgctgatgaactctgacgagacggagttgtgggcggcgcctgccggagaacgggaggcgccggcgtttttccgcggcgccaaagagcccacggtttcgctcgcctcaggccggccccaagggtcaagagatcgcgaggcagctgataactcctcggccttatcagtgttctcctcgtactccgtacctgagcaatga

SEQ ID NO: 20674 - DNA, 1563 bp, Zea mays
  Peptide Sequence Number=SeqID_62453
atggaagccgtcggcgtcactcctgcccccgtggcggcgccggagaagaagaagctgcttgacctcaaggaccccttccccgccgccgccaacagcggcgccaaggcgtcctcggcgagtaagtgggcgacgaagaagaagctggtgggcggcgacgccggctacgtgctcgaggacgtgccgcacctcacggattacatgccccagctcccgacatacccgaatcctctccaagacaacccggcgtattcagtcgtcaagcagtatttcgtcaacccagacgacaccgtcacgcagaagattgttgttcataagaccagtgccaggggcacccacttccggcgtgccgggccacggcagcgggtgtacttccagtccgatgaggtgaacgccgccattgtcacctgtggaggcctctgcccgggattgaacacggtcatccgcgagcttgtttgcggcttgtatgatatgtatggcgtctccagcgtcgtcggcatagagggtggatacaagggtttctattctaaaaacactgttgcgttgacaccaaagtcggtgaacgacatccataagagaggcgggactgtcctcggaacctcaagaggagggcatgacactgccaaaatcgttgattgtcttcaggaccgtggcattaaccaggtctatattatcggaggcgatggcactcagaaaggcgcttctgtaatttatgaggaagtccggagacggggtctcaagtgctctgttgtcggtgtcccaaagactattgataacgacatcgcggtgattgacaagtcgtttggatttgacactgctgtggaggaggcccagagggccatcaatgctgctcatgtcgaggctgaaagtgcggagaacggcatcggtgtcgtgaagcttatgggccgcaacagtggttttatcgcgatgtacgcgactctagctagccgtgatgtggactgttgtttaatcccggagtcacccttctacctcgaagggaagggaggactcctcgagttcgtcgagaggcggctcaaggacaacggccacatggtcatcgtggtggccgagggtgctgggcaggacctcatcgcgagaagtatgaatttcgtggacacccaagacgcttctggaaacaagctgcttctggatgtcggcctttggctatcccagaagataaaggatcatttcaagaagaagcccagcttcccgataaccctcaagtacatcgacccgacctacatgatccgcgccgtccggtcgaatgcttctgacaacgtctactgcactctgctggcccacagcgccctccatggcgccatggcggggtacaccggcttcacggtcgctccgaggatcaccgagaagcagaacaaggtggtgatcacggaccggatgtgggcgagggtgctgtgctcgacgaaccagccctgcttcctgagccacgaggacgtggagaacatgaagcacgacgacgacgagcaccaccacatgcacaacacgcagctcctggaaggcgggagctcgccggtgtccaaatgcaatggctcggcagcggcagtgtga

SEQ ID NO: 20675 - DNA, 435 bp, Zea mays
  Peptide Sequence Number=SeqID_62454
atgtatccgtgcacctcccgtgctccgtgccctgctctgctcacctccactccactgcagagcaggcgcaccgcgcaagcgcagcgcagcgcagcgcgtgccacgccacccgacccccgggcgaggagatatttccaggcgccaacgtggcggcctaacccgctccgcgattccgaggcgagtggggccggcgatcggccgaccaagttgcgcgtctcagcgccatcagtttgtccgtccgtcaccgttcatcgtcggccgtcgccttcctatatccgctcgccggcggtcccttttccccctcgctgcgccaagccgccaaccaacgaccacccccttcctcgcccgcgaccactcgggcctgctgggtcgcgcttttccccctaccaactgcccgtatcgaggaaaataactgagccgtctgagcgcgactga

SEQ ID NO: 20676 - DNA, 414 bp, Zea mays
  Peptide Sequence Number=SeqID_62455
atgatgatgatgggcgaaggcgtgagcgtgccgccgtggtcccaccacgtccccgtgagcggcgtcgacgccggcgtcggcggcgacgagatgacgccgtacctgctggcggcgctgcggcagtacctgccgtgcaacgacgccggcgccgccgagggcggacgacgaggaggcggcggccatggccgcgggcgtggatggtttcggttgcgtcgagttccgcatgtacgagttcaaggcgcggcaaagaaatgcgacttcgcgcacggcgtcttcgagtgctggcttcacctggcgcgctcccgcacccagccttgtttttcccacggctgccgccgccgagtctgcgtgggagtgccctatcagctgcgtgtgctcctgccacgccgcagcagtctagcgacgaatctctag

SEQ ID NO: 20677 - DNA, 465 bp, Zea mays
  Peptide Sequence Number=SeqID_62456
atggggaaaaagggcgaagggtgggggcgtggtgggaaggtgtcaggcatgcggagcgcgaggtggagggcgggggctagcgcttcgggacacgtcgggagttcacgttataaagccacggtggttgaaatgaagaaaattatacgtgaggttaaaagtgataagtttagttccatccaaaaagccactaaaagcaggtccagtggtgcttttagatttgcactacaagaaagtcggcttttagaaaaagctgcttcctggatccagtcctttggttggcttttgacttttaggggggcaaaaaccaaagccaaaagtcaaaccaaacacgccctaagacatttgccctccatggcgccatccgacgctggtcctcgccacgtgccacgtcggcgcggcggccgtaccggaagtccggaacccactgttagaaaatattgtcatgtgatcaaccctctcccctga

SEQ ID NO: 20678 - DNA, 279 bp, Zea mays
  Peptide Sequence Number=SeqID_62457
atggccttcacaataactttggttgctataattttgcgtatcgaaaggataccaaagccccgctggctgaagttgaatttacagtggtgtcggcgtctcgagaccggggggtcccctaagccgacgagtgagtgtgccgcgtgccccagcccagatgggtcgagcgcgtgggcgagcgcgaaggggggaagcgaggcggccggagacgagcgtgagagaggtggaaatcccgcggccttcgtgttcgtcccgcgcccaggtcgggtgcgcttgcagtag

SEQ ID NO: 20679 - DNA, 468 bp, Zea mays
  Peptide Sequence Number=SeqID_62458
atgaatgaattcgctgtaacagaaatggttgggtcattgggtgcgatgtcatctgaagataaagaaaacagcgtcgcctgccccgctccgactgctgtgccacccgctagggtgaggctgacaacagctaagtctagcctcaggcgcaacaggaagctccgcctcgcccgaccttgggcctcggcctcagaaggaggtctccgcctcgcccgacctcagggctcggcccccgcctcggcctcggaaggtggtctccgcctcgcccgaccccagggctcggcctcaacctcggcctcggaggatggtctccgcctcgcccgaccccagggctcggcctcaacctcgacctcagaaggaatcgcgtcctcaccccacctcagcctcggcctcaggaggagtctccgcctcgcccgaccttgggctcggaccgaccacgccacaggggggacatcattaccctacccctag

SEQ ID NO: 20680 - DNA, 324 bp, Zea mays
  Peptide Sequence Number=SeqID_62459
atgtccttccctggatgcacagaagctactgacttcgtggttacaatcgccctttgctttacctcctcccatgatggaaaggttgaggtgagaatggaactattgatggccaaggcattgtgtggtgggatatgtggaagaaaggtttgtgatggaggctcatctgatcttgtctatgagtatgttctcgtagaagaaaagtacacatttgtggggaatgtgaaaaatccttgctcttgtactatactgattaaaggattcaaggatgatgttctgttaagaacacagttgaggatgaagcagttgtgttgttatcatccgtaa

SEQ ID NO: 20681 - DNA, 2215 bp, Zea mays
  Peptide Sequence Number=SeqID_62460
atgctcgtcgactttctccgcgcgaatgccgacgtcttcgcgtggactccctcagacatgcccggcataccgagggatgtcgccgagcactcgctggacatccgagccggagcccgacccgtcaagcaacctctgcgccgattcgacgaagagaagcgcagagccataggcgaggagatccacaagctaatggcggcagggttcatcaaaaaggtattccatcccgaatggcttgccaaccctgtgcttgtgagaaagaaaggagggaaatggcggatgtgtgtagactacactggtctaaacaaagcatgtccgaaggttccctaccctctgcctcgcatcgatcaaatcgtggattccactgctgggtgcgaaaccctgtccttcctcgatgcctactccgggtatcaccaaatcaggatgaaggagtccgaccagctcgtgacttctttcatcacgcccttcggcatgtactgctatgtcaccatgccgttcggcttgaggaatgcgggcgcgacgtaccagcggtgcatgaaccatgtgttcggccaacacattggccggacggtcgaggcctacgtcgatgacatcatagtcaagacgaggaaagcctccgacctcctttccgaccttgaagtgacattccgatgtctcaaggcgaaaggcgtgaagctcaatcccgaaaagtgtgtcttcggggtgccccgaggcatgctcttggggttcatcgtctccgagcggggcatcgaagccaacccggagaagatcgcagccatcactggcatggggcccatcaaggacttaaaaggcgtacagagagtcatgggatgtcttgcggctctgagccgcttcatctcacgcctcggcgaaagaggcctgcctctgtaccgcctcttaaggaaggccgagtgcttcacttggacccccgaggccgaggaagccctcgggaacctgaaggcgctcctcacgaatgcgcccatcttggtgccccccgctgccggagaaaccctcttgatctacgtcgccgcgaccactcaggtggttagcgccacgattgtggttgagagacgagaagaggggcatacattgcccgtccagaggccagtctacttcgtcagtgaggtactgtccgagaccaaaatccgctacccacaagttcagaagctgctatacgcggtgatcctaacacggcgaaagctgcgacactacttcgagtctcatccggtaactgtggtgtcatccttccccctaggggagatcatccagtgccgagaggcctcgggtagaatcgcaaagtgggcgatggaaatcatgggcgaaacaatctcgttcgcccctcggaaggccatcaagtcccaggtcttggcggacttcgtggctgaatgggtcgacacccagctcccaacagctccgatccaactggagctctggaccatgttcttcgacgggtcgctgatgaagacaggagctggcgcaggcctactcttcatctcgcccctcgggaagcacctacgctacgtgctacgcctccatttcccggcgtccaacaatgtggctgagtacgaggctctggtcaatgggttgcggatcgccatcgagctaggggtccgacgcctcgacgctcgcggtgactcgcagctcgtcatcgaccaagtcatgaagaactcccactgccgcgacccgaagatggaggcctactgcgatgaggttcggcgcctggaagacaagttctacaggctcgagctcaaccacatcgcccggcgctacaacgagactgcggacgagctggctaaaatagcctcggggcgaacaacggttcccccggacgtcttctcccgagacctacatcaaccctccatcaagatcgacgacacgcccgagcccgaggcaccctcggcccagcccgaggcaccctcggctcggcccaaggcaccctcagctcggcccgaggcaccctcggttcagcccgaggcaccctcggcccccgagggtgaggcactgcgcgtcgaggaggagcgaagcggggtcacgcctaatcaaaactggcagacctcatacctacaatatctccaccgaggagagctactcctcgaccgagccgaagctcggcggttggcgcggcgcgccaagtcatttgtcttgctgggagatgggaaggagctctaccaccgcagcccctccggcatcctccagcgatgcatccccatcgccgaag

SEQ ID NO: 20682 - DNA, 234 bp, Zea mays
  Peptide Sequence Number=SeqID_62461
atggcggaactggacaaggtgttctcaccggcaattgacagggcgaagaggtcggctcgggcgcaaggaatgcggtcgtgcaggcgacattgccgccagggaaatcggcgaggtcgttgtggagagaagatctacagtgctcttccccccggtagctcacacgacagaagcgaacatcagcgtagcgcgtgtgagggagcttgggccgtgcggtgtcagtggcgtgtggcctga

SEQ ID NO: 20683 - DNA, 1092 bp, Zea mays
  Peptide Sequence Number=SeqID_62462
atggcgaaggagggggaagggcatcaggaaggagcagggcggaggcttcttcacctgtgggatcgatgccgatgtgtactcattgggtggataaaaacaagctccgtagaatcagaaaatgtaagcaaggccctttatgaaactattggcaaactgtcaatccacaaggaggaggcaaggcttattgggcagctgtgcagtggcatgctggccaatctgatcggttgttgccgcgagagaggtggtccgaactgctctcttcgctccgtctcgagtttctcgccgacgtcgacgacgacaacgccgactcgtccgcatgcttcgttggccttgtctcgtattgttgttgctgaaaatttacctgaggatcaaaagcatcaaactctgatgaagattttctcagctgttgggaatgtgaaatctatacgtacctgttatccacaagatatttctctagcagcagctaacaaaacatcaaggattgagatgatttttgctaataagcttcattcttttgtggagtattcaactgttggagatgctgaaaaagcagttgctgaattcggtggtgggggaaactggagagaggggattagagttcgttcactgcttggatgtctgaaacatgggttaggtcaaggaagaaaaggtggggatgaggagtatgctgcagatgaagatggccctgacacaactgatcatccacgagactttggaacagatgttactgcccaaatctcagaagcacatttcgatcaccaggctgaagatggcacccatgacaagggtggaatgaggcagcaggggagagggaggggccgtggagggagaggcagaggccgtggtcagcattatggccacaacagccgagatggccaccatccgattggcactcccccgtcggagcatccagctgtgctgaagccgcccctgggcccccgcataacggatggcacaaaagggtttgttttcaagattttggtgctgaatatttttttggtgaatggttcaagtgttactgttgcgggagtcttcaacaggtcactcgccacatgcgccttccagcagtgctcttgtgtctactggttataa

SEQ ID NO: 20684 - DNA, 291 bp, Zea mays
  Peptide Sequence Number=SeqID_62463
atgaccgcgtgggccgaattcccctcagtcggcccaccagacatgtccttccgcgcagcccaagatggccatgacgccgacatccaggtcccgccgatcagccgtaacccccgcgtttcactgtctggtgggaccgccaactctacgggctcgcctaggccgctgaggtctggggcccgcatgtcagggtgggtcgtcgtcaacaactcgcccgagcttcgtgcgggtgatggccagtggaccagcgcaaaatccgcgtgtgccgtgacgattcttcccctgagcctatag

SEQ ID NO: 20685 - DNA, 414 bp, Zea mays
  Peptide Sequence Number=SeqID_62464
atggccggagggaaaaaaggcaagaaagggcgccgccccgctgatgggaagcgcaagcgcccctcgagtcctccctcggaggacttcggggactcggagtactcgggggaagtctcctccaagtatgatcgttcacccattctagcgtcccctgtggcgtcgtccgaagattcgaacgactccatgaggttgtccgtctcggagcgggcgtacgcccgatccatcgagcgcgtggggctcggtgggtcggacgactcggaggaggcctcctcggaggaggtggaggattcctcagactccaaggaggggagcggttgcgagggcgacggcgaccgcgacgagggcgacggcggtagcagcggtggcggcgacaacagcgacgacggtgacggcggtggcgacgacgacgactag

SEQ ID NO: 20686 - DNA, 1224 bp, Zea mays
  Peptide Sequence Number=SeqID_62465
atgcaggcggcatgcaaccgcaccaagggggcgcaccctttcgacttcgacgcgtccagcatggaggcccaggcccacacgtcatggaccgagaaaggggataccccgaaagggatccttctccgcgaaggaagcgggccccgagcccccctactgatcagaggttcgaaggctggcccctcggaagggttcaacagctgcctcagagcactcgggctctgcgcccactactggctggccctcgaagggttcgacggccgcctcagacgcagagcgagggatgaccctgggtacgttcgatacataaccaaggctcgggctacgctcccgaggctcaggggctgctctcgcaaacccggctccggccaaaccgttgacagcgtcaacataacagcccgagaacttgggactcgactgggctacacccggcggcggccaagtccggcctcgggcgccataggaagctccacctcgctcgaccctagggctcggactcgggctcggccccagaagacgacgaactccgcctcgctcgaccctagggctcggactcgagctcggccccgaaagacgacgaactccgcctcgcccgaccccagggctcggactcgggctcggccccggaagacgacgaactccgcctcgcccgaccctagggctcggactcgggctcggccccggaagacgacgaactccgcctcgcccgaccccagggctcggactcagcctcggccccggaagacgacggactccgcctcgcccgaccccagggctcggactcgacctcgacctcggaggacagactcgacccgacctcggaggagccatcgtctcgcccgacccagggctcggaccaaccacgtcacagggggagccatcattaccctacccctagctagctcaggctgcggggaacaagaccggcgtcccatctggctcgccccaggcactcgtacgaggaggttggccgcgcgggggaacgggacgacgcgcataagcctctcgctctctcccacgtggacgcttgtaaccccctactgcaagcacacccgacctgggcgcgggacaaacacgaaggccgcgggtttcccctttacgcctgtctccctctggtttccccccttcgcgctccgtctcgcgccgacccatctgggctggggcacgcggcgacaatttactcgtcggtccagggaccccccggggtcgaaacgccgacaatcctaa

SEQ ID NO: 20687 - DNA, 462 bp, Zea mays
  Peptide Sequence Number=SeqID_62466
atgggcaagaacaacatgcgcaagcgtgagccaactcctccatcggaggattttggtgactcggagtactcagaggaggagttctcctctgagtctgaggggtctccggctcccatccccctgcgtgagtcgtctgacgactcagacgactcccaggggctcgcggcggaggtctggacatacatccgggccgtcgagcgctccgggctcgagggctcggatgagtcggagtactcctcggatgaggaggactcggacggtggcggcgaggacgagggcgacgacgacgacgacgacgaaggcggtggcggcggtgacggtgacagcagcggcaggggcggcagcagcggcagcaaggacggtgacgacggcggcagtaggggcggcagcggaggtggcggcagcagcaggggcagcaacaggggcggcagcggcggcggcagcaacagggccagtggctag

SEQ ID NO: 20688 - DNA, 201 bp, Zea mays
  Peptide Sequence Number=SeqID_62467
atgaagatgggtaggaaggtgaaggaaattcttctagaagagcaagtgaacatgggaggaggaatcaaggtgctgaacgtggagaagaaacttgcaatggcatctcttgagtttgaaggatatgctttgatttggtgggagcaacttcttcatgatcgtgaagaagatggagaggatctattgctacttggcaagagatga

SEQ ID NO: 20689 - DNA, 1590 bp, Zea mays
  Peptide Sequence Number=SeqID_62468
atggctaccaaaagggatgaaccatctctgatacagcagaggatggcttccaaaagggaagatcgagagccatctcaaggacatcagggagatgttgcagcagctgctgctccaggctcactggagtatcagaactctcggtccggaaatacggttttaaagagtgggccactttttttatcatccaaaggaattgggtggacgtcatggaagaaaagatggtttattttgacacatacttcgttggttttctttagaagcgaccctaatgccgtttctcagaaggggaatgaagtgaacttaactcttggcggtattgatctcaacaattcaggcagtgtgattgtcaaagctgataaaaaacttataacagtacagtttcaagatggccgcgatggacgaaccttcacactcaaggctgaaacattggacgatttgtttgagtggaaagctgcacttgagaatgctttgtctcaagcaccaagttctgctaatgcgatgggacaaaatggcatttttaggaatgatcaatcagaggaagttgatgcttctagggaaccagcaaatgataaaccgcctgtgagatctacagtcataggcagaccagttttacttgccctggaagacgttgacggagctccaacatttttggagaaggcccttaaatttattgaagagcatggtgtcagagtagaagggatcttacgacaagctgcagatgttgaagatgttaagcgtcgaattcaggaatatgaacagggaaaaactgagttttcttccgaggaggatgcacatgtcattggtgattgtgtcaagtatatcctcagagagttgccatcatctcctgttcctgcatcatgctgcaatgcgctactagaagcatgccgaactcaacgtggttctagagtcaatgctatgcgtttggcagtattggacacgtttcctgaaccaaaccgtcgcttgctacagagaattctaatgatgatgcaagttgtagcttctcacaaaaatgaaaacctaatgagcacttcagccgtggcggcatgcatggcacccttacttcttcgaccccttctagctggtgattgtgagattgaaaccgattttgatgtgggtggtgatggttctatgcaattgctacaagccgctgctgcagctaatcatgctcaagccattgttataacactattggaagagtatgatcaaatatttggggaaggttctatttcctctgatttatactctgattcagaagagagtggcagtgaaagtgaggaggcagctgaagatgatagtgagtcctatgacgaagatgaatcttatgaagacgatgaatgcgatgatgaaacagaaggctctgatgtatccaatgatgatgatgatgatgatgatgatgatgatgatgatgaggatggtgacgatgatgatgatgatgacggtgatgaaccaagtgaaacaggcagtgaaagtggtcactctgttaccagtgatgtggatgttgataagaaaagaacagagcatcaaattgcagctgtaaattgctacagaaatcaaaagatgaaggtggagaagactaacttcagaaaatga

SEQ ID NO: 20690 - DNA, 507 bp, Zea mays
  Peptide Sequence Number=SeqID_62469
atggagcttgacacaattacatctctaacagctcagggtgccaagtggatgatatctaggaatgattgttacaccgttaacagcgtcgctctgaagctccactgtaaggagttgtcactgaaacccaaggaggatgatgaagagggtgacgaacctactgcggagaagcagaccattgcatatggaggagaagcagagaaaaccaaatctgtccatgttgaatctgagaagaaagatgatgatgtaactcaagccccagcacctgctaccactaccaccacactaagagcgacaacacctattactgcacaagaacgtgcagttcatcaactaatcaatgaactcacaaaatcagactctgattctgaagatcagttgcctcttagtcagaaaaaaaggaaacatttcaagacaactgctggagaagcagtcccagctgagaatggtgaatccgagctgcagcagcgttacaaatgtgccgccaagaagtctaccgaaccaacttaa

SEQ ID NO: 20691 - DNA, 201 bp, Zea mays
  Peptide Sequence Number=SeqID_62470
atgccaccagatggtagtgaaaggcctgttacaattagtcaaggaggaagggctcgaaaagcattcttccaagctatgaatgaatggtttgccgagttcattcagaaagctaaattttggctcaataatactatcagagtttttgatgaattatcctgtacacctgaagaatgcatgaaaggtgttggcaacccaaagtag

SEQ ID NO: 20692 - DNA, 306 bp, Zea mays
  Peptide Sequence Number=SeqID_62471
atgactaaggaaggtaagaggggcagcaaagaccttgtgagaaggacagatgctccaccaaataggaaccacaagcctcaacataatccgagatatgtcccaagcgacaacgtaatttctcttgctcggcttccaaagctgtcaggagaaacaacaaggatgagcgggggtcaaggcagctatctgccagtcagactggcaattaggtcaccaggggtgtcaaggggcggttcaaccggtcctgacctgtctgacccgcctgcaggtcattctgccagtcagtctggcagtcagactggcagatag

SEQ ID NO: 20693 - DNA, 279 bp, Zea mays
  Peptide Sequence Number=SeqID_62472
atggttggtggaagacctccaaagggacctaggcgcagctatgtggccttggaggcggctaacactgaagtccagcgccttttggcgtacctggtggctcttaacgactcaggggcgggtcacaagctacacttcagtggtaacctccgcagtgccatcggcttgcctaagggttcgatggtggcagatcaagacctatttacgagtaattttgatgccaccatgaacgttgtactcggggtagtgttcgaggaggaaataatccacaaccttatgtag

SEQ ID NO: 20694 - DNA, 321 bp, Zea mays
  Peptide Sequence Number=SeqID_62473
atggcaaccatagtgaagggggtgatgtcggagaagggagatctacagaagtggaagctggagattcaagtggagaagtttgagaagaagcatgtgatggggcagacgggtttggtgaaaccaatggtggaggcaaactggagtcgcctctcccacaacccccgatcatggagttcgcaggtggttcgaaccagcttcggcatcctaatttgccccgatgaccgagcatggagggagggcataacttcgcatctcacgcaaggagggtggtcacaagggtctggatctttggttcccaacatgggttttctggttttttaa

SEQ ID NO: 20695 - DNA, 399 bp, Zea mays
  Peptide Sequence Number=SeqID_62474
atggagggccaggcccacacgtcatataaccggcgcgccggttactacgtgcaagaaactgcatcgccactcgcgctagtaccacgccttctcgactgcggaaccagtaccacgactcgaggcgaccctgcacatgacccaacaatgccaaccgagcacatcggtcacgggccggggtcggaaaatgggatactccgaaagggatccttctccgcgaaggaagcgggcccgagcccccctactgatcagaggttcaaaggctggcccctcgaaagggttcaacagccgcctcagagcactcgggctccgcgcccactactggtcagaggttcgaaggccggccccttgaaagggttcaacggccgcctcaggccactcgggctccacgcccactactga

SEQ ID NO: 20696 - DNA, 418 bp, Zea mays
  Peptide Sequence Number=SeqID_62475
atggacgactccgatttaataaaatctgaactacgcgcagccccgcgatttccgatcaatggtgcagatccgcctagcactcaacgttatgatgatctgatctcgtccgcatattgccgatccgacggcccaacggtcatctccctgacatcgatacccatcacggcggcggcccctgttcgcgcggcggagcgtcaccggagcgaagggctcatgggcgagacacgtatttatccctccctcggaccagcggagtcggagacatgggcaagctggcgccggaaagaacgggaggagcccgcacgatgcgtctggggtgacgccagccggtttcccaacagcacacgcgctactatggctgacctctgggccatggctgtcggcgccggttttactcggagttgggctgcgcggcggg

SEQ ID NO: 20697 - DNA, 129 bp, Zea mays
  Peptide Sequence Number=SeqID_62476
atggagcttgtggctgatgggttgggtcttggaaacaccggtgtgtgtggggagcttccattggccctactcgccccggctggccacctcatgcatgatgaggttgctgaaggatggatcaatgaatag

SEQ ID NO: 20698 - DNA, 462 bp, Zea mays
  Peptide Sequence Number=SeqID_62477
atggggaattatgagataacagggactgaacaaaggggaggggaatggagcagtagtgctgtttcagtcaacttcagagtttggtttgagaaactgaacaagatcctctctctgctgtactccacccatgtgctcgagttgggatacatccctgaagatctggggtctctctatactgcaaaaatatcaaggcttggactggcttgggagttttgggcagtgaactgggtctgccccaaagccttgcacgccagctctcgagttggtgactacacccaccgagacccctacctcgccgtggccagaacgttccagagaattgcacgcccgtatagttctcgtcccgtgatcttcagagagtgtgttgatgccgtggccgttgactatgtcgggccgccgtggacgatccggcgtgggctcaccggagctctccgcggcggagtcgtggctgaggttatgtga

SEQ ID NO: 20699 - DNA, 231 bp, Zea mays
  Peptide Sequence Number=SeqID_62478
atggctgaggtgaaggtcatgcgggctcatgctgatggactgagagcggtgaaggacgagtgctcgatcttggctggcggactggagcagccgggacgtggtggagtggatcatgttgccgacgttgtcgaggactggtgggacacacatctagttgtggaggacttgcatgcggtgcggtactcacgactggtttggtggcttgggcctcaaaaccacctagcgctatag

SEQ ID NO: 20700 - DNA, 354 bp, Zea mays
  Peptide Sequence Number=SeqID_62479
atggatgcactccttgctgatggtcagccgccctttgaagacatcataaggcatgatgaagacgaggtgttgcgatggctcgccgaacgacgcgacaaggaggatgaagagaaccactcgcgccttcacatcggctacaaatgggtcatacttggcccagccatcatatggtatgccgatgcacgcgtttgtgtcatcatcacagcctctgctgccaggcacacgaccgactctagatacagtcagttagtcagcgagtcatctcggacagtccagttacatcgtggaccgtccaacgtatttctaaaagtgaaatgtgcccttgggctattcctatattatttttgtgattaa

SEQ ID NO: 20701 - DNA, 600 bp, Zea mays
  Peptide Sequence Number=SeqID_62480
atgcaacatgccgaagcgaacagggttaagtcggcggccgagtacaagagccgaaaccttctcgataaggtgacggtgcttgagaaggagaaaaaagatatcgattgtcgactcaacgacgagaaagaagccaccgctgaggcaaagatagaggaagagagcacccgcgtggaggcccaagctggtcgcaagcgtgcatgcctaccacgagaagacggagtcggccacccgtgccggtggtggatcgggtgcacacactatttgtggatgcgtaccgtgaccacggttacggtgtctgggcctgcgcaagcaaattttggtgataatgggaatggtgaattgttaatgtgtcaaagtttgatagttcttagtagtgatgaatctgatgttgagtcatggtcttcggaaggtgaggggttgatgagcccatttgctaggatggagaatgagtctttggaggatgacctggattattttatggcgctagatttggctgttgtggagtcttcgcctagagttgcccccactgtgacagagtcttcgtctagggttgccccggctaagttgtgggacaagggaaggattggaatgtcgaaataa

SEQ ID NO: 20702 - DNA, 204 bp, Zea mays
  Peptide Sequence Number=SeqID_62481
atgtccgaagaagccaatctttctgccgaagatatccccggagcacttgaatgtattgaaaagcaagttgacatcttcgatgatgtcataactggccacagtgacttctgtgcgttagtggcttctcgagtacctgcctttgtcattcttcaggatgacgatgccaaaagctattgggctgaagctgtatctgaagcattatag

SEQ ID NO: 20703 - DNA, 456 bp, Zea mays
  Peptide Sequence Number=SeqID_62482
atgaggggaaggtactttcgtgacatttctattgtgcaggctggaggggagagtaatgtccctctgcctgtaacacctcgggctttaagggacaaagtcaggacagctacggctgggaaggtcccaagatattcgcgcgtagtggcggcgcatgagccaactgggtccgagctccgcaaataccgcggcggtagttacaacggccgtccgccaagcgcgtcgagaggaggagagcggcgccccagacctcaggcccactcgccagagtgtgcggttacctggtcccacccggcagtgcccagagcccgcgcgcgaaggctgggtctaccgacgaatgagcccacagcttcggtcgtagcggttgaagccgacggcctggtcttcggcatgacgaaggcaaacctggcgcgaggggcccacgcgccagatagtggtagaatctgtgcatgcgtgtga

SEQ ID NO: 20704 - DNA, 321 bp, Zea mays
  Peptide Sequence Number=SeqID_62483
atggaggagcaggggcgtcgtgccatggctgagggcgcgtggagcacagggagctcaacactgcgctcatggcaaccgcggccaccaagactggccatgggagagaggggagctcgcagggttgagctgctgggagatgtggcgtgcacgaggagcaggaaggaggatggcgccatggaggctctgctcttgcgcgctggggagaaggggaggaggggagggcgccatggctgctggccttgctccctgctatccgccgtggggaagaagggacagggaaaaagaaagtggcagctagggaaaagtgagaggtgggagtga

SEQ ID NO: 20705 - DNA, 384 bp, Zea mays
  Peptide Sequence Number=SeqID_62484
atgaggtggagcttgctgctggggagagggagctcggctgcagggagaggctggcgggcatggaagatgaagggggtgcctgctcctgcacaaggctgggcgccgagtctttgttggaagcagccaggcaggggagcttgctgccgggaagggggtgacgagaggagccacagctcggccagggagggagcttggcttgctgttgtcgtgagggagagtggaggacggcgtggagaggaagggagtagggcaggtgggctgccatttaaagaggcgtcgccggcagctattgggcgagatgggcgtcctgcagagctctggtcagtcagtctgttggcagagttgatacagagttgtttgagcaagatgacaaggttttattga

SEQ ID NO: 20706 - DNA, 330 bp, Zea mays
  Peptide Sequence Number=SeqID_62485
atgtcctatagcgtacctgcaaaaataatgccacaaagtaaggttgagtatgctaatattcagctagacttacccggttacaaggggtcaagcagtctcattagctgcgagaagcagacgattcgaatcaggggcactccgtccccacacatatcaaccgtccccatcgattcctcgttcgcagccagggctcaccgccttggcatacaatgctccattgaccccggctgccgccgtgcagtgaccgcacttgtacccaccatagctagcatgggagacacagtgtcaggacaagtgaggggaaagtccgcgcccgacttcactcagtga

SEQ ID NO: 20707 - DNA, 396 bp, Zea mays
  Peptide Sequence Number=SeqID_62486
atggctgccggcgacgcctctttaaatggcagcccacctgccctgctcccttcctctccacgccgtcctccactctccctcacgacaacagcaagccaagctccctccctggccgagctgtggctcctctcgtcacccccttcccggcagcaagctcccctgcctggctgcttccaacagagactcgacgcccagccttgtgcaggagcaggcgcccccttcatctcccatgcccgccagcctctccctgcagccgagctccctctccccagcagcaagctccacctcatcgtcgtcaatctccattgcccggcaacgccgtcacgttgttcggtcctccctgctgctctacgtaaggtagaagaagagccatttgactatgacaggtatgattaa

SEQ ID NO: 20708 - DNA, 459 bp, Zea mays
  Peptide Sequence Number=SeqID_62487
atggccaccggcgacaacgacaagcccccgtcgcttgacgcagacgtcgacatggccgacctagcttccctcgacgccacggccgctacatccgccgccgcgggcggcgcgccttccacccgcttccgtcccaaggccaaggggaagcccaggccgaaggctgagcctcccagacccgtaccagttgccgtacccaagccggagccggagccagagccagaggcggttccgatgccggagcccgatgccaaccccgcgccgccaccggaggacacgatggaggtcgacggggcggtggacgctcctggacatggggagggggcggtggaggaggacttcgtgttgcgcgagatcgatgtgtacttcaaccccaagcccttcgaagacgacacccagtggccgatcaggacggctgacatgttcattgagtacccttcagattggagcgtgtcagactaa

SEQ ID NO: 20709 - DNA, 261 bp, Zea mays
  Peptide Sequence Number=SeqID_62488
atgaagaaatcatctactaaattgtctaagtctatcatggagccaaagatgccagatctgccgaaggtacaagaacaatcaaagaaaacacctatcccggcgagaactcctaaaaagggaaaaagaatggcaaatgtgctagacgttgttctgaggtctttgaaggcagcaacacctgccctaccgaaggtttccaaggacaacactgatgaagcaatgattggtatcttagatactttcttccgacttgggcaaggctag

SEQ ID NO: 20710 - DNA, 546 bp, Zea mays
  Peptide Sequence Number=SeqID_62489
atggagctggttgtgagctccgcgtacggctccggccatcactcctctggttgtgtctctccagcatcacgactccatcccttcatgctcgtatctggagctcgctcggcctacagctcgcttgtaccccggccgccgtgttgttcctgttcgtcttcagcgccggtcgagcatcgccgcttgggaatggcgcacggccatcccgtctcgacctcctccagctcctccatcccttgttccttggcgctcgccaagggcctctccttcatcttttgtcgcgtctcaactcccatggccgcctctacgcacgagctcgccggacgccgcagcatatgctccctgctcggcctccccggcgtgctgctccctcgccttggcgcccctgcgagctccttctccctcgcccgcacgccatatcgccaattttcctcgtcatttctcggctacaacctcgtcagcttctgcgagtcgtgcgcgtcttgtgttcgggtcgagcccaaggattttaaggaaaaagaagctctagtgcttcggccggtgaaatga

SEQ ID NO: 20711 - DNA, 504 bp, Zea mays
  Peptide Sequence Number=SeqID_62490
atggaaaatagcacccgaacctcgggccaagtaaggtctggtatcaccacgtatcctggtcagggaggccgaagcctggaccccctcaggtgcgctccggggccatggtcagagaaggcttgggaatgccatttcatcgcttatcctctgtcctgcctcttatccaggcaggggtctggtgccgacgcgtggccagacgcccccaaatgtgcaagccctggccttatcgtgcctgattccccctccccgtggccgagtttcctcgccagagttacccgacccgcccacagcacctgcctccgcagttctcccgcctctggtcccattctcgcgccggagtcctaccaacgagttcgctggaccttcttcaccagttccagccctcaccgacgaccccagaccccctcagaggtcgtctgccccgtctcagacaatgagaagttcgtggttcctgagtgtgttcccggagacttccttgagcagcaacctggtgaaggcaagtga

SEQ ID NO: 20712 - DNA, 1014 bp, Zea mays
  Peptide Sequence Number=SeqID_62491
atgggcaacaccttcggcttccgtggtggcctccgcgccgacgtcgccgatctgatgcaggatgctggcgaacacctgaggagcagtggggtgttcgtcaagagagcggtggcttctcagtaccaaagcaaccgcaccgggaacgacgaaatcgacgagtcgtccgccgaggagctgcgcgacgcggcgagctacgtgcagcacaacgcgatgctgatccaggtgccggtggtagggacagcgaggacgttctggcggctatcggacgaagccacgaggatgatcaggaagctcgcgttgatcctgaggaaccaccactccgtctgcaagtgcctcgccgctcctctgcaggcgtccaacgtctgggtcgggagcgctgggaacgccaagctaaggggggcgaggttcaccgacaaaggcttcagcgtcgagcgcgtgagggaggactacaggaacctgtccagggtgctccagcagctgatcagtatctctggtggggataccagcaaactgcctccggattacatagattttctctcgctcttgacggaggacaaccttacaaacaaggatgagttcttggttgtaaaccatgctgctctgctgcctctgaaaaaccggctcatttgggttagttgtggtcacagcaccgaggccttcctgatgctatacgacaggatcgtcaagtacctcggcaaaagaaaccgagcgaagatgaacaggatactctcctgcctcccctaccaggacgactggctggacaccgcgacggcgaatgccaagatcaaccagtggattgtgaatgtccagaatacaaaggagtacaggaagactacactcgatctcctgcggctcaacagaaacgtgagaagccacttgcacgagtacggccacgacgacgacgtcgaggagatcctgtactgtgagtggcccatgctgctcgtcgtcatggagaagatgttgcaccgggaaggcgagctccaagacacggacatcgagaacaagttcggctag

SEQ ID NO: 20713 - DNA, 105 bp, Zea mays
  Peptide Sequence Number=SeqID_62492
atggacgagtctgaaaaaggagatcggcctcctgggactagtaattgtatcacatttgagtcccagaggattggggacgcttcagtcaccaatttaggcatgtaa

SEQ ID NO: 20714 - DNA, 903 bp, Zea mays
  Peptide Sequence Number=SeqID_62493
atggacgccggcaaggtggccgagctgcgcagggtcgacctccgcggcctccgacccggcgggcctggctgggtgcaagcctgcgcggcggtggctgcgtcgatggaggagctcggctgcgtcgtggtcgcccacggcgcgctggacggcgagctccggcgggacctgttcggccgcgcgatgccggagctcttcgcgctccctctgccggcgaagcaggggacgctgtctggccatatcggcggctacatcgggcccgacccggagaaggcccctggcctcgagagcctgcgcatctccgaagccacggacgccggcaaagtccacgccttcgctgatctcgtttggcccgacgatgggaacgccgctttctgtcagacgataggagcgtttgccaagggcatgctggagctggaccacgcggtgcagaagatggtgctggagagcctgggcgtccggaaggagcgcgtcgactcgcacctcgcgtcgctcgtctacgacgtccggctgtcccgctacggggccctggcgcctgtgaccgccggcgacgacgacgaagcgacgacgtacatggtcgcgcacagggactgcagcatggtgaccaccatcacgcagcacgaggtggagggtctgcaggtggtgacgaacgggagggtgcctgcctgcgtccaccgcgtgaggacgccgagcaaccgcgagaggctgtcggtgctgttcgggtcgtcgctgaagcacggcgccgtggtgggcgcgctggaggagctcgtggaccacggccgccaccccttgcgtttcaggccctgcgacttcgacgaatacgtcaagttccgcttcgggcagcagaggcccggattgaacagtgcgctccaggagttctgcggaattggcaccggcaccaagtga

SEQ ID NO: 20715 - DNA, 447 bp, Zea mays
  Peptide Sequence Number=SeqID_62494
atgagcgacggcaatggcccaccagagcaccacgccgcgaagcccgacgaccacatcgaattactcggtgtaaaaagtaattggaatatgggcgatgcagagaaggtgattaggaaagcatgggtatatatgggtatcgccactttattatgcaggataaaagatatctttaaagcatttataggtttgggtctcctattcctaaaggtcactttcggcacaggacttcaaggtgtgaaatccacttttgtatttagaaggaaaagaggttgtgcatctttacccacaagtcatgttacccatctgccaagggatcgcgacttcccatacacctctaccgaggaggcgaggcaagggacccctcgcatgaccgccatcgcagcaaaatcatcccaaggacctccctacactgaccactcccctactgcccttgcccctttcgggtaa

SEQ ID NO: 20716 - DNA, 630 bp, Zea mays
  Peptide Sequence Number=SeqID_62495
atggactgggtggggctgcacccggacgtggccttggagtacgcgctgctcttcgcgcgcaaccagctcggcgccgccgacgtgcgccacctggaccacgagttcctcctcagcatgggcgtcgccgtcgccaagcaccgcctcgagatcctcaagctcgccaggaaggagtcgtcgtcgtcccaccgcaaggccgccgccatcgccgtcgtcctgccgtggcgcgccaccaggctgctcgccgcggcggtgcaccggtccgcgcgctcggcgctcggtcgcctccgcgcctgccgggaccggaaccgggagcggggcagggacagggacagggcggcggccgtcctcgccacgcagcgcgtgcctttgctgcggcaccgcggcgggagggtcgcgctcgcgcatcgccacagcagctgctggagcaaggccgcgccgcccgtggctaccatccgtactggcgggaagctgctggtcaagacgctgcccgcgcccgctgcctccatagccgcatgccgcctcgtgagcacggacgtctgcagctgcgacgaagacgaggaggtggcggtgatggacggcggcgaggcgatgcggtgggagtccatgttccaggacctgaggccaacttag

SEQ ID NO: 20717 - DNA, 1830 bp, Zea mays
  Peptide Sequence Number=SeqID_62496
atggacaggacaggagccagcgagcacggaatggtggtcgcagccgcagagtcgcatcgcacggtggagtggagcatttactatttagccgaggtgtgggtgggggcgttggcggcaaccggcaacaccgtcctcccctccccctcctcctcccgcgtgctctcctctcctatcctctctgcccccgggacgcagctaggccggcttctgggcggcctatggttcctggccgcgttgctaggacgaccgggcgccacggcggcggccgccgggcagccggcggcaccagcggtggccgccgtcgacgggcggcgcgccgtcgcggcgaccggggaggacttcgtgtgcgcgacgttggactggtggccgccggacaagtgcgactacggcacctgcgcctggggccgcgccggcctgctcaacctggatctctccaacaaggtcctgctcaatgccgtcagagccttctcgccgccgctgctgctccgcctgggagggtcgctgcaggacaaggtgatgtacgggtacggcgccgggcggccgtgcgcgccgttcgtcaggaacgcgtcggagatgcacggcttctcgcagggctgcctgcccctgcgcaggtgggacgacctcaacgccttcttccggagatccggtgccaaggtcgtgttcgggctcaacgcgctcaacggccgcgtcccgttgccggacgggtccatgggagggccgtgggactacaccaacgcggcgtcgctgatccggtacaccgcgaacaagggctaccgaatccatggatgggagcttgggaacgaactgagcggcactggagtgggagctcgggttggcgcggaccagtacgccgcagacgtgatcgccctgaaagcgctagtcgacgacgtgtaccggagcgagccatcgaagccgctggtggttgctcccggaggattcttcgaccaagcctggtttactgagcttgtcgtcaagaccgggccggatctactgagcgtggtcacgcaccacgtctacaatctaggaccaggcacgctcgcggctactttgcgtcgttcatgcgacctccagcggctgctcaagtccacggggacgtcggctgtggcgtgggtcggggaagccggaggcgcctacaacagcggccgccacctcgtcactgacgcgttcgtgttcagcttctggtacgctgacgagctgtccgatcagcttgggatggcagcgaggttcgacaccaagagctactgcaggcagagtttggtcggcggcaactacggcctgctaaacaccacgacgttccagcctaaccctgactattacagtgctctactgtggcatcgcctcatggggaccaaagttctagcagtaacattcagcggcacgaacaagatccgcgcgtacgcgcactgcgcgagagattcaccaggaatcactctgctgctgatcaacctgagcggcaacgccaccgcgcgggtctcggtgacggcccaaggggctgccgcggcgcacgcgcacaggcacaggcacgacgcgaggaagcacggcggcggcaggaagttccggcacgtgcacgtccccggcttcgccggcggcggcgaggcggcggcgggcgccgtgagacacgagtaccacctcacccccaaggacggcgacctgacgagccaggtcgtgatgctgaacggcagggcgttggccaccgacgcggcggggaacatccccgccctggaggcggtcgaggtggacgcggcgcggcccatcgccgtcacgccctactccatcgtgttcgctcgcgttccgcatttcagtgccccggcgtgtagggtagaccggtag

SEQ ID NO: 20718 - DNA, 231 bp, Zea mays
  Peptide Sequence Number=SeqID_62497
atgatgaatatatttttcctagtatacttaagtgataaagaacataggaaaaatacagagcaccctagtcttgagctaatccaagattgcaacctcgctgacggagagtacgtgctcattcccgagcaaagagctgtccacgaggaagaccaggagccagctcctgagactgccacaaaggatctccccacagccccagcatttgaaggcaagccccggttttatgcataa

SEQ ID NO: 20719 - DNA, 114 bp, Zea mays
  Peptide Sequence Number=SeqID_62498
atggggatagggaagaaatatcccccgcaaacgtttgtgtggatcctcgagggaaaacaaattgtcacgggaagatctaagtgcatatacgatactccttcagtcccaaaataa

SEQ ID NO: 20720 - DNA, 3054 bp, Zea mays
  Peptide Sequence Number=SeqID_62499
atgaaggcgcaggacggccccggcggatcgtcggcggggaagaagagcccgtggattatgtgcacgccagcagaagtggagcaggtgaagctgctgctgtgcgtggtgcccatcttcgcgtgcaccatcatcttcaacaccatcctagcgcagctgcagaccttctccgtgcagcagggaagcgccatggacacccgcctggccgcctccttccacgtcccgccggcctcgctgcaggcgatcccctacatcatgctcgtcgcgctcgtcccggcctacgaggccgccttcgtgccggccatgcgccgcctcacgggcgtccccacggggatcacgccgctccagcgcatcggcgtcggcctcttcgccgtcaccttctccatggtcgccgccgcgctcgtcgaggcccggcgccgccacgccgctgccacggacggcggccgcctcctctccatcttgtggatcgcgccgcagttcctggtgttcgggctctcggagatgttcaccgccgtggggctcatcgagttcttctacaggcagtcgctcgccggcatgcaggccttcctgacctccatgacctactgctcctactcgttcggcttctacctcagctccgtgctcgtgtcgctcgtcaacaggctcaccagtagctccagctccacggcaggcaatggcaatggcggctggcttgccaacaacgacctcaacaaggacaggctcgacctcttctactgcctcctcgcggcactcagcatgcttaacttcttcaactacctcttctgggcacggtggtactccaagagcgtagagacgctgcaagtgcaagtcgtcggagtcggaagcggcggcgcagacacagctaggtggagcacggcagctagcaggtacggctggacccggacgcggccgtcggcgcccgcgcgccgcccggcctccacggcccgcaccgcctcctgccgcagctccggcggcagctgcaggcagacccagtccatgagcgcgtccacgtccttggcgaagtccagcagcgagcagtctgctttcgttgagctgatggcggaagatagcggaggctgggcatgctccccaaggacaaggagatcaaatcatgggaggcttcggcaggcatgcaagctgatacacggtaagtacaactctcaaactggtatttcctttgatttggcggattcatcttcgagttttggtgtcccctcgggtgagcatggagcctatggttcttccagcgaatccgcttcttcttcggatgaacctactggtgctcatactcagattgaggggggagttaattgtgataatcggatgttggaacaaacatctttggtagggggcgatactctgattccccacaatacagactccggtgttttagctgaacaaattgttcttacagcaaaacactttggatcccctgaagaagacgacaaggtgttcacgaaaattgaatcaaatcgaaatgtgaggctgcggcggggtcctaaggctcggataatggcctcagcgcacccattctggacccacaaatcagtgtcttcaggtggtaacgagataatttcgggagttaatgctggggggctgtcgtctcccgaagagtcgcgtgcgatcctcccaaggacgacttgcacttcttccagttcgtgtggctgggacagcaaggttgggagaggtcctcaagttaactcatcggactccgttttagccgacctaatcaagagggccaaggcttttggaaaaccacgctcctgcttgttccggcttcatcaaggcaaggtccctaggccggtggcggtggatttaaaaggggccatcctctcatcgcattcaccatcctatgctgagatggctgcccgtccgcctgctccagccagcaggtcgagtgaagctgctcatcgcccattcgtcccaaacagcagactcccagggatggcggtttccagacagagtgatgggtggcgtgggcgcacctccccacgtcaaggacgtggatttggagtgcagccgcagcgccatggtccggggcacggaggtcccctgggccggggcagtcttggtcgtggagcagcgggccggggtggacgatttccaccacagccgcggttccaacagtacggggaggtgcccgcggcaagccaggagacgatgcctcaggcggccactgctgatggtatgtcttggatgccaagggatgctgagcgcaggcagtcaacagcggctcccccaggtaactctgtgaaagcaaagaaactaaagtctcctctgtgcttccgttgcaagttgagtggccatttaaatgatgagtgcaaggcagatttagattgtgtggtgtgtaacaagaagaattcacatgtggtagccaagtgccccctactgaaattgcctaagcccgatgcctccttctttggctttggtaataacgagttaggcttctttcgcattccggatttcgactacaggctagaaacacctgaccctgccccgactgctctgatcaaagtgagtggggggaagctctcggctgaggcggtgcaagctgaactagctcgattcattacaaaagaatgggtttgggaggcgctaccccatagtgatgattccttcttggtggtatttccctcagttgatgaactgattaggatggctgatgtggagttcactctcaaaaatcatggagttactctcaccatctctgaatggaaggatgctagtgatgttgaacccagttatcaattggacgaggtttgggttcatgtgaggggagtacctcacgcttggaggcattatttgggtttttgggccctaggatcggtaatcggcgccactcttgatgtagacatgtacacctatagaaagatgggcgtcatcagactgcttgttggtgtgatgagcagagatccactacccctgaccaccgatattgtttttgacaagaagggatacgagatcacctattctatagaggataagaacttcattcctgcatctccggtgatttttagggaggagtctcgtaatggtggtgggggttgtttgtacaag

SEQ ID NO: 20721 - DNA, 384 bp, Zea mays
  Peptide Sequence Number=SeqID_62500
atgccatcgtcggccctcaccgatgactatacaacggagaagagagaatggggagagagaaaagaaagtctggcagccgagcttacctcgagtgaggctcaatcgggacggagctctgagcggcagtggcggaccacaatcaaggatagcatggtgagcttgccgtggggctctgagcggctctgggatgcgacgattgcgcgacgaggggaggctggcaagcgggccctgcagggcctgtggggcagagaaagagggcgcgagtgggggctgagggcgacggcaccgacaaggcgggcccaccgggcagagagttgggggagtgggtgcgcgggaggggaagatgggcctgttgggccgaaatgtaacgtctcggttatttaa

SEQ ID NO: 20722 - DNA, 705 bp, Zea mays
  Peptide Sequence Number=SeqID_62501
atgaagaaacgctgctttgcacttgggtccctggactttcttcccttcctctttcgcaagttagtcctcagggcgctattcacccgagtcgctgacatcgtgaaaacccctaggcttatgaactattcatcccgcgctccaaacctcaccggaatagtgacagtggcggaaaaaagggtggcggggcttaccactgacgatctagcttcggtgaagtggtcgcagagatcggggaggtcctggcgaacacgtcgatggtcggatgacgaccagtggtggtcggagtcaccggtctaccttccccgacggtcggagttcgacggcagaggtgctctgctagtcggcgacggtagggctcgattcctttggcggacaagcacatcaggtagtgggaatacgattccccaaaggttggttgtggaagcgggtccacgcgcaccgacgctcgggtgtggtccggcgagcggtggcgctaccttggcgaggcgtgcagacgaaatggactggccgaggaggttcactggggctagggaaactcctggtggtgatggcgtgagggttggaagatggtattggctgggccacggtggttggcccttcggctggcagggcaggtggtggcgtactccgacggtcgcaaactccggcaaggaaggcttgcaatgggcaagcagggagaggctgagggcgcactggtacttatag

SEQ ID NO: 20723 - DNA, 207 bp, Zea mays
  Peptide Sequence Number=SeqID_62502
atgaagcgtgaacgggacatgggcgatggctttgcggcgagcatctcttgtattgacccaatgtttgatcactcgcagatacctaagcagtctcctgacgaagggcaacccacaccgcgaagctatggagcacaggtacggtggttgacggtgaaggtcatgcggttccatgccaatggaccagtagcggtgaaggacgagcgctag

SEQ ID NO: 20724 - DNA, 219 bp, Zea mays
  Peptide Sequence Number=SeqID_62503
atggcggggcccgccgtcagcctctccggttccttcgcgcggctcgcgcgtgtgtcgctgcgtcgcggctcccccgggcaattggtacggggtgctcggatgaagcgggacagtagtcaccggcggatctccgccgcgtgtgggacgcgccgctgtgctctggcgaggcagggaggtggaagacggccgtggagcgtccatccggtgatctacgactga

SEQ ID NO: 20725 - DNA, 1371 bp, Zea mays
  Peptide Sequence Number=SeqID_62504
atggacgagtacatctaccagtcgctcttcctctccgtccttgctgtggcactgctgcagctggtgaagatggccctcaagccgaggccacggctgccgccagggccttggaagctgcccgtcatcggcagcatgcaccacctcgtgaacgtgctgccgcaccgggcgctgcgggacctggcggacgtccacggcccgctcatgatgctgcagctcggccagacgccgctcgtcgtcgcctcttccaaggagacggcgcgcgccgtgctcaggacgcacgacaccaacttcgccacacgccccaagctcctcgccggcgagatcgtcggctatgagtgggtcgacatcctcttcgccccctccggcgactactggcgcaagctccgccagctctgcgccgccgagatcctgagccccaagcgcgtgctctcgtttcgtcacatccgggaggaggaggtgatgctgcgggtggaggagatccgcgcggcgggcccggcgacgccagtgaacctgagcgtgatgttccacagcatcacaaacagcgtcgtgtcccgggccgcgttcgggaagaagcggaagaacgcggcggagttccttgcggcgaccaaggccgtcgtcggcctgtccagcggcttcaacgtcccggacttgttcccgacgtggaccaccgtcctggccaagctcaccggcatgacgcgcagcctcaaggagatccacaagacggtggacaccatcctcgaggaaattatcgtggagcgcaagcgcatccgcgacgaaaagatcaagggcggcgacgccgccgaggacgtcgacgagaacctcgtcgacgtactcatcggcctgcaggagaaaggcggcttcggcttccaacttaccaacagcatcatcaaggccatcatactgaatggacatgttcgcgggcgggacggggacgtcggggtcggccatggagtgggggatgtcggagctgatgcggaacccgccagtgatgaagaagatgcaggcgctgatcagggaggcgttccgtgggaagacggctgtgacggagggcgacctgtaggcgagcaacctccagtacccgaagctgcaaagtcacgggtcatcatcaacgcgtgggccatcggccggaaccccaagtactgggacgacgccggcgagttcaagccggagcgattcgaggacggctcccgagacttcacgggcagcagctacgagttcttgcccttcggctccggccggaggatgtgccccggcttcaactacggcctcgcgagcatggagctcgccttcgtcggcctgctgtaccacttcgactggtcgctgcccgagggcgtcaaggatgtcgacatgggggaggcgcctggactcggt

SEQ ID NO: 20726 - DNA, 381 bp, Zea mays
  Peptide Sequence Number=SeqID_62505
atggcgaacgcaggggaagagttctcaccggcagggacgaagcatagaggcccgaccgcggagagtgggtggtccgcggcggattcagtcaccgacgagaaattcaccgagccctggccgcccacggccccggaattccacacggcgacgtccgcaaaccttgacaaagctttcccgagcgcacgttttgccctaaatggacgaaatctgcagacgagcaggaaagagggtcacagcgtggtcacttttatggtcccgggagcacgcgaccagcagtctgctggagaagatgatcctgatgccctaggcccacatggcagcgaccccgcgtggagagtgcctgatgggaggcggctacggagcgatcccacgtgccagtga

SEQ ID NO: 20727 - DNA, 1152 bp, Zea mays
  Peptide Sequence Number=SeqID_62506
atgggcgagcgccactctcccattcccaacccccaggcccgccagtgccagggcaggatccttccgcaccgggagcttccgcagcaagccgcacacaagcaacagcaaatggcagcggggttccgccggcggctcacggcgctcaccgtcccgaaggcgtcgtcgctcctccgccgaacgcggcacaagaagctctcctactcccgtgtccgctgcaacagcctgccggggcgcttccacccggcggtggcgggcctgcacgagtcggcgaacgcgctcatccgctggaccgaggagccggcgcagcaggccagcccggcgtgggtcgccgacggggcggcgcacctggcccgcctcctgtcggggctgacggacctgctccaccacccgcaggcgcgggacccgctgatccgccaccaccgcggcggcaacggcaacggcaacggcaacggcaacaccaacagcaacagcaagacgccggcgtcgtgggccgagcgcctgctggacgacctcctcctcctggccgacgcgcacggcttctcggcgaggcgcacgcccgcgctgcgccgccgcgacgccgcccgcctggcggcggcgctccgcgccaggcgccgcgccgaccgtgacctctcccgcctcgcctccacgctgcgctgcctctcccaccgctgctcgtccggcgccggcgcagcggtggcgccggaccacggcgaggccgcggtggccgacgccgtcgcggccgccacgtgcgccgcggcggccgcgtccgccgccatcttcgccgggctggcctccgcctccgcgtcgtcggcgtcccgcgcgatgccgtcccctcttgcgacggtctcgcccgcgaaggtggccgccgcgcccgtgtggtgggtcgccgacctcctcaggtggcgccggcgcacggtggccgtcgtcgctggcagtggcagcggcagcgagcccgggcccggcgcgagagaggcgaatttcgaggcggagcgctgcagcgatgaggaggagggggagagacaggcggccatggaacggctgcggaggctggaggactgcgtcgtggcggcggagaacggctgcgagcgggtgtaccgggcgctcgttaacgcgagggtgtcgctgctcaacgtgctcacgccgtgcttttga

SEQ ID NO: 20728 - DNA, 1050 bp, Zea mays
  Peptide Sequence Number=SeqID_62507
atggaggccgtcctacggcatccatcgctctcgcgcaccaggcctccgaacctgaaccctcccacaacgccatctccatctcttcatgcaccatctcttctccgcctccgcgcgcgccggctcatcgccgccgcggtgttccaggaccagaagccgaaggagccagcaagcaagggaggtgatgacgaggaggaggcgtacggcgaggtggaccgcatcgtctccagccgcacagtcagcagcccggtgttcgcggaggacggctcggccaccgccgccgtcgccacggagttcctggtggagtggaaggacgggcacgagccgtcgtgggtgcccgcggaggccatagccgcggacgtggtggccgagtacgagacgccgtggtggacggcggccaagaaggcggactcggaggcgctggcggcgctgctcgcggacgagacgttgcggcgggaccccgacgcggaggacgcgcaggggcgcaccgcggcgcacttcgccgcggggctggggtccgaggagtgcctgcgcgcgctcggcgcggctggagcggacgaggtgctcgccagggcgcccaagggcaacccggcgacgttccagcttcggcaggggctggaggcggcgcagaaggagctggagaaggccgtgtacgagtgggccgaggtggagaaggtgatcgacggccgcggcgaaggcaagtggcgggagtacctggtggagtggcgcgacggcggcgagagggagtgggtgaaggcggcgtgggtggcggaggacctggtgagcgacttcgaggccgggctggagtacgccgtggccgaggccgtgctcgacaagaggcaggcggcgacagcgacggcggaagaggaggacagctgggagtaccttgtcaaatgggtcgacattgaggaggccacgtgggagcccgccgagaacgtggacaccgagctcgtgcagaagttcgagcagcagcagtcggggtctgcaggcgaagttgacgaagttgttgacaaagtagtcgactactttggcaacaacttcgtcaacttctaa

SEQ ID NO: 20729 - DNA, 390 bp, Zea mays
  Peptide Sequence Number=SeqID_62508
atggccagcaccgccgccacctgctccttcaacggcaccgccaccacgaccaccaacgacccaactccaactcagcgtgccggtggggagcgagcccggccgaccaacctctccccttcgacgggcttcacgcctccagtcggctccagccctccgtcgtcgtcggagttcgccccaccagtggccggcaccaacccgccgtctggaagcgaccttggaccgggattcggcaccccgtcgggctccttcaatggcaccgggtcgttcaggcccagcggcacgctcaacccttacaacggcgtgtcccgtgggttgccgcgcgtgggcttgttcacggctttgtccgccgctgcggtcgccgttcttctcgtgtccatggatgccatgtga

SEQ ID NO: 20730 - DNA, 207 bp, Zea mays
  Peptide Sequence Number=SeqID_62509
atggatgaatacataagggcagacaatgacttccaccaaagaagggaggaggtccagagatatgtagaaattgccaagagcttcaggggaagattcaaccagagccataaagagcgtgcccaggaaagcccagacgacaaggccatgcggacaagcatgactttaccaagaaattatgagtggagcacaaaaagatcaaaattttga

SEQ ID NO: 20731 - DNA, 300 bp, Zea mays
  Peptide Sequence Number=SeqID_62510
atggctcctaagaagatcacgagatccaccgcctctctggatgaagcttcaagggcagccctcgcagagaataagggaaaggcggtcctcgcagacagcactctggcagctacaaccgagatcgacaaggctgctgcacctagcaagcaccctcgcgctgaagaccccccatgccggagggcagcattcatacttacaccgaggacttacccaccagcgacataccacctaggtttgcttcaatggggccccacccagatcaagaggatgaggacaaattccaagattgcgaacacttag

SEQ ID NO: 20732 - DNA, 264 bp, Zea mays
  Peptide Sequence Number=SeqID_62511
atgccatattcagcctgtgaccttgttccccacagcggaaacatgcacaacctcctccttgcactggagctgctaggttgttctggttggttgctggggcaggaaggtgaggtgcctggttgttttgacgctgatactgatttcctccctactggttattctgatggtactgctgctgatgatgatgagggaactgcctctggtattgctactggtgctgacgctgatgctggtgttggtgatcttgagggtgaccttgcttga

SEQ ID NO: 20733 - DNA, 454 bp, Zea mays
  Peptide Sequence Number=SeqID_62512
gcacttcgaggcttttgaccaaggtaatgaggacttcgacctagaagtgctccaggcattgagggacgaggaggttgaggacctcgctggcttggagtgctccttggccacccaggatgttggtgttgagataggcgtggaggagcaatcgtcttatgcagaggccaatcgcgcgatcctggtgcagcggagactttgcaaccttctgctgatgagcagggccccgataactacgattaagggcaaaaggaaccgagttggtgttttgaagcgaaggttgggagtgctggcgcatctgcacgtggtggcgaggattttcaaagacatcgtcgtgtgggactgggcgggcctcgctcattggtttcgctccacgaggcgcttctcatgtcgccttcgcgtcctcatgaaagggagagggcgcggtcagaagagagatctcgccgaattgttctag

SEQ ID NO: 20734 - DNA, 153 bp, Zea mays
  Peptide Sequence Number=SeqID_62513
atgaatgatttccgtgaagaaagccaccacttactcagacttgatgttggtgagggatcggacctcgatccacttggaaaattagtcgatggcgaccaacaggcgaataggagcgacaagaccgatgtacctttgaacttcaccaactactga

SEQ ID NO: 20735 - DNA, 408 bp, Zea mays
  Peptide Sequence Number=SeqID_62514
atggcggacacctggacctatctcccatggcgccgctccctgtttcctgctggccgccgctgcccttctatggtgctcgcccgatcccaagctgagcttgtctccatggccgccggtcagcccctgctccctgttcgcctcagccgcgaccttgccggacctcgtccctgctcggcttctccagagcgcctgccgccagctcgattcctcgcttcaaccatgggacctgctgctcgccaccgcgtgtgcactttttcctccgagcaacagccccggatctacgcagctccggccttgttttcgacctcactcgctaccgatgtcatggcttgtgcacctcgtgttcgacaaaatccccagagtgatggacatctatgcgcgattcgagtcgattctgccagtctgtag

SEQ ID NO: 20736 - DNA, 135 bp, Zea mays
  Peptide Sequence Number=SeqID_62515
atggggagggactgggagctactcggacaacaggaaaacgagagggagagggccgggaagatgagccaaaacgacggcagctgcacaagactcgacatatcacgaaataaatacgcgagatcaatgcggcattga

SEQ ID NO: 20737 - DNA, 1053 bp, Zea mays
  Peptide Sequence Number=SeqID_62516
atggcggcggtggccggggatggtggtggtgggcccgaggagggcgtcggcgagagctcgtccccgcctcgcaaccccgtgctcgcgcccgcacccgctgcctctggcgggagcgggagcggtggcggcggccgcggaggtggcctccgggacatctgccgcgaggtgttcgagcgcctcgtcaacgatggccacagggcgggctccgagctccttgcccagctcgaggcccacttcaatcgactccccatcagctacaagctggatgtgaatattgacaaagcagaagatgtgttaatccatcagaaagttttggcagaagcacaggatcctgataggcgcccagcattcactgtccgtttcctcaggcttgaagaggtaaatgtggacgagacaactaactctgatgcacatgaagaaggggctgatattggtgaagctctttctaccaggtcaaagacatcatatgcacacattcatgagatactattctccaccaaggataaacccaagctcctgagtcagttgtctgctttgctttctgacattggactgaacatcaaggaggcacatgtgttctcaacaacagatggttattctcttgatgtttttgttgttgacggttggcccgttgaggaaactgatggtttgcataaggcactagaagtatcaattttgagaaatgagggttcctggtctggctctgaatcctcagcttccaaaagatcactgccattcctagcacaggattttgaatcagatattgacacaagacttctgaagcttgtaaataagattgcttctggatcttgtggggacatgtttcttgggacctacagtggtgaggaggttgctgttaaagttcttaatcctcagaatttgaacaaaaatgtatggagtgaatttaagcaagaaatcaacatgttaagaaattgctctctgaaaatcggcataagtaggcatgcttttacctccacgagcttgtttgttgcaagcacaaacaaagatatatacctagccttcaccttccacgcttcatttcagggaagttga

SEQ ID NO: 20738 - DNA, 801 bp, Zea mays
  Peptide Sequence Number=SeqID_62517
atgacccctcctgtgacgtggtcggtccgagccctgggtagggcgaggcggaggctcctccgaggtcgagggccgagtccgagccctgggtcgggcgaggcggagttcgtcgtcttccggggccgaggccgagtccgagccctggggtcgggcgaggcggagttgatcgtcttccggggccgaggccgagtccgagccctggggtcgggcgaggcggagttcgtcgtcttccggggccgaggccgagtccgagccctagggtcgggcgaggtggagttcgtcgtcttccggggccgaggccgagtccgagccctggggtcgggcgaggcggagtttcctatggcacccgcggccggacttgcctgctgtcagcctcactctgtcgagtggcacagcaggcggtgctgtcctcttgtcaggccgctttgtgctgatgggggttaccagcttagattaggactcttgggggtacccctaattttgttccccgacagggttcaaaataaaggagcaaaagaaaccaaagagaaccctggtctggcggaccggactgtccggtgcaccagggtggatcaacttcaaactcttcaccttcaggtttctgaggccgcgctccgctataattcaccggactgtccggtgggtcatcggactgtccgcgagcaagtgtcgatggctctctcgaagcggacgagcggcggcggcgcaccccagggccagtggcgacggcagttgcgcgaggtgcagcgcgcgcgcgacttcgactcctcggaggcgcgctccaggagtggcgcacactag

SEQ ID NO: 20739 - DNA, 276 bp, Zea mays
  Peptide Sequence Number=SeqID_62518
atggtgtcgacgaagaggaagcgcacaacaggtgctgccgtggtcatgacagtcgtcaagtggaaggtgggcgacctcgtgcttaccaagatgaagagcttcccggcctggccagctatgcaaggacatgaggagcttgatggagccagcttgcgggaacatgaagaattcacaaaggtgaaaaatatctcaaaggttgaactagggagatatgagatagatacatcatacatgcttcatgaagcgcaaagaattagcttcagaggcatatggtga

SEQ ID NO: 20740 - DNA, 735 bp, Zea mays
  Peptide Sequence Number=SeqID_62519
atggcgccccgcacgctctgtgacgacggcggctctcggcccccttacggaagcaagaggatgcgtccacacccgtgttctgcctcccgacgcctgtctgcccacggggacccggcgtatgagcaggaggtgttcctcgccacgcggcgcggcaggcgcatgctcgacctgtcccggttccacgaccgcgactgcgcgcagtgccgcgactggtgcttcgccacgttcgtgcacgcctacgccacgtacctcgacgaccggctcaagcaccggatgcaggcccgtggagcaggcggggccagcctgggcaaatggcacgtcgacggcgaccctgacgggatggcgtgcgaggtggccgaggcttgggagcccatgccgcggggaaggtcggcgtcggcgacggagacgacagcggcagaggatgtcatcgggaaggcgcagcagctgaagcacctcctaggccggttcatccagtgccggccgacggggaaggcgaggacgaacccggtggtgacggtggcgttgtacaggctggtgaaggagagcgcgacgatgtactgcgagctcatggaggtgatggtcgtgctcttggaccgcttcgccgacctgggcactcctgcctgcatgcgcgtccactccatcttcaccagcctcgcgaagctggtcgacgagctcgacgacttctacttgtggtgcaaggccaccgacgtgtgccacccatcgggatatccctga

SEQ ID NO: 20741 - DNA, 1374 bp, Zea mays
  Peptide Sequence Number=SeqID_62520
atgcccggcataccaagggatgtcgccgagcactttttggacatccgagccggagcccgacccatcaagcagcctctgcgccgattcgacgaagagaagcgcagagccataggcgaggaaatccacaagctaatggcggcagggttcgtcaaagaggtattccatcccgaatggcttgccaaccctgtgcttgtgagaaagaaaggagggaaatggcggatgtgtgtataccacacaggtctaaacaaagcatgtccgaaggttccctaccctctgcctcgcatcgatcaaatcgtggattccactgttgggtgcgaaaccctgtctttcctcgatgcctactcagggtatcaccaaatcaggatgaaggagtccgaccagctcgcgacttctttcatcacgcccttcggcatgtactgctatgtcaccatgccgttcggcttgaggaatgcgggtgcgacgtaccagcgatgcatgaaccatgtgttcggccaacacattggccggacggtcgaggcctatgtcgacgacattgtagtcaagacgaggaaagcctccgacctcctttctgaccttgaagtgacattccgatgtctcaaggcgaaaggcgtgaagctcaatcccgaaaagtgtgtcttcggagtgccccgaggcatgctcttggggttcatcgtctccgagcggggcatcgaagccaacccagagaagatcgcagccatcacaggtatggggcccatcaaggacttgaaaggcgtagagagagtcatgggatgtcctgcggctctgagtcgcttcatctcacgcctcggcgaaagaggcctgcctccgtaccgcctcttaaggaaggccgagtgcttcacttggacccctgaggccgaggaagccctcgggaacctgaaggcgctcctcatgaatgcgcccatcttggtgccccctgctgctggagaagccctcttgatctacgtcgccgcgaccacccaggtggttagcgccgcgattgtagttgagagacgaggagaggggcatgcattgcctgtccagaggccagtctacttcatcagcgaggtactgtccgagaccaagatccgctacccacaagttcagaagctgctgtacgcggtgatcctgacgcggcggaagttgcgacactacttcgagtctcatccggtaactgtggtgtcatccttccccctgggggagatcatccagtgccgagaggcctcgggtagaatcgcaaagtgggcagtggaaatcatgggcgaaacaatctcattcgcccctcggaaggccatcaagtcccaagtcctggcggacttcatggctgaatgggtcaacacccagctcccaacagttccgatccagccggaactctag

SEQ ID NO: 20742 - DNA, 345 bp, Zea mays
  Peptide Sequence Number=SeqID_62521
atggcgccccgcacgctccctgacgacgacggctctcagccccttacggaagcaagaggacgtcagcaaggactcgacagccccgacagctgtccttccgccaggctccagcgctcctccgacggccacgacaccacacgaaccgggtgccaaaacctcttcggctgccacgatggcatgggagatcctcaacatgtagcaggagaacaacagggtgtggacgagctgcaggcggggctggaccacatcaagggtctccaggtggagcaggggacaacggcgacgacagctcgtctgcctaagcaacagcaacctggggctcgtgccgtgcaacaagtccaataa

SEQ ID NO: 20743 - DNA, 191 bp, Zea mays
  Peptide Sequence Number=SeqID_62522
atggccgcttgtcatgaagtatgggacactgagggagactcacgggacctcgcaggtagacgttcctcgaacctgaggcgtcctgcttgctgctccacctgctgctggacgtcgtcgtcctgctatgtctcctccaccgtcctgtgggtgctccttctccccatccttgtcgtcatcccaccgcccaccat

SEQ ID NO: 20744 - DNA, 100 bp, Zea mays
  Peptide Sequence Number=SeqID_62523
atgacgctcggcggtgttggaactgacatttcgaccaaatctaaagggatcacgtccgttgagtcaaccatcgagaccaaggccactgcgtaccatccta

SEQ ID NO: 20745 - DNA, 663 bp, Zea mays
  Peptide Sequence Number=SeqID_62524
atgctgttgggctccgtgggtgggttgtgctgctggtggctgttgaagcaggagggcgacttgcggcatgcaggcaatggtggtgccctggatccgtatgtttatatggtcacagacagatcagatgaagttaacgaagctttgtttatagaaatagtgatggagatgtttactgggggaaagggtcacaaatacaaggcgaattttactaatgatttgacttccatgaaacttggatcattggatgagttattaaaagcaatgataactgttcttgaccctccttgggaaggctcaaatttgatccctagggatgtgatgtggtctgacccttccttgcagatgggtctttctccgaataaagatcaagacattggattgctttggggtcctgatatcactcagcaatttctgaggacaaataatttgaagcgacgcacaggcgaattgatcatgtggaggcctggaagtgtaatggtggtttaccgagggagcatttacaaaaggcctctaaaatctcaagctctaaatggtgcctcatcatcggttaaaggcgaatttggtgcattgttcatcccaaatgcctcgaatgccgttgagaatgatattcaagggatatatttgtctgcaaaacatgcaactgtgtccctattgaatgtgtag

SEQ ID NO: 20746 - DNA, 2457 bp, Zea mays
  Peptide Sequence Number=SeqID_62525
atgtcggcgaaggacgcggagaacgcgaacatcgttgatagcgacatgctcacggacaaaatggaggccgatctccacgtgcaattcaaggcatcagatttctctgatcctcaagagtatgaggcatggcggagtaggaatctgaagcttcttgaggctggtctacttgttcatccactcgttccattgaacaaatcagacagttctgtgcaacggttgcggcaaattatacggggtgcatatgataggccacttgaaactgggaaaaactctgagtcaatgcagggtctacgtacttgtgtcatgtcccttgctggaagatctcatgatggtacttctgatggatgccactgggcagatggcttcccattgaatctccatctgtaccaaacgttggtagaagcttgctttgataatgatgagggcactgtggttgatgagatcgatgaggtgatggagctcttgaagaaaacctgggttattcttggaattaatgagttgctccacaatctttgctttacttgggcattgttcaaccattttgttatgtctggtcaagtagatatcgagctactttctgcagcagagaaccagttagctgaagtggctaaggatgcgaaaaccacaaaagatccaaattactgtaaagtattgagctcaacattaagctcaataatgggctggacagagaaaagacttctggcatatcatgaaaccttcaatacaagtaatattgagtctatgcaaggcattgtctccattggagtgtcagctgcaagggttcttgttgaagatatatcccatgaataccgccgtagaagaaaagaagagactgatgtagctcgaagcagggtagagacatacataaggtcttcactacggacagcttttgctcaaagaatggaagaagcagattcaaaacgatcatcaagaaaccctactccagttctttctatccttgcgaaggacattagtgacctagctacgaaggagaaaaaattgtacagtccaatactgaagacatggcatcctcttgcttctggtgttgctgttgcaacccttcattcttgttatggaaatgagctgaagcagtttgtagctgggcttacagagctgacccctgatacagttgaagtacttaaatcagcagacaaattagagaaggaccttgttaatatagctgtagaagattctgtggatagtgatgatggaggcaagtcactaatcagagagatgccgccatatgaagctgaaaatgcaattgctaatctggtgaaagtgtggataaaagaaagagtagacagactaaagggatgggttgaccggaatttgaagcaagagacctggaatccaggtgccaacagggataattttgctccctcttccgtggagatgcttcgagttattggtgaaacgttggatgcatttttccaattgcctataccaatgcatccggctcttcttcctgatctgacagttgggctcgacagaagcctacagctttatgttgctaaagcaaaatctggctgcggagcacgaaattcttttatgccccaactacccccactaacgcgatgcgaggttggctccaagttattattcaagaaaaaggagaagccacaaaatctgcaggttcgtgtatcacaaaatggagcatcaaacggaaatgatcccttgggccttcctcaactctgtgtgcgcctgaatactcttcagtacatccgtggtgagtttgagaatctagagaagaaaattaaaacgagcttacgaaatgttgagtcagctcaggcagatatcactgatggattgaacatcaagtttgagctttgccaggcagcctgtcaagaaggcattcagcagatttgtgagacgactgcatataaggtgatgttttatgacttgggacatgtcctctgggacaccctttatgttggtgatactgcatcaaacagggttgaggtactgttgagggaacttgaccctgtccttgagacggtatctagtatggtgcacaacaaagtgcggaaccgtgctattactgcactgatgaaagcaacttttgatggtttcttgctggtgcttcttgctggtgggcctttgcgtactttcacccgtcaagactctcagataatagaagatgacttcagggccctcagagatctgtacttagcagatggggatggtttgccagaggaattagttgacaaggcatcctcccaggtcaagaatgtcctgcccctctttcgagcagactctgaaagtctcattgagcgattcaaacgcatgatggttgaatcgaatcggcctgcgtccaagaacaggttaccattgcctccaacaacagggcattggagtccaaatgagcctaacacagtcctgcgagttctgtgctaccggaatgatgagacagctacaaagttcctcaagaaaacttacaacctaccgaagaagatttga

SEQ ID NO: 20747 - DNA, 552 bp, Zea mays
  Peptide Sequence Number=SeqID_62526
atggagctcaataatgttgggctgagccctgtcaaaaacacaagggattttatgcttcgaaacatcccatcccacaagaatggtcagggaattcagtcccttgcgcaactctttgggagtaacctgatggtgtgcccccaccaggtagaaaagcacttcacctttgctgaagtcctggaggccaagctcgcggccaagaagaccgagctccagaggtgcagggacaccgcggagcggctggaggccgagaacgggcggctgtgcgccgagctcgacgccgccgcgctggaggtcacgagcaggaagcagaggatcgtcgagctggagaaggagatggcggagttgaggacgcggcaagacgcggcagcggacgctgacgactgctcctcgtccgcttcggcgtcgagcaagcgtctcgagagctccagcgctgcgccaaagccaaaccgcgcgagtttagctgggcttaatcgcggagcatcgacgtcgatgggagatctgcgggcaggcgcggaaggagcgcccgagggagcgcgggatccgcgaggatga

SEQ ID NO: 20748 - DNA, 186 bp, Zea mays
  Peptide Sequence Number=SeqID_62527
atgaggacaattttcgtctcatacccgtaccctaatagggaattctccacagactctttgttcgacgtcatagaccgtggcgccgagataacacatctcggtgtcacagattttgacgccgagatacgcgctctgctggcgagagagtctaacatggcgctcacgtggctgagctcggcgccataa

SEQ ID NO: 20749 - DNA, 207 bp, Zea mays
  Peptide Sequence Number=SeqID_62528
atggcgagttccaagtccggcatccctatcaaggcagaacaagattcggatggctcggcacaaagcacagctgatatgacggcttttgtgcaaaaccttcttatgcagatgagcctcaatgacctcaaggctgagataggcggtgaaggcatgtcgacgccatctaagatgaaggaagagtcaagaccttcagacagctccgcatga

SEQ ID NO: 20750 - DNA, 438 bp, Zea mays
  Peptide Sequence Number=SeqID_62529
atggcgccaccgcacttcgaagacaccggcgaccctactaggctaaactttgaggctcaaccgtgggtgaaacccgtccccgatggtggcggcactcacgatctctctccgcacggcgacagcccaaggcgatggtgcccgcggccacacttttccacggcgagttcccttcaatcgatagacgagggaggctttgcacggaaaatattccttctaaagaaagagatctattattggaaatcattttattctcaaatctttggagaactctttaaatcatcaaaacaagattttggttgttacaaagggacctcatcggggaggacagatcctagggccattttatttggtcgttttgttttagcgggtgaccggggtttctttgttggccgattgcatagaacaaccttcttgctagcatatttggagagcaattga

SEQ ID NO: 20751 - DNA, 327 bp, Zea mays
  Peptide Sequence Number=SeqID_62530
atggcgtcagtcaattgctcgccgaggacgacttccgccgtgcgctgcggtcacaagattcagcttcacaattctcgatcgcaccgtaccctttggccaagccgaaattgtaaaagagtcccttaccttttagcgattcagcccgccatcctctggggctgtgctctatgtctgcatattcttaccccgagccccctaggtttctctgaatttgaggcccagttcagagcctatttaaacgaagagcctgtaactgaggatcctggtgagcagcagcagatagaagtagctgagcaggagctcattgaaggcaagttatgcccttga

SEQ ID NO: 20752 - DNA, 192 bp, Zea mays
  Peptide Sequence Number=SeqID_62531
atggcagacgcggtgaactcatcgtccaggatttcccaccgagtcccttcgattcaccatttggagcgagtccgcgctgccctcgtgctgaacacaaatcttactgtctcccggttttcgaaaccacgacaagggctgtcgccaatgttttcaaatcagttggttggacctggtcgcctagtgaccgactag

SEQ ID NO: 20753 - DNA, 849 bp, Zea mays
  Peptide Sequence Number=SeqID_62532
atggaggcgcacggcgaccagcggtggctggtggattgcctgacggctacgctcgacaccgcgcgcgatgtccgcgccttcgccgaggagtcgctccgccaggcctcgcttctccctggttcgccacctcctacctttaccccctctctcgtggacgattggctttttatcaagcagcattggcaggaagacgaagagaattttgtgccccctgttgtttctgcttcagaaaaggtggtcatacgacagctcctgcttacctcattggatgattctaatgggaaaattcgcactgctattagcatggctgtagcagctattggacagcaagattggcctgaagactggcctgagttacttccggttctcttaaagttaattggcgatcaaagcaatgggaatgaagttcgtggagcattaagatgcctagcccttctatcggatgatctagatgatatgtgtgttccaaagctagtgccagagctattcccatcactgtatagaataatatcatctcctcatctgtatgaaaattctcttcgtgcaaaggcttttgcaatagtccattcatgtatttctatgcttggatcaatgagtggtgtctataagagagatacagctagtctgatgacttcagtgcttgatccactaatagagcaattctccatagttctaaattatccggtgcagtcccaaaatcctgatgactggagcatgcagatggaggtgctcaaatgtttacttcagcttgtccagaactttcctagattacctgaagctaaaatttctggcaagcacgagacgcagcctgagcaaaagtacatttatgtcctcaacatttacacatga

SEQ ID NO: 20754 - DNA, 240 bp, Zea mays
  Peptide Sequence Number=SeqID_62533
atggcggccgccgaggagtccccggagcccgccttgagatttatgccgccgccgagccgctccgccgtggaccgcccccctccggtgcccctgccccgacccagaccccaccagaggattcctcgtgtcctccccaaccttcccggccgctcaggtcgtctcggaggcccgccaaacgcccgcgcccctcgtctccggcgagtcctccgccgcggggacgagcgccgccgccccagctag

SEQ ID NO: 20755 - DNA, 426 bp, Zea mays
  Peptide Sequence Number=SeqID_62534
atgacattaccaaagacccaaacgaacaaggataagggccctaagactactgatgagggttttgttaaagctaaccatatcacatccagttccacttgtctttcttggtatgttttacaacaacacagtcaacttcaagaaggggagcaaggttggatgacatcaagcactacatcaataccttttgcaagcaccagcgactttgagtcgaggatgactcaaaaccaagaaggggagcatgatgagtacatggatgccaactatatagtcaaagcccaatcaatcatagtcccaagctcaaggagagttgaagtgcagtttattcatgaattcggttgggactgcaggagtgggtctcacgaaaatggatgcctaggatacatacggactctattttcaacattcaagacaccgttggaaagctaa

SEQ ID NO: 20756 - DNA, 255 bp, Zea mays
  Peptide Sequence Number=SeqID_62535
atggctaggcagcggctactggtggcagaaatgagttacaagtggccagaacgtcaactagctggtcatgatagacgtcgtagagtttggctttggggctatgccaaggcgaaagatggaggtcaggggagaacgaagatggccggcgaccgaatcttgctcgaggaggagccgacactggagaccctttcaatgtcagcgaggaggagacggcgaagcacgccgagccgagggcagcgaagaggggacgtctag

SEQ ID NO: 20757 - DNA, 471 bp, Zea mays
  Peptide Sequence Number=SeqID_62536
atgccccgtcgctgccgtgagctgtctgtcctccagcgacccttgcagaaccgtcctcggtcagagcagaacggcaaagctctgttcaacaacggtaggctccctcgcccagctggagctggtgctgcagcaacagcaacatgtcgtcgctctccccgtccccggacggacccgtcggtaggccggctgctaccgtcggtctggtcccctcgtgtcacgtttacatcggcggtgacagacagggcagagcagggcccctccgcccggcacagcacaactcactctcatagcacccagtcaccggaggtcggcacgacgaccgggatcggatgcgaagtctcccgccatgactcggtgctgagaggaccgaccgcctctgccttttcaacagtcaactgcataccagaatcgcggttgttctcttctggacaaggcttcagacgtgcagccaacatcagcaccagactctag

SEQ ID NO: 20758 - DNA, 1365 bp, Zea mays
  Peptide Sequence Number=SeqID_62537
atgggtacgaggaaaggccttgcgtatttattcagctacgtggagagaaaatcgggcgggttcattcctggccgcgcgaagaccgtggtggagatccggggagttcttcaacggcctttgcggggctgttgcgatggcgtgaggagaacgaccgagcgtggggagagaggggctgactgcgcggtgggtgctatcggtactgtttttggagaaatgggagctctccagccaatccctggcggtgtctgccaaggccacaaggatgactgtgaccttctccataccagcagacaaatgcttctggggttgagtatgcatttggagcacataactattcgattagtggagttttggaggtggaacctcggcagtgacctggatcctctccaagtcaaagagttcatggagattcactcattaaattacaatggtgataccttctatttggttgaaccgtataagctttatttctttcaggctcgactatatgatagctgttacttaatctgtgttgatctatgtaaatgtggcaacgcttggcagtttcatgcttttactaatggagaaaaacatggcatggttgttccacaacatagttccaacaaggatttggcttcgaatgcttctgaacaaaaagatactgttgtgctacctaaactacaaggagagtctctggtacccaaaagtagtgctggccaccatttggatttacgtcttgttagaaaccaatggcttctattggaccctggagctgattgcctaatgtctgaggctaatgaagataaaacatctagagacttcaaagaaatgggtagcaggttggccggggagccatacttgaagaacctctacacttacatgtcaatatcagggcctcacttgggttactggtacaattcaaattctttgttcaattctggactctggctgctgaaaaagctcaagaatgctcaatgcatccatcaactcactttcagtgatgatcaagacccccacaatacatatttctataagctttgcaagttgaaaacattggagaacttcaaaaatatcatattattatcatcaccacaggatggctatgtaccatatcactcagcaagaatggagctctgcccagctgcatcatcggacacctcaaaaaagggtcaagtcttcacagaaatgctcaacaattgcttggatcagatccatgcgccctcatctgacacccggacgttcatgcgctgcgatgtgaattttgaccggtccaaccacggacagagcctgaacaccatgattggcagggcagcccacatcgagttccttgagaccgacatctacgccaagttcatcatgtggtccttccctgacctgttccgatga

SEQ ID NO: 20759 - DNA, 2184 bp, Zea mays
  Peptide Sequence Number=SeqID_62538
gagagcaagcagtgggggaagacgccccaggaggcggtgggcgcaggcggcggtcgccaagtggatctagatgaagaggatgacctggaggagttccggctgcccatgggccaccgccccaccgagaacctcgacacggatgggctccagcaagcctctgtctacacccagctcaccgcgtccaacgtcggtttcaggctactgcagaagatgggctggaagaccggcaaggggctcggcaagaacgagcaaggtatactagagccaataagagctgacatgagagatgcaaaattaggtgttgggaagcaagaggaagatgacttcttcacatctgaagagaatgtgcaacgaaagaaattgaatattgaacttgaggagactgaggaacatataaagaaacgggaggtcatagcagagcgtgagcacaaaatccgcagtgaagtcaaggagatacagaaggtgttcttttgcaacctctgcaataagcagtacaagctggctcatgaatttgagagtcacttgagctcatatgaccacaatcataggaagaggtttaaggaaatgagagaaatgcagagcagcagtggtagtcgagatgacagacagaaacgtgaacaacaacgagaagagaaggagctggcaaaaattgctcaactcttggatttccttaatgaagcttcagtgcggatgctcataggaagcagcagaaggataagcaagaaaagtatgcctctcgccacccttctgctcccctcagtctctacgcccaccgccggcgaccaccgcacccacagccggcggcatgaccaccaccacggcagcaagcgcaagaagaagccgccgccgccgccatcaccacagccgtcgctcccgttggcaccgagaaccccgccaccgccaggcgcaccaagccccaaggtccgtgcggcgggcaagaacaaccacgcccagtaccagtaccagcagcgccgaggccagccgacgaagaacagggccgcggcggcgtcctcgtcctgggagcaggtgaagagcctgctgagctgccggaccgcgacggcggcggcgcgcgtgcacgacccgtcggcgctggcgcggctccgcggcgcgtcgctctgcgccatgcgcgacgtcgtgctctcctccgcgtcgggcgaccgcgacacggcaccgctgaaccgccgccgcgccccgtcctcctccgctgcctctggcgccggcagcagcagccaccactcctccctgcggggcctctccggctgctacgagtgccgcgccatcgacgtggagcccatgtcgaggtccgtacgattccgacccatcaacctttttttaaagcaaataaccatgattaatgcacgattaacgatcaccaggcggcggtacccgaggccgagggagctgtgcgcgtgcccgcagtgcggcgaggtgttcaccatggccgacagcttggagcaccaccaggccattcgccacgcagtgtctgagctgggtccggaggactccgggcgcaacatcgtggatatcatcttcaactcgagctggcagaagcggggccgccccatctgccacatcgaccgcatcctcaaggtccacaacgccccgcgcaccgtcgcccgcttcgaggcctaccgcgacgccgtccgctcccgctcccgctgccgcgccgccgcccgggtagcggccgacggcaacgagctgctcaggttccactccgcgccgctcgcgtgcgcgctcggcctcggcggcgcgaccgccctctgctgcgccggcggtgcttcgtcgccctgcggcgtgtgcacggccatccggcacggcttcgcgccgtgggcgggcgcgcacccgctcggggtgcgcaccacggccagcagcgctcgcgcgcacgactgcggctgctcggcttctccatcgtcggtgcagcagacccagcagccggcgaacgacgctgctgcctgccgcgccatgctggtgtgccgcgtcatcgccggccgggtccgtcgcggcggcggcggcggtgccacgtcgaacgctgccgatgaggatcaggaaggcccgttcgactcggtggccgtcgaggacgccgtcagcagcagcatgtacgggaacctcgaggagctcttcgtggccaaccccagggccatcctgccctgcttcgtcgtcatctaccgcgtccttgatgcttga

SEQ ID NO: 20760 - DNA, 786 bp, Zea mays
  Peptide Sequence Number=SeqID_62539
atggatccaacggtcaggggggtcacaaagcacccaggcattgcggccacggtggagcacacccagcccggcggcgccatggaatctggcggccggaccccatcggcgacagcgattaggcgccctaatggcacattcaccaacgttctagagctcgaccgattgttttggctgtccggcaatggagtctacggtcaccgtttgacttcgcgcacaacccaggtcgccaaggatccacagttccaatcgaactacgtggagagaaaatcgggcaggttcgttcctggccgcgcgaagaccgtggtggagatccggggagttcttcaacggcctttgcgaggctgttgcaacggccagccaagtccagcctcaggcaccataggaagctctgcctcccccgaccctagggctcggaccaacctcgaccccggaagacggtctccgcctcgcccgaccccagggctcggactcaacctcgaccccggaagacgatctccgcctcgcccgaccccagggctcggactcaacctcgaccctagaagacggtctccgcctcgcccgaccctagggctcggactcaacctcgaccccagaagatggtctccgcctcgcccgaccccagggctcggactcagcctcgacctcggaggagtcaccgccttgcccgaccttggtctcgaaccaaccacgctacaaggggatacatcatttaccctacctctagctagctcaggctacggggaacaagaccggcgtcccatctggctcgccccggtaaacaagtaa

SEQ ID NO: 20761 - DNA, 282 bp, Zea mays
  Peptide Sequence Number=SeqID_62540
atgtctggagatcacgccaagagggagatagtcaccagcgacaaggccaaaggctcgggaaggaagaacaatgaaaggactccatcaaggaagtctgacgacaaatataaggaggaatccactatctccatcaagtcacataggaagggtgacaagaagaaaaagaaaatgaagaaggtggtctactacgagaccgactcttcatcacattccacatccggcaccgagtctaccactttgaagcgccaagagcgtaagaagagaaagggtcacgatgcctaa

SEQ ID NO: 20762 - DNA, 1526 bp, Zea mays
  Peptide Sequence Number=SeqID_62541
atgccgcgccgcgacgaggtcgcctacgcgactcttctctcgggctatgccgcggcagctgacttcccgggcgctatggcgctcttctcccgcttccgcgcctcctcctcccagccacacgacgccgcggatccgttcatcctcagccccgtcctcaaggcgtgcgcttccgctgccgccagcgcagggctcctccccctccctcacgccgccgcggcggccgctctgcacgcgttcgccgtccgctcctcctccctgccgtccgtgttcgtctccacggcgctcgcggacgcctacgccaaggccggccgcctcgacctggcgctgcaggtgctcgacgaaatgcccagcaggaacgtggtctcgtggaccacgctcgtcgcctcgctggcgcgtgctggccggcggcacgacgcgctccgccgcttcgccgagatgcgggcctccggcgtggcctgcgactcccacgcctgctcggcggctctcacggcgtgcgccgacgcggggctgctgccacgcggccgcgaggtgcacgcgctctgcgccaagctcggcctcgacgccgtgcccttcgtcgccaacgcgctcgcggcgctgtacgcgcggtgcggcgatgtcgaccgcgcgctggccgcggtcggccgcatgggctcgcacgacgttgccgtgtgcacaacgctgatcgcatcctacgtccagaccggccgcacggaggaagccatcgaggcgtttgtgagaatgcttcgcgatgagtcgtcaaattctgcttcaccaaatgagtatacgttctctgccgtaattgccgcgtgtccaaatatggatcgtgcatatcttggagagcagttacatgcacaagctgcacggagagggctatctcatgcccgctctgtggccaattcccttgtcaaactctattcccgccgtggccatctttcagctgctgatgctatcttccgggagagtgtcgtcaaggatgttgtctcctggagcacaattatatcaggatacacacaagaaggcctcgccgaggagtcttttgccttgttctcagaaatgcggcatcacagtagctgccctcggccgaatgagtttactcttgccagtctcttcagtgtgtgtgcaagtgctgcgtcgctggatactggacgccagctgcatgcactcgctgttgctgctgggcttgaacaccatgcaatggtcaggagtgcgcttgttaacatgtatggaaagggtggtagcatgtcagatgctaatgtcgtattttccaatcgcactaaagatgatgtgatttcatggactgcgatgatcgttgggcatgctgagcatggtcacagcaaagaggcttttgaactgtttgaggaaatgtgccgtatcgggctaaagccagaccatgttacgttcattggtgtactcactgcttgctctcacgcgggggaacttgagctcggattgagatacctcaatgcaatgaacaaaagctatgggctggagcctgaaaaggagcactacggttgtgttgttgattt

SEQ ID NO: 20763 - DNA, 213 bp, Zea mays
  Peptide Sequence Number=SeqID_62542
atggcgtcacgcgacgtctgcaagggtcgagtgacgcgcaccgggcgggagctctgcgagggaggtgaaagcgtggtgagggggatctcgggttgcgcgtgcgggtgcaggctagggcatgatggtggtgggggctactgcggtggttgcgtgtcctgtgtggaggacaggataccggcgaccacgaaggggtcacctctagcctcgcgatag

SEQ ID NO: 20764 - DNA, 699 bp, Zea mays
  Peptide Sequence Number=SeqID_62543
atggagatgatcgacgcggagctgcgtcttggcccgcccgggagcaacaacagcgacgtcgtcgtcaccgtcgtgccgcctgcagcggcgaggaaaccggcggcgccggcgccggcgtcggcggcgaaacggccgtcctcgtcggtggtgaagagcgacgacgcgtccgggacgggcgaccatgacgacgacgccgcaccggcctccaaagcagcacgcgacacaccgcgtacacagctactataccgcgcgcggagcgaccagctgatgatcgggctggtgctcgtgaacgaacgccgcagggtgcgggcggtggggtggccgccggtgagagcgtaccggaagaacgcgttccacgcggcggcggaggcggcgaggaggaccaataataagggcgaggagctgcagggaggaggcggccgcctgtacgtgaaggtgagcatggacggggcgccctacctccgcaaggtcgacctgcggacctacggcggctaccgggagctgagggacgcgctggacgcgctctttcggctgcttctcctcctcctccgcctcctcctcctcggccgacggcggctgccagttcgccgtcgcctacgaggacaaggacggcgacctcatgctcgccggcgacgtgccctgggacaacgggacaacgtgcagtaccagacccacaccaccggcccggccgcacagtag

SEQ ID NO: 20765 - DNA, 1248 bp, Zea mays
  Peptide Sequence Number=SeqID_62544
atggatttcagctgctttcagccccacacggggatctgtagctacctgccattcgattcgtacatgcagcatgatggacagtatgagctccatctccatcctgctgatcaccatccgcttgaagttactggagactacacttctgcgacgttcgacgaccttggacacgagttctttgcagaaagagaaatcgagaagcccatattcaaccgtacttcatcgattggtcgtagagttgggtctcaactacctctgccgactatcaaaactgaggtttctcatctcatagacagtggcctcgtatcatgtaaggcgtatgagataaatgacaggtttctggcaagaaagaagacctctttgaagaaagccaatgtcgtgaaagggcagtggacaccagaggaagataggaagctggtaaaattagtggaacagtttggactgaggaagtggtcgtacatagcacaactgctgccagcaagagtgggaaagcaatgcagagaaagatggcacaaccatttgaggccaaacatcaagaaagacatttggagtgacgaggaagacatggttctgatagaagcccacaaggaggtgggcaacaaatgggcagagatagccaagcggctacccggcaggaccgagaactccataaagaaccactggaacgcaacgaagcggaggcagttcgcgcggaggcggagccgcaccagctccaaggcgcccaagccaggcacccttctgcagagctacatcgaaggcctcggcattgttggcccgagcgacaagagtgctgcgccactttctgaacctacactgtcgcctgaagctcccggagcaaagtcggcaaagaccggtggaacaacgctaccggaagaacacagcccgccgtccaacatgctggattcccaaggcgttcttcttcccagcgaagagcttcttgccccaatctgcgacgaacttctagatggaatgtgtggcggtcttttcgactgcacgaacgaggacgccttcttccgtgtgtgcgctgtggacgatgacatcgacgtgagctacatcttcgaccatgcgatcaaggtcgatcctgagatagacatggagatgatgatgatgtgggatgacgacgccctcgcgtgtactgctggacctgctgctggaacagctcatgtcgagaccgtgcatgtgaaggaggagatggacctgatggagatggtggcagccacgcagaactgtggcgaagcagaaaatcactag

SEQ ID NO: 20766 - DNA, 127 bp, Zea mays
  Peptide Sequence Number=SeqID_62545
atgactcctgatgagtcgtggtccagtcctctcggccgccgccgccggccgagaccccagacggtgatacagagcctacggcgtcgagaaccaccggagcccatgtttgctcgttcatgtgattctg

SEQ ID NO: 20767 - DNA, 453 bp, Zea mays
  Peptide Sequence Number=SeqID_62546
atggatcaaataggcaagtactggggcatgtggggagcaaggagaagcagcagcagcagcagcacgatccccatctctgcttgggctgcggcgtacggcggcagcagcgagccgtcgtgggaggagcaggccttcgcacgcgacgcggcggaacacctcggcggctgcgtctggccgccgcgctcctactcgtgcaccttctgccagcgcgagttccggtcggcgcaggcactcggtggccacatgaacgtccaccgccgcgaccgagctcttctccggctggggggctcgtcctcccccgaggacgtgcacgccaccaccaacgatcagccacacccgcagcaaggtgctctcctgtacagggcagcagcctctaaccctagcactaccacgccgagtactactgcagctgcagccagcaccaaaggccgctaccaatgttgcagcatgtga

SEQ ID NO: 20768 - DNA, 129 bp, Zea mays
  Peptide Sequence Number=SeqID_62547
atggccgccagcctctccattgcagccgagctcccttacttccccagccatggagccgaactccatctccctgcgtactgctcaaacggaggtagaagaagccactttgtgcctatgacagctctatag

SEQ ID NO: 20769 - DNA, 174 bp, Zea mays
  Peptide Sequence Number=SeqID_62548
atggagttcgccttcatccgctcatcgcataactgccgtagattcgtgtgtccgtgcacctgggcgacgagcgccttcactccggcaaagggctaccgcggggaaaggccggcgctgccatcttgtgggctggaggtggaagatggcgtgccagccgttggatccgcgatggat

SEQ ID NO: 20770 - DNA, 1143 bp, Zea mays
  Peptide Sequence Number=SeqID_62549
atgggcctcctcgtgcagctcctcgccgcgcgcctcggcgtcgccacaggccgtcacctcgccgagctctgccgcgacgagtaccctgactgggcgcgccgcgcgctctggctcatggccgaggtcgccatggtcggcgcggacatccaggaggtcatcggcagcgccatcgccatcaagatcctcagccgcgggtacctgccgctctgggccggcgtcgtcatcaccgccttggattgctttatttttctttcgctcgaaaactatggggtgaggaaactagaagctgtatttgcacttctaattacaactatggctgtctcatttgcatggatgttcacagacactaaacccaacgggaaagacttattgattgcactagtgcaatcaaggaaaatagatcaaaataaggaatatcaagtccgtgaagcattgagatactattcaatagagtcaacaatagcattagttgtctccttcatgataaatctctttgttacaacagtttttgcaaaaggattttatggaagcaaggaagccggtaatattggtcttgaaaatgctggacagtatttacaagagaagtttggtggaggattttttcctatactgtacatctgggggattgggcttttagcagctggacagagtagtactataacaggaacttatgctgggcagtttataatgggcggatttctgaatttaaggttaaaaaaatgggtcagggcactgatcaccagaagcttcgcaattgtgcctactataactgttgctttgttcttcgacacatctgattctgcactggatattttaaatgagtggctcaatgtgctccaatcaattcagatcccttttgcactcattccactcatcaccttggtttccaaggagcaagttatgggagtcttcaaaataggccctaacacccaagctgtaacctggactgtagccactctgctgatcactatcaacggctacctcttgatggatttcttctcttctgaaatccgaggtcccctatctggctcgcttctctgcgtggcggtcctcatttatgcctcgtttgttctgtatctcatattgcggggcaccgagctgtccgagaagattgccaaagcgatccgcggcagtttttcatga

SEQ ID NO: 20771 - DNA, 606 bp, Zea mays
  Peptide Sequence Number=SeqID_62550
atggggaggagaaacggtgctaataactcggataaacggtcgattgactctccattaaactccattacacgtggcttcggattcctgagcgcggacgtcgggctggggctgttcggcttcgggtccggccgggtcgcgtcaggcgctgcgcgtcggagcgggtgcgtggctctctggcatccaggcggggctctgtttggcggctttgggcgcggtagagagagacacgagggggaaggagagccagggaacagcgggcgcacgcaggggcggttgcgcaggatcggtcgtccggcttcctggcgacggcgtgggaggaaggagagggacgcctgcgggtggggtccgcagggcggggctcaagaaagcttcgacataactcgagggaagtacgacgaagcaagcttcgtcacgatgaagcaggaaggcaatgaagggagaaggtgctgttcaaccgaccatgggcagggccaggcggctggcgtcgaggcggacgttggcaggcggggttgggggcggctggtgttgagtggggccacggacagggataaggcagccaacgtcgggtggtgtcggggcagtcggccttgggcgaggcctgggtag

SEQ ID NO: 20772 - DNA, 453 bp, Zea mays
  Peptide Sequence Number=SeqID_62551
atggcaaagaagaggaccaatgtgatccccattattgaggatgtcaggcatccggcaaggtaccagatgttggttggcatggttgatgttatcttctctgatgttgcacagccaaaccagacacatgaaaatagcgaggatattgtttttcttcagccattggacaacaaaatctacattttggtgaaactcgtccttacccaatatttgattcctcggcttcaagcacaggacagtaagagagactacctagaccatagcagtggaagtggagttggattgtacggctgtactgaatgtgaagctgatgttgtcgcgctgatagaggaggaagtgtcgcgtgttggggaagcggcacgccggttcgagtggataggcggcgaggttctccttttcctccctcttcagtcgcaacaaattctcaacgggaacacctccccgcgctcacgatga

SEQ ID NO: 20773 - DNA, 926 bp, Zea mays
  Peptide Sequence Number=SeqID_62552
accgtccatccgcgcacgcccacgttcgttccccacctcccccacccccaccccgcgtgagccgccgccgccccgcctcccacctccagtccgccgctctcccgcggatcgtgctccgccccgtccacctgccgcttctggtaaaatgcctccggcctcccccggcacaaaaccctagccctcaatcacgccgagctcgacggaaccagcccaatccgagcccattttctgctcgggtcccggccgatccgatggctcctcatcagcacaacccggggccggggcaacgtcccccagtggatgctagcctgatcgggtccccacggtcgatgggttcgccttggtccgccaatggcagacgcgacgagtacgtgaggatccctgaggaggtggaggtggcgtccaagggggagggagatgctgcggcggccatcaaggcggccgtggcagcggagtgcccgagggtgctgcggtgccgcgcgatccggtggtgggccaaggtcgccgtgcttgggatcttccttgcaggggccggagctgctgccgtggtcttcctcggcccgctcgttattaagaaggataaatggtgggcgtgcggagtcgcacgcacgatctacactacaccacgcggcgaggacggatggaagaggataaagcggacgtgcagcaacggaaaccacctcggagagagcgattcagtccacagagaggagggagaatactacaacgggtttctccaccgcggcgccggagtcgacgcccacgccgacgaggacgcacagttcatcgcgagcacgcggtggcggagtcgacgcccacgccaacgaggccgcacagttcatcgtgagcgcggggagcgcgacaacatcagcttcacattcagtacagccgtacaatccaactccacttccactgctatggtctag

SEQ ID NO: 20774 - DNA, 297 bp, Zea mays
  Peptide Sequence Number=SeqID_62553
atgtcgggggagtatagcgtgaagcacaatgacggtgatcgtgggcgaggaggcgccgaaaaagaggaggtttgggatgatggggtcaatgtcagctgcgaggacgctgcaaaggtatgggcccgctaccatgtgcttgaggcaccaaattcgtggaggatccaccgcacacgggggaggaggaggagaaattggcggctgcgcattgacgaggagggacgcgtgggtgtggacgggcagatgaagctaaagctgtgttgggggagaaggcgtggaaggcatgggagaggggcgtag

SEQ ID NO: 20775 - DNA, 1659 bp, Zea mays
  Peptide Sequence Number=SeqID_62554
aaaattgcttccatcaagagtgggctggatgcagctgctatccctgctgcgagaaaagctgatttgagaggcaaggtttcaaagttagaggatgattattataactgttgcacgtcacaggacgaacttaggaaggcaaagaagaaaatgggggagcaaaatatacaaaaggctgtgaagtccgcaatggatgctgcagaagctgctctttcaggaaataaaccgttttgtgttactcatgtggatgtgggtcttgataccacggctgtccgtgaggcggttatcaaagtcatggaccagaagggtttgcctataatgttattcagcaccgatgaggcatcaaacaaagccgttatctatgctggtgtgcctcccaatgctcctagcggcttcaaggtgttggactggctaacaccttcaattgcgccactcaagggaagaggcggtggcggcaagaacggcgtcgcccagggccaggagcgctatgggagaggagacaagtcttatcccctgtttgatggaggtgctgttcgagtcgtagttattgaaacaacgataagtatggtgaaaaatgcatggcaaaggccaggctcgggcaagaccaaggttcctcctgaggccttggttgagcctgcctcggggcatgcagtggtacagggaggggttagcatagttgtcggagtggccacctacggaattcacggggagttgttgccggggcagttggccgaagccgagcttgggcgaagcggagttttcttcgaggttaaggccgactttgggcgaggtggagttccctcccgaggctgggcacggggctgtcctcctgtccgagatgggcttggacgaggtggaaaccgctatttggtgaagaggggacatcggggcttggtggatgatgggctgcttcgcccctgctccctcgggacgcaccccgagtggctcaccccttgggatgagaaggagccgaccccgcctgcaggctatgtggcgacaatctacacgacggtctgcgaggaatacctcgggatcgagccccattgggacctgttgctccacctcttctgcgtggagccattctcccgcccttcggaggtgaagaagagccactggttctacctccgcaatgatgacgggaggttgccggagtacaccaagcgggtcaggctctatgaccggggggctaccgcggccgaggtcgtcgttgccttccattatcggagggtgctaccgctggtggagcggcacctgcgcatggatgagatgacgcccgaggcctccatggagagttctcggatggcatcggtcgccctctccaccgacaagctcctcaagcgggagagggagggactgccactggaggcatcccctagtagagacgatgacgacgatgaggggatggaggttcggctggtcttctgccccgaggtcaggatctggtctgagccatccttagtaggctcgtccgttggtgcagacgtgtcggtgctcgagcttgaggcatctgtgcctctgcccgagataagggcgtctaccgagtcgggacctatcctcgcaaccgaggaggaggcagcggtggtggagcgggctgccgacccactcccggtgccaacctcaaggacaaagggcccaaggagccaagggcatgccctggtctag

SEQ ID NO: 20776 - DNA, 552 bp, Zea mays
  Peptide Sequence Number=SeqID_62555
atgacgatttcattgggcactgtgggcgcctgtgctctcagacgtaaaaaccttcagacatacgcctggagtgcagcccctagccctaaagaagctttcttcggcggcatgataaaggtcatggcttgtcaaaggtggtcgaatgagttcactggagacgaaggttatgaaggacgtgccttcatcatctcagtaaataataaaaccttcggaagacgaagacccccaacatgcatcgagctcggtcaggaggtggccaacagtggggagggtagtaaaccgagggaggaaccgaaggccctcatgggggctaagaccttgcaaagcgaagcccccgaggcatgcaaacataagggccaaatcctctccttagaacaagctacaaaggcagcccttgctgccagcgcaaagaaagccaaagtcaccttcgccgacgagatcccacccccaacaaagaacgtcactctcaccatcaacaaaccagaggaagaaaacaaccaagaccacccactccagaaggcggtatccacacctgcggctttgagagcctag

SEQ ID NO: 20777 - DNA, 144 bp, Zea mays
  Peptide Sequence Number=SeqID_62556
atggccaccaagggcaatccctacttcgtccttgacgacgcggaggagaagcggatgtggtcagaattccatacaatggctcgggggcttatggcaaagtttgtggccaagtcgattttcattcgtcgtgagcacgacgtctag

SEQ ID NO: 20778 - DNA, 153 bp, Zea mays
  Peptide Sequence Number=SeqID_62557
atgtcctccttctcagcagccttagcagtactagcatcttggtccaagaggaaacatcagcttctaaacaactccagtcagttcacctctatctttgacagcttcagctctcactactacatcatgtacccatgtcatcctcttggtggttag

SEQ ID NO: 20779 - DNA, 564 bp, Zea mays
  Peptide Sequence Number=SeqID_62558
atgaagaggatttccgggaagaaggagctgggtgtggtgctgcgcactccctccatctcctttgactgtgcagtggtcgggatggtcgtcgatggtgcctttggggtcacgcttgtcccaaaagtgcatgcttctcttcgccgagtgatccaagtccatgctcgagtgggtgatgtggacaacggagtccgtcgggtcggagggcttatcggtggaattcttattgttgctgtttgtggcaaccctacagtcgcttttggtgccactggggaagctttcttcctgggtgggtccgctatgcggtgcaagatgcctccccgatctgtgatgcaggagatggatccgaagtggaagatctctccagcattgaaggtgatcatggtgttgaaggagtacgaggattacaagatgaggattgtggatgaagatgagctggaatgtgaggtaggtgtgaacccctcacagtcaccatcatggctcctccacaatcttcacggagagctcgacagagacaccaccaagccatctatgaggcgacaacctctaagagtaacaagacgatga

SEQ ID NO: 20780 - DNA, 378 bp, Zea mays
  Peptide Sequence Number=SeqID_62559
atggaggagacacccatttcagttctgatttcctttctcatgagggttttcctcccatcttgtggggaagtgctcaactccgccgggttaccctacgccccctatgtacacagtgcggctctgggttggcgttcccttgactcccagataattggatttaggacggacgacaccactgaagcggaagctatgaagaccttgacgactttctatggctaccatcccctggagatggtgatgcaccccttgggacttttccctgctgagaagaaggacgaccccttgtggtgcaaccgtgtgagccatgtgaaggatgtatgggtgatgtatcttgacttggttgggaggatcaccgttcagtgcatgagtgcgttgtag

SEQ ID NO: 20781 - DNA, 231 bp, Zea mays
  Peptide Sequence Number=SeqID_62560
atgggggaggcgaggagcccgggggcgagctgcacgccgaggtggcgaatgggcgcatggaagacaggagctcggctggtggcgccctgcacgcggcgtgaagggagcccgtacacccgcgcaaaggatgaacccaaacctccaccgcgcgcgctatctacctctgctacacgggggccccttgttagccgcacgtcccaggtcccgttccacaactcgacgccgacctga

SEQ ID NO: 20782 - DNA, 111 bp, Zea mays
  Peptide Sequence Number=SeqID_62561
atgtggaagcttaaagagcaaggccccaacccatttatagccgttggacagaaagcagtatctttctatcgacaggcgcaccagacaggtgttgcatcctcattgccttag

SEQ ID NO: 20783 - DNA, 300 bp, Zea mays
  Peptide Sequence Number=SeqID_62562
atggccgacgaccaacgacaagtgtgcagtgacacacaccatggaccgggaagagccggagacgacgtgcatgaacctcaggggtattcgtggcgtggactacacgccacggcgaggtccgagaatgctgacgaaattccggatgtcgagaacggtggatcagggacgagcaccggggagctcacgcgtttggctgacgggaagctgagacgagcgcgtgtgaagaagctcgacgccaagctgctgttgttctggcgtcgagaggcgaggcgatggagagccggcgtgagggatagatga

SEQ ID NO: 20784 - DNA, 1551 bp, Zea mays
  Peptide Sequence Number=SeqID_62563
atgttctcgcacggcgctgattccgcccacgacgccggggccgtcggcgtcagcagcggcggggctaccgtccccacccgcttcgtctggccctatggtgggaagagggtcttcgtctcaggctccttcaccagccccctccctgtgaatcatcgctattctggtgcgcctaacagctacaccttttgtcgtaggtggtcggaacatttgccgatgtctcctatcgaaggctgccccactgtatttcaggctatttgcagtctgtctcctgggattcacgagtacaaattctttgtggacggggaatggcggcatgatgagcgtcaacctaccatatctggggagtttggcatagttaacacactttacttgacaagggaatataaccaaataaataccttatcaagtccaagcacacctggaagcaggatgaacatggatgtggataatgaaaattttcaacgtacggttacgttgtcagatggtaccgtttcagaaggtactctgagagtttcagaggctgcaatacaaatatctaggtgtcgtgtttctgaatatctgagtttgcatacatgctatgatttactcccagattctggcaaggttattgccctagacattaatttacctgtgaagcaatcattccatattctccatgaacaggggattcctgtagctcctctctgggactcattcagaggtcaatttgttggtctccttagcccattggatttcatactcatattgcgggagctagaaactcatggctcgaacttgacagaagagcagcttgaaacacacactatatctgcatggaaagaggctaagcggcaaactaatggaagaaatgatggtcagtggcgaccgcaacagcatctagtgcatgccaccccttatgagtccttgagggacattgcagtaaagcttttgcaaaatggcatttctacagtgccagttatttattcatcatcatcagatggatcattcccgcagttattgcatcttgcatcactttctggaattttgaaatgtatttgtagatacttcaaaaactcaactggtaatttgcatattctgaaccaaccagtgtgctccattccgctgggttcctgggttccgaaaattggtgatctgaacagtcgtccattggctatgttgcgacctaatgcatcacttagctctgcccttaacatgttggttcaagctggagtaagctcaataccaattgtggatgacaacgactccctgcttgacacttactctagaagtgacatcacagccctagcaaaagacaaggtctacacacatgttcggctggatgagatgaccattcaccaggctttgcagcttggacaagatgccaatacaccttttggattctttaacggccagagatgccagatgtgcctccggtctgatcctttgctgaaggtgatggagcgactggctaatcctggggtgcggcgggtgttcattgtggaagctgggagcaaacgtgtggagggcatcatatcactaagtgacattttcaagttcttgctgagcttgtga

SEQ ID NO: 20785 - DNA, 474 bp, Zea mays
  Peptide Sequence Number=SeqID_62564
atggagcattcctcgaggccgaccctggggtttcccctgggaactgctctcctgctcctcgtcatctttgccctgagcggcatgttctcgtgttgctaccactgggacaagctccgcgccctcctccggtctcggcatcccgacatgttcctggaggccgaggagcatacggccgtctccgtggcgtcgtcatcgccgccgagaaaggcggtttctggtcacaagagaagagttacatatagcaagcttgagctgagaatcatttgcagctggagagatcgggggaagagcgcggtgtgcccgttattattatgcctggagacaaggtccccaagttcttggcgatggcgaggcccagccctcgcggccccgaagcagcagcagagaagaccaccgaatgtcgggatcatcaggaaccctccgtcagtatctgtatacatgatgaaagcacagttagctgttagcatgatttga

SEQ ID NO: 20786 - DNA, 1077 bp, Zea mays
  Peptide Sequence Number=SeqID_62565
atggagcagatggcaatgcggggtgctctggaaatcgcgaagcctcataaggggtccatttgtggtgttgggacttgtcttgctcctgcaaactgtacaaattcatgtgccagatattctgattttcatgaagatggcatcatcagaatgatgttgtgccgtgtaataatgggtaatgttgaggttgttttgcctggatcaaagcaatttcagccatccaatggaagttttgataatggtgtggatgatcttcaaaatccacagaattacatcgtatgggatgctaatgtgcataaacacatatatgctgaatatgctgttattgtccaagcacctctcgtgaccaatgaatgttcgggcttgaaggatagcgtgcccaacatatctgagatcataagttctggttctcgagacaatctaaccaaggaggataggttcgcgccttgtggtgtcgaacaagaagcacctaggctggggcgtgctccaagggccccctcctcaccatggatgcccttttcgatgctttttgctgctatttccacgaaagtgcctcgttcggacatggagttggtcatcagatactatgaagaattcaaggttaggaagaggatgagccggagcgacctggtggtacggatgaggcaaatagtcggtgataagatattggtttctacaataatgaggcttcaccaccagaagaagaaggaagctaacaggggtggtgatgatggatttttgcagcccccatcgatggcagcagcagcagctgggctagcaagagcactcgcaaggggggaagagggagggggagtagccgaattgaatcgcaaacaccctacaatagcgctcccttcagtttccgcctctgccgttgcccccttgagcaaagaagttgacagactcatcgccgacgagcgtcaactatccagctgtcgttatccagtggccaggtggcgccggcgacgagtcctcaacttctctgtgctcaaggttccggtgggggcctcgtcgaatccccttgccgacaccccgtacccagaggccacgcgtgagcgggtcacgctccgttccatttag

SEQ ID NO: 20787 - DNA, 558 bp, Zea mays
  Peptide Sequence Number=SeqID_62566
atggacgtcgcctccaccgcctcctgcttcaacaccgtgatcgctgcggttgctgagtccggggaacacccagcccaagccatcgaggtagtgggcaccacgatggacgcattgacgtcggtcaaggaggtgcacggctttgcagtgcggcaatgcatagtctcagagggtcctcaaccaggttcatgttcgggacgtggttgtttggagctctctggtttcagtttacgctttccatggtcgtgcaatctcgcttttccaacacatggaggaccaggagatatggagtgggagcttgtgcagatcattattcgtgcatggtgtagacgtctacagctacatcaagcttatgaacttatacggacaatgccagcagtaaaggttacagcaaaagcctgggagctcttcttgctgcatgcaggaagcatggggatgtgcggttggcagaggttgccgggagagcattgcttgagatcgaaccagagaatgcatgaaattttgtttcgcttgcaaacatctactcggatcgtggcatgcatgaggatgcagagcgggtga

SEQ ID NO: 20788 - DNA, 402 bp, Zea mays
  Peptide Sequence Number=SeqID_62567
atgcagcgccgccgcctcacgcgcgccaaggtcgtcgcgctcatggtcatggccagctcggcgctcgtcaatgttgtcacggtcgcccaccatcctcacccttccgccgtcgcgggtgctgctcgtgttctggccccgaggagttttcttgttgagcagttctggtttatgagggagctttctcatatctcgtcagagtttgacaatgttgttcaagttgtactggaaaactacaaacctcagaagatgcaaaatgatgatcagggtaccaatgatgctgacagccagttggtgcaggaagaccagaaggctgagcaccccccttcccctttcattatcactgtggccccctcttgggagagcatagttaatattaagggagaagtcagcctaccagagtaa

SEQ ID NO: 20789 - DNA, 510 bp, Zea mays
  Peptide Sequence Number=SeqID_62568
atggagggaggtagccgcgcggatgggcggaatccgaaccagctccggccgttcacctgcaccgggaacccgctccaccgcgcccacggctccgcgcggtgggcgcagggcgacaccgtcgtgctggccgctgtgtacgggcccaagtcgggaacccggaagggcgagaaccccgagaaggcctccatcgaggtcgtgtggaagcccaagaccggccagatcggtaccctgctcttcccctcgagttcgcttcgccccacggctgcgcgtgttaccgggtcactgaaatggcgagttgtttttgcaggaaggcaagagagggaatatgagatgacactcaagaggacgttgcagagcatctgcttgctcacagttcatcctaacaccaccacctctgtcgtgcttcaggatgactatttcaactgcatagagaggggtgtcatggcgtcctcgaggatctcggatttcatgaggaagacactgcagaaggaggcttccagggatgcctga

SEQ ID NO: 20790 - DNA, 447 bp, Zea mays
  Peptide Sequence Number=SeqID_62569
atggcgccccaaggcccaaacgacggcgttgcgggcgggcaattcgtcgaacatgcggcgggtgagttcgtagaaggctccgccactgccgccgccgtgtgtgccgtaggacgcgatgagaagggacacgaggaaggggctggagaggaggccacacttggcggcgagcgcgtggaagcggcggcggcgctgggcacggagcgcggtggtggacttgagcgcgagcgggaagacgtgggcaggaccgcaggaggggtcgatgagcggcgggacgtcgggggcggtaaacatgcaggaggaggcgccgagctcgttgcggtggcgggcggcgttcacttgggtggtcagcagcagcttcgtcaggcgctggtggcgggagccgggagggaaagggcatcgtttttgagtttgagctcagcccgcacgatggtcggtgaacgactttag

SEQ ID NO: 20791 - DNA, 999 bp, Zea mays
  Peptide Sequence Number=SeqID_62570
atgccgcggccgccgtccaagcgcgtgaagcgagccgagccctccagcgacgaggtggaggaccgcggcagcagcggaagcgaagaggagagcttcagcaccagcggcagcgacagcgatgacggggaggagtcctcggaggagctcgagacggtgcaagcggacttcgccttcttcgaccccaagccgagcgacttccatggcgccaggctgctgctcaagacgtacctcgactctaagccctgggacctcaccggcttcgctgatctcatcctcgcgcagaccactgtaggcacggttgtcaagttggccgatgacgaggaggaggaaggggaagggaacggtgttcagaaggccaattctagtactaacaatgacgacgatgatctgtttggtctcattagcgtgctcaatttgggacaacacgccgagcaaaaatgcattaaggatcttaaggagtatctgcttgatgtctgtcccgacaaaggtactaagaagcagctcagatctctgcttgaagagaaagcgtcgagcgtgggcctgctggtgtgtcgccgctttgtgaatttcccttatgaactcgtgcctaagctgtatgacgcgctctttgacgaggtttcctgggcaacagaagatgagccaacacaagaactccaggactccttccggttcaagcactacctgttaatcgtcagaatgcttgagaagggcaacccaggtgcactggtgagagttatctcattgagttaccagaggaagacccctccaaaacataaatcaaaggcgaacaaagatgatgacgaacctattatctatccaaagtttgaggatgaaatttttcacgagcttagctcatggtctttcacttttccaatacgttctgaagagtcagctcagcaggagatgaagaattacaaggagatgggcttagtgatggcaattaaagcaggcacagttccgaagttcagaaagaagctgggggatttggtgtccgaatag

SEQ ID NO: 20792 - DNA, 228 bp, Zea mays
  Peptide Sequence Number=SeqID_62571
atggacccttacttcaaagtctctgctgacaatgttcgaaggcaaggcaagcagccgaaaaggctgtggatattagaaaaaacttcagagcaaaaaaacctgaaggtcgtgattgatgtaaaacatactgaagctgaagctaaagatgttgctgctgaagccaaggccatttctgctagagctatagagaaggttgaagatgatgcaaccttgaagatctgcgagtag

SEQ ID NO: 20793 - DNA, 318 bp, Zea mays
  Peptide Sequence Number=SeqID_62572
atgacgacgtttcatagcatgtgcgcaccatcgttttcgccgtcattggacgtcccgtttgtattctcagccttcgccctgttcttcctccccaacctgctacccacgcctactgtcgcaatcgcgagccgactaacgctcgtcgacgcgggtacaggcggtatactacctatgtcgcctctagatgcccaggtcttcattgtgttcttctccggcaacaaacaagatttggagatccatgggggcactaccacagggtgctcgtcccttgtgttcttggctcttgcatgtatttggtcgtttctaagatcacattag

SEQ ID NO: 20794 - DNA, 264 bp, Zea mays
  Peptide Sequence Number=SeqID_62573
atgccctatcgtagtatcgccctccgctgtcccttccatggatgtgcgcttgtgattggagagacggagaccggcaagccactacggctgcggaaggcgccgacgagggccaaccttctccggtcatctccttccccaaggccccaagctaggtcgagcctcaagcgccaggcgcgccaccgccgcggagcagccaagccttcaggtgcaacgccgccgccctcaactctaggctcccaggggcgccaccagccaccaggctag

SEQ ID NO: 20795 - DNA, 204 bp, Zea mays
  Peptide Sequence Number=SeqID_62574
atggccacgcgctccagcctgccgcacggatccaacgcccgtgccacgaatctcgccagcgcgctattagcggatcctcaaccacctctcgcgccctcgctctcatcctctcactggagcgcggaccggcatgtcagtcttcccctcaacaaacaagccgccaaccgcgggagctgtggcgatcttcttggcctactccgttga

SEQ ID NO: 20796 - DNA, 630 bp, Zea mays
  Peptide Sequence Number=SeqID_62575
atggcgcctcctgttgacgtggttggtccgtgccctgggttggacgaggtggagactcctccgaggtcgaggtcgagtctgtcttccaaggccgaggtcgagtccgagcccctgggtcgggcgaggcggagaccgtcggctgaggccagggctgagtccgagccctggggtcgggcgaagcggagttcgtcgtcttccagggctgagcccgagtccgagccctggggtcgggcgaagcggagttcgtcgtcttccggggctgagcccgagtccgagccctggggtcgggcgaagcggagttcgtcgtcttccggggctgagcccgagtccgagccctggggtcgggcgaagcggagttcgtcgtcttccggggctgagccctggggtcgggcgaagcagagttcgtcgtcttccggggttgagcccgagtccgagccctggggtcgggcgaagcggagcttcctatggcgcctgaggccggacttggctgctgtcagcctcactctgtcaagtggcacaacagtcgaagcggcgcaggcggcgctgtcctcttgtcagaccggtcagtggagcggcgaagtgactacggtcacttcggctctgtcgactggagggcacgcgtcaggataa

SEQ ID NO: 20797 - DNA, 408 bp, Zea mays
  Peptide Sequence Number=SeqID_62576
atgggcagcattgtgagcgcggggaaaagagctcatggggatctcatctgtaagctacttgcctcgtcggggtcctgctgtcgggttgaggagcttcgcccgtgccctagggaggttgggatagcatcaccgtggttgaagggaccaccatgtgccctgaatttctcacctggggtcggcatcgtcgcggtccgccgcgtgctgtgtgcaggacccctactgctccaatccgagatcatatctgcgcgtgccggttcgacgcctcaatctaaactgttaagaccgacgtggagggctaggatcaaggcgggtcttcattcaatgtggaccgttgatctttccgcgggtgactgggatggcataggggcattccagcttggtgatttaatctggcgcgacgaaatctga

SEQ ID NO: 20798 - DNA, 333 bp, Zea mays
  Peptide Sequence Number=SeqID_62577
atgggcagcattgtgagcgcggggaaaagagctcatggggatctcatctgtaagctacttgcctcgtcggggtcctgctgtcgggttgaggagcttcgcccgtgccctggggaggttgggatagcatcaccgtggttgaagggaccaccgtgtgccctgaatttctcacctggggtcggcatcgtcgcggtccgccgcgtgctgtgtgcaggacccctgctgctccaatccgacgtatgcttcctaccacggcgatcgccttgttccatcctgtgcgtaaaacccatcgtctctgagagtcgggcactagaatacgcgggcggattgccctga

SEQ ID NO: 20799 - DNA, 309 bp, Zea mays
  Peptide Sequence Number=SeqID_62578
atgggttttacgcacaggatggaacaaggcgatcgtcgtggtaggaagcatacctcggattggagcagcaggggtcctgcacatagcacgcggcggaccgcgacgatgccgaccccaggaggcgccagggccggctatttatggttccgggcgagggagtcagggaagcgcgacgttggtggaggaaatcccgaactccatgggggggctggaatgcggggatgggagacagacaagtgggacacacctgtcggtgcagggtcatgcagccatctattaggtcagatgaggtacggttatggcaagtag

SEQ ID NO: 20800 - DNA, 816 bp, Zea mays
  Peptide Sequence Number=SeqID_62579
atggcgtccaattccgcggccccggctgccgccgacgggggcgacgacctcgaccagctcctcgacagcgcgctcgacgacttcaccagcctcgacctctccgcatctgccgcccccaaaagcgccggtgaggcatcggggtcaggatcgggaggcaaggggccggtgaaggggctggggctggggcttccggaccccaaggtgccgaagcggcgcgcggggaagcagccaccgccgaggggcgcgtgcgccaaagaggcgcttgaggagctgacgcgcgagacgcgggaggctgtgcgcgagctcgagacggccactgggggtgttccgtcactggacgatgacgccatgatggaggagttcgtcaaacagttcgaggactacttatcttccatttctctcggcacgtcatggtttcaatctggtcaagggaagaaggaaaatagtggagtgctgctagcaggccagggcctgagcggcacaatgaccatgggggatatggactccattgttgaaacaatgatgcagcagcttttgtccaaggagattcttcatgagcccatgaaggacattgtggaaaaatatccaaaatggctggaggataataaaaacaagataagcaaagaagaatatgagcgttataataatcagctagaactcatggtgaagcttattgaggtctatgaaaatgatcctgagaacatgactaagatttttgacatcatgcaaaacatgcaagaatgtggtcagccccccagtgatcttgtccaagatactgtacctgatctggatctgagcaagttgggacagctgtga

SEQ ID NO: 20801 - DNA, 591 bp, Zea mays
  Peptide Sequence Number=SeqID_62580
atggggaggagacctatgggctatgggcgctgtcgtggctgtcgagggggggagcagatgggcatcgcgggtgccaccacgggcaggggcattaacctacatggtacaacctacgaaaagaatgaggatggggaatctaaatctgtttcatgtctataccagcaggccagaaaccagtgtactaatgtgtttgaacttcattacaggccttcagtaaaaataccagtctctgttatgatgccggtggctcatgttgtagaatggacttaccagaaatttgccaagtatggaatgaaagttcctcagctgaccccttcaaggatcaggctgctttcatgtaacaggacattcagttgctcaagagcaaaggagcagcttggttatgaacctctcgtgtcccttaaggtttcactatctctgctggttgtcagcatccttagttccatgtcttctcaggctgcatttaaaataggttcgtctctggtttcaccagcatcgaaagcgtatgagaaatggagggacagcatggatgttttgggggcgcggccagtccccttcttcggcgctctgttcggccaaggaatcccctag

SEQ ID NO: 20802 - DNA, 273 bp, Zea mays
  Peptide Sequence Number=SeqID_62581
atggagccactggacgccaacctggccgcggagctgggcgccgccgtgcgcgtgccgcaggagcggttcggggagttccgggccgaggacgtggcgcgcacggtgcgcagggccatgcgcggggaggagagccgcgcgctcaggcgccatgctgcggagctgcgggaagtggtggcgcggaacgacgcggacgacgcgcaggtcgccgcgcttgtgcagcgcatggcgcgcctctgcggcaagggacagcagcgtgtggccgtgcccaactga

SEQ ID NO: 20803 - DNA, 396 bp, Zea mays
  Peptide Sequence Number=SeqID_62582
atggcagttggcgttcaatttggactatggaattcaattatgagttgcagtttgttgatattaaaggaaatatacaggttggcttttttacttaacaaggtagatgctcactattttgaagagggaaatgtccagctggatactaacattgatcgcaaggactccaccataatgcagtcacctgacgactgtgcagtttcaataactagcatcattcgacatcacgagtctgaatatttgtcatctctcgaggaatcttacttaaatttgtctgatgcaactttcaaggatcttcggagaaaacttccagtgacccgtactcttttcccatggcataacacactggcagtcagtcttacgagagaccttgccaaacaattagcgcttggaaaatga

SEQ ID NO: 20804 - DNA, 909 bp, Zea mays
  Peptide Sequence Number=SeqID_62583
atgggcaacctcatctcacagttactgtggaagagcaccagggacggtgtatcagaggcgcacacgaagcggctcgatgggtcgccggaagtggtggatctcacagtggagccagagcttgaaaataacgatgccgtggggaggatgtttggagaccggagcgtccctgcactggggtcatcaaagtcgccggagaagaaggcaacgttctacgaggagccgcacggtagaagattacaggagtcaggattcaagaagctcaagcttgccgagctgcctgatccgctggacaatacgtctaaggaggatctatctgaactattcacacctctaagtgacaaagacgaaagagaagtcaatgctctgttgtgtagtagtgatgacagtgataaaatcgtagtgatacatacgccttctaacatcgagattactaaagagaaacttcaatgcttgaggcctcgtgggtggttgaatgatgaggtcattaatctgtacattgaactgttaaaggagagggaaaaaagggaacccaacaggtttttgaaatgccatttcttcaatacattcttctacaagaggcttacttgcggaatagctggttatgattaccagtctgttaggagatggacaacattcaagaggctgggttatggacttgtcgagtgtgagaaagctagatacatcgtggatgaattgaaggacaagagtaacatagaggtagaacctagttcgtggactgtagtgtcagagtctttgcccttgcagcagaacgggtgggactgtggcatgtttatgcttaaatacattgatttccatagcagaggtatcaaaccatctttcagtcaggaacacatgatgtattttaggaaacgaatagcaaaagagatcatggcattaagagccgactga

SEQ ID NO: 20805 - DNA, 123 bp, Zea mays
  Peptide Sequence Number=SeqID_62584
atggagctctttggcgacggcgacgacgacaggccaacgctctcgtccaacctcttggacttcatgcgtgttgatattagccttacatgttccataatccatatgcctggacacaatgtttga

SEQ ID NO: 20806 - DNA, 1209 bp, Zea mays
  Peptide Sequence Number=SeqID_62585
atgtccgccgagcccacctctccgcctctatcgacggcgcaggtccgcgggagcctcatcccgccgcttccagacgacttggctgtccactgcatcgctctcttgccgcgcgccgcgcacccatccctggccctcgtctcccgcgctttccacgccctcctgtgccgccacccggagccgctcctcgccgcgcgccgcaccctccgctgctccgaaccccacgtcctcctctccctccgcccaccctcctccgcgtcccctatcttcttcctcctgctcccgcaccccgggtggcccccgctcccgcttccctcccctcccgtccccgtctcgtcctccgcgtcggccgccaccgacggcgcccggctcttcctcgtcggcggatccgtatccgcggtcccctctgcgtccgtgcagatcctggacccccgggccagatcctggtccgccggcccgcgcctgtcctctacgcgggagttcgccgcggccgtcgcgcactccggggcgctgttcgtcgccggcggctgcatcccctcgtcccctttctgggccgaggctctcgacctctccactccgaacgccaagtggagagccgtcgccagcccggcccacctccgcgagaagtggatgcacggctgcgcgtcgctcgacgggaaggtcgttgtggtggcggaccgtggcggcttgtcctacgatccttcggcgccacctgcggaggcgtgggcaccggtgtcgccggtgcttgacatgggatggaagggccgagctgcagtggttgagggaatcctctactcttacgattacctgggacaggtcaaggggtatgatccgtacactgattcttggagcacagtggaggggttggagggggagctacctaagttcttgtgcggcgccacacttgccgatgttggaggattgctctacttggtttgggaaggaaagtggaaagggaaattaaaagaggttcaacgatcacacattgcattgcattggagttgtgatgcagcagatgcagatgtaaagcaggtcaccttgatcagcattttaaaagttccaatttcttcattcagctgtactgctgcctgcttgcgagaagttccaacgatgattcaggcggtttgttccacttatattggctttcaaggcttgctggctaacggaacaatattcccgaagtatcgcaatgccttcatcgcaactccttga

SEQ ID NO: 20807 - DNA, 3093 bp, Zea mays
  Peptide Sequence Number=SeqID_62586
atgggaagcccaacgattcacctcgcgcacgcctgcatttactccaaactcttgggaattccaacaggcggccgcctacatcggctacttgcggttgcgcttggaaactgtgactttatttctagtgtttttctgcgcttgcatgctagctgtgacttgcatccgggcgtgaattgcacaaacgattgggctgactacaagccgctaggtatcatgagcaacgacggcaccatgagcgctgcgggcgaagacatggaagctaagcccaagcaagatccactgctggaaatgatggaggccgctgtacgccattgcaatttggatcttagctacttgcagagaaaaatattctcctggtccatccaagacgtcttcaacaaggacctcctcaagcaacaggtccgcaggattccagataccttcatgctgctgaatgcctacttggactcatttaccggccctctgattgaagaagtacactgtgacgtctttttgtcactgagcggttatgctcatgccaacttcatagagatagtccgactggataagcttaatcatgagaaatcaatatatggtttcgtggtttccatgccttccaaggacgcaaagtcgagggagatttatgcccccaaagaaggcgatatagtggttgtgtccttgcagaaaccgaagcatgtgtctgatctgacaaagaacaggtcatcttacaatctaggctccattctgaaatctggaaaagaagaagaagaagatagcgatttgccgccaaatttctgcattgttaggtttctgtcagctattcctgtggaagtagatcctgaaacaagcaagcctagagggccatgttttgctgtctttctcataaacaccacgacatatgaccacatatggacgtgccttcacttggtagcaaatgatcataatcttgcaccactccagaagagagggtctaataccgctattgtcaatctagtgtggcaatacaagcgtcgggcagctgaagatggtagcttgtcattctcccagctctcccaaagtgtcactcagtcagttgatgaccttggcctcgagaagttcggcctaaatgattcacagttgcatgcagtagctgactgtgtcttgtcagcaatagacaaccggttgccttccctaaaactaatatggggcccccctgggacaggcaaaacgaaaaccatctgcactatcctctgggcaatgctcatgaagggcttaaggacacttacctgtgcccctaccaacaccgctgtattggaagttgcatctcgaattgtcaggctcgttgagcatctccatggcagtgtctgctttctcaatgacattgtcctgtttggaagcaaagaaaagatgaaaatcggccgtgaggacgccctttccatggtattccttgactctcgcgctaaacgactgctgccgtgtttcatgccaaccacaggctggatgcattgtttgcgctcactaatggaccaccttgagagtcctattacccagtacaggttgcatcttgagaaattactcaaaaatgaaaagaaaaaggagagcaataagggaggttctagagcaacgcagggtacgatcattagaataccgccattcaaagatttcttcaaaggttatttcaacaaggtgtcaaatttgctgagaaagtgcgttgagacaatgtacaatgatcatccacgaagtccagaaacaggacacagctttcagtgcatgctggaggtgcttgagttgattggaattcttcaggagctgataaactgcaaaaacgatgacatatggtcagatgaatttcatgattgcaagatagaagatgacggtgaccccattctgtggtctgagcagctagcccatgtgcggagtaacactagcaaaaagcacaaactaaagctagctagatccttgtgtgtgcgagaattgagatatcttcacaaaaatctggagcttcctggttactccagcaagcgatcagttgagacttacttgctgcagagagcaaaatgcattctctgtacagtttctagttctttcaggttgtacaacgtgcccatggatagttcttgtacagacattcacagtttgctcaaagggcctgaaacgttcaagcttttggatatgctgatcgtggatgaggctgcacagctgaaagagtgcgagaccttaatccctttgcagctgccaggcataaggcaggccgtgtttgttggagatgagtatcagctgcctgctttggtgagaagcaaaatatctgatggcgcaaacttcggccgaagtgttttcgaaaggctaagctcgctgggttacgggaagtaccttctgaatgtgcaatacaggatgcatccagagatcagcaggtttcctgttgccacattttacgatggcaagttatctgatggccccaacgtcactagtatgagctatgagaggacgtttttggcgagcaaagtatttggaccgtattcctttatcaatgtggatggggggcgtgagacaactgagaagcatggcacgagccttaagaacacagtagaagttgctgcggtcttgcggatagtgcagagattgttcaaagagtcagtatctacaggttgcaagctctctgtcggtgttgtgtcgccgtacaatgctcaagtcagagctatctgtcaaaaagtgggggaatcctataatgcacacgatggtttctctgtgaaagtgaaatctgtggatggtttccaaggcgcggaggaagatgtcctcatcatatctacagtgaggagcaatggagctggttctgttgggttcctcacaaacctgcagaggaccaacgtggcattgacaagggctaagcattgtttatggatagtaggaaatggagcgactttgtccagcagcaagtcagtttggcagaaaatagtgaaggacgcacgtgatcgaggctgctacttcgaagccagcgacgatggggatctgtcgaatgcagtcgtcaaggccatcattgagcaggacgatgccgataatttggtgaggatggagtcgctgcacataagcaggccgaggtctcagcttcagaaatcaggacctaagaacttttcatga

SEQ ID NO: 20808 - DNA, 246 bp, Zea mays
  Peptide Sequence Number=SeqID_62587
atgaagtgtggatcactgtcaagaacctccccaatggcaaagccccatgaccggatggcttcactcgaaagtttttacaagatttgctggcccataatcaagagtggcttgatgcgagccattgatgcacccagatgggtcgagcgcgtgggcgagcgcgaaggggggagaggcgaggtggccggagtcgagtgtgagagaggtggaagtcccgcggccttcgtgttcgtcccgcgcccaggtcag

SEQ ID NO: 20809 - DNA, 2283 bp, Zea mays
  Peptide Sequence Number=SeqID_62588
atgcgtgccgcgagccctccgctgccgtccctgcaccaccatgacccggaccacctgctccgcctagtggacgatctctgcgcgtcgggccgctccgcggaggcgcaccggcgcgcgtccctgctcctcctctccccggcgagccgtctccacgcgcgtgccgccgatgcgctcctgatccgcctcctgcgcgcccgcacgccgctcctcacgctccgcctcctccaggcgctccccgccgccgcgaccgcgcccgcgccctccctccccaaccgcaaccgcctgctcgcgcacctctgccgcgcggggcacgtgctcctggcgcaccgcttcctcctccgcatgggcgcggctccggacgccttgtcctacgccgcgctcctcgacgggtacgcgcgggcgcccgacgctcgcgccgtgcagaggctgctcgacgaaatgcccgcccgcggggtgccgcccacctccctcgcgcgcacgttccttgccaaggcgctcctccgcgcccgcgacgtcggcgcggcgatggatgtcgtcgacacagccctctggcccagcgcggcgggcggcgatcggctccgtgaggaccaggaggtcaccagcgcggcgttcgccaacctcgtgcagtgcctctgtgccgaggggttcttccacgttctgttccgggtcgccgaggagatgccgcagcggcggtgcggcgtgggcgacgacttcgcgtacgcgcagatgatcgactcgctgtgccaggccgggcagcaccacggcgcgtccaggatcgtctacatcatgaggaagagagggatatgcccgagcgccgtctcctacaactgcattgttcacgggctgtgcaccatgcccaagcctggcgcatgcctaagagcgcaccagctggtgatggaaggcacgagttttggataccgcccgagggaggtgacgtacaaggtgctcgtggacgagctgtgccgtgagaatgagctcgccaaggccaaggatgtcctggagctgatgctgcagcccaccgtccagtgtggccaggacagtggtggagatgcgggtgaggagaccaggacaaggatatacaatgtgtttcttggggcactgcgtgttgtggacaacccgagcgagcagcttggtgtgcttgtttctatgctgcaggctggatgcaagccggatgtgatcaccatgaacactgtcatccatggcttctgcaagtccaggaggacccaggaggcaaggaggatcatggacgacatgctcagcgggaagttctgtgctcctgatgttgtcacctttaccacactcatatctggatacctgggtgcaggtgatcatgcacaagcccttgatgtactgcgctctttgatgcctaggcgtcggtgctctccaactgtcgttacttacaactgtgtcctcaagggattgtttggcgttgggcaagttgatacagcaatgcaggtgcttgaggaaatgagtgccaataaggttgctgctgatcctgtgactcatactgtggtgatcaaagggctctgcgatgcagggctgctcgagaaggcgaaggaattttgggacaatgtcgtctggccgtcagggatacatgatgattatgtgtacagtgctgtcttcagaggtctctgcaaacagatgaaactggaacaggcatgtgatttcttgtacgagttggttgattgcggggttgctcccagtgtagtgtgctacaacatactcatagacgctgcctgcaaacagggatcgaataagttagcatatcagctagttaaggagatgaaaagaaacgggctagcaccagatgctattacttggaggattcttagcaaactgcatcactatgacgaggaagaacgagaggggaaccagcatcaaatgtttgatgtggatcgaatttctacagaaggcagagaggagcgtcttgtcttgactaaagataagatgcctttgctgccgtcatctgaaaattttcatggagttaatgaggatgataacgctgctgagactgaggaagagattgactatttaccagatatggctagtaaatctgaagccgaggaggttggatgctcaacaaaaatgacagtggaggaggcaccagataatactaagcaaaccaaagaacagggcaattgtctgagggataatccaacaaggggaacaacaattgacaaagctgatataacatggggagatggccttaagaactcggataatcaaccttcagtaaaagagccactctctacagtggtaagaaaggtgtttgggctcctgtag

SEQ ID NO: 20810 - DNA, 990 bp, Zea mays
  Peptide Sequence Number=SeqID_62589
atggctctgaccattgggttggctgcagctgctagtgtcatcctattcttgttcgtcctagccaccgccttgttcatctacaggaggcagaagaggaccgccgccacggtggcggaccaagagtccaacaaggacgacgaaacggaaggcgtgttcaggttcttcagcaaggcatcggctggacccaaacggttcgcctacgacgtcttggccgctgccaccggcaacttctcagacgaccggaagctcggggaaggcggcttcggatccgtgtacagaggcttcttggcggagctgggcctatctgtcgccgtaaaaagagtgtcgagcagctccacgaagaggaggaaagagtacgcctccgaggtgacgatcatcagccggctgcggcaccgcaaccttgtgaagctcatcgggtggtgccacacccacaatgagctcctcctcatctacgagctcatgaccaacatgagcctcgacatgcacctttacagtgcagagaataatgtactttcctggcggcgcaggtatgagatcatcctcgggatcggttccgcagtcctgtacctgcatcaggactgcgagcaaggtgtagtgcacagggacatcaagccgagcaacgtcatgctggatgcctccttcaacgccaagctcggcgactttgggctcgcgaggctggtcgaccacgcccgtggagcgcacaccacggagctcgccgggacgatggggtacatggaccctgcatgcatcagcacaggcaggttcagcacccagtcggacatgtacagcttcggcgtcgtcctgctggagcaagacccgaccctgaggccgtccatcaggcaggccgttagcgcgctgcgggatgaggccccgctgccgacgataatagtaagcaaggcgccactgctggttgagcgattgggctctcttccgtcgtcattcgttcctgatgaaggcagagtgaccagtagaatgacttccacctactaa

SEQ ID NO: 20811 - DNA, 288 bp, Zea mays
  Peptide Sequence Number=SeqID_62590
atgccgatgagatttatcaagaataagaattgccaaccacttttactgtcgatcagggaagaggaggaggtgcagtgccacgacgaagaggttgcagccatagatgccggggtacagggccatgaggaggaggaggtcgcgggcatagatgctggggtgcccaaggttcacaacaagccaataaaaagaccaaagatgggttcaaataaagagagccaaagacatcccaaagcctgtgcctctggcatgtcgttcgatggtgtcagcgacattcgagcagcactctaa

SEQ ID NO: 20812 - DNA, 768 bp, Zea mays
  Peptide Sequence Number=SeqID_62591
atggacacggcaccaggtcctaggtgtggttggcaagcaaggccgcgtactccaaagcgcgacgccaggtcggcgaagcgggccgcgctcgtcgacggggccgtgcatggcgcaggaggggtcgagggggccgcgcgtggcgtgggtagaggcgtgagcggaggcgtcgagaccgcgcgtggcacgggtagaggcgcgagcggaggtgtcggagccgcgcgtggcacgggcaacgatgcaaggtggggcgtcagggatggagggggaaccggatcggactcaaggagagtcgatatcggtgggtggggaggagccagcaaggggaaacacatcttcgtcgaaaataacatgacgagagatgagtatgaggtgggagacgaggtcaagacagtggggccctgcccagtaactggcagggagagacgcctagaagagaaggcaagtgggttgtgcagtgagggcagcggggagaacaccgagggactcaaggccggcaatgaaggggcccccgtccctggcgagttcgcgggtgtgggagaggaagagctcactgcccgcgccccagcggggacagcagtccagtgcccaagggggccaacaagccgaggaaggagaggaggctcgctgccacgacgacgcgcgcagcgacgtcagcacccgcggtggctacacaagcagcagagtcagcgctcgaggaaggtgggtcgatgggttccatggtggcgtatgcacagggagaagcggcggtcggtgtcggggcgggcctag

SEQ ID NO: 20813 - DNA, 219 bp, Zea mays
  Peptide Sequence Number=SeqID_62592
atggcgatgggtcacgacgaggggcggcgcggcgatgggtcacggcgatggggcacggcgaggggcggcgcggcgatggggcacggtgaggaggcgggggtcactgacaaagcaaaaaaaaccttgggttttcaaggtcttcaacccgcgctcctcccaccctcgccggaacagtactcaaaacaatggcaagaaatagcggctcacctggtgcggtag

SEQ ID NO: 20814 - DNA, 975 bp, Zea mays
  Peptide Sequence Number=SeqID_62593
atggtagagcaacaacaagcagctcagagcttgatgaagaaggcctcgttggcggccaggaggaggccggcgcggctcgtcataccggtgggggacgacgctggcgaggtggccgccggctggggcgcggctgccgctccggcgaaggaggccgacgtggaggtggagggggaggggttttcgctggcgagtagggcaggaccgaggcatgcgatggaggatgcatatgctgtggtgactgacgcagattctcagctggcattctacggtgtgttcgacggccacggaggccgcgcggccgtggacttcgtctccgagcggctcagcaagaacgtcgtgtccgccgtgctcgccgccgcaggaaaggatacgcgctgcgaagcatcgtcgtcgggggacgacgacgccgtctcagcggcgatcagagcggcctatctggccaccgacagcgagctcctcacgcagcatcaacagggtgcaagcggaggtgcatgcgcagcgacggcggtggtgaagggcggcgacctctacgtggcgcacctgggcgattgccgcgtcgtgctgagccgcgagggcgcggcggtcgcgctgacggcggaccacacctgcgcggcggaggacgagagggcgcgcatcgagcgggagggtggctacgtgagccgcagcggcagcggcgtgtggcgggtgcaggggagcctcgccgtgtcacgcgcgttcggagacggcgcgctgaagcagtgggtcatctcggagccggcggtcacgagggtgcccctcgccgccggctgcgagttcttggtcattgcgtccgacgggctctgggacaaggtcagcaaccaggaggccatagacgccgtctctggcggccggagccgcgccgcatcctgcagggacctggtggacatggcacgccgcaggggaagccgggacgacgtcaccgtcatggtagtcgacctccagaggttcgtaagatag

SEQ ID NO: 20815 - DNA, 837 bp, Zea mays
  Peptide Sequence Number=SeqID_62594
atgccgccgcccagcaagcgccgctgtagcgcgctggcggcggccgtgccggcgctcgtcgtctgctccacgctgctcccgctcgtctacctcctcgccctgcaccgccccgccgggtatggatcggacgaccgcgccgcggtggtcatcagcaccgagctcgccggcctcggggcgcgtggcagccggcatctggagaacgggggcgccatgaagcacaagctgctcaaggatgtttccaaaaaggtgtctggatctgatggggtttccgctgagagatctactagatcgaggtttagccaggatcatgctgccaaatcaaaagcaaagctcaagggcgctttctctttacttggactgaacaatgataccttcaaaggacctcgtacctccaaaaggtttcagttgaaggacctgtcctggagatcaaagtattttggttgcctgcactctgcagctcttcattttgcatatttgaaaaatagtcgagtagcctctagggcttaccatgcccaaaatggtgaggatactactgtcaatgggaaagagaaccatgatcaagagacagtgcatgaggagaataccaagtcctgtgaacatgaatatgggagttactgcctctggtctactgaacacagggaagtaatgaaggatgccattgtcaagaagcttaaagatcaactttttatggcaagagctcattatcctagcattgcaaaattgaagcaacatgaagcatttacacgtgaactgaagcaaaacatccaagaacatgaacgcatgctgagtgacaccatcacagatgctgatcttccaccattgttagtcttgtcttaa

SEQ ID NO: 20816 - DNA, 246 bp, Zea mays
  Peptide Sequence Number=SeqID_62595
atggcgcagccgaccgttgctgatctgggagccgttggcgcaccggacatgtccggtgcacaccggacagtccggtgcacaccggacagtccgaattggcccaagggcacatttccctttcaagaccgcggcaaccaggcgcgggtgaagccccagcggctgctcctgggcgctggcggctttggctccctgggcgacggcgggatggccaggaaacctcctggtggcggctacaggggcagttag

SEQ ID NO: 20817 - DNA, 1446 bp, Zea mays
  Peptide Sequence Number=SeqID_62596
atggcagcgcggcctgtggcagcaacagtgctcctgctgtccctgcaactggcgtggtggtcctcgtcgtaccccggcgtgcaggtccttgccgacgccgccgtgctcggtcggaaggcggggggcctcctcctcgccatgcgcgacggcaacgacgacgacaacgacaacgacaacgacaaacccgtgatcaatgcggagagcagtgtcaatgcggcggcggctgggccggggaggtacgccgtgatcttcgacgccggcagcacggggacccggatgcacgtcttcaggttcgacaaccacatggacctggtcgggatcggccacggcatcgagttcttcgccaaggtgaagcctgggctgagctcatacgctggtgaaccccaggaagccgccaactccatactacctctcctcaagaaggccaagagggtcgtcccttccgagctaatcgagaaaacccctcttaagctaggagtcagggatctcgtgcacaccaaatccaagacgcagttccagtacaaccctgactggatcaacgtgatcgaagggtaccaggaagggtcatacctatgggttgccctgaactacctgctggacaagctgggagtgggggactactcgcagacggtgggggtggtggacatgggaggcgggtccctgcagatggcctacgccatctccgcaaaagacgccgccaaggctcctaaagcgccggacgccgacgaccgctacgttacgagggagtatctcaaaggaaaagactacaacatctatgctcacagctacttgcactacggcgcttttgcagctcgagtgaagattctggacgcgaagaagtatgggcagttcagttcctgcatgctgcgtggattcaaaggcgggtgtaactacacatacaatgggcagcagcacgacgcgacggcttcgcctgaaggagcagtgtatggaaaatgcagggaggaggtagctaaggcactaaacctgagtgccccatgcgtcattagctgctgcggctgctgcaccttcaatggcgtgtggagcgggggcggtgggcctggcctcgacaccctctaccttgcatcaagcttccactttctagccgcacaggttgggatgatagacgggaaactccccagtgcaaagtcgaccccttctgcgttccgagtcgcagcgaagaaggcctgccagatgagcgtcgaggaagccaaggctgcgtaccccggtgtccaggacatccacgtgccgtacctgtgcatggatctcacttaccagtacacgctgctcgtcgacggtttcggactcaagtcgatcaagaaggtcacgctggtctccaaggtgaagcatggagagtactacgtccaggctgcgtggcctttgggcaccgctatcgaggcattgtcacccaaaatgggacaccggcaccgcgcgcatggcttcgaatga

SEQ ID NO: 20818 - DNA, 270 bp, Zea mays
  Peptide Sequence Number=SeqID_62597
atgcgcctgcacgggacgcgcctcggtaccccgtggtcgggtttgcgtctccatcgcccaccgccagtcgactcgcgcgccctcgacatcggcttcaacaacaccagcttcttcgtcttcttcgacagtgcaactggcgtggcatgtgacgtaactggaactcctgcatgtgccacgcctcttcgtctgcacgtccatctatgtcggcttgtcgtcgccaccaccgatcgggaggctccaccatcgacattaccatcgtcgtcggtctga

SEQ ID NO: 20819 - DNA, 111 bp, Zea mays
  Peptide Sequence Number=SeqID_62598
atggggaggagttgcttcgccgcaacaacctccattcgcgcggccgctgagagggagagctattgtactggtcacagagtggagtttgaatatgagtatgtgaatgggtaa

SEQ ID NO: 20820 - DNA, 1330 bp, Zea mays
  Peptide Sequence Number=SeqID_62599
atggccgcctcaggctactcgggctccgcgcccattactgatcaagggttcgaaggctggcccccgaaggaaggacagcgccgcctgcgccactccgactgcagtgccactcgacagagtgagtctgacaggcaatcaggccttgccaaaggcgccacggcgaactccgctccgcccgaccccagggctcggactcgggctaagacccggaagacggcgaactccgctccgcccgaccccagggctcggactcgggctaagacccggaagacggcgaactccgctccgcccgaccccagggctcggactcgggctaagacccggaagacggcgaactccgctccgcccgaccccagggctcggactcgggctaagacccggaagacggcgaactccgctccgcccgaccccagggctcggactcgggctaagacccggaagacggcgaaactccgctccgcccgaccccagggctcggactccaccctggcctcggccgaacgacttccgcctcgcccgaccccatggctcgggctcggccgcggcaacggaagacagactcaacctcggcttcggaggaacccccacgtcgccctgcctagggcacggaccgccacgtcaacaggaagcgccatcatcatcctaccccgaatcaactcgggtcacggagaacaagaccggcgtcccatccggccagctccgaccggaggggcaatgatggcgctccacaagctctatgacgacggcggcccccagctctcttacggaagcaggacgacgctccgccgcacctccgacagccacgacatcacgccagcagggtgcccagatctctccggctgccacattggcatggccttcttagagaaggttggccgcgcgggaccgaggacgggacaggcgctctcttggggccgctcgcttccctcacccgcgtggacgcttgtaacccccctactgcaagcgcacctgacctgggcgcgggacgaacacgaaggccgcgggacttccacctctctcacgctcgactccggccacctcgcctctccccccttcgcgctcgcccacgcgctcgacccatctgggctggggcacgcagcacactcactcgtgggcttagggacccccctatctcgaaatgccgacaagtacaaaaacccgcaactcttcaatcccactcaaagatttctctccaaagatttgaaatgggagaggcaagagatgtgtgtgagagagtgggaggagagaaaccccagttcaactggcctggaggcaagttcaactggttttggccagagagtttcacggttgaagttgaagttcaactcag

SEQ ID NO: 20821 - DNA, 378 bp, Zea mays
  Peptide Sequence Number=SeqID_62600
atgacgcgatgtgagtggttagatcgaggtcatataaagaattacgggataaatagacgtaatatatgggatctaggtgtggtcatcttctaccttcctcccaccttcttcatcttttctttcttggttttggatcgaatcttccatgtaaaaggacctatgatgatggctaatctgtcattcggaaagcgccaaacctatcacatgggaaagactattaacccacctccaacttaccatccaatcaagctcttcgatctggcgctgctgctggacatctcgattttttcgcaaattgataatgaaccagaaatccggtcaacggaccagaaacgtggtgacgaagctctcatcgagttggtcacaacgatgttctag

SEQ ID NO: 20822 - DNA, 2235 bp, Zea mays
  Peptide Sequence Number=SeqID_62601
atggatcgctccacctccctgctccggctcatcttgcttgctcttggcgcagccctggtgctcctcgtcgtccgctccgccttccgcctcccacgtggaatcgacacacccaccacctcactcttcgatgacgaagccaccgcgggcagcagctgcacccggttcgcgccgtgggggtgccggcaagccgaccggattaagcagaagccgccgtcgcacgagaacgacgtgccgcggcacccgctcgacccactgacgatcagcgaggtaaaccgtgcgcgcgagctcctccgcgcgcacccgccgttcgcatcgtcgccgtcgtccatgttcgtgcactcgctcgcgctcgacgagccggacaagcccgtcgtcctgagctggcggaagggcgtcgacccgctgcccccgcggcgcgcggtggcggtggtccggttccgcggtgaggccttcgtcctggccattgacctcgccagcggcgccgtgactcctctgcctgtcccagcttccgggtacccgaccatgaccatggacgagcaggtgctcctctgctacacgcctttcagggacccggcgttcaacgcgaccatccagcggcacggcgtccgcctgtccgatgtcgcctgcctgcccatctcgctcgggtggtacggccccagcgaggagaaccggcggctgatcaagatccagtgcttctccgcggagggcaccgccaacttctacatgcgccccatcgagggcctcaccgtgctggtggacatggacacgagggaggtggtccgcatctccgaccgcggcgccggcatccccatcccgcccgccgccaacaccgactaccggtactcccgccacatgcaagacgaaggcgacgaccagcagacagcggggttccagaaggtgcgggcgccgtcgatggaaccggggccgtcgtcagggccgcgggtggagctggtggacggccacacggtgcggtggggcgggtgggagttccacctcaaggcggacgcgcgcgccggcatggtggtgtcgcgcgcacgggtgcaggaccccggcacgggcgcgcaccgggaggtgctgtacaagggcatggcgtcggagctgttcgtaccgtacatggaccccaccgaggcgtggtacttcaagacgtacatggacgccggcgagtacggcttcggcctgcaggccatgccgctggtgccgctcaacgactgcccgcgccacgcgcgctacctggacggcgtgttcgtggccgccgacggacggccctacgtgcgcgagaagatgatctgcgtcttcgagcggtacgccggtgaggtcgcgtggagacactcggagagccccatcaccggcttggacataagggagtcgcggccgaaggtgacgctggtggcgcggatggttgcgtccgtggccaactacgactacatcatggattgggagttccagatggacggtctcgtccgcattaaggttgggctgagcgggatcctgatggtgaagggcacgtcctactcccacctgagcgaggcccgcgggaacgagggcgacatgcacggcacgctgctctcggagaacgtgatcggcgtcatccacgaccactacgtgaccttccgcctggacatggacgtcgacggcgccgacaactcgttcgttcgcgtggagatggcgcggcaggagacgggccccggcgatgagtcgccccggaggagctacctcagggccacccgccgcgtggcggagaccgagaaggacgcgcgggtgcgcctcagcctctaccacccggcggagttccacgtcgtcaaccccgccaagaagacgcgcgtcggcaaccccgttggctacaaggtcgtccctgccggcaccgccgcgagcttgctggacccggaggatccgccgcagaagaggggtgctttcacaaacaatcagatatgggtgacgccctacaacaagagcgaggaatgggccggcggcctgttcgtgtaccagagcaaaggggaggacactctggatacttggtccgagagagaccgtccgatcgagaacaaggacctggtgctgtggtacacgctggggttccaccacatcccgtgccaggaggacttccccatcatgcccaccgtgtcgtcaagcttcgacctcaagccagtcaacttcttcgagagcaaccccatcctcaagcagcgcccgaccaaagaggatgatctgcccatctgtactgcctccaccgccgcgtag

SEQ ID NO: 20823 - DNA, 636 bp, Zea mays
  Peptide Sequence Number=SeqID_62602
atggacctcccctgcgctccttcccccgctagccaccaccgccttgccgacacccttccccagccgcagccgccggcggtccacgctctacacgctgtcatcagatcaccagccaacgcctgtgcgcgtggtcggcatggaggaaacgtcgccgggaaagctaccgccaccgccgagggtgtccgcatctcctccgctcgccctggcgcccttcaccctcccctgcttgtgggcacctacacgcttcacccgcacaaccctaccgagttccccatgtgccggtggacgagaccgttgtgcgcgcgaccgacacgcatctctttggctctcccatgcgcccttcactcaccccggttcgcggacgcctacacccgcaaagtcacgtcgagttccccatgtgctggtggacagggtgcctacatgcgcccaacactgccatggcggaatcctgaagccgccggccaacaactccgccccgtggtcacgaggtcgtcgccccgaagtcctccctcgcgcttccagttgaacgacacgctctcagcgaccaaccagccaactctggcggccctgtccgcgcgcctgcgccacttccgtgcatcctcctgcgcccgtcggccccgcctccctccatcgtaa

SEQ ID NO: 20824 - DNA, 303 bp, Zea mays
  Peptide Sequence Number=SeqID_62603
atggaggcaagaagagcttcgaggtaccaagtgcatgggagaaggtcaaagaggctgaggagcccaaagccaagggtgaagaagaagacttgcaaagtcaagggaccttcggcgacgaagcatggtcccaacagtaaccatctcaacatagtggaaggctctacctgtcagattgacagatttgagcaaatggaggaagaagttgaaatagactccaagcccaggatattcttaagacaggaatttcaaatccgctgcaacctacttgaagggtccttcactccactgcgttctagtctttga

SEQ ID NO: 20825 - DNA, 360 bp, Zea mays
  Peptide Sequence Number=SeqID_62604
atgaagaaggtggtctactacgagaccgactcttcatcaccctccatgtccgacaccgagtcgtccactacttctaagtgccatgagcgcaagaagtatagcaaaccaccatattttgatgaagactattgcatgtggagtgataaaatgaggcaccatctaacctcactccacgaaagtatttgggatattgttgaatttggagcacaggcaccaaaggtgggggacgaggattacgactcggacgaggctgcccaaattagacacttcaactcccaagcaacttctatactcctcgcctccttgtgtcgagaggagtataataaggtgcaagggttgaagaatgccaaagaaatttga

SEQ ID NO: 20826 - DNA, 345 bp, Zea mays
  Peptide Sequence Number=SeqID_62605
atggcacgcaacacactaaataagatcggacgtgggagcaagctggcaggtgggtccctatcggtgctccttcctttgatcgtatgcctggcagcctgggtgaaaccacgttttttcttcaaccttgagaacgtgtgcggtgcaacacggggaggacagggatcgttgatcggtgtggagactcgccggcggcatgactgcctcggcatacaacagcagttcgccggacaggaggcggcgcaccggcactgggagtgggcaccggcaagcaggtcgtgcccgcacgcagcatgcgaccatggaggaggggagaaagagctaatgtcgcgcgggggtctttcatga

SEQ ID NO: 20827 - DNA, 867 bp, Zea mays
  Peptide Sequence Number=SeqID_62606
atgtctcacctcctcatcgcccaccgcctctctcaccttgcactccccctcctccgccttctcgtctcccgccttggccgcgactccccgccgcggctactcccgctacttgtctccgcagcctcaaccgacgacccggcgcctctcgtgtccgctgtcgccaaagtatacgccgatgagggcctcctacccgatggatgctccctcctcctcctcgcgctccgccgtggcatccgcgtccccatgccagcgtggtccgatctcatgaatcggctcccatctgttcccgaagcctacgccttctacctgcacctgctcgacgccggcgtgcccccggaggccaggcagtttaacatgctaatgcgtgacatgattagatcaggcaaacttgccagtgcgcggaacgtgttcgatgaaatgttgaggaggggtgtgcagccaacggtagtgaccttcaacaccttgatgtctgggatgtgcaaggcgtccgatctgaacaacgcaaatgctctgcgaggcctaatggcaaaggcaggaatcgcaccagatgtgtacacctatggtgcttttatacaggggctgtgtaagacagggaggatacaagatgcaatggagatgtttgaggaaatgtgtgagagaggtttgaaccccaacactgttgtgctcactacattgatagatgcacattgcaaggagggggatgtgacagctgggttggagttgcgctgggagatggccacaaggggtgtcaaggcggatttggtggcatacaatgctttggtgaatggtttttgccgagtgcgtgatatgaaagcagccaatgacattgtggaggagatgagaaaggatggtctcaagccggacaag

SEQ ID NO: 20828 - DNA, 651 bp, Zea mays
  Peptide Sequence Number=SeqID_62607
atggtgggcgctggcgcggcgacggacgcggccagggcgctggcggcacgggagatcggcgaggccgcgtcggaggacgccgtgcggaggcggtaccggcagctcgcgctgcagctgcacccggacaagaacaggcaccccaaggcggaggtcgcgttcaagatcgtctccgaggcgcacgcgtgcctgacggaccaggcgaggcggcgggccttcgacctggagcggcggggcagcttctgcgccgcgtgccacgaccgctacgccgccaggtggtcccagccggcgtccggccaccaggcgccggcgccggcggcgtccaggagcaaggcggcgcgggagacgatccagagccggctgcgggacgagtgccgggtcatcgacggctgcctgcgggccaacgacgccgcggcctgcgcgcgccgccgccagtcgttcccgctcttcgatccctctgacggccgtcgcttcccagactacccgcacgtccgcccgccgccgtttgagctccggcactccgaggactggcttggccgcgcagcagtggatcggcaagccctgaaccggaggtggtgcaggggcggcggcgagtcgccagtgtaccagatcaggacggtggcgacagagtgcaccgataggcgtgcatggtga

SEQ ID NO: 20829 - DNA, 558 bp, Zea mays
  Peptide Sequence Number=SeqID_62608
atggaggagggaaagaggggcgcggccgtggagggaaaacggaaatccgtggagcgaaattttgggctgaatgtttgtgtgtgcgccacggctgagcagcagcagcttcagctccagctcgggcaatctgttcaaaccacgcaatcagttctggtgttccaagtaaagccacaggtctacagtctactaggcaatagccatacctggccccagctaccagagggtggcggcggcacttctgctccatactctcccaagcccaggttcctcaccagtgcaactttcgatgcggccagccacacgggcgaccacgcgcggccgcgccgcaccagatccggcccggaccgacactacgacccaaaaagaggaggcgcggctcggcgcacgcaacagcgtcccgggaaacgtccgccgctgtccgctgttcgcaccgtgccagccgatccagtgcgggccggggctggcggcaggagtgcaggcccgcgctgtccgccgcgggaaaaccctaaatttccccgccctcgacgaattgacggaactgcccctcgcgcgctttga

SEQ ID NO: 20830 - DNA, 114 bp, Zea mays
  Peptide Sequence Number=SeqID_62609
atggcggcggtgtccccgccgaggatgacggaagtttacataagtgaagatacggtttatatgagtgaggacatatacaccgagggtgatccccctcttttgagggagccatga

SEQ ID NO: 20831 - DNA, 897 bp, Zea mays
  Peptide Sequence Number=SeqID_62610
atggcgttctccttgcgatgccagtatgccacccccaaccgtagcaccaacggagtaaattttggccgctcaaagtttgaaaccgtctgcgttgaccgttttgccgtggacgtcgtccgtacgctcggcctcgacgtgcgtgcatgcatgcatgcatgcagctctgcaaacctccctggcctcacgtcacgctacaagaccgagaagaacgacacctccaatggtcccagccctctacgagacgacgacctcgatcgcgttccctgtaacgccaccaccaccgtcaccgccatcgctcgcccggatcgcgtcaacatggcagcagccctccgtgtcctcatcgccgtcctcgcggtcgtctcggtctctctccggcgcgccacggcggccacggtccccaccgtcgtcgacgaggcgtgcaagcagtacaccaagtacccggagctgtgcgtcaagtccctgtcgtccgcggcgccggaggcgaaggcgaaggcggagcggggagggctggcggggctggccgggctggcgctggcgcaggcggcgcagtgcggcgccgagacggtggcgttcgtcaagggcctggagaaaatgccggggggcatgccgcccgtgtgcctgaacgagtgcgtggccaagttccagggcgcgctggtcgacctgcagcggtccaaggtggcggtgcagaaggccaaggacgaggccgccgtcgacacgtggctcacggcggcgaaactcgacggcgactcgtgcctgagcgactgccagaaggtggagggcggcggcgagatgcgcatcgtcgacaagatcggtgacctcggcaagatgtgctccgtcgccatgtccctcgccgatgcttctcatcgtaaccacaccgcgtccgccgccgccgcctga

SEQ ID NO: 20832 - DNA, 903 bp, Zea mays
  Peptide Sequence Number=SeqID_62611
atgggcacgattaagtcagggatcagtccacacgatgccactcgacagagtaagtctgacaggcagtcaggccttgccaaaggcgccacggcgaactccgctccgcccgaccccagggctcggactcgggctaagacccggaagacggcgaactccgctccgcccgaccccagggctcggactcgggctaagacccggaagacggcgaactccgctccgcccgaccccagggctcggactcgggctaagacccggaagacggcgaactccgctccgcccgaccccagggctcggactcgggctaagacccggaagacggcgaactccgctccgcccgaccccagggctcggactcgggctaagacccggaagatggcgaactccgctccgcccgaccccagggctcggactcgggctaagacccggaagacggcgaactccgctccgcccgaccccagggctcggactcgagctaagacccggaagacggcgaactccgctccgcccgaccccagggctcggactcgggctaagacccggaagacgacgaaactccgcctcgcccgaccccagggctcggactccgccctggcctcggccgaacgacttccgcctcgcccgaccccttggctcgggctcggccacggcaacagaaggcagactcaacctcggcttcggaggaaaccccacgtcgccctgcctagggcacagaccgccacgtcaacaggaggcgccatcatcatcccaccccgaatcgactcgggacaacgtcagcagggactcgaccgctccaacagctgtccctccatcaggctccgccgcacctccgacagccacgacatcacgccagcagggtgcccagatctctccggctgccacattggcatgtacctagggcgctag

SEQ ID NO: 20833 - DNA, 318 bp, Zea mays
  Peptide Sequence Number=SeqID_62612
atgaagctgtcggacgccaatctcacgttggagaaaaagtacgtgcacctcaaccgcttgcaggcgaagatggaggccttcctccgcaccaaggatgacgagtccgcctcccactccaccgtgctgcggggggcgcgcctcatcagcgtcgtcgtcgccgccacaagctcgtcaccagtggaggtggatgcagaaccacttctaccgactgctgctgcagaaagggaaagggagagagacgacgacgggcgcacagttagattggataaaagcgagaggacgtccgacgcggagagaggattgcaggcgcggatgtga

SEQ ID NO: 20834 - DNA, 408 bp, Zea mays
  Peptide Sequence Number=SeqID_62613
atggaggcgagagcggccatgagctggtactgcggctcccttctggccgtggccatcgcgctgttcctgtccgtgtccctcggcgtgcgcgccgccggcgccggcgccggcgttgacatcaaggtgtcgtgtgcagcgacgccggacccggactgcctgaacgagtgcgccggggagatcgaggaggcgctggaccacctggacgacaccgagggcggcctcgacgacggcaagctccacgacgtgaagctcacgcccccatccacgcccgtcaaaaccacgctgctcgccaagaacaaggacttcgaggcgctcatgcgcgtcgcccacgcgctcatcaagcgggccaccggtggcgccggtgacgcgccggcgccggcgcccgccgcccgcgccaagattcattaa

SEQ ID NO: 20835 - DNA, 504 bp, Zea mays
  Peptide Sequence Number=SeqID_62614
atgcgcgcaccatcgttttcgctgtcgtcagacgtcccgttcgtcttccctgtcttcgccctgttctttcaccccaatctgctgcccccgcccacagtcgcagccgcgagccgaccgacactcgtcgacacagggctgggaaaacactcgcattctctcgcccttctcggactgacgcctggtgcagatgccctggtcttcgtcgtgtccttctccggtaacgaacagagagcgtccgtccgtcaccttccgctctgcagcccgcaaggcatctctcgcaagaggatcgacatggccgccgcctctgccgctgctctccgcggcctcgtggtcgtcctcgccgtcctctccgtctccacgtggggcgcggtggccacgatcaacgtcaaggatacgtgctccttcacggcgcacccgaacctgtgcgagaaggccatgaccaagctgatggggcagaacggcgtgcccacgtcggcgccggcggctccggagacgtcggcctga

SEQ ID NO: 20836 - DNA, 582 bp, Zea mays
  Peptide Sequence Number=SeqID_62615
atggaaccatcgccctcctcccgccgccgctcccgcgccgccgccgccgacaagggcaaggaccccgaccccgcctcctccggccacccttccccacccgcccctgacaatgacgccgacgtcaccttccccgagcccttcacctccgccagcaccgccctccagggcctcctccgcaggctcggcgccggcctcgacgacctcctcccatcctcctcctcagcgccctcctccgccacgtccgatcacctcaagaggaccctcgccggcctgcaggcgcacggcgacgagtcgcgccagctccagtccctcatgcagctctgcgagatgctctccatcggcaccgaggactcgctcgcccgccttcccggtcgacgctttcgtcccaatcctcgtcgggatgctcggccgcgaggacgagcctgccaccgctggtgccagccccaacgtcatgctgctcgcggcgcagcaattgccgcgatgacggcgcccagggaagaaacggcgcgagggcaaaacgggaagataaaatgtgctaatgactatttagagggaccgatgctaaatgttcaaagcgggtaa

SEQ ID NO: 20837 - DNA, 426 bp, Zea mays
  Peptide Sequence Number=SeqID_62616
atggcaggcccatccggcgccgcggcctcctcctccacttctcgtggcgtgccggagaaccggttctacaaccctcctcacgtacgtcgacagcagcagcaggagcaacagcggttgcggtccgcgtccccgtccccgtcaccgtcgccgtcgccgcggtcggcacggcagaagcccccgccgccgccgggggccctggcctcggcggcggatgtggacagtcgggtggattctgacgactcctcgtcgacgacctcgtccaagccgtcggtggcgtccacggcggcggggaatttggagaggtttctcacctccacgacgccttccgtgaccgcgcagtacttgcccaaggtatcatcgggattactcttcgccacctcagtaggctgctgtgttgtggtcttacttcttagagctgtctgctga

SEQ ID NO: 20838 - DNA, 1446 bp, Zea mays
  Peptide Sequence Number=SeqID_62617
gcagccacagacaccaacactatggcagtgcactggttcttccttttccagggtcccagccctatgatagtgcgatacgtgtacgccgtactttttctgctggccaacttgtctgcgtggctcacgcgagagaacggcatatcatatttcatatcgcagcgggtcagcggcggctgtcacgggaaaattgcgcaggttggagcagggctatttcttgtacttcagcttgtgtctaccataaaatttatcacacagctgaactacaaattatgcgtgaccaattttgaagaaaggtacctctgggtcgccgcgatctctgctactgccgtcatcatatcaatgggattgatcatatttatgaccctcaagttcgcacaatgttggcacaacatggaggtcattgttatcacacttgtgctatttttcatcatgtgtgtgctctcactaatgtccaaggctaacaaatttttcatggagcctgcactaattggtgggtacgctacattcatatgcctgctagcgatgacaagtgaacccgagtcaggctgtggcatgaaaagcaaagcaggcccaggtgctggttggttaaccatttccttttttgtttctggactgctcagcaccgtttattctgcctttaccatgggcaccggctacaaatgtacacgaagcacggtggagtcggaagacgacgtaccatatgggtacggttttttccatttcatcttctcggcgggctgcatgtactttggaatgatgtttgttgcctgggacacacatcataccatggaagaatggaacgtagatattgggtggatcagcacatgggtccatatcgctagcgaggctctggtggtagtatcctacttaacgatactgctggccagaattttgggagtaggctggctccaacacttccttgcaaagatctttggaacagatgaccagccgcacaacgatgaatcccatacgacgaccgatgaatcccatatgatgaccgtgcatggtgatgaaccccagacaacgaccgtgcatggtgatgaaccccagacaacgaccgtgcatggtgatgaatcccatacaacgaccgtgcatggtgatgaaccccagacaacgaccgtgcatggtgatgaatcccatacgacgaccgtgcatggtgatgaatcccaagcaacgaccactaatgatgatgaatcagagacgatgaacacgcatgtcacatcgccgtcctctttgtatcacacagcgtcaccctctttgctctactactcccccgagcaatcaccgaccaataacactgaccatcaacctcctccgccgtcgccgccttcactgtccccccctcataccatagaactgcaaatgtccgaggtaccaaacatcggtacctctggcatgaatgaagaggatggcgatgactatatcagagaatgggagagtgaataa

SEQ ID NO: 20839 - DNA, 1281 bp, Zea mays
  Peptide Sequence Number=SeqID_62618
atgactataggcaatgtgctgaattccttgaagcagttccaatcttttattctgaactactattatgcgataaaggagtcatctgagctatttgattctgatgttaatgatattaatcccacttcatgcaatggcattatgaagtttactgatgaattgttcgcgaagagcagttctgtgcattttaaagcggaacgtttgtggatgcttcggttattatctgctggatcaaatctagctgatgatgctaaaatatacaagagaggaagagtcttagaacttgctcttgccttctgttcttcacctgtttcagattttgaatcgaaggttttagtccttaaggtgctggagaattgtgtcaagctgcccagttctagctcatcatctagaaaattggaatcatcgattgttgctgtaaacagcagtgatagcagtcacattgtttatgtatgtcagcagcacaggggaacgactgacccgctgcggcagtcgtgggggcaagttgctaccatgattggcatcgccaacatatttgatgaagcactgtcttcctcgaaggagagctgttcctcagcctctgcatcggtgaaggtcagagctctctgtagcttttttgaagagaaaacctccacatctgccattgctaagcttgttgatcaagctcttgcctcaggaaagatttatgatggagatgggttcaattacatcaaagaatcttttgaaaatggtactcttcaccttattaggttgttgagtgatggtggtgtccactcccgccttgaccaactacagttacttctgaaaggtgtcagtgagagaggagcaaaaaaattcgtgtgcacatccttaccaatgggcgtggcatttttggatggaagcaatgttggtttcgtggagaccctagagaatgatcttttggagcttcgaggcaagggtattgatgcacagattgcatctggtggtggaaggatgtatgttaccatggaccgttatgaggtgctcggagaagcaccctacaaattcaaaagtgcacttgaggctgtgaaaacactgagagcacagcccaaggctaatgatcaatacttgcccccatttgtgatagttgatgacatcggcaaagctgttggacctgtattagatggtgatgcagttgtcactatcaacttctgggctgatcgcatggttatgcttgcgaaagcactaacggaatggagcttcgatttcgatgggaccaggtcgcaacatccgttgagcagccatatggcttccctgttcagctag

SEQ ID NO: 20840 - DNA, 579 bp, Zea mays
  Peptide Sequence Number=SeqID_62619
atgaagaggcgctcttcggggcgccgctgcgacagggcctggggccggcggcgcgccgatgccccatcgcttgctccggcggacggcagcgcagcggcagccaagcaaagatctttgggacaggtgaccaccagttgcatgggtgaatcccagacgacgaccacatctgatgagacatacacaacgtcgtcgtctttgtcatcattctacctgacagttgagaagacgacgaccacaactgatcagatgtacacagcgccaccgtctttaccatcattgtaccttacacccaaggagacgctgaacaatggtgtcatttcgataagcaactacaacactgatgaagcaccttcgccgcaacctgtatcgttggtatctgatgagatagacatttctgaatcatcacctccgccatctccgtcgccacatacagtggatgagatggacaactctgaggagtcaccttcacctttgtctcacaccatagaactccaaatgtttgaggtaccaaccacctcaggcaataatgaggaggacgaggaggatgacgattcttttagagaatgggagagtgattaa

SEQ ID NO: 20841 - DNA, 1026 bp, Zea mays
  Peptide Sequence Number=SeqID_62620
atgtcgcgtgaaatgagggtgaggcggtatgtactccagatcggagaaggaccgaggatcgttgcacctctgataccagatgttaacgtggtggtggctgggaagatcgctggtggcgaactcttgagatggagaagcagggaaggcagccaagctagcgaagcacggacgacaataatgaactgtgtcttctcctgccagggcctcagccctatgaacgtcagatacctgtatgcggctatcgtcctcctggcgaacctgtctgcgtggttcgcacgagagaacaccgtatcgtattacctgaagcagcgactcagcggctctcataagttttatgagatttatcacaaggctgaactacaaattgtgccaaaccaattaccaaggaaggtacctcgtggttgggatctccatctttgccaacatggctctacggggttgacaatagtcatgattgtcaagcacagacattgttggctcgacatcgagttccttggcaccacgctgctgctagtgtacattatgtgcgctctctcattaatgtccaaggccaataaattattcatggagcctgggctaattggtgggtatattttgttcctctgcctgttagcgattacaagtgagcccgagtcaagctgctaccagaaacacaaagcaggtccacatgctatttggataacaatttcctgttttgcttttggactgctcggcaccgtttattctactttttccataggcagtgactacaaatgcatacatttgtggaacattgtagagtcagaagacgacgtaccatatgggtatggctttttccatttcgtcttcgcggtgggctccatgtacgtcgggatggtgtttgtcggttgggacaaacatcataccatgaagcaatggagcgtggatattgggtggatgagcacatgggttcatatcgccaacgaggctctcttagtagtattctacacaacttttggtggccagaagctgcgaaaagccgaaacaaattggcacgatgatggatga

SEQ ID NO: 20842 - DNA, 228 bp, Zea mays
  Peptide Sequence Number=SeqID_62621
atgtcgaaaatggatgctcttccgaaggttgtggaaataaatgatcttcagacgaaggtcatgaaggacataccttcatcattttatcgtataaacatgaatataaataagaaagcgtccacagattattttggtgcacggttctgccgatccctctgcccacccaccgccccctctgctccccgccatcaactcgacgccgagccgccaccaacgccgatcctgtga

SEQ ID NO: 20843 - DNA, 249 bp, Zea mays
  Peptide Sequence Number=SeqID_62622
atggcctactcgaccactaggcctgttcacaggcggcccatgcagcctggccacgggagaggggtgcgctcaggtcagccattggggcctagccgtcaggtgtcgaggatattggttcccgtcgtggatctgcggtggattggctcctccaatgttgcctatagggggaatctcaaatctcgatgggatgatggggatctgagacatagtcacagtgattctagtcactctgagcgcctagtggattag

SEQ ID NO: 20844 - DNA, 2405 bp, Zea mays
  Peptide Sequence Number=SeqID_62623
atggggtgcggccagtccaagatggaggaagagtacgcggtgcgccactgccgggtgcgctccgagctcctcgcgctggccatccgccagcgctacacgctcgccgacgcgcaccacgcctacgccgagtcgctgcgcgccgtcggcgccctgctgcacgacttcctccgcggggtccagtcgctgccgccgccgccgcccgagcccgcgctccgcctcccgcagcagcggaagggcgacggcctccctgccgcgtcgccgccgcccgcgatggcgtcctcctccgccgccgccgccgcgccgcccgtcgccaagcaggtccgcatcgcccccgacgacgggcatatccagttctccgacggcgactccgattccgaggatgggcacatcaagttccactccgacgaagagcccgacccggctcgccgccgcccggaggtcgtccgctccaccggcgcgccgggtcctccgccaccgcagatgggacagccgtatgcctccggcggagggtatgctccgccgccgtatggtcctggatacggttacgggtacgccactgggcctggtccgggtcctggtcctgattatggcggtattggcatgaacggcggcggtggttatgaaccaggccatggtgtcatgtatgggcaaagctatggtggcagcggcagcggcggcggctatgatgaccagggctatggtggcatgggcagtggtggcggcgctggcggctatgaccaaagctatgctggcataggcggatatggccagagcttctttaacatcagctacgctcgcagccagccacctccaccatctgtctcgcacgagcaacgcctggaggcgactaatgccagggtccactactattccggcaatggcgagcagcagccacccccgcgtggctatggtggtgggtactcctacccaccacagagttcaagatcatataatcagtatgcctatggtggttactatggaggtggttctgctcctgcaccaccagcagacatcccatcctcctccggtgagccagcagcagtgccaccgcctccatctccgcccagggtgtccacctgggagttcctggacccgtttggaacttatgagagctactacgagcaaccaactgctacagcagctccatactctcctggcaggagtttgaaggatgtgcgcgaggaggaggggattccagacttggaggacgaagacatggaggtagtcaaggaagcttatggtgatgagaagcaccctgtgaagggttacatggggaacgggaaggccgcaaagggagagggtaggagcagcacgggggatgaattgccccgcaagtccaagtcatctgaggccagtggtagtggtagcagcttggagcatgacgttcatgtagtggaaaaaagtgttgtcggagaacaagttcgacactcggagccacggcagcatgttgccggtctaccacccacaggatcggaaaagctatacattgatgacactgaggtggtggtggagatcaggactcaattcgagcgtgcctcacaatcagctggtgaggtatcaaagatgcttgaggtcggaaagatgccttactaccagaagggttcaggtttcaaagtctccgcaatgattgtttgtggtataccgacaatggaggaggagtttctgcgttttgaagaggacaaggcgatgggctctggcaacctctcctctacactacagaaattgtacatgtgggagaagaagcttcttgaggaagttaagacagaggagacaatgcgggtactgtatgacagaaaacgtgaggagctgaaaatgttagatgagaaaggtgccgaagctcataagcttgaggccactgaagtttacatcaggaagctatcaactaagattagcatagctatccaggttgtaaacactatttcagaaaagattagtaagttgagggatgaagagttgtggcctcaaacatgtgagctcattcaagggttgatgaggatgtggagcgttatgctagaatgccatcagatacaactgcatgccatatcccaagctaaaaacatagactccatgatagacactgcaaagttcggtgacgctcatatggacttgatcaagcggttagagcttcagctattggattggattgcttgttttgttgcatgggttagcgctcaaaagaattatgttaaaaccttaaaccggtggctgacaaatggtgttatctatgttcccgaggaaaccgaggacggggcgcctccattttctcctggaagattaggagggccaccgatcttcgtcatatgtaataactgggctgccagtgtggacaggatatctgagaaagaagtagttgaggcgatgcaggcctttgcatccaacgttctgaacctctgggagaggcacag

SEQ ID NO: 20845 - DNA, 456 bp, Zea mays
  Peptide Sequence Number=SeqID_62624
atgatcaacgccaagaagattgctcatctcgccaagaagtggcagaggatggccgcacaagggaggaggcgcctcaccttgggggcgacatcagcaaatggagcggacgagtgctgcagctctgtggcgagcaagggccattgcgcggtgtacacggccgacggggcacggttcgaggtgccgctggcgtgccttagcacccctgtcttcggggagctcctgcagatgtcagaggaggagtttggcttcgcgggcggcgatggcaggatcacgctgccctgcgacgcggcggtcatggagtacgccatgtgtttgctcaggagaggagcctctgccgagctagagcaggcgttccttagcaccatggccatgtcatgccactgtgccagccacatggcgccgctgaaaacaaggcacttcccccagcaagatgggggacagggtggaatggactga

SEQ ID NO: 20846 - DNA, 151 bp, Zea mays
  Peptide Sequence Number=SeqID_62625
gtccccggcgaagctccgccgtgtcgctgatcagcttgaattcggtgtgagcgagattggggaaagcaatgctagccgtgggatggggtatcggcgatccagattagaaaccggggttcggctaaccgggaaccgtggatgtaggatctaa

SEQ ID NO: 20847 - DNA, 2337 bp, Zea mays
  Peptide Sequence Number=SeqID_62626
atggggcccatcaaggacttaaaaggcgtacagagggtcatgggatgtctcgtggccctgagccgcttcatctcacgcctcggcgaaagaggtctgcctctgtaccgcctcttaaggaaggccgagtgtttcgcttggacccctgaggccgaggaagctctcgggaacctgaaggcgctcctcacaaaggcgcctatcttggtgcctccagctgatggagaagccctcttggtctacgtcgccgcgaccactcaggtggttagcgctgcgattgtggtcgagaggcaagaagaggggcatgcattgcccgttcagaggccagtttacttcgtcagcgaggtactctccgagaccaagatccgctacccacaagtccagaagctgctgtatgcggtgatcctgacgaggcggaagttgcgacactacttcgagtcgcatccggtaactgtggtgtcatccttccccctgggggagatcatccagtgccgagaggcctcgggcaggattgctaagtgggcggtggaaatcatgggtgagacaatctcgttcgcccctcggaaggccatcaagtctcaggtattggcggacttcgtagccgaatgggtcgacacccagctaccgacggctccgatccaaccggagctctggaccatgtttttcgacgggtcgctgatgaagacgggagttggtgcgggcctactcttcatctcgcccctcgggaaacacctacgctatgtgctacgcctccatttcccggcgtccaacaatgtggctgagtacgaggttctggtcaacgggttgcggatcgccatcgagctaggggtcaggcgcctcgacgcccgcggcgactcgcagctcgtcatcgaccaagtcatgaagaactcccactgtcgcgacccgaagatggaggcctactgcgatgaggttcggcgcctggaagacaagttctacgggctcgagcttaaccacatcgctcggcgctacaacgagactgcggacgagctggcgaaaatagcctcggggcgaacaacggttcccccggacgtcttctcccgggatctgcatcaaccctccgtcaagatcgatgactcgcccgagcccgaggtaccctcggcacagcccgaggcaccctcagctcggcccgaggcgccctcggttcagcccgaggtaccctcggcctccgagggcgaggcactgcacgtcgaggaggagcggagcggggccacgcctgaccgaaattggcagaccccgtacctgcaatatctccgccaaggagagctgcccctcgaccgagccgaggctcggcgggtagcgcgacgctccaaatcgttcgtcttgctgggcgatgagaaggagctctaccaccgcagcccctcgggcatcctccagcgatgcatctccatcaccgaagggtgccaattctatgcgaagcagacccacctgcccgctcaggctctgcagacgatacccatcacctggccctttgctgtgtggggtctggacctcgtcggccccttgcagaaggcgcccgggggctacacgcacctgttggtcgccatcgacaaattctccaagtgggtcgaggtccgacctctgaacagcatcaggtctgagcaggcggtgacgttcttcaccaacatcatccatcgcttcggggtcccgaactccatcatcaccgacaacggcacccagttcaccggcagaaaattcttggacttctgcgaggatcaccacatccgggtggactgggccgccgtggctcatcccatgtcgaacgggcaagtagagcgtgccaacggcatgattctacaagggctcaagcctcggatttacaacgacctcaacaagttcggcaagcgatggatgaaggaactcccctcggtggtctggagcctgaggacaacgccgagccgagccacgggtttcacgtcgttcttcctggtctacggggccgaggccgtcttgcccactgaccaggaatacggctcctcgaggacgagggcctacagcgatcaaagcaaccaagttagccgagaagactcgctggaccagctggaagaagctcgggacaaggccttactacactcggcgcggtaccagcagtccctgcgacgctaccacgcccgaggggtccggccccgagacctccaggtgggcgacctggtgcttcggctgcggcaagacgcccgagggaggcacaagctcacgcccccctgggaggggcccttcgtcatcgccaaggttctgaagcccagaacgtacaagctggccaacagtcaaggcgaggtctacggcaacgcttggaacatccaacagctacgtcgcttctacccttaa

SEQ ID NO: 20848 - DNA, 180 bp, Zea mays
  Peptide Sequence Number=SeqID_62627
atgggcgtgcctgacttctacgtgcgctggcgcgtatttaatgcgctgcagtccaaccccagggttatgaaggctggggagcaccgggaggataaggagggggaatgttttgtccgatttggacatggtggtggcctgactccttccggtataaccgttaagaaaaaggagatcgggtaa

SEQ ID NO: 20849 - DNA, 1032 bp, Zea mays
  Peptide Sequence Number=SeqID_62628
atggcgcacctgacagtccggtgcgccaccggtgcgccaacggtgcgccaccagtgcgccaacgcgctctcgggtttctgcgactgggaaggctctgctgtggaccagcctggtcccacctggcagaggatggaccgagagctgatagcacgaccgccctcacatgtcgcgcttgacacgttcgcccgtgactcacaaggcgcacgcgtgccgccgccgcagacctcagctcaactcctcgggctccccgctgggctggacacgtatcgtagacgtgtcaccatagaaccatgggcaacgcgtgcccactacgaattaaagctactaggagatagccacgtctccccgtgtgtacccgtgccgtgcaagcccggcaattcgttgatctccgaatctcccgcccgtcagtctcgagtctccacacctgaaacgtctgagtccatggccgaggccgaagtcgacgccagggccacggccgacgacgagggccgcggcggcagcagcagcaacgtcgccgaagacgggcagccggctgcggcgaaggggcgcgcgaccatatccgtgacggtggtgctgctcgcgctgctggtggcctccgtggcggcgttcctgacgtcgtcgctgccgcgcgccggcgacggcgacggcgagggggtgcagggagctgctggcagggcgggggaggtcgggaagcgcgcccgagcccgtcgagcacgccgtcggcatcccggggttcaacagccggctggacgcgttccgcacctgggcggcgctgacgtggatgaagctccggcggccgcgctgctccgacgagccacgttgtgtgacgtggtcgccgcgtgcgtcctttgtgttgtgccaaggtacgacgacgatggtgccgtcggctctctgggggacgccgctaagaagagcttcgagatgggcaaggagacggtggagcaggcggcggcggccacggcgagggccacgcgggacgccgcagagacggccaaggagaaggtgaagggaatagatgacgctgagctctga

SEQ ID NO: 20850 - DNA, 237 bp, Zea mays
  Peptide Sequence Number=SeqID_62629
atggcactccacgccgtgcacgagcgggaggaggacgaaggtcccgacacgtggggccctcagacaacgagcagcccatggttcctgagtgtgttgtcgaagatcttcctaagcaacaacctggtgaaggcaagtgtcttctaccgaggctggttgccgagattctttcgatttgattttgttagtcacccttcctatggggagaagtacggtgtttatcaaactggagaaacctaa

SEQ ID NO: 20851 - DNA, 408 bp, Zea mays
  Peptide Sequence Number=SeqID_62630
atgccgccatgctccgatgagcaatttggagcagtgcaccggacgcaaccggctcaccgatgccacacaaagcttcagagggcaccggtgaacatccccaggaagtttggaggcctcggtggcgaactggcagcgaggacagggacccgaccgtggcggcccgccattcttcactacgccatgaggcccgcgtattggcttggaggccgagaagggtatgcagcgctgctatttatgcccctatgggccaagaatcccaacgattccccgaagatcacggtgcgactccgatatacatgcgcgacttcgcattctgttgaaaggagacggagagggaagatgatagatccgacagagagggcccacacggcggtgtctagatcaagccaacgacaagcgcgcaagtag

SEQ ID NO: 20852 - DNA, 312 bp, Zea mays
  Peptide Sequence Number=SeqID_62631
atggcgcagccgaccgttgcagatctgggagccgttggcgcaccggacatgtccgagacaaaccacttcctccttattcatcatgaagcccttgctttcgttgagcaggccactgagcagcaaattcttattattggaatcaaggtcgtggatcttcttgcaccgtaccaaaggggtgaaaatattggtctcttcgatggtacacaagagtgggtggcaaaacagcctccaccctaccatcacccgagcaaggacaacaatagatcacgccataaaatgtggtgcataacaccaactagagagctaatgtag

SEQ ID NO: 20853 - DNA, 1245 bp, Zea mays
  Peptide Sequence Number=SeqID_62632
atggcggagagcgatggtggcagcgaggcgcagagtccgagccctgatccaaggtccggggacggggcgaaccctgacccgcgcccgccgcggccgcagctcaccaagtcgcgcaccatctctggttctgttgcagcctccatattggccgctgatagggtagcaggaggaggaggcggaagcggcggaggcggtctaagggacagcatcctcgttcgccgctcctccacggcgcccctcccgccgtatacggcgtcagcggcgggggcgtcctcggcgccgcggcggctcaccgtcgccgtggacgacccctcctacgcggcacccaacggcggcgtgcttgaccgggactggtgctacccgtcgttcctaggtccgcacgcctcgcgcccccgcccgccgcggcagcagcagaccgcgacgactaccgaacgccgaagcgctaaccccaccgtgccggtgccgccgagggtggcggtgtcgcagcgggaggaggagaagagcctggcctccgtggtgaagcgcccggcgctgcttgaggagcggaggacgcctcctcctacgctcccgcccccacgcgctccgcgatttgatctctctccgtatctctcactcgaaaagatcagatcatgcagcgaggccaatgctggggaccgtgatggtaccgagaaggtgtcttggattgacagggaccatggctctgctttttttggttcgcggagatggaatttagctcaatctagtaccatctttgctcttgcaattcctttgtttctgtttaagtacattgatctgctccgacgcagacaaacaaattccatgagaggaagaagtggtgaggaagaagtacctctcaagaagaggatcgcctacaaagttgatgtgttcttctcaggacacccatatgccaagcttcttgccctcctattagccaccataattctcattgctttgggtggaattgcgctgtatgttgttagtggaagtggattcctggaggctctctggctttcctggacttttgtggcagattctggaaaccatgccgaccagattggcttggggccgaggattgtatccgtgtcaattagctctggaggcatgctggtgtttgccacaatgcttgggcttgtgtcagatgcaatatcagagaaggtggattcttggcgcaagggaaaaagtgaggtgatagagatcaaccacatactaatcctcggatggagtgataagctggtaacattctga

SEQ ID NO: 20854 - DNA, 1263 bp, Zea mays
  Peptide Sequence Number=SeqID_62633
atggacgaaggccttgatgaagatgtcagcgaactgcaaagtggtcgggatgcggacatcaccgacgacgacacgctcgcggacaaagtggaggtcgatctccccgtgtttcatgcgttggtgttgcataggattggtggagagatatgggaagacatattgggatttgaaaatgcagagttttatattaagcaatggccagaattggatggcatgcggtttggggatgtgttgatctcatttcctgatgccgtaccttgtggagtcaaggttgcttcaaaatctggaaagatcttgatgaatcctgatgatggttatgttttaagagaaggagatgaggtccttgttattgcagaagatgatgatacttatgctcctgcccctctaccagaggtgaataagggttttctgcctaacataccaacccctcccaaatatccagagaaaattttgttctgtggttggcgccgtgacatccatgatatgataatggttctggaagcatttcttgctccaggttctgaattatggatgttcaatgaagtgccggagaaggagagggagataaaactgactgacggtggtttggatataggcgggttaataaacattaaacttgtacataaagaaggcaatgctgttatcaggcgacacttggaaagcttgcctctggagacatttgactctattttaattcttgcagatgagtcagtagaggactccattgtacattctgattcgcgttctttggccacacttcttcttattcgtgacattcagtctaagcgtctcccatcgaaggagctgaagtcacctcatcgttacaatggcttctctcacagtgcctggattagagaaatgcaacatgcatcagacaaatctataatcatcagcgaaatacttgattctagaacaagaaaccttgtatctgtctccaaaatcagcgattatgttctatcaaatgagcttgtaagtatggcactagcaatggtagcggaagacaaacaaataaacagagttcttgaagaactttttgctgaggagggaaatgagatgtgcattcggtctgctgaattttacctttatgagcaagaggaattgagtttctttgatattatggttagggcgcgtgagagagatgagattgtgattggctaccgtcttgctaacaccgaccaggctatcattaacccagaatataagtctcagattaggaagtggtcactagatgatgtctttgttgtcatctcaaaaggtgactaa

SEQ ID NO: 20855 - DNA, 1209 bp, Zea mays
  Peptide Sequence Number=SeqID_62634
atggacaagtacgaggcggtgcgggacatcgggtcggggaacttcggggtggcgcggctgatgcgcaaccgcgagactcgagagctcgtcgccgtcaagtgcatcgagcgtggccaccggattgacgagaatgtgtacagggagatcatcaaccaccgctcgctgcgccatcccaacattattcgcttcaaggaggtgatacttacaccaacacatcttatgattgtgatggagtttgcagcaggtggagagctttttgatcggatctgtgatcgtgggcggtttagtgaggatgaggcccggtatttctttcagcagttgatctgtggagtgagctattgccattacatgcaaatatgccatagagatctgaagctggagaatgttctcttggatggcagcccagctccacggcttaagatctgcgattttggctattccaagtcatcagtgttgcattcaagacccaaatcagcagtaggaacgccagcatatattgcacctgaggtgctatcccgtcgcgagtatgatggaaagtggtacttgttcatgcagcttgcagacgtatggtcctgtggggtgactctttacgtcatgcttgtgggagcatacccatttgaagacccagatgaccccaagaatatacgcaacaccattcagcaaataatgcaagtgcaatacaagataccagatcatgtccacatatctacggaatgccagcaacttattgcccgtatctttgttgccaatccaatgaggagaatcacaatgaaggaaataaagagccatccatggtttttgaagaacctaccacgggaactcacggagactgcacaaggcatgtactacaggagggataacagggtcccttcttattcagaccaaacgtcggaagaaatcatgaagatagttcaagatgcaaggaccatgccgaaatcatccagatcaggctatgggtggagcagtgagtattcggatgaagaagaagagaaggaagaggaacacagaccagaggagcatgaggaagaggaagatgaatacgataggagggtgaaggagtctgctaggttccggtatgataattctaacgcatgtgtgtctgacgataacaatctgcacaatctgcatcagacgcataatggaactattctgattccgattcgacaactactgaaagaaaaacgagggtgcagcactaaccgcatgtag

SEQ ID NO: 20856 - DNA, 267 bp, Zea mays
  Peptide Sequence Number=SeqID_62635
atggcaagcaaatcattgagtgcctcgtccctctgcatgcttgtcaagggtgaacgaagcactccatggggcttgaagggcttggaagctcaatccacatcgggttgtggtaaacctatgatgagatcaagaaaatcaaggtccctcgtcgagggaagcaggatagacaagctggaaccgaccactgaaagcatcaaggtaggaaacccatggatgcctgctgaagacaagggaccagtcaggatgagggtgcccctaggaaattag

SEQ ID NO: 20857 - DNA, 303 bp, Zea mays
  Peptide Sequence Number=SeqID_62636
atggcggaaacacagtttgggggaaatgagcaattcatggtctctggggaacaattggagcaattgctagtgctttggatgggtgattatcctacggagctcacggcgtgctcaatttatagcgtgcttgagcggtggccagtgaatttgatggagagacgcggcggtcgtagaaagagggggttactggcgctcgggattagtggctttcaccgtggcaagctccccagcgaccaccggatatgcaagacgcgattcactgcgatgtggtctagtgctttagcacgtggcgcactgcggtaa

SEQ ID NO: 20858 - DNA, 513 bp, Zea mays
  Peptide Sequence Number=SeqID_62637
atggcgccctgcaggggatcctcggcgagcagcgccatggaaaggttggtgaggccgctcgctaccgctgtccatggagctgggggaggcgctggagggaagggacgccatgggcaggagcttggccagcgtccaagcagggaggtggaggcccgcgcccatggaagaagaagatggcatgctcgccatgggaggggcatgcagagctgctgctcggccatgggagaaggggtgtccgtgccttggacaacaaatggaaggaagggccccgtgcagaggaaagggatgaggtgcgccatggagagaggagccaagctccatgcttgctgccgtggagcagggaggaagaaaaggggcgccctgctactgcgcgtgggagaagaaggcatggaggaaaggttgtggtggctgaaaaatgaggggtgggaatggaaaaatagccaagtgcaaggggagatggatcctatttatagaagaagccctagggttagggtttcttatgggttgggttga

SEQ ID NO: 20859 - DNA, 153 bp, Zea mays
  Peptide Sequence Number=SeqID_62638
atgaagaaggtggtctactacgagagcaactcatctatgtcctcaaccttcgacgccgagtcgacatcttcaaaacaccaagagcgtgagaagtatagtgatgaggactacgactccgatgaggccacccaagtgaggcacttcaactcctaa

SEQ ID NO: 20860 - DNA, 132 bp, Zea mays
  Peptide Sequence Number=SeqID_62639
atgggtgtcacgtccattgaacgaaccattaggaccaagaccatggccactgcattctttgtcgccgaggccctgaggtcaaatgattcgaggtcctgtagagggggccccaatttgtgggtgcccttctag

SEQ ID NO: 20861 - DNA, 321 bp, Zea mays
  Peptide Sequence Number=SeqID_62640
atgtggagcctggtgcggcgatggcgatgggggcggcggaggcggacggcgcgggtggtggacgagagcgcgctcggcgcagacggcgatactgacggtggcgccgccgctccggccgcgggcggcgcggtggtggcgccgacactgggtggcgctctagccagggcgctgctggcgctggcgtgcgccatccgcttcgacggcgcggacgtcagcgcgacggaggaggcgtgggccgtcacggggtggcggccgcgcgccgccgacgaggtcagccacctcatggtgcgcgagagcatgcgctacgccatctacgcgtag

SEQ ID NO: 20862 - DNA, 306 bp, Zea mays
  Peptide Sequence Number=SeqID_62641
atggcgaacacgatcatgggcacaacaacggcgctgaggcaccggaggacaaccgtccgcgtcggggtggctcggcgacagcgcgactttactccggtgagcaatcgcgcccagccgagaacagagaaaggacaaattaggggcggggaagagagggacggcgccgacacgcggggccctgatggtagagggagcaggagagagcacgcgagcgcgagaactgccactgaaaggaacacacaacctatctttaaaccatacaacgccttctacgtcctcacggaaatctttgcctttcccatctaa

SEQ ID NO: 20863 - DNA, 162 bp, Zea mays
  Peptide Sequence Number=SeqID_62642
atggccgctacacgtgggaatgggaatgggctttgcggggagggggatgagaaagacagtgcgaggaggggggatgagaaagacagtgcgaggagggggtgtgacataagtgatatcagagaaatgttgactgtagtgttactcttctctatctcactctag

SEQ ID NO: 20864 - DNA, 525 bp, Zea mays
  Peptide Sequence Number=SeqID_62643
atgaatggtggggtggttggggtatttatagccccaaccaccaaaagtggtcgttgggaggctgtctgtcgcatggcgtaccggacagtccggcgcgcattaaatgcgttgcagttgaccgttgcgtgtgaagtagtcgttgctccgctggcacaccggacagtccgcgtcaagttccctgctggagcttcatctttagcaccgccagtgccaattgctcaagcccctgctcctagaggcgatgatccggatgattctggtgatgatggagacgatgatgatgaggcagaagaagaagaaaacaacaatgaagaagtcaacgatgaccaagaggacaaccttgttgggatgtggcatatcaccgagcattacacctcgatgttcgagacgggacactttccaaacctgttgcagaatgtattgcatgcgctaggaacctacgtccgacctctatatgacacaaggcataccagcatctccccacaccctgcttggccctttcgggaaaggattaaccccttctag

SEQ ID NO: 20865 - DNA, 111 bp, Zea mays
  Peptide Sequence Number=SeqID_62644
atgggcttcactctgataccagatgtgatagaacctcccaagcgtcaagtccacgacgtgaatgacggtgagcgcgccctccggcgaacctgtactggccagaatgcgtag

SEQ ID NO: 20866 - DNA, 387 bp, Zea mays
  Peptide Sequence Number=SeqID_62645
atgggggagattcaaggcgcaagtgacaacctgctcattaatccaagggcacacatcaaccaatcaatggcccggagtcactggccgagccggtatgcacagggcgatcacagtcgtttactgatccagcgaccgcaaccgattcttccacccgcgcccagaccaaatcaagtggcggcgcggccggaatttgccccccgccggagtgcactggggcgacactgccctacatccggtgaccagagctcatcggagaatggaccaaaacgttgcagggagattaataaagctaacgatggagcccataccggacagggcagtagcagtggtcccgccaacgagttcatgcagcgcggcggtggatccccgacaccagcggggagctag

SEQ ID NO: 20867 - DNA, 291 bp, Zea mays
  Peptide Sequence Number=SeqID_62646
atggcagtctgtagcgcttgcctaccccggcttggagtgtttgtctccttttaccgggtgatccgtgtccactccttagtgggtgaggtggacaatggagttcgtcaagttggggaggccatggtcgaccggccttctaccctctcggggatcctgagcctagcttcgtgcgagatcatgctccatcgcaccatttgcggggattttgttggcacggagatggtcccgaagcagaagactgctcctaggctgaaggtgatcatgctcttgaaaaccatggccatggagtga

SEQ ID NO: 20868 - DNA, 252 bp, Zea mays
  Peptide Sequence Number=SeqID_62647
atgaacccaccgtgctgggggaagagcctccctagcatgatgcacaacgatggcgaaacaggtgtcaaaacgtacgatgacaccatgaagccggagagcgagatccggctcagcccgtctctcgggacgaagctttggaaatgggggaaacccctaacgaaagaacgcatcgagaacgacgcaattctcgccgccgtgatcatcgccaagcttaggagcgcgagcgggagcaagccgaacaagacggattaa

SEQ ID NO: 20869 - DNA, 901 bp, Zea mays
  Peptide Sequence Number=SeqID_62648
atggcccccaagcgagctaattcaaaggctgccccatccatcgacgacacggcgaaggcagtgtttctggtggacaaaaaaggcaaggccctcgtggacgccacccccaagaggccttcgaggacgacgctgtcaacagcaaaagacaacgcgaagaccaccccaccccgacggcaccgcacgcacttgcagttccaaagacgcgccccaggcaccaccgccaggctccgctccaccagagggcgaaaacaccgtagaggacggagaagtcatcgacatctcagccgaagaaatactcaattgtggttaaatccgggtcagcagcattctcccttccaaatgccgtcctccccgtggcctcccgctgccggagcgccgccgccgcagcagcgagcggcgcagggcacggtctccaccgtggcgccggagcgtctacccgtcgagggttcccgatctgggccagcgaaggaggaggacacggctcggcttccgtctgtcgactactactcgtggccgtttaacaaggttgtttgcagatccagcaaagattttgccgagaaaaagagctctactgagaagggcattttctcgacctctggctggtatactgagacccatgcatttgcctatatctatatcgatattattcctcctgagggacgtttcaactttttacctgagatatgggtgcctaccaagatcgtagcactaaggaagccaaatattacaatgatccaggatgtaattggaatcatgatgagcagcagatgggtgaacacacctgagctgcatcagctactccttatcttcatgcaactgtggtgttgcaggtccatggccagcactgtgagacatggcatggtggatgatggtgcattggtgcttcttccaccggcgcctg

SEQ ID NO: 20870 - DNA, 492 bp, Zea mays
  Peptide Sequence Number=SeqID_62649
atgaataaagacgtgcccttatgcttcccgtttctgacagaactacttgatgttctgcgatcagactctagtggcatgatttttctagtggcgattggcagtgacactggtgtttgtatgacgaaatatgagcttctcaaggactgccttggatccattgctcagagtggtacctcaaaatttctgaaggccctcaaggtgcatcatcatacattcctttacaattgtatatatgagtacgggatatggaaaacaaagaccttgggggctgacaatggtctaattggtcagtttggtgttggtttttactcggcttttcttgttgcggggaaggttgtggtgtccaccaagagtccaaagtcagataaacagtatgtgtgggaagctgtggctgacagtagctcttatgtcatcaaggaagagactgatcctaagaaaatgcttatacgtggaactcagattacactgtttgtaaggcctgatgagtattag

SEQ ID NO: 20871 - DNA, 300 bp, Zea mays
  Peptide Sequence Number=SeqID_62650
atggtcttgttgttggctatggttgtccaccttcacggagcttaccctgaaactcatcctggctcatcgtctcaggttggcgatcttgaagcacgcgttgtgggccaagcggtggggtcgtgcctggagataaacggcaaggaggaaattcgcatcgtgaggatgggggtggatgcagtaaaggagaatatgcgcttcggcctccagtggaggggcggagtcggcggtgggaagggaggtggcgacggtgaatgggacaggaggggtggtggttgtggcaaggacgagtttaggttttag

SEQ ID NO: 20872 - DNA, 594 bp, Zea mays
  Peptide Sequence Number=SeqID_62651
atgagcggcgccagacgagctccagccctcgcggcggcgctgctgctgctgctggtggcgtcgccgccggcctctgccgccgcgacgctgcagtgcgcgcaggtggcgcagctcatggcgccctgcacgccctacctgacgggcgcgcccgggatgacgccctacggcgtctgctgcaacagcctggccgtgctcagccagctcgccgccgcgcgcgccgaccgcgtcgccgcctgcgcctgcgccaaggccgccgccgcggggctcccggccgccgccgacttcgcgcgcgccgcggggctccccgccgcctgcggcctctccatcagcttcaccatctcccccgacatggactgcaaccagaatctcggcagcggctccgttggccggtacaacgactccgagctctcccggatttgcgacccttccttctacgttttagcatcgtctggcgggtcgggggtggccgggttgccgttgcaatcggtcgccggcgtggggccgtcgcggctgttcttgcccgtgcgcggcctggtgccggatgggggtgacgactgggctaccgtcggatggccattgggtggtgtgggttag

SEQ ID NO: 20873 - DNA, 396 bp, Zea mays
  Peptide Sequence Number=SeqID_62652
atggaatcaccccggcggcggctggattcgcgcttcatttggtgttcgtctgctgccgagcctgcgccgcacccgcacccgcacccgccgccacgggcaccgaccatgcacgcagccgctcctgcacccgcctccatctcgcgcagccatgcccccaacaaccggccgcgtcccgccccaaccccggccgccatgcgcacagccacccccggccatgcgcgcagcctggtggggctcaggctcggcggcatggtgggcgccggcatgttcgtgaccacgggccgcgttgcccgcctctacgcggggcccggctctacgccattgccggcctctgcgcgctgctctccgccttctgcgtacgaatccgtggacatgggcaacggcgagctagtttaa

SEQ ID NO: 20874 - DNA, 444 bp, Zea mays
  Peptide Sequence Number=SeqID_62653
actagacacaaccatacccccatctccatctcgaccgtccgattgtcgcatcaatctcgccttcatcccaaccgtccgattgcctcgctctcgctcctgctcccgctcctgcagccgcacccgcacccgcacccgccgccacgggcaccgaccatgcacgcagccgctcctgcacccgcctccatctcgcgcagccatgcccccaacaaccggccgcgtcccgccccaaccccggccgccatgcgcacagccacccccggccatgcgcgcagcctggtggggctcaggctcggcggcatggtgggcgccggcatgttcgtgaccacgggccgcgttgcccgcctctacgcggggcccggctctacgccattgccggcctctgcgcgctgctctccgccttctgcgtacgaatccgtggacatgggcaacggcgagctagtttaa

SEQ ID NO: 20875 - DNA, 462 bp, Zea mays
  Peptide Sequence Number=SeqID_62654
atgggcaagagcaagaaaggcggcagctcttcgcatcactcgggcgacaagcgcaagcgcgagccgactcctccttcagaggacttcggcgactcggaatactctgaggaggagttctcctccgagtccgagggctctccggctcctgcctctcccccggtgtcgtctgatgattcagacgactcccaggggattgccgcggaggtatggacctacatccagtcagtcgagcgcgctgggctcgcgggctcggataagtcggagtactcctcggacgaggagaactcgtccgaggagggcggtggcgacggcgatggcggtgacggcaacggcgacggcagcggtgacggcggcgaaggcaatggcgacggcggtggcaagggtggcagcggcgacggcgacgacggcagcaagggtggcagcaggggcagcaacaagggcagcaacaagaccagtggttaa

SEQ ID NO: 20876 - DNA, 336 bp, Zea mays
  Peptide Sequence Number=SeqID_62655
atggagaaggaaggtgttgccgataaggctatccgaatcatgcagaaatctgctaagcgtctcatccgtatatgcaaggagaagctacctttggacaagccactaaattcttttgatgttagggtactccgagaagcgcttgaatttactgctaaagtattggaccaggattctctattcttgcaaatagagttggatgatgccaaaaaggttgatgtcgaggacgatttcaattctatctctggtttcacttggcaggaatctccatgtgtaccacaccctgaagacttcatgtttggagaacactatgaaaagttttggggtgtctcagactag

SEQ ID NO: 20877 - DNA, 657 bp, Zea mays
  Peptide Sequence Number=SeqID_62656
atggcgggcggcggaggagccgtcgtgctcgtgcggcgcgtgtcggaggcgtcctctgaggagtcgccgctcgcagccccatgtccatactctctccagccctggggccaccggtggagcccacccccaccggccctcacggcctgtagtggctggaccgggtatccgacgcagatggcgctcatcgagtcgctgcacgtcttcaagcccgacccggcgcgtgacggggcgagcccctcggagaccatcgagcgggccctcgcgcgggcgttggtcgactactacccgctggccggccgcctcgccgtttccgagggcgccagaggcctccacgtcgactgcagcgccgagggcgtctggtttatcgaggccgatgtgtggtgccgcctggaggacgtcgactacctcgagtacccgctccagatccccaatgacgacctgctgccgcacccgctgccgaggcctacccacgaggaggagagcaagctgatcctactcgtccaggtgacaacgttcgagtgcggcggcttcgtggtgggcttccggttcagccacgcggtggcggacgggctcggcgcggccaagttcatgggcgcggtgggggagctggcgcgcggggcggaccgagtctccgtggcgcccacctccctgctttga

SEQ ID NO: 20878 - DNA, 336 bp, Zea mays
  Peptide Sequence Number=SeqID_62657
atgccgtacagcgagcaggtcgtgccaccgccagtggccagatcacggatcgatgccgatcttgttccgcacgtcggtgtcgccaaatatccatgcgaccaatacaacatgcaagagaaggaggaaaggattgaagaagaggtagttgagctacctattcaagatgagatccctctagctaccatagagcatgaggcgaagctgaaatcggggccaaagctaaaaccggctcacaaggggacacctcagaagagcaagagaatgaccaatattctgaaggcaattcagaaacctgaagagccatcccaaccaaggcctgctccatcttcttcgtag

SEQ ID NO: 20879 - DNA, 189 bp, Zea mays
  Peptide Sequence Number=SeqID_62658
atggcgctaagatcttgctccggccctcgtcctctatctcctctcctccgcggccgcgggtgcacgaagccgggcagctggctgcgaggacaaaggaggccggacagccagccaccagacgaccagagcgtggagcgcgactgcgcgagggatctgagcgggcgatttgtccagcactccagcctctag

SEQ ID NO: 20880 - DNA, 396 bp, Zea mays
  Peptide Sequence Number=SeqID_62659
atggcgagcgcccagctccacccctccctcctctctgcccccgtggccagccctaaccttcctaggcgcgaccatcgcgccctaacccaccctacgccatggcgaccatcccgccttctgctcctctcacccccaaccccctgcgagatccaggagcccatggaagacctcctcgctgaggccgagtcgaacccgagcaggatcccatacaaacaacatccgagcctggcgggcgagctggctgccgacaccatcatcgaccctgtcatggagtaccatgagctggacgcagaggtggattcgtcgggagatttgtcgaagcggaagcctccctccatggtagacgacactgtcgcagacggacataagtacaaacactcccaacccgcaaattaa

SEQ ID NO: 20881 - DNA, 234 bp, Zea mays
  Peptide Sequence Number=SeqID_62660
atgtccgtgaattatagcggcgagcggttgcgaattcccgaggctgccaagttccagagccgcgtcctcttggagcaccggacactgtctagtgtacaccggacagtccggatatcaccaaatcaggatgaagagtccgaccagttcgcgacttctttcatcacaccctttgcatgtactgctacatactatgcatcgtttgaggatgcggtgcgacaatacaaaggtgcatga

SEQ ID NO: 20882 - DNA, 297 bp, Zea mays
  Peptide Sequence Number=SeqID_62661
atgacaaccgagtttgtgtcaaggccaccatcttgtaccggtgggaacaaggcccagggcatttcggctggaagctcattaatggagacggcagggagcgtccaagaggagccgaaagcggagcaccagttgcgcatggagaaggcccgtgactctctatggagttactcgaccgagctaggtgatgcggacattgtgaggaagattatctcccttctaccacaacaaaagtatgggagcatcatcactattctttacaacatggaggacttgagtcaaatgatcctgccactgtga

SEQ ID NO: 20883 - DNA, 153 bp, Zea mays
  Peptide Sequence Number=SeqID_62662
atggccaaaaatatgggatttctaaagcttgaagctggcctttccgccatgtcaaaggatgacctcgcagaaagccttgcatacaacagtctgaagggcttaattcttagcaattcttcactaccggaatcgccgcctttgccgagtgcctga

SEQ ID NO: 20884 - DNA, 177 bp, Zea mays
  Peptide Sequence Number=SeqID_62663
atggaggatcacctggcctataaattcaccgcgctctcacccccgtcatccaaatcaactgagcactactcttcgtcccttagttatgaagctaacggctcactagccatcctgttctgtccaccatcatcggagatcatcggatttccctgggatcggtctcttccgccgccatga

SEQ ID NO: 20885 - DNA, 183 bp, Zea mays
  Peptide Sequence Number=SeqID_62664
atggcagtcggggtcagtgaggcattgtacgccaaggcggtgagccctgatctattgccagggaatcgatggggacggttgatgttctctggaggacatggttgctggagtgacttggtcatccatcttgccaccgggttggacagtcgagtgggaccctacctcggccgaggtggagcatga

SEQ ID NO: 20886 - DNA, 144 bp, Zea mays
  Peptide Sequence Number=SeqID_62665
atggagtacacttatgctattatgcatcatactgctgcaggcgagctcacatgtgaccattctccgctgtcaggagaaggacgtggtgaccatggagtacctttcactgaaagagtcgaacgagcaactaaactagaaggttga

SEQ ID NO: 20887 - DNA, 168 bp, Zea mays
  Peptide Sequence Number=SeqID_62666
atgggtaactcacaattctcaaactgggttgaaagaaaggggaggcttctaaaggataagttcaagggtgtaaaggtaggcataaaaaaatatgatagcatgagagatttcaaggagatgagcataccaataccaagagacaagaaattgttgaaagatagcgactaa

SEQ ID NO: 20888 - DNA, 261 bp, Zea mays
  Peptide Sequence Number=SeqID_62667
atggctttcctctctctttccatcttttttgcctggctcatttggctgccctgttggaaggccaccgcctcctcaacatcggttgtggcattggtgggcccgcacgcacaaccgcaaggcctcgtctcgcctcaatgcaaggtcgtctgcggtaacttcctctccatgccattcgcggacgcgtccttcgacggcgcctactccatcgaggccttctaccacgcgctaaggctgcaggacgtctacggcgaggtcttttga

SEQ ID NO: 20889 - DNA, 519 bp, Zea mays
  Peptide Sequence Number=SeqID_62668
atggacgagtggcgctgccggaggcacccgccctcggccggcggcggcgtgtgcccgcactgcctccgcgaccggctcctgcgcctgtgcccggactgcgcctgcccgcggccctgcgcctgctcctgcgcgtcgtcgtcgccttcgtcctcgtcctcgggcgccagcgcgctgggccgggtccacagcctcatcgagcgggagcgccgggtcgagcggtcgcgctccgtcgccgcgcacggagccgtcggcgaccagcggcgccccaggtccggcgtgtgggcctgggtgtccttccggaagccgccgccgccgccaccgccggccgcgggctgcagggacgtggagcaggagtacgacgaggcggtggcattggcgaggtcgaggtcggtgacaacgacggcgccggcctcggagcgccggcctcgatgggggaggctcatcgcaggaaagatcaaggcgctgcggagccggaagccccgccccggcggcgattggcgggacagcgtgaggccgtga

SEQ ID NO: 20890 - DNA, 579 bp, Zea mays
  Peptide Sequence Number=SeqID_62669
atgcattacgtagcttctctaccttttaacgatctgattctttcagctatcgaggagcacaaggatgctgacactcaaagtcgtgtgtggaatgatcttgagccacttatggattacctcaaagtgaatcttaatgattcccatctagaagcggttaatgcgggtctttcacacagatcctttgttcttattcaggaatcggagagacacaaactattcttagaccccttagtgtcgttctccattctactcctgacaaggctgtgttttcacgcatctgctctcaagtggcacccggacaaacatcaagggccttcacagatttgtgtcatattgctgaagctcagtggctatttcaatagctaccttcaaggtatggatgaaaccggatcagataggtattcatccaaagcagaccttgtccaatcaggtgaccgatcccaacaagctgccaaagtggaactaggacgactccagctccagccaggccccgatgaggacagtgaggctatcttagaggatccattcaggacgggcaacaccatccttgttggtatagcatcattctccacagtctaa

SEQ ID NO: 20891 - DNA, 126 bp, Zea mays
  Peptide Sequence Number=SeqID_62670
atgcggccgcggggtgagcggcagaacgctgtggctgtgcacgcctacaatacacacttaattagtagtagagattttggggggcctgtgcagcggccgagctccacccctcagaatagaatttaa

SEQ ID NO: 20892 - DNA, 177 bp, Zea mays
  Peptide Sequence Number=SeqID_62671
atgggcggatcattatcgactggtggtgtcaggtcttcttccatgggcggtgtcgtggagcaactgattgtctcacgtctcaccaacagggttgtctttattcctgataatgcatgtgttacgccatttgactggattaagaaaactttcttcgagaaaccccaaccagaggcataa

SEQ ID NO: 20893 - DNA, 297 bp, Zea mays
  Peptide Sequence Number=SeqID_62672
atggctgggaccaaaattttggcccaatgcggcagcccaataacgtttcctgtgtttaagtcagaaacgaaccgtgtacgggccttgaacatgggaatcctcgtctcggcaattttcttttcagctgttgataaattagaagatgagatcgatgcaatagaagcatacccagcggtaatagagacgatgctaggtgacactgtttatcgttgtaataattattacaattttatccgactcgatgccgggcaaaaagatataagaacaggatcttctgcataccctaatgagaattag

SEQ ID NO: 20894 - DNA, 114 bp, Zea mays
  Peptide Sequence Number=SeqID_62673
atggagtggcttaccagcggtggtagcactctagcggggtcgtcagtgaggtcgggccggttcaacagctacgtgcgcaagttgaaccactctgaaccaatccaactgttttaa

SEQ ID NO: 20895 - DNA, 738 bp, Zea mays
  Peptide Sequence Number=SeqID_62674
atgtcgcttgctgttgactacgtcatcctcaagggcctcatgagggatgtcgttagtgagggctaccttgcccttcttctcaacgagaatggccaccttcgctgcatcttcgatggaagtggtcattacagtgtgattaggtacaacacggacgaacaaaccatcaactctacccacacactggcttacaagtgggaccaggcggcccagggcggttttacacaggcccgccgtttcaacaatgcgcgggtggcgacagaagccttcgtgctccgtgagccaagtcttcgacagtcggtgaggccttcactgttcctggctctagcgggaacctgcaaggccttctgccacacccggttttggaaggcaaaccgaatgcgaaacatgggcctgcgcgtgaagtctaaggacggcgggttctattcgcagaaaaccgagggggtcttaagcaaatcaaccacatcgaaaggacaatcgggagggggaaacggcggggacctgacaagcggggtcacagagaggtcggccccgctagtcagcgatggagggcacgcgcatgcgcgacatcgcgggcgcgcgctgacggacggggccctccaggcagtgacacagaacgaggggaaggggggcgaaatgagcgaggcaggaggaggtgggggcgagcggttgaaggagggggagaaggactggcaagcggggcccaccgaacagcgacacagacacgcaaacacacgatag

SEQ ID NO: 20896 - DNA, 354 bp, Zea mays
  Peptide Sequence Number=SeqID_62675
atgggctcgggcgaggcggagacaatagttccagagagagggaacctcggccgagatgaggattctcccgaatacgtaccttgtccgaaggcaggctcaggcaaagcggagttatggttgaccatcaagaaaggcctcgggcaaagcgcggtttatgctctcttgaccttgaggaatgtgtctgacgatagtcttggggttaagcatgtttttagggacacaatccaggaagcaggcagcgaagtggtcaccgcaaattctgagtctacaaccaacaacagggacaacatggccaaactccacattgtgacgaatgagatcaagggcctccgtgcatcgaggcatagcttgtag

SEQ ID NO: 20897 - DNA, 513 bp, Zea mays
  Peptide Sequence Number=SeqID_62676
atggaggagcagtctaccgtcggagtggggaagagcaatgccatcgaatgcggggaggaacatggctgcagctgcaggggagggcatcctcactacggtcacatgggaggggaaactaggccacgcaccatgctgaaggtgctggccgccgttggcgtaggaacagagggcgacaagacaaagagagggctggcgtgtgagaccgcgaccgggagagaggcggacgtgggctcttggtcagtcgcacgcgtcccggcgcagatgaagccgggcttaggggcggtgcacctagggaccgcaaccaggaaggaggccggtggcacaatgcctagcgcgacgatggacgcccatgagcgtgaggagagggtagggaatggaagggaggtaggagcaatcggcgtcctccatggctggaggggaagagctcagactgacggcaagctaggggagagccgatacagtcatctaacagtgtccttcgagtcctaccacctcgaggtcgttaaggcctag

SEQ ID NO: 20898 - DNA, 351 bp, Zea mays
  Peptide Sequence Number=SeqID_62677
atggcagcgccgtccggcggtgggggcggcggtgcgggggagggctcctcctcggccgccgcagctatgacgatcggggcccacggggtggaccaagaaccgggcaatgctgaggcacctgggtgtcggcggcgcgtcggtggtgttataaacctccgcgtcgtcacagaagcgatgtggcagatgaatttaggagatgccatggaactggggccatacccagagcgtgttggtgatccagactgtagctattacatgaggactggcatgtgcaggtttgggatgacctgtaaatttaatcacccagcagacagaaagctggtaaaatccattcttctacccttcttttag

SEQ ID NO: 20899 - DNA, 108 bp, Zea mays
  Peptide Sequence Number=SeqID_62678
atggccggccacctgctgcatgctgcccctgctggttctccatggcagactgagctctgcagcattgccgccctcgcccaccaatggctgtcagctatgcctctttaa

SEQ ID NO: 20900 - DNA, 330 bp, Zea mays
  Peptide Sequence Number=SeqID_62679
atggagggaagtggtcgacgaccgccttcaagctccattgatggccgtaacgatgacggcggtttccggttcgagttgaatggggagaggaagtgggggagggagaagataaaacgaacggcggtttcggttccgggactgaacgtgcgcgaccaaggggcacgaacgccgaggaggcggcacggcctccagtgccagccgagcggcggcgacgccgtgccagcacatgcgcgtgacgcgcggccagggaagaggaataggccagggcggtcccgcctgcaagtgagaggtggggaggggaaaatgggtggctggccggttgggccataa

SEQ ID NO: 20901 - DNA, 462 bp, Zea mays
  Peptide Sequence Number=SeqID_62680
atggccacgcctgctcggctgctcctgcaggggccgcgcagggcccttgccgctgggggctggccggggaggctcggctggggccgaccgccgcgcgcgccgcgctggctgtgcaggcaggctgccgcgccgactggccgccggggcctcgatcatgggaacgcagagaggggcatggaagagagggagaagaaggggattcctcacctgcgcacgacgaacgacggaccaagcgcgcaaggaagacggcgattttggacggatgctccggggagtccggacacaggctcctactgcacggacgtcgatggcgagacgagggtgctgcttgacgcggcaaacggcgagccggtcgctgggcgatgcttgagaccgattgatgcaattcctaaggatcccttggacctgtgggttatgggcccacacacgatcccgctgcgcctttttgatcttattggttga

SEQ ID NO: 20902 - DNA, 1461 bp, Zea mays
  Peptide Sequence Number=SeqID_62681
atgcagcgtttggggtattttgggaatggagttgggcgagcgtcggggcctgaagatgtccccgagccggaggattcattagctgacaccgaaagttatggtagcattggcgaagtttgtctaggcggtgacttcatatggtgggaatcgtctgttgaggtcttcgccaagaattattgtctgaattggcagaaaaagaagattagtgaattgattgcccaatttgggtcttgcacgttcacgccgaggattgggaagacatcggccgaagcagttgaaattattccatgtgccaagaacaagtggggtaactggtggtggggtctgggtgaagtcacgcttcacctgatgccatttttggatgatcagatggtgcagagccctgccttcgccatcgatctgcgagggcaggatgcagccgccttcgttagggagggggactttgctgatgctggggacgaccgagggaaacaggtgaagactcggtctaaagagggcacctcgaagggaaagaatgtgattgcagcgactcgtaaaaggaaaatagaggcgaaaggtatggagagggaaacggcggggccgaaggcctctaggttatttgttgaggaattgacgaggacatgtgctgggcctggggaggtgaccgggggtcggtggcataagaaggaccctattccctgggccaccggcgatgactattttatgtcttgtatggctcgtgaattaaaaatatttccttacggaagaaacattggtgatgttgtgtcagcagtgatggataaggatcgtcaagaggcccttacggaagaagggactaagaatggtcagttggtggtggcaccggcgaggccgtccgctgacatgggggcttcggcgaggggtgcggctgggacctcgctggatccgtgggcgcatttttgggctgctgctgatggtggcggcgaaattgccgtggcggcggctgtcacgcgacaactgcgctatctgcattccgagaggaatcggctagagggcaaaatagagcgctttcggatgcaacatacagaagctatcagggacaagtcggcagccgagaacaagagccaaaacctactcgataaggtgacagcgcttgaaaaagagaatgaagatctcttttgtgagctcaacgacgagaaggatgccgccgctgaggcgaagacggaggccgagagtgcccgcaagcatgctgccgagcttgagctcgaggtgaaaagaatgcacgcctgccgtgagaagacggagtctgccactcgtgctggggtggaccaggcgcacacactttttgtggatgcgtaccgcgacctcggtgcgcaaactactcccttcaacaagtcaggaggggaggtggggacccattttctcgggtggctgcaggaggagctggagtcacacccgtccaacatgatgggcctcatgtcctacgcatcgcttatgtcctag

SEQ ID NO: 20903 - DNA, 1230 bp, Zea mays
  Peptide Sequence Number=SeqID_62682
atggcagcatcaaggagggaccatcagcagaacgctagtctcaaccggggcatccagaatatattcccagggctcaaacccagtgagtctggccaagggctacggcgtgcaagctcagcctcttcaagtcacagcaagacactgtactctgcttcgtccatggctgctggtgcaaggcagggaaacacagtgagaagaaaagcagaaaggcctggtgccacatctgtgtggcctccagcccttgcagttccaagcacctcgtctaaggatatcaccagagcaacgaaatcaccatccaccatgcagaagagtaataatctctctacaaggcccggcattgagaaggcggcggcagcgtcttctgtaaagctgaaatctcagaaaacagtagtaggacctgaaaaaactcaagctgcagcttcgactcgtgctcctggcgctataacaaagaaaagaatgggagccgagaattatgtctccatccagaggacaacaagtgtgccggtaagacaaacagagacaccgaaaatggtggaacgagacgttgagttgttgatagagtttgatgagacggagagcataagcacctcttccatagaggagcacttgcatgaacgactccctgaccctgttgatatgaaatctgcggatctcaatagcaagacatcctcttgtccggaggaacacaagaatcgagacaacacagggggcattttgggggagaaacagggtggaaaggacaatgaagacctcagcacaggcgacagtgcttctgctggaaacagaaacagtgatacaaacatccctaaagaagcagtcgatgaatctgagttggaggaagctgttgatggacctgggtcgaataaagatgcctgtgcatctgagctaaatgaaactgtaggtcggactgaactaaacgaagctgtcagtgaaaccgaaccaaaggaagctaaagatgaagccaagctaatacaagttgactgtgaaattgtactaaaagaagctgccagtggaactgagttaagagatgattttattgaacatgagttgatagcgcaagaaaataccaaaactaaggagaacataaccatggaattagcacagaagtggaggaaggatgaaaggaggagcaatgaagctacagaggagggcaggggcaaacctatccacgagaggaagaacaaggtaatggccttggtggggagatttgagactgccatgtctggctga

SEQ ID NO: 20904 - DNA, 1347 bp, Zea mays
  Peptide Sequence Number=SeqID_62683
atgccatcatcgataccaccaccgccacaaaattttctcccactgccatcaccaggggttgggcagagcactcgtattaaccttggggaaatcaagctaaaactagttaagaggattggtctagagcgagcaaagaggtactttgagcacctgcagaggtttttgtctttgaagctgagcaagagtctatttgacaagttctgcctcacaatacttggtgatgataacattcagcttcataaccacctcgtttgctcaattctccacaatgcttgccaagcaagtgggccatcgacagtcagtacacctaaatcaattggagttgccaagaattcaaatcatgtcttaagtcctacagtccctttctctgacattggtgatgttctgcatcatcatgtcaaggaccactatccacgaagcagaaatgcacatgtcgtccaggagaatggtgttgtgcgtttgtccaaactgaagagatttccgcagcctcacagtgaacttgtggaactactgtccaaacgatcacgtgtggagaatgcatattcaaatttatcagaccccataaatagcaactgtcctggtgtctctggtagagaatatgtggaagctgttgcacagcatgctcgaggtccaataattgccccactaggggttgccttctgttctggtcatttcggtgggaattcaaaaaccttgacacttccctctggtgctagcagtgatgactctatttgttgttatgaccttggtcagctgtgtgatacttcatcactgagacagcgtatggggagaatagcagaaacagaagggttggatgctgtgtcattagaatgtgctaattcattgaataatggagttgatttttacttgaaataccttattggatcatgtattgagctagtaagagcaagatctcagcatgatcgaataaatcatatggcactaaaacaacagttaagtcaaaagctaataaatggtgtgcagctccaaaatcaggtgcatggtcaaagtgccactacatgtccgcaaatcagctcggtttcattgcaagacttcaaggctctatcagagacaattcctcagctgcttggagtcaatgcatcactggagcactttgtcaatgttgactcctgcttgagcaacatgtcatggaccaacgaggatgtcgacgtcgctgatatggccaaggaaaagctagagcgcgaggctaccaccacaaagctcgaggcagagactaagcatgccatggagactgttagacgtgccttcctcaggaaaaggcaacgagatcaacatcctcgggcatccctaagatcatggaagaatctcgaagtccctaatgcgtga

SEQ ID NO: 20905 - DNA, 270 bp, Zea mays
  Peptide Sequence Number=SeqID_62684
atggacactcttccacaggaaggtgactcgcgcatcgttagactcaaaactcatcaacgtcatctgcgaagtcttcgtgatcaccctctgatcaaaatattagcaagggtgagctcacttatggtcggggctcagcaagtgggggaaataatgcaagttaataaggtacaaatagaaatgcagatggagaatccacttgccttgctcgaaagtgtcatgtgggtcctcctcgaacgtgtttggttcgtctacctcacagtcaacttctag

SEQ ID NO: 20906 - DNA, 468 bp, Zea mays
  Peptide Sequence Number=SeqID_62685
atggagggggagtacgaggggggcagtgcgcactactggagggttgcagttcagtcggaggtggctggcgctgcccacggctgcaagcagaacgacggcggccatggacgggagctcgcaagaatgggagggacaacgctgggagcgtggagaaggaatggagaacattggggagtgctctggcgccgtttatatagatgggggaggcagagaagggtcagacaggaaggggcaatggcagggaccgagaaaggggatatttcgaaagggatccttctccgcgaaggaagcgggccccgagccctcctactgatcaggggtttgaaggctggcccctcagaagggtttgacagccgccccagagcactcgggctccaagccctcctactgatcaggggttcgaaggctggcccctcggaagggttcgacatccgccccagagagcccgggctccgcgcccactactaa

SEQ ID NO: 20907 - DNA, 141 bp, Zea mays
  Peptide Sequence Number=SeqID_62686
atgaggccggttttcgtggggaacctagactatgatacccgccactcggagctcgaccacctcttctaccgctatggcagggtcgagcgcatcgacatgaagtcaggaaaaaaagtgagggaattcccccattctgtataa

SEQ ID NO: 20908 - DNA, 2073 bp, Zea mays
  Peptide Sequence Number=SeqID_62687
atgaagcaaatagtctcacaacaaatttctgccctcaggctctacgatgtcaacattgcaacgatagatatgagcaagaagttgcctctatcattagaggaagtggcgttacagctgatgctcaccaagaaggttagagatgatcaaatggtattgagtacaaaaatattgaatctagagaagaagtggaatgagtactgtgtacgtctccatcaaggttgcaatagaatcaacagagatccttgccagttatttccacatcacattggtgttcgagttgacagggaaagatgtgcaaatccaaaccaaagcgcacagacaattgcacttcagagggatattattaaaccttgtgcattgtcttctccatacaccaatataactgcaaagagtatttcagcaccagaccaaataaatgcagaccttgtactaaaccttcaagtgaggcagtcgaggagtaatgaaccccttcaaagtggggttgtgccattccaacatatcaactcatcaaattataacaaacccgaagaatcatctgctgcacctgtgacaactgatttagtgttggccacccctcgtggatcttccttcaaggattcaagtagtgccctgtgtaaacgtgtagaggacattgaagagacaatccagctgatgcctaacaaggttgacgatctgaatcttaaacctcctcacttgtctatacaaccttacacttgctccaagagttcctcatcaaattgggagcaaacatcacctagtgctctgcattcaacatctttaggaggcacttctgcctttggccaatggcagaggccttcaccgctcgcaacacaaagttttgatttgagcaattacaagctacttatggaacacctgtttaaggttgttgggaggcaggaggaagcattgagtgctatttgtgcatccattgtgcggtgcaggtcgatggagaggcgtcgtggtgcaaacaaaaagaacgacatatggtttagtttttatggccctgacagcattgccaagcggagagttggtgtggcacttgctgagctaatgcatggtagctcagggaacttgatatatctggacctaagcctcaatgattggggtaaccctagtttcagaggaaagcgtgccaccgactgtatctttgaagagctgagaaagaagcggcgatcggttatcttccttgacaatattgacaaagccgattgccttgttcaggagagcctgattcatgcaatggagactggtaggtacaaggacttgcatgggggacgagtgactgatcttaatgactcgattgtggtgttgtctacaagaatgatccaaggatgccaggatgcttctcttggggtggaagagggcaatgctttttcagaagaaaaggctgtggcagctcgtgggcatcaactgaagatcatagttgagccgggcacaaccaacatcggtggaggcaacgttgtagtttcgtcaaggcattccttgggaagcagtgaagcctcaagttattccagtaagcggaagctccacatctctgatgggcaagaaaagacagaagaatcggcaagcacttcaaagcgactgcatagaacatcaagcatcccattcgacttgaacctcccaggcgacgatgaggaagcccatgatgatggtgatgatgacaagagcagtggcagccacgaaaactatctagagggatctgtcggaaacctcttgcgttgggtggatggttcaatcaatttcaagccatttgactttggcaagctttgtgaggacatcctgcaggagttcagcaatactaccagcaaaattctgggcaccagggggtgcaggctggagatcgacgctggggctatggagcaggtagtggcagcggcatgggcatccgattcgcatgagaatgagaagaggcctgtgcggacgtgggtggagcaggtgtttggcaggagccttgagcaggtcaagatgaggtgtgagaatctgagcagctgtaccctgagactggtttcctgtgaggtgaaagaagatggttttggagctttgcttccctcgagaataattctggattggtga

SEQ ID NO: 20909 - DNA, 729 bp, Zea mays
  Peptide Sequence Number=SeqID_62688
atggctatgaggagaattttgatcgttttcctctctggtcacaggatcaaagctcaaaatgaggagattagcatggttcaacatgctgtcatgaatgatgtggtgctagaattgacaaacaatgagggtgttatttatacatcagaagggttaatggatcataacctagccattcaaaccagtagtgtgcagcaggctgccaagaatgatgtggcgatagatggggccaaattgatagcatcttcaacctacaatttggtcctaagtaatcagcctggtcctgaagatgcacaactggataccaaaagtccaaaatcccatgtacttaataccctgtgtggggaggctgctagctctgcgttttgtagttctaagactttggacaaaaagcttgatttagagaccagaaattttgtctctactatgcttggcactagcaagaaaaatcccaaaggtacaggttcatattcccttgatcccaatttcaactctgttgatggactccattgcagcatacggaataatgttaattttgtggatggtacatcgttggcaaatgatgacatgctttgcaaggccatgaagcttactgctaggtgtaatttggatgcttcatgggacgacaagatgatggttgcgcatgctgaggcatcaccattgccttcggttatgtcctcactagaacttggtgtaaatttatctatgaaaacgttaaagggtttggactag

SEQ ID NO: 20910 - DNA, 444 bp, Zea mays
  Peptide Sequence Number=SeqID_62689
atggcgctggacgcctctttcccagatcgacgggcgtccatctccgtgcgtcctgtctcccatggactgaacgtccctccccctcgcagcacctccccttggcgagtttctttccctgcaaccctgcattttccccctgccatggacgcccaagaacagcagctcctccaactccccatggcgcgctgcagcagacgccgtggagcacctcccggcatctcccctgccatggctcgtgactcggcgtcctccctgcttgcgtgctgctgcgcagtgacccgcggtgcttgcaaggtgctcggcaaaatgcgcagcagccccgacgtctgcgcgcgctgtcggctcgctgttttgggaagccaagtggacagcacgccgtcgacactcgccggttgtttgctgtttttgcacagccccgtcgtcgtcgtcgttcacccccggtga

SEQ ID NO: 20911 - DNA, 177 bp, Zea mays
  Peptide Sequence Number=SeqID_62690
atgcctctgcccttgcctctggcagggtccctctcccgcctcgcctggctctgcgtggtcggtcgggtgattggaaagaaaattgttgaggtggagatggacctgaccaaggccaagagcaaggggtacctatgggggaacagcactgcagctgtgaacaccgacaagaagcagtag

SEQ ID NO: 20912 - DNA, 807 bp, Zea mays
  Peptide Sequence Number=SeqID_62691
atggaagacgaagccatcaagcgaaatgaagaagaatcccatcttgcctcagaagaagcaagaaaagctgaagaggccgctgatcgtgaaagacgtataggtatgcataacaccctaggtgttactagtagagtaagaatacaacatgtgaagtcatactcaggaactaagaccttaagtaaataccaagctatcataaggcatctcctaaatcttcttatgatcatcacaaagcctgctagacagatcacacttgagtatgcgagatcttctcagctagtgagcaaaacccgacggcccccaaaccttatctctagcttagattataagcaaaaaagcgtatatggagattttgctaagatcaggcttggacaagcgaaaatacgcctgggagactggccagacgaacacatgccaggtgttcgaccacggttgatagaagccgagcgggttctgtccgcctgcccgcgcaccaaccctcacgcgtgcccacgcctgtgccatgaccagggagacgcagcgtcacgcacgcccgtgcctataagtaccagcacgccctcgatctctccctccacgacattgccagtcgttcttcgcaggagttcactacagccgaggatgccaccgctcgtcctgccagccgagagtcggccaccgtggcccgaccggcacaaccttcaaaccaccgagcaaccaacaccaggagcttccttaaaccccagtgaacctcctcggcaagcccaattcgtctgtacaccccacaggagtagtgccattggtcaccggaccgcactcatgcgccggtga

SEQ ID NO: 20913 - DNA, 450 bp, Zea mays
  Peptide Sequence Number=SeqID_62692
atggggcaaacgggcttcgatggcgtggtcgtcacggtgctggcgctgggttcggacgactggacgatggtggtggtacttgatatcggcacggcaactacgttgagcgggcgcggcaatcgacgagctagcagagaactcggcaacgaggtagcagcaagcagagcgaagggacgcatggcgcggtgcacgagggctcgggcggtgtcggtctctggcgtccaggcgggcgtcgaggcggggtcctgggcggcgggtgtgacggcgcaggggctcggggtcgtggatggccgagcgcgggtggtcgggttctggcgtggcggcttggtccttggagctgcgcgcgggcggttgagagcagagggaaggagagagagagaagagagagggaggaaacggctcttggcggcggctgggagcagggagagggagcagggcgcggctggctag

SEQ ID NO: 20914 - DNA, 729 bp, Zea mays
  Peptide Sequence Number=SeqID_62693
atggcgctccgcctcaacgacgtcgcgctctgcctctccccgccgctcgccgcccgccgccgccgcagccgcagccgcagcagcggcaggttcgtcgccgtcgcctccatgacgtccgccgtctccaccaaggtcgagaataagaagccatttgctcctccaagggaggatcctaggactgagaataatccttatcttggtttcatctacacctccttccaagagcgggcgaccttcatctcacacgggaacactgctcgtcacgccaaggactttggcgacttaaagcttgcacaaatctgcggcatcattgcctcggatgagaagcgacatgaaactgcgtacaccaagatcgtggagaagctgtttgagatcgaccctgatggtaccgtggtcgctctggctgacatgatgaggaagaagatctcaatgcctgcccacctgatgtttgacgggcaggacgacaagctgttcgagcacttctccatggtcgcgcagaggcttggcgtttacactgccagggactacgccgacatcctcgagttcctcgtcgacaggtggaaggtggtgaacctgactggtctgtcgggtgaagggaacaaggcgcaggactacctttgcacccttgcttcaaggatcaggaggctggaggagagggcccagagcagagccaagaaagcaggcacgctgcctttcagctgggtatacggtagggacgtccaactgtga

SEQ ID NO: 20915 - DNA, 750 bp, Zea mays
  Peptide Sequence Number=SeqID_62694
atgatcgggtggggcgacgtgtacaaggtggtggcggcgacggtgccgctctacttcgcgctgttcctgggctacggctcggtgaactaccgcgccgtggccgccgacgtgatctccaaggccgtgatcgtgggcgtgatcggctgctgggccggcagcagggtgggctccgcgggcaagggcaagggcgccgtcggctggtccatcaccgggttctcgctgtccacgctaaccaactccctggtggtcggcgtgcccatggccagggccatgtacggcgagtgggcgcagcagctcgtcgtccagctctccgtcttccaggccatcgtctggctgacgctcctcctcttcgtgctcgagaccagaaaggccgccatcggcatgtacgtcgtccccggcggcgctgctgacagcgacggcggcgtgccggactcgccggtcaaggacaaggacgtcgaggccgctgccggcgatcgtcgtcccgccgccggccctgccgctgctgccaccgtcgtggtcgtcgtccccgtgaagccctcgctctgggcgctcatcaaggtggtggcgcacaagctgtcgcgcaaccccaacacgtacgccagcttcgtcggcatcacctgggcctgcgtcgccaacaggctgcacatcgagctgcccagcgccttcgaggggtcggtgctcatcatgtccaagtcgggcacgggaatggccatgttcagcatgggtgagagtgatttccctgtctcatga

SEQ ID NO: 20916 - DNA, 324 bp, Zea mays
  Peptide Sequence Number=SeqID_62695
atgtgggaccccgcacacagaaccttctctttccccaccgtgaagatttgcagcaaaattctgttgagatccgatcctcctcacgcacctgctggcgggatcctcagggcggttgagtttgctcagggtataaatcccaaggcctcatacccatactttgtaggacctaaaccatcgctagccgagcaatgcagggtgatgggtgggctgtgcaccgtgcggagggcagagagagattggggcgacaccgctattggccaaaccgggaatcagatgattgttgtcgccgtgaagttgctcggagggtccaccagacggcgctga

SEQ ID NO: 20917 - DNA, 243 bp, Zea mays
  Peptide Sequence Number=SeqID_62696
atgtcgggagaacgctccaaaagggagatggtcactggcgaaaagctcgaagcctcgagaaggaagaacgatgaaaagacttcgtcaaaggaggccggcggcaagcacaaagaggagttcgctggctccatcaagtcacataggaagggtgacgagaagaaaaataaaatgaagaaggtggtctactacgagatcgactcttcatcaccttccacctctagtgccgagtctacatcttcataa

SEQ ID NO: 20918 - DNA, 240 bp, Zea mays
  Peptide Sequence Number=SeqID_62697
atggacaacattgatgaggtgatcgacaagaggatggtggctctaagggagatcgagaaggacaagatcatagtcgccaatgcctataacaagaagcttttccaaaaggtaggtggcatgtgtttagcaccatatgtgccaccctggatggatacagaacgtgtaataccaccattagtctcaggaggatacgggtacccagttcctgagcacccggttattgtttctagcgtgcaataa

SEQ ID NO: 20919 - DNA, 1827 bp, Zea mays
  Peptide Sequence Number=SeqID_62698
atgggatgccttgtggctctgagccatttcatctcgcgcctcggcaaaagaggcctacctctgtaccacctcttgaggaagaccgagcgcttcacttggacccccgaggccgaggaagccctcgggaacctaaaagcgctccttaccagcgcgcccatcttggtgccccccgctgccggagaagccctcttgatctacgtcgctgctaccactcaggtggtcagcgccgcgatcgtggttgagagacgagaagaagggaatgcattgcccgtccagaagctggtctacttcatcagcgaggtactgtccgagaccaagatccgctacccacaaattcagaagctgctgtacgcggtgattctgacgcggcggaagttgcgacactacttagagtctcatccggtgactgtggtgtcatccttccccctgggggagatcatccagtgccgagaggcctcgggtaggattacaaagtgggcggtggaaatcatgggcgagacaatctcgttcgcccctcggaaggccatcaagtcccaagtcttggcggactttgtggctgaatgggtcgacacccagctcccggcagctccgatccaaccggaactctggaccatgttttttgacgggtcgctgatgaaaacaggggcaggcgcgggcctgctcttcatctcgcccctcgggaagcacctccgctacgtgctgcgcctccatttcccggcgtccaacaacgtggctgagtacgaggctctggtcaacgggttgcgcatcaccatcgagctaggggtccgacgcctcgacgctcgcggtgactcgcagcttgtcatcaaccaagtcatgaagaactcccactgccgcgacccgaagatggaagcctactgcgatgaggttcggcgcctggaagacaagttctacgggctcgaggtcaaccacgtcgcccgacggtacaacgagactgcggacgagctagcgaagatagcttcaacgcgaacaacggttcccccgaacgtcttctcccgggacctacgtcaaccctcagtcaagacaaacaacacgcccgagcccgagaaggtcttggccctgcccgaggtgccctcggctcagcccgaggcaccctcggcccctgagggtgaggcactacgcatcgaggaagagcggaatggggtcacgcctaatcggaactggcagaccccatacctgcaatatctccaccgaggagagctacccctcgacagagccaaagctcggcgactggcgcggcgcgccaagtcattcgtcttgttgggtgacgggaaggagctctatcaccacagcccctccggcatcctccagcgatgcatatccatcgccgaaggccaggagctcttacaagaaatacactcgggggcttgcggtcatcacgcagcgcctcgagcccttgttggaaacgctttccgacaaggtttctactggccgaccgcgaaggcacccgggggctacacgcacctgctggtcgccatcgacaaattctccaagtggatcgaggtccgacccctaaacagcatcaggtccgaacaggcggtggcgttcttcaccaacatcatccatcgctttggggtctcgaagtccatcatcaccgacaacggcacccagttcaccggcaggaagttcctggacttctgcgaggatcaccacatccgggtggattgggccgccgtggctcaccccatgacgaatgggcaagtagagcgtgctaatgacatgattctgcaaggactcaagccacggatctacaacgacctcaacaagttcggcaagcgatggatgaaggaactcccctcggtggtctag

SEQ ID NO: 20920 - DNA, 456 bp, Zea mays
  Peptide Sequence Number=SeqID_62699
atggagccggcgacccctccggcacccgccgccggcgtcacggctaccgtcgacctctcctcagtcgcagccgacctcggtggggcgcacctcctgccctgcggcatcaggcagaacggcggcgcccccgtatccgactacttcaagcctagggacacaggttatgtattggagaagagtcgcggacagaattcagatgctgaagtcagcaattttacatcccgagctgaattccagagcataacctactggaatcacgatacagcgccatcagcagaggattccctcccgaggtgcttccattggcttaccgtcgctaatgcgatgcatagagcagtgactgctgaagacctgactaacatgggcagcaatgcagaatcaggacaagtagattcgttctataacgaagccatgcaatttcgatttggtgaaccatctcgacaaaggatcttgtaa

SEQ ID NO: 20921 - DNA, 1128 bp, Zea mays
  Peptide Sequence Number=SeqID_62700
atgcaccaccgcgcaccactccctcctcggctcgccgacctgcctcgcgcgcccgcggcggcggccgtgccccgtcgtgcgcgctgccgtcgccgtggaggccggcgctcaggccaaggtctcactcatccggattgggacgcgtgggaggtgatcgaattcgaccctttctgcggtttctttgtttgggatgacgatgaattcgtggttatgctggacagtcctctggctcttgcacaagcccatgaaactcgggaaaaactgaaagccgcacactctgagttagctgaggagggggctattgagatcgtcatcataaagaccacaggagacatgatcttggacaaaccccttgcagatattggaggcaagggtttattcaccaaggagatagatgatgcactcttgcagggaaggattgatatagctgtgcactctatgaaagatgttccaacatatctacctgaaggcacaatattgccctgtaacctcccacgagaagatgtaagagatgcattcatatgcttgactgcaaattcgctcgcggagcttcctgctggcagtgttgttggaagtgcttccttgcggagacaatctcagattctctacagatatccatcactgaaagtagttaacttcagaggaaatgttcagacacggttaaggaaactcaaggaaggagatgtgtctgctacattgttggcgctggctggattaaggcggctaaaaatggcagaaaatgcaacagctgtactatcagtggaagaaatgcttccggcagttgcccaaggtgctattggaatcgcttgccgaagcaacgatgacaaaatgatggagtatctgtcctcgttgaaccacgaggataccagactagctgtcacatgcgaaagagaattcttggcagttcttgatggcaactgccgaactccaattgcggcctatgcttaccgtgacaaggacgggaactgctcattccggggcctactgtcttcaccagacggatctaaagtatttgagacggcaagaagtggaccgtactctttcgacgacatggtcgagatgggcaaagacgctggccacgagctgaaggcgaaggctgggcctggcttcttcgatagccttcaatga

SEQ ID NO: 20922 - DNA, 402 bp, Zea mays
  Peptide Sequence Number=SeqID_62701
atggcgcctcgcgtgctccatgacgacggcgactctcagcccccttacggaagcaaggagatgtcccgggttcgaagcagcctctccgcattcgcgggagaaggtttgccttggtttatcccttccccagatccgcctccggcgctggaggcaaatgctgaggactccagtgctggtgctggatcaaaggactatgtgcacgtgcgtattcagcagcgcaacggaaggaagagtctgacaactgttcagggcttgaagaaagagtacagctacaacaagatcctcaaggatctcaaaaaagagttctgctgcaatggtactgtagtccaggatccagagctaggccaggtcattcaactgcaaggtgatcagcgtaaaaatgtcgctacttttctagtccag

SEQ ID NO: 20923 - DNA, 270 bp, Zea mays
  Peptide Sequence Number=SeqID_62702
atggcgtcgcttctgacgctggatcccgagcccgagtacgagctgggcgagtcccttgcgctgtcacccggccctgtgcagctgtgctctgtgacgctaatgatgattgatgtggaccacaccatcgccgagatcctctggtgctctgcaagtctgcatggaccgcacgcccgtcgccggctcctgctccacctccacccaccggccaccacgcctgtcggcccctctccgtggctaggccccctgactcgcgagtctctcgagtggtag

SEQ ID NO: 20924 - DNA, 720 bp, Zea mays
  Peptide Sequence Number=SeqID_62703
atgcgggcggcatgcaaccgcaccaagggggcgcacccttttggcttcgacgcgtccagcatggaggcccaggcccacacgtcatggatcgggaaaggggatactccgaaaaggatccttctccgcgaaggaagcgggccccgagcccccctactgatcagaggttcgaaggctggcccctcggaagggttcaacagccgcctcagagcgctcgggctccgctcacactactggtcagaggttcaaaggctggcccctcggaagggttcaacggccgcctcaggccactcgggctccgcgcccactactgatcagaggttcgtaggctggcccctgaagggttcgacagccgcctcagacgcaaggcgagggatgaccttggccaagtccggcctcgggcgccataggaagctccgcctcgcccgaccccagggctcggcccccgtctcggcctcggacgatgaactccgcttcgcccgaccccagggctcggactcagcctcggctccggaagacgacgaactccgcctcgcccgaccccagggctcggactcaacctcggcctcagacgatggtctccgcctcgcccgacccggggctcggactcgacctcaacctcggaagacagactcgacctcaacctcggaggagcctccgcctcgcccgacccagggctcggaccgacacgtcacaggggggccatcattaccctacccctag

SEQ ID NO: 20925 - DNA, 399 bp, Zea mays
  Peptide Sequence Number=SeqID_62704
atgggtaagagcaagaagggtggtagttcttcgcatcattctggcgataagtggaagcgtgagccgactcctccctcggaggactttggcgactcggagtactcggaggaggaccgaggagttctcctccgagtcagagggctcaccgaggtgtggacctacatccagaccatcgagcgcgccgggctcgagggctcggatgagtcggagtactcctcgaactcgtctgaggagggcggcggcgacggcgatggcggtgacgacgacaacgacggaggcaatggtgacggcggcgaaggcgacgacaagggcggtgacggcggcggcaagggtggcagcggcgacggcggcgatggcagcaagggcagcagcaggggcagcaacaaggccagtggctag

SEQ ID NO: 20926 - DNA, 207 bp, Zea mays
  Peptide Sequence Number=SeqID_62705
atgggttctcacctgttggggaccttcttctccgccaaaggtcctctaagcaaaaacaccttcagcaaggccatatgcaagcaggcgcaacacgaaggtgaacagtacccccatactgttcacactgacttgtattcacttgcacgtcattcttggattcttatcttcgggcaagacgaagatataaatgtaattcaatatcgttaa

SEQ ID NO: 20927 - DNA, 1317 bp, Zea mays
  Peptide Sequence Number=SeqID_62706
atgaagatgagcttcaacaagagcagcggcagcaggggctgggggcagggagcggctgcaggaggaggaggagacgagctggtgctgcgaggctccatctccaagaagtggaccttcctcctctgcttcggcagcttctgcatcggcctgctcttcaccaacaggatgtggacggtgccggagccgaaggagatcatcagaaggtcgacgttggaggtggagaagatgagccttgtcgacggcgactgcgctccgaaaagcgccggcgatgcaagagacgttcccggagaggttccaagaactcaagatgtcatccagacgctggacaggacgatctcgaacctggagatggagctagcgtccgcgaaggcgacgcaggagtccatgctccacggcgccgccggcgccccggtgcccgagcccacggggaagcggaagcacttcatggtcgtcggcgtaaacaccgcgttcagcagccggaagaggagagactcggtccgcgcgacatggatgcctcaagaaacaagtctcgtcctgcgcactctgaaacttgctctgaccgtcggttgggttcgttccactgcaggcgagaagaggaggacgatggaggaagagaagggcatcgtcattcggttcgtcatcggccacagcgcgactcccggcggcatacttgaccgagcgatcgacgcggaggacaggaagcacggggacttcatgaggctggaccacgtggaagggtacctggagctggcggcgaagaccaaggcgtacttcgtggcggccgtgtccacgtgggacgcggagtactacgtcaaggtagacgacgacgtgcatgtgaacatagcgactcttggaaacacgctggcgaggcaccgctccaagccgcgagcttacgttggctgcatgaaatctggccccgtgctagcccagaagggcgtgaggtaccacgagcctgagtactggaaattcggcgagtgggggaacaggtacttccgccacgcctccggtcagctgtacgccatctccaaggacctggcctcctacatagcactcaaccagcatgtcctgcacaaatacgctaacgaagacgtgtccctgggatcctggttcatcggactggacgtcgagcacgtcgacgaccgccgcctttgctgcggcacgccaccagattgcgagtggaaggcgcaggcggggaacgcgtgcgtcgcctccttcgactggagctgcagcggcatctgcaaatccgctgaccggatcaaggaggtccatcagcgctgcggcgagagcgagaacgcgatttggaatgcagagttttag

SEQ ID NO: 20928 - DNA, 456 bp, Zea mays
  Peptide Sequence Number=SeqID_62707
atgaacttcaatgcctctaatcggcaacgagttggagtccggccagtcggaagagagaggtctcactgcttcagaaaatctcggagaatccgaacgagaggtgttcttcttcttccctgcttcttctccttccgagtgagccatggtcggagggaaaaacggcaagaaagggcgccgccccgccgatgggaagagcaagcacccccgagtcctccctcggaggattctagggactcggagtactcggaggaagtctcctccgagtatgatcattcccccgctccagcgtcccttgtggcgtcgtctgatgattcagacgactccatggggctgtccaccgtggagcgggcgtacatccagtccgtcgagcgtgcggggctcggtgggtcggatgactcagaggaggtctcctcagaggatgtggaaggactcctcagactccgaggagggcagtga

SEQ ID NO: 20929 - DNA, 587 bp, Zea mays
  Peptide Sequence Number=SeqID_62708
atggagggttctaacttgaaaggtttggtagatgatgaaattgtcgtgaagacaggcaaagctgcaggcatcggtttagcttttggcagtgtgtatggtgcactacattctatgttgtttgatggacctcaggttggcaataatgtcaagtatccccagctgatcagaactaccaaggctcttgcaaggtacaggatgaagaaggacatcattaatggtgctgttgcaggttttgctgctggtgcttctctgggtttcagtgctggaagcttccgggcagcattcttttcaggctctgcagtcgctttgacatctgtagtgctggataggttcttggatagccgtaaggatcaggcagggtggccaacgtgcagggatcagcttgtgtccatctccaaggagcaggaggagctgcgcggcagtggttcgggcggagggaccatcgtgaagcgccagctgcacaacaacttcgcggggctcttcttcgggctgcccttcaccaagctcaacccggacttcgccctgacagtcaaggacaagttctcgccggaaagcaagctgctggttgtctgccaggaaggtctcag

SEQ ID NO: 20930 - DNA, 1092 bp, Zea mays
  Peptide Sequence Number=SeqID_62709
atggaggagaggccatcgcccgaggcaagcgcgggcaactcgagggccgaggatgacttcaggagctgctgcggggacgaggaagagttggaggacacggaggagtcgttcacggccggcgtcgccaagggggagctggacgaggcctcgatcgaagctaactgcctggggcagttgaggcatccaaaattggtagagttgatcgtatattgctgcgaagatgaccatcggaaggtggcggtcttctgctgctgctggtttttaaggtccataacagccatccacctcgcgtgctctgcactttgtgcctatccgttcattgaagccctgtgggtgtcggccaaggagcttctcggcatcaagtctgacagggatgaggagcagccctcgacgatgacgaagggcccaacccccatccaccagttgtctcgcactagctgtgcaacaaacctctacccatctagcgagtgggagcagatgcggaaggacaactacaagacggtcaacgtggaggagagcctccacaagaagtgcttcagcgagtatacaatacagttgattttgcaaactgagggaggtgctgggggagcaaaattttctcagtttggcgctgatttatcaaggcagtttctattcgctgtcgcgctgctcctgcacaccccccccccaattcgagtcggaggaccgaagagtagatctgcgccggacgaccagaggatggccgtcaactgggagctgcagggttgctgccaccgcgaccagaggatcttcatcgccgccgttggcgtctccaccgtcgtcatcctcctcctgaggacgttcctgctcaagccgttcaagctcatcaccgtcttcctccacgagactagccacgcgctcgcctgcaagctcacctgcggtgataaattgtgcagagaaggaagaaatgaaaagtctcacgggttgtctgcatctcattttgctctgaaaaagaaaattttctctgtggttcacttgaccgtactgttctcttatgggatcaacgggctaaaaaatcacagtatttctgttacttatgggatggtgactgttggatttcagacatttttgtaa

SEQ ID NO: 20931 - DNA, 351 bp, Zea mays
  Peptide Sequence Number=SeqID_62710
atgccaagacccacgcccagatgtttaagtgtagccgaagaaccagaactggaggaatcggtagggctgccaaaaatcctgagcctgccacccgagccggagttgccaaaggtgtccaaagttcctgtaataactcccaaaaggaggaggatggctagcgtgttggatgttgtactggagtcgacaagggtaccaactcctgcctctgcagaggtgcccagcatgagcgaggaaaatataaaggaggccgccgaagctgttacaatccttgttgaagctgaagttgggccctcagttctcgcagaaacaaggcctgttgaaactgaactaggaccttcgatgccgcactaa

SEQ ID NO: 20932 - DNA, 375 bp, Zea mays
  Peptide Sequence Number=SeqID_62711
atggagagaggaattaagggaggaaaaacggctccattgaactccaaggaaacggacgcggggcttcggttggctggcgcggtcggcatcgggcaggggcgctcgggcttgcgtctggccaagcggcgtgcagtgcaggggcgcgggtctcggctgcacggcactcggccgggtgcgcaggcgaaggggcgcatggtcgcgcgtcttctggcgtcggtcggagctcctgggcgcgcacggcgcggtcggatgcctaggcgcgggtcttggcgtcgcggtagtcgggcggggcgcggttggggtggcgttgggcgcagggcagccaagccggcctcctggcggcgcctgctgggaagaaagggaggagcggaatga

SEQ ID NO: 20933 - DNA, 1335 bp, Zea mays
  Peptide Sequence Number=SeqID_62712
atgaggaccgacgcttgcctcactcacctcacgctcctgcttctcgtctccgtgcccgtgctgcacagccacgcgtcacagcaggctcaactcgagaaattcatcttgtcacggcaaggcagagctgctagcgggagtagcaagtccagcgcacacgagcctggcgtcggagtgacgagtagcagcctcctccagcgcctccaggcacggtcgtacctgggctccgagtccgaccagagcgccctgaaggcggccgacaagatcgcggcgctgccggggcagccggacgacggcgtcggcttcgaccagtacgccgggtacgtgaccgtcgacgaggagaagggccgcgcgctcttctactacctggtggaggcgccgccggaggatgcgccgtcgaagccgctcctgctctggctcaacggagggcctgggtgctcgtcgtttgggtacggagccatgctagagctgggcccgttccgcgtgaacaacgacaacacaacactcagagtaaacgagtacgcctggaacaaaggtacacacgctaggttccccgagtacaagacgcgcgccttctacatctccggcgagagctatgccggccactacgtcccgcagcttgccgccaccatcctcagccacaacctgtacagcaacagaacgatcgttggcaatccatacctggaccggtacaagaaccagaaggggcggttcgagtacctgtggaaccacggggtgctctccgacgaggacatggccaacataacccaccactgcagtttcagcccttcagatgataaactctgctcggatttatacgggtggtacgatttcggccccattgatccctacgacatctacgctcccatttgcgtcgacgaacctgacggctcatacaactccagcagctacctaccggggtacaatgcgtgtgactactatcctaccgtgacctatctcaatgaccctgtggtgcaagaggcctttcacgccagaaagacagagtggagtggctgctcgggcctggattggaaagatgcgccagactccatggtgccgaccctccagtggctgatcaagcatgggctgcccgtatggttgtttagcggcgatttcgacgccatatgcccgctcaccgccacgagatactcgatccaagatctgggcctctcagtcacgacgccatggcgtccatggacagcgaaaatggaggtgggaggctatgttcagcagtacgcaggaggcttcacatttatcactgtgagggccgctggccacatggttccgtctttccagcccgagagagcactcatattgctcaactatttcctcaaaggg

SEQ ID NO: 20934 - DNA, 168 bp, Zea mays
  Peptide Sequence Number=SeqID_62713
gtggcggtgctggaggaggaggtcgtccggctagaggagcaggtggtgagtttccggcagggaatctaccagggaggcgaccgtcttctcctccgccaaagaacacccaactcccccgacgacagaaggcaaggatggccttctggatttgctctcaacggctcctag

SEQ ID NO: 20935 - DNA, 459 bp, Zea mays
  Peptide Sequence Number=SeqID_62714
atggaaaaaattcagaacttcctatggtgttcagaactgggacaaattcctatgttgagggtgtggcaaatgacatacctcggcctttgggcggaacaggtacagggcggacctcagcgcctcggcatggggtggaacttgtgtggtgtacctcgtctactcgacatccgggagaggaggttggcctaccggtgccggtcgtcgactccggtgaggatctcatccggtcatcccgctgagccggcgagcagcctgagcggagtttgggtcggcggcggctccacctgggcgcgggcagatctggtcgaagctttaggcgtggacgggggcacggccggccagcgccgatggcccagagcgacgaaacttagaggctcggtcgcgccttgcgcggaggctcagcgcggaggcgtcgcattagcggctcgggggacgacgggatgggtcatgtggaactga

SEQ ID NO: 20936 - DNA, 1023 bp, Zea mays
  Peptide Sequence Number=SeqID_62715
atggccaccctccaggcatcgatcttggcagtcctcagctttgccttcttctgcggtgctgctcttgctgctcgcgacctgaacgaggactcagccatggtggccaggcatgagcagtggatggcgcaatacagccgcgtctacaaagatgccgccgagaaggctcgacggttcgaggtgttcaaagctaatgttaagttcatcgaatcattcaatacaggtgggaaccgtaagttctggcttggtatcaaccagttcgctgacctcaccaatgatgagttcaggactaccaagaccaacaaaggcttcaaacctagcctcgataaggtctctaccggatttaggtatgagaatgttagcgttgatgcgattccagcgactatcgactggaggaccaatggtgcagtcactccgatcaaggatcaagggcaatgtggttgctgctgggcattctcggccgtggcagccacagaaggtatcgtgaaaattagcactggcaagctcatctccctctcagaacaagaattggtggattgcgatgtccatggtgaggatcagggttgtgagggtggcctgatggacgatgcattcaagtttatcatcaagaatggaggcctaacaacggagtccaactatccatacacggctgcagatggcaagtgcaagagtggatcgaatagtgctgcaaacatcaagggctacgaggatgtgccaacaaacgatgaggctgccctgatgaaggccgtggcaaaccagcccgtgtcggtggcagtggacggtggagacatgacatttcagttctactctggtggtgtgatgactggatcatgtggtactgacttggaccatgggattgcagccattggttatgggaagactagtgatggaaccaagtattggctcatgaagaactcatggggcacgacatggggtgagaatggttacctgagaatggagaaggatatttcagacaagaaaggcatgtgcggactagccatggaaccttcctatcccactgagtag

SEQ ID NO: 20937 - DNA, 771 bp, Zea mays
  Peptide Sequence Number=SeqID_62716
atggcgaggctgagccacggcctcctgggcgccctgaacctggtgacgctcctgctgtccctgccggtgctgtgcgccggcgtgtacatcgtcacgcgcgccaccacggcgtgcgagcgcggcctccagatccccgtcgtcgcgttcggctgcggactgctcctgctctccctcgtcggcctcgccggcgcctgcggacgccgcggcgccgccaggccgttcctctgggtgtacgtggccttcatgtttctgctcgccgtcctcgtgttcgcgttcgccgtgttcgcgttcgtggtcacccaccgggggcgcgggcggcgccgtgtccgggcgcgggcgcggatcgccgagccggagacgtggcggcgcgtcgagagctgcctctctgaggcgcgcgtgtgcggcggccgggaattctacaggcaacacctctcgccaatccagtccggttgctgcaagccgccgacgtggtgcaggttccggtacgtgaacgccacgttctgggaggcaccgagatcggggctgtctgcggcggcggccagcgacggtgactgccgggcatggagcaacgaccagcaggtgctttgcttcgagtgcgacacgtgcaaggccggcgtgctggagaccgccaagaagaagtggaagacagtggctatcgtcaacgtttccctcctcgcgttcatcgttattgtctacacggtcgggtgcttcgccttgcgcagcaaaggtggtggtcggtacttcaatggcggtggtcctgaccaaacataa

SEQ ID NO: 20938 - DNA, 456 bp, Zea mays
  Peptide Sequence Number=SeqID_62717
atgggcaagagcaagaaaggtgggagttcctcacaccatttcggtgataagcgaaaacgtgagccgactcctccctcggaggactttggtggctcggagtactcggaggaggagttctcctccgagtcagagggctcgccggtccctgcctctcccccggcgtcgtctgatgattcagacaactcccaggggatcgccgcagaggtatggacctacatccgggccgtcgggcgtgccgggctcgagggctcggatgagtcagtagtctcctcggatgaggagaactcctcggactcatccgaggagggcggcggtgacgggggcgacggcgacggtgacgacggaggcggcggcgatggcgacgacgatggcgaaggtggcggcgaaggtggcggcaggggcggcagcggtgacggcagggacggcagcaagggcagcaacaaggccagtggctag

SEQ ID NO: 20939 - DNA, 138 bp, Zea mays
  Peptide Sequence Number=SeqID_62718
atggatgcaagccaggatgcaagaagtaaagagaacccagagaacaatcctgattgtactactgtatatgttggcaaccttggacatgaggtggagttggttgcggaggtcggcgactgtaattggcggacgaagcag

SEQ ID NO: 20940 - DNA, 537 bp, Zea mays
  Peptide Sequence Number=SeqID_62719
atgcccatgcccctaaccctagccgccactaccctgctcccgctcccaagccaccgccactccttctccctccccctttctctctcttctctctcccacgcacctgacctgtcggcagcctccggaggaggcccggcccagggcagtgcgacgacatggctggtggtggtggagggccggggctggggcggggagccgcacgccgtggctgcggggagcgcctacgggttcccgctctactcgcacgccgtcaaggaggcgctcggctacaaccagcaggctctcaccatgctcggtgtcggcaacgacatcggcgagaacgtggggctcgtcacggggttgctcgccaaccgcctcccgccctggctcatcctcgtcatcggctctgcctgcgccttctttggcttcggcaggctctggctcgccgtcaccaagacagtcgccatgccttattgggtgatttttagtaccatttatgtcattaacattagcaatgacagacaattgaaaaagagaattgatcttttttatgggtga

SEQ ID NO: 20941 - DNA, 556 bp, Zea mays
  Peptide Sequence Number=SeqID_62720
atggacgagttgtttagcaagctcaagtccaaggatgaacactacaaccgcggcgaccctgatcacttcattgctagttgcccctacaagggcaagcaggagactgaaccgcgcgaccaccactctggtcggtgcaagggcaagcgagagcacaccactagcaagcacaagtctagtgggaggtttgacaaggaggcgctcaagaagaagtatctccaaaaggcaaagatcgaggagcgcgccttcctcgcctccctgagtgacctcaaccacgactccgacgaggcgatgtcttcttcgagcgacgaggagttcaagaggcgtgttgaggacaagttcaatggactatgcttcatcgccgacaccacaggaggtctttgcaccatggctctcggtgatgatgcggtgggtgacatcgatgaggtagaggagccgatggctgctttagctaatctggctaagttgcttaggcttgttgctcgtgagaggaaagattttatatccaagtatgagagcacacttagggagcttgagtctgctagagcttctgtcatgg

SEQ ID NO: 20942 - DNA, 147 bp, Zea mays
  Peptide Sequence Number=SeqID_62721
atgcggcgagaacggcgcgccgaacgttcttgcttccgcgaccgggcaactgcgcatcgccgtctcacggacgcggagaacggcgatgagccgagatcgccgcgaggaaaggagtggcattattgcgtccaagcaacagacgtctaa

SEQ ID NO: 20943 - DNA, 546 bp, Zea mays
  Peptide Sequence Number=SeqID_62722
atgcgcgtccgcctcggccccggcggcgcggcccctcggcctccctcgcgcgtggcccctcggccttccccggcgcgctgccccttggcccccacgcgcgcggctccccgaccccccggtggcgcggccgtcccggcttcctacgcgcggcctcgtggcccccggcggcgcggctcctcggccccggtgcgcgtggcccccccggcccggtgcgcgcggcccctcgcccccctgcgcacggcccctcggcccccagtgcgcgcggaccctcggccccctgcgcgcggccgtcccagccccagtgcgtgcggctctcggtgcgcggcccctgccttcagcagcgtggtcccccggcgcggtccctgcgtgcgccccggcgcggctcgcgtggcctcgcgcccccgttcacccaacgtgttcccgcgtgcgcagccccacgcgcgcggtggtgatgagaatgatggtcttggtattgactatggtactggagaagatgaagcagtggaggaggacttccaagagtttcaggagtacgatgagttctag

SEQ ID NO: 20944 - DNA, 222 bp, Zea mays
  Peptide Sequence Number=SeqID_62723
atggaggtgcttacacttatgctctctgcgattctgcctcagcccttcagatgtggtctacttgtgcctccgtcttctatctcgcacgccccctcctctatcagcatctgcttgctgaatggcgtggcgactgtcgagtcgtctgccctgcttcctgatcccgcggccacaggtagtgggtgcaagtcgcacgctcgccctacagctcagcagatctcctaa

SEQ ID NO: 20945 - DNA, 648 bp, Zea mays
  Peptide Sequence Number=SeqID_62724
atggcgaggaatccaggccgcaccgtcttcatcggcaacttggatgaaaaagtatctgaaagagtcttgtatgagattcttattcaggcaggccatgtagtaggcctacatgtacctagtaataaggagagtaacagtcgcaaaggttatgcttttgctgagtatgaaaccgaggatatcgcgcaatacgctgttaggcttttctcgggacttgttcggatcaatggtaaaacgctcaagttcgtgattgctggtcatgacaaaccgtcttcaaatgacaataagtcggtactgctcaatcatgtaccctcttcaaatggcaataacccagtaatgcctaagctcaaccctataccgttgccaaaaccgactcaaatcatgcgttgtagtgatatgcctgtgtctcatatcccagcatatccggtgctttaccgggtggaccagtacacagccatggcaaggtttagcaacagtacgtatgcttacaataggcaggaatttggttctgttctgaacattgcgcagagaggtcctgttatgaatgcctttgcccatgaggctgcgaatcagccaatcatgtatgttgagaacgtaggtgcagaagaacgtagtatgttaagagtaggcaggttccacataggttcttga

SEQ ID NO: 20946 - DNA, 1014 bp, Zea mays
  Peptide Sequence Number=SeqID_62725
atggccggcggcggtactcagcatctgctgcaggtcgcggccgtgctcgcggcggcggtggtgctcatggcaacggcgtcggagggcttcatctccaagaagacgtggagcgccatccggcgggcggaccgcgacgggcccttcgtggggctggtggtgcccaacgcctacgagatggtccccgtcctcaactcgccggacttcaaacccagcagcaacatacccatcctagacgtccaagggcgacgattccgcttcggaactattggaagccaaaacgttgtcatggtcatgaccgggctcagcatgctgaacgccgggctcacgacccagctgctgctgagcctgttcagagtgaaaggcatcgtgcactggggcatcgctggcaacgccaacgaggacctccagatcggcgacgtgaccatccctgagtcctgggcccacctgtccctgtggaactggcagaggcacggcgacgggcctgagaacgagctgccgctagagaacgccggcgactacacgagggagtacggcttcctcaacttctccgactacacggtggggcaggacgccggcaacccggagctggcggcgaacacgctcaacagccgctactacgcgctcgccgggaagctggaggggctggagctgccggcgtgcgtgaacgcgacgacgtgcctgccccgcgcgccccgggtgacgcgggtgcccaggggctgcagcgccaacatctacaccgacaacgccagctaccgccagttcatccgctcccacttcgggtgcacccccgtggagatggagagcgccgccgtggccctcgtcgcgcaccagcacggcgtccccttcatcaccatccgctccctctccgacctcgccggcggcggctcctccatcagcaacgaggcagccacgttcctcgacatcgcggcgcagaacgccgtggacgtcatgctcaagttcgtgcccctcatcgcgcgccgcggtggcgaacaggagcacgccgccgacatgtaa

SEQ ID NO: 20947 - DNA, 1173 bp, Zea mays
  Peptide Sequence Number=SeqID_62726
atgggtggagaattcaggagctctttgatgcagcagatggtgtggagtagtagtggcggcggtacagacagcaagaatatgatgagtagtagtttgatgccttgtgccgaggagcaagaagaagagggctccaacaagatgccccctttatcttctccttccatgctcctcctcccgcagcaccacctccaaatcttctcgggcctgcctctgcctctgcctcctgaggtgctgaacgacagctctgctacttctgatctgcatgatggccgggaaagcagcatgccggagtcatggagccagctgcttcttgggggattagtcggagatcacgagagatacaacgctgccacagctttactgtcaaaaggattagaggagcgacctgcagcttacaattgctatgaccctggacatggtggtggtgaggagatccagacatcggggaccaacattaggtctcatcaggtgagccaggcgctcttagcgtcgtcctctcctaggtcctgcatcaccacaagcctcggcagcaacatgctggacttctcaaacaccaccgtgccgccggcaccggatctgaagaatcatcactccgataactcttctgagggtaacagcgctggaagtggttcggctccaaagaaggctagggttcagacctcttcttcagcacagtctaccctaaaggtaagaaaggagaggcttggggatagaatcactgcacttcaccagatagtgtccccatttggcaagactgacactgcctccgtcctacaggagactattggctacattagattcctcctgagtcaaatcgagtgctggaaagcccttcgaatttctgcagctctcagcttcccttacttgggccatgacaacggggactccatgcaacaacataatactaataacttgctgctaaaccatagcactagcgatgccatggtacaagttcaaggtcctccgatgaccaatcaggagggggaggtctatggcaatggcattgaggagggcagcaggaaggatttgaggagcagggggctgtgcctggtgccagtgtcgtgcacgtcgcacctcgccgacgacaacggcccctcagacttctgggcggtgtccgcggcgccgtccccgcctcctccgcctccgccattcgccggcatcatctggcgatag

SEQ ID NO: 20948 - DNA, 558 bp, Zea mays
  Peptide Sequence Number=SeqID_62727
atggcgcagctggtggagaatcccatcctgatcacgcactgcagccagctccacgacaacccatccctgggcctgcccctgcaggtcggcggcagctgcgagtcctactgctgcagcgccacgcagctcgacaattgcgaagggcatttcggcttcatcaagctgccggtgcccatctaccaccccagtcacatcaccgagctgggaagatactcaacctcgtctgcctccgcctcaagaaacccaaggtacaagaaccctaaggacaccgggaaagaatgcagattcacctcatgttcatattgccaggacctcccaccgctatgcgtcagtcaagtgaagaaattcaacggtgcccgtagcttggaactgaaagcaccattaaagcaagaggttgccgtcaggttttggagcttccttgatcaatttggcttccacacaagtggtacatctcaccgccgccccttacatccaaaagaggacataatgaagaagataactgaagaaacaagagctaggcttgctgctatgggtaccatcttcaggatggatatgtga

SEQ ID NO: 20949 - DNA, 3963 bp, Zea mays
  Peptide Sequence Number=SeqID_62728
atggccgggccgacgccgacttgctccgcgatcgtgtcccacacggctgccttcctggccgagctcgtcgccgacccgctcctgcgtcgtcacctcctctcggcggccgcggctgcgggcggcggacagcagcacccggccgccacgctccaggcgctgtccctcgtgtcggacgcgctcgacaccgccgcctcgtgttccccgtccccgtcgtcgctccgcgccgcggagcgcctgctgcggtcgctgccggccgccaccccgctctcgtgcctcctcctcgcgctcgcgcgcgccgcacggcgcggcgccggggccgcggccgccgtgctcgacctcttcgcgctggaccccgcgctggcgcgccacgagctcgcgcccgccgccttcgaggcgctcttcgcgccgcggctgctccccgtcatgcgccacttcgccgcgcgccgcgccgcggccgccgccaggaccaagggcgaggagggcgggtcggacgaggccacgccgatgcgggtcctgtcgctcatgagcggggcgcaagcgcaggagatgagggcgctggagcgggagtatgacaaggtgctcgacgccaactgcagggcgtacgcgctctacctcaagaggatcctcgaggccggcgagccatcatcgccggcggtgtcgtcgccgctgccgcagcctcttcctcctccggagctcgtgttcggcgtcgaggacgacgacgacagtcgcggcgacgaggacaccgcgccggagaacgacgagtccgctgccagctcgcagagcgaactacgtgacaatccgatgtgggcggagacggaggagcagccgggcgatctttacccgcggcggcagggcagcgtgaaaggcaggagggacctcttgaggccgccgagcctgtacccgcagcgcgtgccgccgcacctcatagttcagcagcagcaagcgctgccggtgggcagagggagcccagcgtcaaggctccgagcggagcactcacggtcgcggtcgccggccacgccatcagacgacagcatggaggagtcttcctccgagctctgtgcggccaaagaggaaaagatcgcggcgtcgccactgtcctccaagcagccacgtccacgcgccgacgccggccagctgtcaccggagccagcgagcttcccagtacgctgcgacgccgccgccgtcgacccgctgcagccgctgccgacgcccaaggacttcgtgtgcccgatcacgagccaggtgttcgacgacccggtgacgctcgagaccgggcagacgtacgagcggcgcgccatccaggagtggctggaccggggcaacgccacctgccccatcacccggcagcgcctccacggcgcgcagctgcccaagaccaactacgtcctcaagcgcctcatcggcgcctggcgagaccagcggcggacgccgtccccttcctcctccccttccccttcgccgccgccggccacgcctccccccgctcccgcgaccgccatggcgggcgacagccccgcgccgccgttccccctccccgtcaaggctgccgccgcctcgtcgccgtccccggacgccaacaccagcgccagcgcgccgtcgcccaccagcgtcatcgcgcaggcctcgctcgagagcgccgtggccgagctccgcgccgccgtgtcctgcctctgcacgtccgaggacctggcgcagtcggagcggcccgccgtcctgaacggcttcgtggagatcctcttcaactccgtcagcgcgcaggtgctgcgggtcgccgtcttcctgctcgccgagctcgcgtcccgggatgacgccgtcgtgcagacgctgaccagggtcgactccgatgtcgactgtctcgccgcgctctttaagaagggactggcggaggccgccgtgctcatctgcctcctgtcgcccgcgcccgagcagctcgtcgagatggacctggcggaggcgctcgtcgccacaatccgccgcggcggcggcgacgaggacccgctcaagatgtgcgtcagccccaaggccgcgtcggtcatcctcctcagccagatcctcgtcgaggacgccgctgccgccgccgacgatgacagctcctccacgccgccggtgccgaggtctgcgctgatgtccgagaggttcattcggagcctcgccgccagcctggaggccgagccggtggaggagaggctagccgccatgcgcatcctcctcaggtgcatctgggaggacggccactgtcggagaagcatcgccgagaaggcgtccctcggggccgtcctcgacgccttccacgccgtcggcgacgccgacaagatcgacatcgtgcgcttcctctacgagctgctcaagctgaaaaagcgatcggcggcggagcgtcttcttcgcacaatcaaggagggtggctcgttcagcatgatgcacacgctgctggtgtaccttcagtcggcgccgccggagcacagccctgtcgtggcggggctgctcctccagcttgatctcctggtggagccgaggaagatcagcatgtaccgcgaggaagccctggactgcctcatccagtgcctgaagaacgccgacttccctcggtgccagctcctcgccgccgagaccatcatgtgcctcccggggaggttctcgtcgtcggggaggccgctcgcccgttccacgctgctgaagctggccagggtgaaggaaaggtaccggcagtcgcaggacctgagcgccgctcgcgccgacggcgaggacgagatggaggaagggaaggccgcgtcggagtgggagaggaaggcggcgtacgcggtggtgagccacgagttcgggctggtgttcgaggccctgtccgagtgcctgaggaccaagaacgcggagctgttcacgacgagcctcgtgtgcgccgcctggctcgtgcacatgctctccctgctccccgacaccggcgtcctcggggcggccagggtctgcctgctccgccagttcgtcgtggtgctccgctccgccaagcacggcagcgaccgggtcctcgccatggtggcgctcaggagcttcatgaacgaccgcgaggggatgcacgacatcacgacgtacatcaaggacgtgctcaggacgctgagggagctgaagaaatcgtccggcctcgcgttcgagatgctcaagctgctatcagacggccaggaatccagcgtcgacatgtggagccacaaggagatcaatcaggtagactgcagcgcgaacggcgaggtcacgtcggtcgtttacctcaacaactacatcttctccggccactccgacggcacccttaaggtgtggcaagggagcgaaaacatccttgcccttgtccacgaggcccaggagcacagcaaggccatcaccagcttgtcggtcctgcactcggagtcggaggagaagctctacagcggctcactggacagaagcataagggcgtggcagctccgggacggcgtgctccggtgcgtggaggtccacgacacccgagaccccgtgcagagcctggccgtggccagcgccgtggcctgcttcgttccgcagggcgcgggcgtgaaggtgctgagctggggcagcggcagctccagggtcgtgaacgccaacaagtacgtgaggtccatggcgctggtgcacggcaagctcttctgcggctgcagcgacggcagcgtccaggagatcgacctggcgagcggcacgctgggcgtgatccagcccggcagcaagcggatcctgggcaaggccagccccgtctacgcgctgcaggcccacggcgggctgctctacaccggcggcacgccgtcgtcgtcgtcggcggcgtccgcggacggcggcggcggtgcggccgtcaaggtgtggagctgcgccaactacggcctcgtcgggtcgatggccacggcggcggaggcgcgctcactggtcgtcagcgccgacctcgtctacgtcgcctccagggccgccgcc

SEQ ID NO: 20950 - DNA, 278 bp, Zea mays
  Peptide Sequence Number=SeqID_62729
atgaccgacgcacggcttcgcctcgcgtccgcctcggaggtttcaaatttgggggagggggaggcggagccgcggaggcgattgagaggggatggaatggatgcttccgcttgctttgctattgcctgcttgacgtgttgcgacgaagacgtcttcgaccccgatgccggccacccgctccggccggagtttccggagctgaaggcggccatcgccgagctaggcggcgccgcgctccccaagcgcaactggagcgcgcccaaggatgccacattcat

SEQ ID NO: 20951 - DNA, 2700 bp, Zea mays
  Peptide Sequence Number=SeqID_62730
atgccgagtgataaagcaaaagctccaaagaagaagggcgaagaggatcctggaatcccgccagctccctgtgaaggagaaattagccatgagccacatagacaacggtcactcaatgggaggaccactggtccgacccggcgttcaaccaaaggaaattggacacccgaagaggatgctatattgtcccgtgcggttcagacataccaagggaaaaactggaaaaagatagcggaaagttttccagacagaaccgatgtacaatgtttgcacaggtggcaaaaggttctaaaccctgaattggtcaaagggccatggtccaaagaagaagacgaaatcatagttcagatggtaaacaaatacgggccaaagaaatggtcggccatcgctcaagctttgcctggacgcataggaaagcaatgccgggagcggtggcacaatcatcttaacccagccataaacaaggaggcatggacgcaagaagaggagattactcttattcatgctcataggatgtatggaaataaatgggccgaacttacgaaatttttacctggaaagggcgcaaagaatacacaatattatctgcttatgctttactaccaattgataacacaaaggacggacaatgcaattaaaaatcactggaacagttcagtgaagaaaaaggtcgattcgtacatatcttctggtttactttcacaagtcccatgcctctctctgattgaatgtcctgcacaatgtgactctttatcggctatggaccaacaaaacaacggaggtactgattgcaatgaccagaacactagcgtggtcttaagctctgatttacaagtaaatgtggatgccaacaagaaagaagcacatgactctcactcgtccttgtgtcaaggggtatgctatccttccacagagactgtaggatctgttttgcctgatgacctggagatggatatggatgaaggatcaggaaactctatttttgcagacgatcaaactctttgtagcacatcaaatcaagaacaatctatggtgccatttgttgttgcacaggaaatgcctgtctctgtgctatcaagtgtttctagcgctgagcagaaacggcacttaatctctgatgccaaaagcttgaaatccgaactttggaaagatgtttgtttgcaaactcttattacaggagatacagatgaccctgatgcttcttcaagattaaataacccagattcttctaaaatggacaccaattttttgaaagaggcctacccattacacacaccaaatccatccagtgtgattgaaactgtatatgaaccgatggcgttggtgacaatctctcccccttttatatgttcagatggtttgtctttcgcacccgaaaatagatctaagccaggagaaatgtcagactgtgaagcagagatggtcacatgctcaaacaatttttttggtaatgccgagcaatctgctaaacttgccagcagtgatgacaggccagaggctttcacaatgactgagagcactacaaactgtgggggtgaacaattgacagatgccaaagaacctgtggccagtacagcaaaagaacggttatcgaaagacatcgagactatgccagataaaaagaagggtgagggggctctattctatgaacctcctcgattccctggtttggatgtcccgtttatcagttgcgatcttgtaacttctgctgatctgcaagaatttagtccccttggaattaggcagtggatgcggtcgaccatgaatgtcccaactcctttaagattatggggctctccaacacatgatgaaagcccagatgcactaaaaactgctgctgaaagcttcccatgcacaagttcaataatgaaaaaaagacagagaagtctattgtcccctactccagatgaaagaattgagaagaaatctgggattgcaaagggggtgacggacatctcctatatgataacggccacatgttccatgaatgcaaccaatgatgaagacattgttactgaatcagctgtgtgtgctaagcaaccttctttgaaacatctagacaagaagcttgagttctctgacattaacaaggaaaactctgatggagcatctgaacaggccaaagatgcacaaaacacacaactcgtggatgagcaacattcctcaccaaatgttgtgaatcctaacactgatctacaagacaatatacaacctgtacagattcttgtagagcaaagcagcaataaccttatttcctctgatcatggtgcaaagccatcctgcttcagcgtgtatgaagctaagctgtggcaggttctttttgtcaatatttcttatgaattgctgcttttgctagattggctgataccccagggttttgtcagcccagcagacagaacttatgacgcgttaggattagtgaatcgtttaagcaagcacagtgctgctgctgcagtggaggcctgtgagatgctagcaagtggcaacacgacttctgataaggaaaacaaggataatacggatggcaaggaactagtgacaagaaaatcacagattaagatcatggccgaggcgcgagtcctggatttcgacgaatctcccgcacctgcaagaacagcagataagaaacttggcagctgtcaccggagatctgttagctcacccattcttccttcccccaaccttagaagtttccgatag

SEQ ID NO: 20952 - DNA, 477 bp, Zea mays
  Peptide Sequence Number=SeqID_62731
atgaacaaacccttgtttgttcatgatgccacgataagcgtgctgactggtgagggtggggggcacgccgcaaggattcgcgagcggaggcccgtctactgcttgccggcccaaatatctctgctctcttctcgacggacgcctgctactgcgactgtcgcgtccgcgcaccggggcggcggtgccgccatcccggtgtggagctgctccaactacggcctcttcgggtcgatggccacggtggcggaggcgcgctcactggtcgtcagcgccgacctcgtctacttctgctccagggccgccgccgtcgagatctggtccagggagaagctcgccaagatcggcacgctgcaggcgggcggccgcgtccagtgcatggccgtcgacgccgacggcgacttccttcgtcgtcggggacgcgtggggattgacttgacaagacgcagaagaactattgggtgtagagaggaggcatga

SEQ ID NO: 20953 - DNA, 1416 bp, Zea mays
  Peptide Sequence Number=SeqID_62732
atgtcgacgtcgccgccgccggccacttccccgcccggcgcgccgcccaacggggatcagcaccaaagctggcagcataacgcccctccaccaccccctgatcatgttatcaagatcaattcacatcctacccttccgccgcctccgcataacgtacatagcagtggttccgcttcgaaccactcgggtggtgagagccgccctgcgctgtcgcctggcactgcccttagcttttcaaggagcacattcacttacgagcagctgatgacagcaacgaatgggttttctgacgctaatctgctggggcaaggaggttttgggtttgttcacaaaggagtgctaccagatggcacagaggttgccgttaagcagttaagagatggcagtggccagggagagcgcgagttccaggctgaagttgagattatcagcagagtacatcacaagcatcttgtatccttggttggctattgcatttctggagcccacaggttgctcgtctacgagtttgttccaaacaatacattggaattccacttacatggaagaggcagaccaaccttggattggccaacaagactaaaaattgctttgggttctgcgaagggattggcatatcttcatgaagattgtcatcctaagattattcatcgtgacataaaggcctcaaatattcttctcgatctaagatttgaagctaaggtggcagattttggacttgcaaaattcacttctgatgcaaacacccacgtttcaaccagagtgatgggcacatttgggtatctagcacctgagtatgctgcttctggcaagctcactgagaaatcagatgtcttctcttttggagtaatgcttcttgagctaataactgggcggcgccctgtaaattcaagacaagcggacgacaacctggttgactggatatcattgttattatcgactattgaggcaaggcctctgatgataaaagcatttgaggatggtaatcatgatgctctagtggacccccggctgggaagtgagtacaatgataatgagatggcgaggatgatagcctgcgcagctgcatgcgtccggcattcttcacggcggcggccacggatgggtcaggtcgtccgggcgctggaaggcgacgtatctctggacgacctgaacgagggcgtgcggcccgggcacagccggttcgtggggtcgtacggcagttcgacgtccgactacgacaccagccagtacaaggaggacctgaagaagttccggaagatggcgctgggcggcagcgggctccagagcagcagcgcgcagacgccgacgagcgagcacggggagaacccgtcggtgtcggtgtcgagcagcgacggcgacggcggcggaggaaccggcgaggagcgtgaagacagacggcaggcagcgtcgtga

SEQ ID NO: 20954 - DNA, 953 bp, Zea mays
  Peptide Sequence Number=SeqID_62733
gcacggcctcaccgcagccgcagcatcggcctcatcgccgaccccgacccgtgccgccgcggccactagtccactacctggtggcgcagctctatccgcgcgactcggtcctcctcggcgacaagctgctctgctgctccaccgcgacgttccagtggttcgtgaagccgctgctcacctccgccacgacgcgcatgcgcaaccccagcgccgataccggagtagtcgcgcacgccgggcgcctctactggctcgccctcgcctacggcgtctttgtctgcgaccccttcgccgacaccgcgcacctgcgcttcctggcgctgcccgcggactgcgatttgggggagaagccctaccgaatcaaccgcgcgtacgtcgcgcagtgccgccgcgtcgcgcccagcgagggccagctccgctacgtcgagatccggggcctctcctacgaggcgtacgtggcccccgctgtggcgcctccgccggtgcaccccaccgtctggatgtggacgctcgtcgacccggaggcgacggagccctggaggttcgagtatgaggcgcccttcgccgaggtctgggcgcacgagtcctacgccgcggccgggctgccgcacggggaggtgccccacgtcgctctcgtcgaccccgacgaccacggcatcgtctacttcttccagggctccaagtccaagctcttcggcctggacgtgcgcgccagacgagtcgtctcctgcgaggaatgctcggtgcgcgacgacctgaagatgaaggactggaactcccgccccattgtcgatgcctgggaggtgccgccaccctcgcctccctgcagcgagctttcttcgccatctcctcaaggcagtgacgaacttgcccccgtcgccaagcgggtgatagagatattgaggctgatgagcgacacggacgacgacgatggaggatatgcgacgatatga

SEQ ID NO: 20955 - DNA, 384 bp, Zea mays
  Peptide Sequence Number=SeqID_62734
atgaactacggcggcggcagcaggagcagcagccggctccgggaccggctggcccggatgttccgcccgagcgcgctgctccgctccacctgcaacacggccgccgccgcgtcctcctgctcctcctcgtctcccgcgtccacggccaagcctccgcctccgcctgtggctgcggcggcctccgcgtgctcctccagccgcgcgctgctcggcgccgtcgtcgacggggactcgtcgttcctcgcctcctcgcggcgcgacctggccgtcgccgggcgcgccgagtccttctccgccgccctcgacagatgccgacgcaatagcaataactggtgttgtgttttatcgaccacccccgtacttgactatatttttgagaaataa

SEQ ID NO: 20956 - DNA, 431 bp, Zea mays
  Peptide Sequence Number=SeqID_62735
ggggtatcgtcaataacacactccggcctccaatacctgagaagtgtgacccggactggcaaaagctgatggagcaatgttggtcggcgaaccctgacgcccgcccctcattcaccgaggtcaccgacaggctccgagccatgccgccgcgcatgtcgtcctccatggtgcccaagaacccgccgcccccgaccgggtacgatggcgaaggcggcgtcgaggcggcgccggtgacgagctgcctgtacctgcggcccggggcgggggcgctggacagggacgccgtgctgcgccgcatccgccaccggaggcgccacagccgcctccgcgacacgctgcgccccatggtgctgcaggcgcagccggcggagccggacggcgccgaatggcgcctcccgtggccgctcgacgacgccttctcggcgccgtag

SEQ ID NO: 20957 - DNA, 1095 bp, Zea mays
  Peptide Sequence Number=SeqID_62736
atgaagggctcgaccatcccttcggtcgcgatcatgccctcgccgctcttcctctggcggtttaaggttgtgttgtttcttctatggggcttatgttgttgcaagataggttgggactcagttatgagaatgagtgttgatctcagagacctatttctttatgaggctttcttgtactataatcctcttcttcttgtggccttgatgatttggttgtggggagtaaatctatgggtctttgcacaatcatctgtgaattatgcaaaagtgtttgatcttgcacaaacacatttatctcaccgtgagatatggaggaaaaatctaagcggtagtttatacaaggtgataattttactgaagatctgtgatgacttgtctctgtctaaagaaatgacccaaaacaattcagtgaaatatagcaaggttctcttgtatgctattcttctgatgatcctcctttctccttttgatatgttttacttatcatcacgcttttactttctgagaacagtctggcgtataatactgcctttacaagcaattacatttcctgacttctttttggctgatatttttacatccatgtcaaaggtgttctcagatctggagcgttcggttgcaacaatcgcttggtttgaagcagattctatttgtggcagtcattccgtagctattcctcttgttctcgtgtttccctacttgtggcgtttcttccaatgtctccgtcagtacaaggatacaaaggagaagacatgtcttttcaatggaaacttatatgtttacttctatacctgtctctggaataacttgtcatttttatatcctgaattcagctctcaagtattctactgggtactgggcagcaacttggttctgcgatgcacatggacatacaagctctcggcgcatctccggcacaactacctgacagtgttcaccatagcagctctggaaatcctgagacggtggcagtgggtgttcttccgggtcgagaacgagtggaacaagatgacggccaaacaaaacttggagatgtcatctgacatgccttccgaaggggacaggctactggattcgagtaaccacacagtgtga

SEQ ID NO: 20958 - DNA, 333 bp, Zea mays
  Peptide Sequence Number=SeqID_62737
atggacggcggagcagtggctccagcaaacctgtaccggccaggatacgcaatgactggtgctctagagcaattgacacctaattcgacccctaataactatttcccctccattaattgcgctaatccggtatcccagagcggtggctcccaatttggtcatggcgtgctggcggtcggagagagggaagagcactggcgcaatagctacgtgtctttcaccgtggcaggcttaccggcgacgagccagcaatatagaatggcttactgcgacatggtgaagcttcaaggactctttgagataggaacttcatttccactaccacctacttga

SEQ ID NO: 20959 - DNA, 240 bp, Zea mays
  Peptide Sequence Number=SeqID_62738
atggcggtccaaaataaacccaactttaagaagaagggtaaatctcaaaagaagaagggaaaggcaaaggatacagtatccaagccaaaccaaaaacccaaagctggaccagttgtagatgcagagtgcttttactgcaaagaactgggtcactggaagaggaattgcaaacaatacttggcctctattaagaatcgcgacggtaagggtacagccgcagcagggaatgataagaagtag

SEQ ID NO: 20960 - DNA, 453 bp, Zea mays
  Peptide Sequence Number=SeqID_62739
atgggcaagagcaagaaaggtggtggttcttcgcatcattccgacgacaagcgcaagcgcgagccgactcccccctcggaggacttcggtgactcagagtactcggaggaggagttctcctccgagtccgagggctctccggctcctgcctctcccccgacgtcgtctgatgattcagatgactcccaggggatcgtcgcagaggtatggacttacatccgagccgtcaagcgcgccgagctcgagggctcggatgagtcggagtactcctcgaacgaggagaattcccccgacccgtctgaggagggcagcgacggcgacgacgacggaggtgacggtgacggcggcaagggcggtgacggcagcggcaagggtgacagcggtgacggcggcggcggcagcaagggcagcagcaagggcagcaacaagggcagcaacaaggccagtggctag

SEQ ID NO: 20961 - DNA, 387 bp, Zea mays
  Peptide Sequence Number=SeqID_62740
atggcgggggggcttcggctgcacggggagaacaccgatgagcgcggaccaggcgaaacagagaggctaggggcaaaccagatggtgtcccacgttgctggcgaagaggtggagctcaccaaggcaatggacgcgaaaagggctcggggcgcaagggacatggccaggaaacgtgcggtcgtgggcgtgtccacgacggagagcgcggatgggaggttagggaaggtggaagtggctgataggcggggttcgcataccagcgagggtgagcgggcgaacgggcggtcagtgctgacagggaggtcccaccgagtagcgagcgagagcgggcgtgtgcgcggatgggtcggcgccgacaggccggtcccaccgagcagtgggaggtaa

SEQ ID NO: 20962 - DNA, 225 bp, Zea mays
  Peptide Sequence Number=SeqID_62741
atggatgttctccagatgatgcggcgaagccccatgggctggttcccgaggccggagcaaggggtatggatacaagatggggcgattgagatgttacgccggcatagaccgcgtaggatctcgacaacccggcgcgagctcagcggagaaaaaggactaacaacaggggcggcagagaacgcgagggcccattcgtcagccgaagcggtgcccccgctacggtag

SEQ ID NO: 20963 - DNA, 465 bp, Zea mays
  Peptide Sequence Number=SeqID_62742
atggaggaaggtgaagtacgattaggaattgaagctgccacgttggtcgatccattccgccgcggccacggatgccctccagatgatgtggcaaagccccatgggctggttacggaggctggagcaaggtcaaagaaagttgcggctcgatttttaattataggggcatggatacaagatggggcgatggagttgttacgtcggtggagactgcgtaggatctcaacaacccggtgcgagctcagcggagaagaaaggacagacaataggggccgacgagtcagcatcgggtgctcacgtgcggtcaccgaccatgagggcccagccgaagcggtgcccgcgcgtaggggaagtggtgtgggtgactggacaggcgaggccacatgtcggcgcctggacacgatgcgggttcgagttgggctgcgcttggaggttagctgggcccagagcgggcaactggcctag

SEQ ID NO: 20964 - DNA, 324 bp, Zea mays
  Peptide Sequence Number=SeqID_62743
atgtcctcaaatgagtggcaacgcgacagagaggcatgcctcaaagctgaggtaggaaacctgctaacggcggtgaagacgttgaagcagtggggtctctctggcacgcggctagtgcggaccttcatgcatcgttggatccaacctctaatgtcttgccgaaaaccgaggcatcaatactctggggtcaatgattccgaccgctattcctttatgtcgcttgctctatccgagatcgaggccagggtcagggtcgtcaagacattgtcattggagtccttcatggatgaagaccttcccctcccttgtccaaagacgtcatga

SEQ ID NO: 20965 - DNA, 336 bp, Zea mays
  Peptide Sequence Number=SeqID_62744
atggcgcggacgaactccggcgacggcatggacgagcaagagagtgaggagcgcggagaaacggacgtgggcggctcggcagttgcgcgcatggcgcggtcgggtgcgcaggctgctcggtcgcggggttcctggcgcgcgggcaggggcatggtccttggcgctactggcggcgtcgggtgcaggggcattgaggcagggctctgctcggtgggtcctggcgcggcgcctggcgggtcgcgcggcggtgtgcgcggggcgcgcaggggcagtcggcttctggcggcgcggacggttggggagagaaaggggaaagggaggagaaggcgcagctag

SEQ ID NO: 20966 - DNA, 210 bp, Zea mays
  Peptide Sequence Number=SeqID_62745
atggcgaaggtcacagcttgccgaaggtggtcaaatgagttcactggagaaaagatgtctcaggaaaagaaggttgttgcaaaaacgaagctaaccgaagaagcgaagctgtttgaggagaagtctgtggatccttattgttgggggccttcgtcctccgaaggtcctcaaaaacgtgatttaacaatatcttccaagtgtgacacatga

SEQ ID NO: 20967 - DNA, 549 bp, Zea mays
  Peptide Sequence Number=SeqID_62746
atgtgtggcgggtcacatggttttgcctcggggctcagtggatacaacgtggctttgtcctgtcatcgtgggctctactttgtccttccgcgcgcatggattcgcccattcggtatggcgcctcgtcatgtcgcttctaccataccgactactatggaggctccgatgctgaggtcgccttggaccggggctgcctcgtcccatcagacaacgtggtatgcttattatatgaaaggtcggcttctccccaaagtctttttctcaaggggagggccttcctccttcgacctagtcggcgcggggagggagaccataaagctacaagaggattatccaagtgagatccgatcaccctccggcagtgttatcccactaggggtgctcaacccgctggggcatctcattgagtccttccttattcaatcccgttctagccctctggtcggcatggcctaccaaagggggccctgtggccaccccatctgccgagtttccatgggagaatttgaggtacgaccttggatgtggtgccgagcaaatgacctatga

SEQ ID NO: 20968 - DNA, 846 bp, Zea mays
  Peptide Sequence Number=SeqID_62747
atgccgccatccgccgcgtataaaaacaagccccggccggcgccgaggagcgtcccagccaccgcaccctcacgactatgcatggggaccaaacgctgctgcgtcgtcggcgtccgagcacggggaccggacgcgagcagtagcgacgacatgcgggagcccaggagcgctacgatgttggacgacggcgacgacgacttcaccttcgccgccgcccatccgcctccccgtctactacctgcaggcgccggcggcggattcgtggggccgccgctgctgtacccagtcttcgggcgcccgaggtccccgccgcgggttgctgatccagcggagccggagccggagccggacacggccaccgcgcgggtgccgctaggacggcatctggcggtggacaggaggagggatccggcaccggcaccgctgccagctcccgcggacgacgacgacgactcggtgccggcggagacgttctgcccgtggtcgcccgggtggtcggcggcggcggcgtcgccggcgcggtgcaagaagagcggctccacggggtccgtgctccggtggcggccccggctcgccgtcgggcggagccagagcgacggcaaggagaagttcgtcttcttgagtgccggcggtggctcttctgggcgccggagccagaatgggcgaggcgtcgccgcgcccggaggtggtgccactgccggtgccccccacgcctggagctgctacgtcaacgacaataagtccggtggcggcgcgcgccgcaggtcgttcctgccgtacaagcgggacctcgtcgggctgttcgccaacgccgccgtgttccgccggagctacctcccgttctga

SEQ ID NO: 20969 - DNA, 426 bp, Zea mays
  Peptide Sequence Number=SeqID_62748
ccaataaagagatcaagttttggattcaacaaaggagcaaagaggcaaccgaaggcacctctggtctgggggcaccggactgtccggtgtacaccggacagtgtccggtgtaccagaggacttcaactcaaactcgccaccttcgggaatttccagaggcacgtcgctataattcaccggactgtccggtgtacaccggacatgtccggtgctccaaggaaaggtggcctccggaactcgccagcctcgggtattcacttcagctgctccgctataattcaccggactgtccggtgtgcaccagactatccggtgtaccagcggggcaacggctataacggcgccaacggctacctgcaacgcattaaatgcgcgcgctgcgcgcgcagaaggcaggcgcgcccatactggcgcaccggacaatga

SEQ ID NO: 20970 - DNA, 1164 bp, Zea mays
  Peptide Sequence Number=SeqID_62749
atggcgtacctccctccccacaagcgccaacccagcaccacagcctccacgcccatccccgcacccaacccgccacctccgtccctctcctcctcccttcgctccctctccctctcctccccgcgcggccgcggccgcggcgcagtcggacgccacccgctcgcttctacaaagattttccgcgctgccggctgcatctcccgttggttccctctacctcccttctcccctgccggcgacggcgaggagtacaccctacgcctcgagcccttcccttgttcccccatcgagcacaggaccggcgccaaaccccttgcccttgtcgtcgcctccaccccaggacaaggctcttccggctccactgcggcggcagtcacctccatcgccgagcagtttcttcccgatctccttgccgccgcggagagggccaaggcagaaggcgcgcctaaggatgagttggtgaaactgagtctcgttgcaagactgggaacggtgctcttcgagtgccagccaggtggatcgcccgtttcactggacgaactccgccaggccgctaaagcaggggaagatggttccaggagccagttgcgtaaaacgttctacaccagtttgtctagtgagtgtctggatgatatggagcgaaccatggtgaagaggattgggctggattttgattcgtccaagaagcactatcatgtgaaggtttctgataagaatcgaagtgattctacaatatcttgcaaatgcaccgtggaggaagatgggagtcttgctatccataaggttgaattgaatcagtctgaagtggaaaatgctgtaaagagcttggtgtctactgctattattgatcctaatgtgaaagggggagttagatggccacttggaaaggaatcaattggcgagaggttcagcatagttggggtgtggcacacgggctacaaagctttcagaaacgagaccatgaggctcaagctaaggcatgctgacagattcgatcaccgtacctcgactgggggagtttctgatgaagttacattcaaactaactgctatatcttgcaaactggaggaagatgatctggcggagagcgctgtgaaagagatgctggagtctgcggtccaaatgctatgggacaatgcgctcaattaccgggtcgtgccttga

SEQ ID NO: 20971 - DNA, 174 bp, Zea mays
  Peptide Sequence Number=SeqID_62750
atggcgggtagcgcagagcttgccggagttggggtttctgctcggggagtgaagcaggggagttgtcacgtcgccaacttgggtgtgtctggctgcttcgtcccgaggcaatcctatgccaagatcgtgtcaatcggcctaggtttgtcttcaaacttcgctagggtgttctag

SEQ ID NO: 20972 - DNA, 429 bp, Zea mays
  Peptide Sequence Number=SeqID_62751
atgtcgggagctcacgccaagaaggagatggtgactggcgagaagcccgccacaagccacggaaaagctccatcgggagagtccggcaacaaaaagagggaggaatcacctccccgcgtcaagtcgcaccggagtggcgacaagaagaaaatgaagaaagtggtctactacgagaccgattcttcgttgccttccacctccggctgcgacacgccgtccgtcacttctaagcgccatgagcgcaagaagtttagtaagatccccttacgctatccacgcatttccaaacacactcctctactttctgtcccactaggcaaaccatcgggtttttacagtgaagattattgtatgtggagtgataaaatgaggcaccatctaacctcactccacactagcatttgggacattgttgagtttggtgcgtag

SEQ ID NO: 20973 - DNA, 1539 bp, Zea mays
  Peptide Sequence Number=SeqID_62752
atggagattgaccaggcggtgcgcgggtgcagcgaccgccgcatgcgcaccaagtacagcaacgccgtctacgtcgtccagcgggccttcgcgctctaccctgctcttaaaataattgcattcttatttggatctatactatctatgggtaatcgattccttgcaatgcaaacaggatttgaggaagttgccttcagctttaatggtgggaaggattcaactgtgctcctgcatttgattcgagctggttactacctttacaagaaggactctggtgatgtagcccaaacagatgctgttaaaaactgtccactgcgtactatctatttcgaaagcccttgtgctttccctgaaatcaattcattcacttatgagattgtctcaacttatgggttacctctggaaaccatccattcagatttcaagtctggtctagaaggccttctgaaggagaagcccaccaaagcaattttcattggcacaagaattggtgatccaaatgcggttggtcaagaacagttctctcctagttcacctggctggcctccttttatgagggtgaatccaatcttggattggtcatacaggtatacttccattgggagcatacacgatactgttccaaatgcactccttagtgattcatcatctgagaaaagttttagaccagcatacatgctaactgatggaaggcttgaaagagctggtagaacaaaaaagattaatcctaaagtagaaatgaattctgctgcaagcaatggcatcaacgatactgagggaggacggatgatctcacgggcggcatcaatcattgtagtcggtgatgaaattttgtttggtacaactgaggataacttaggagcagccttgtgcaagaagcttcatgcaattggctggcgggtttctcatgtagcagttgttcgcaatgagattgattctgttgctgaagaagttgaacgttgtaaatctactgatgacatggtgtttatttttggtggactcgggccgctacattcagacgtttctttggctggtgtcgcgaaagcatttggagttcgtctggctcctgatgaagaatttgaagattaccttagtcaactcatgggaaacaattacactggtgaccgaaatgagatggcacagttgccagaaggtattacagaattactgcatcacaaaacgctaccattgccattgatcaaatgtagaaatgtcattgctcttgctgcaaccaatatggatgaactagacaccgagtgggattgtcttctaggtacccaggagagtggtctaatgccatcaaaaccttttgtgtcaaagcatctcagcactacactttcagatgttcaaattgcttcagtccttgcaaaactgtgcttagagttttctgatgtttacatagggtgtcatcggatatcaagagctggtcctttggttgtgaatcttactggaaaggataaccagagggtagatgcggctgccgagaagctgacaagcagctttgaaggacaattttcccaacttaacagttgcaaataa

SEQ ID NO: 20974 - DNA, 126 bp, Zea mays
  Peptide Sequence Number=SeqID_62753
atgacattcaagggtttaaaatttcaatttgatagcattgaagagattgatataagtatggatgatgttgaagggattttctcgctggagatatgtttctattggattcatacagggagaaggtaa

SEQ ID NO: 20975 - DNA, 598 bp, Zea mays
  Peptide Sequence Number=SeqID_62754
gggctcgcccaacatcgagatggacgagcacacgttcctgaccaacagggagagggccgtggactacctcaactccctggacaaggtgttcgtgaacgaccagttcctcaactgggaccccgagaaccggatcaaggtccgcatcatctctgccagggtgtaccactccctcttcatgcacaacatgtgcatccggcccacggacgaggagctggagagcttcggcacgccggacttcaccatctacaacgccggccagttcccctacgatataggttatggcgccgagccatgcaggggctcgcccaacatcgagatggacgagcacacgttcctgaccaacagggagagggccgtggactacctcaactccctggacaaggtgttcgtgaacgaccagttcctcaactgggaccccgagaaccggatcaaggtccgcatcatctctgccagggcgtaccactccctcttcatgcacaacatgtgcatccggcccacggacgaggagctggagagcttcggcacgccggacttcaccatctacaacgccggccagttcccctctagagctaggaataatggcatgcagacgatatag

SEQ ID NO: 20976 - DNA, 1122 bp, Zea mays
  Peptide Sequence Number=SeqID_62755
atgagggccgcgcagatcgatccgtcccccgcggcgccgcccaagtcgcggctgaagcgcctcttcgagcgccagctgctgcgggtctcgccggccgagcgcctcccgtcggcgcctcccggtggcggggacaaggatgagctgccggagcctagctcgctgtgcctggacggcatggtgcggagcttcctggaggacggcggcggcggcggcggagccgagcgggcggcagcggccgcgcggtgctgcaactgcttccacgccggcgacacctccgacgacgaggacggcccggctgccgccgacgccgcggccgctgacatcgcggagacaatcaaggggctcgtccactgcgccagcctccgggagcgcaacctgctggccgacgtgtcgacgctggtggagcgccaccgcgcgtcgggggcgcgcaagcgcgacctgctccgcctgctggcggggtccctccgcgcggcgggccacgacgccgcggtctgcctctcccgctgggacaggtcgccgtcccaccccgccggggaccacgcgtacctggacgtgctcctcccggccgcgtcggagcgcgccgggcgcgagcgcgtgctggtggacgtcgacttccggtccgccttcgaggtggcgcggcccaccaaggcgtaccgcgccgtgctgcagcgtctgccgccggtcttcgtcgggcgggacgaccgcctgcgcctcctcgtggcggccgccgccgacgcggcccgcgccagcctcaagaagcgcggcctccacctgccgccgtggcgcaagcccgagtacatgcgcgccaggtggctttccccctacgaccgcgaggctccgcagcccgaggccagcaccggtgagctcgccggcgacggcgagggaggtgggataaagtggggatctggtcagcaaagtgcaaggggtgggatagcaagcgggcgggctatcctgtcggattcaacgagatcgttttgcccccgctactatgaaaattccccgctcgcgggtatcaattcgttttgcgtgcggcggctgctggagaggaagacgtgtgacggtcacacttgtcagcaacttgtagaatatatagcaaaatcctctctgacacgtggaagttaa

SEQ ID NO: 20977 - DNA, 237 bp, Zea mays
  Peptide Sequence Number=SeqID_62756
atggaccccgaagtgatttttggggacggcgaactaccgaacgccaagccctccttggtccttgcgcctgggtctggatgcggcccggaaacaagaagaaacgcgcgtgcaagaaggcgcgccggtgattcagggaagggtataagggacgtatacacagactgtttacgtggacagagcctccgtcaaggagtggtgaaaagcgaagggaaaggtgcaaagcttggcacgatatga

SEQ ID NO: 20978 - DNA, 861 bp, Zea mays
  Peptide Sequence Number=SeqID_62757
atgcagggcgacatcattacttgtttaccggggcgagccagatgggacgccggtcttgctcctctgaggtcgaggtcgagtctgtcttccaaggccgaggtcgagtctgagcccctgggtcgggcgaggcggagaccgtcggctgaggccagggctgagtctgagccctggggttgggcgaagcggagttcatcgtcttccggggctgagcccgagtccgagccctggggtcgggcaaagcggagttcgtcgtcttccggggctgagcccgagtccgagccctggggtcgggcgaagcggagttcgtcgtcttccggggctgagcccaagtccgagccctggggtcgggcgaagcggagttcgtcatcttccggggctgagcccgagtccgagtcctggggtcaggcgaagcggagttcgtcgtcttccggggctgagcccgagtccgagcctggggtcgggcgaagcggagttcgtcgtcttccggggctgagcccgagtccaagccctgcgggcggtgcggagtttcctatggcgcctgaggccggacttggctgctgtcagcctcactctattgagtggcatagcagtcggagcggcgcaggcggcgctgtcctcttgtcaggccggtcagtggagcggcgaagtgactgcggtcacttcggctctatcgactggagggcgcgcgtcaggataaggtgtcaggccacctttgcattaaatgctcctgcgatacggtcggtcggcgtggcgacttggccaaggttgcttcttggcgaagactgggcctcgggcgagccgaaggaattctattcagaacatgacatgaaatcaggactgcctccccccaccatgccttag

SEQ ID NO: 20979 - DNA, 900 bp, Zea mays
  Peptide Sequence Number=SeqID_62758
atggatggaccagtctgcacggcgttattgagctgcaggagagtggcgcatctgactgacccccttccattcacacaggtgcacccggagacgtacgcgctggtggtgagcacggagaacatcacgctcaacgcctacctgggcaaccaccgcccgatgctggtgaccaacacgctgttccggatgggcggcgccgcggtgctcctctccaaccgccgcgccgaccgggcccgcgccaggtaccggctggtgcacacggtgcggacgcaccggggcggcgccagcgacgagagctacgcgtgcgtcacgcaggaggaggacgccgagggcaacgtcggcgtctcgctctccaggggcctcatgtccgtggccggcgacgcgctgcgctccaacatcacggcgctgggcccgctcgtcctcccgctgtcggagcagctgcgcttcctggccgccgcgctgctccgccgcgtcgccgcggtcaagccctacgtgccggacttcaagctcgcgctggagcacttctgcatccacgccggcggccgcggcgtgctggacgagctggagcgcagcctcggcctcagcgcctggcacatggagccgtcgaggatgacgctctaccgcttcggcaacacctccagcagctcgctctggtacgagctcgcctactgcgaggccaagggccggatcaagagaggggaccgcgtctggcagatcgcctttgggtcgggcttcaagtgcaacagcgccgtctggaaggcgctacggacggtggacgacgccggccgccgggacaccaacccctgggccgacgacatccacgacctgccggtgcacgtgcccaaggtgtcgcccttcgcttcttccgaccaggcgccgcccaccaacgcccagcatgcctag

SEQ ID NO: 20980 - DNA, 294 bp, Zea mays
  Peptide Sequence Number=SeqID_62759
atgctggagacactagaggatgttcgggatgttggggaagcgctctgggcgtggaaggacaccctgagcaacagggagaagactatcatcctcaaggagcagaaagattggcgacgggcagtcgaaatctttgactggtttcgcagggagcaaggccatgagcttaatgtgattcactacaatgtcgtgctcaatacagttgggaaggcaaggaggtgggacctcgttcttaggctgtggtatgagatgcattcctttggcgtggctccggacaactcaacatatggcacataa

SEQ ID NO: 20981 - DNA, 261 bp, Zea mays
  Peptide Sequence Number=SeqID_62760
atggttttaccttcctgccccggcgcaaggcgacatgggagcctccgagcgggggagggcaggagggagctgagcccggcccggctcaggctgacgtgggctagaagagcaagctggcgctgccatgccagcgacagccggcaggcggagcagcagaggagggaggcaacgatgcgtagcgagcaaaagccaaaggagcagaaccgcagaagcatgcggatgtgggcgctgggcggcatggatgatgagcctgaaggctga

SEQ ID NO: 20982 - DNA, 2631 bp, Zea mays
  Peptide Sequence Number=SeqID_62761
atgaggtcgcagctcaacgcgtccttctcgccgccgccctcgctccggcgagctctcccctctgccacgccccgcgccctcaggtacggcgagcgcaccgcttcgatcggctccgcgtttctgctccgcagagcgacggaggctggcaggctgctgaacacagctctccctggttccaggttccacgcgttcccgtggcggttccgcgctcctcagcaccacggccgcggcgctggagctcgctgcgctaccaatctgcccgcgcccggcagccatggagtcggagtgctcgcctccgagaggagggccgacgatggcgacactaccgtgaaaaatgcagatgcgcctagcacttcaacggcgacgcagggaaacctcaacatggctgccattgttagcatagcattctgctttctacacagaattgtttctggacggatgcagtcgatgatgaatttgttcccttggatgtcaaacggcattgcaagcttgccatttgcttgcatatctgatcctaccagaaaacccatgcctcttaagctagatttgactcttccaccactgcctgatttcggatggaatttttcgcgactgtactatcggttcaattctcagcttgatcggaacattgccttgtctatcattaccttgctcatcacttgcttttcatttgtcattgttggaggattactgtttcataagttcaggaagcaacaacaatccctggaggactgcttttgggaagcttgggcatgtctatgttcatcatctacccatctaaggcaaaagacacgtgttgagcgtgtcattgggttctttcttgctatctggggtatattattctattctcgattattaagtgcaatgacagaacaatttagaaaccagatgcataaagtaagggaaggggcacaggtgcaggttattgaggatgatcatatcattatttgtggagtcaatagtcatctgatgtctatattgaaccaattgaataagtaccatgaatcatcaattcgcttaggtttagctacagcaaggaagcagaaaatccttcttctctccgatcttccaaggaagcagattgataaacttgcagatagcttggccaaagatttaaaccatattgatgtattcaccaagagttgtagtcttagcatgtcaacgtcatttgagagagcagcagcacacaaagcaaaatctataattatcttgccagcacagcatgaacgatatgaagtggatacagatgcatttgtctctctattggctctacaaccctgtaaacaaattgcacctgttcctatcattgtcgaggcttccaatgcaaccacttgtgaacttctgaaatcaatcactggcttaaatgtgcaacctgtggagatggttgcttctaagttatttgtgcagtgctctaggcaaaaggaccttctgaaaatctacaagcacttgcttaatcagcacaaaaatgttttcaaccttttcaggcggcctgaattagagggcatgaagtatatggatgcagtcgtttgtggtatcttccggtctggaaaaattcattttcacccaagcgaggaagaactactgaaagaaacagacaaattgcttcttattgctcctgttcgtgggatgaaaagaccacaatatagagcattaagtgtacggaaagaaacacaaacattgagtcgtaactcagagccaagagagggtcaaggatcatttaatatggctactaccatggataatgaaacacggctaaataacattgtaaagcgccccttgaaatctctttctaagagcagtgattatatgcttggacccaaggaatgtgtacttattgttggttggcggccaaaagttaccgaaatgatacgggagtacgataattaccttggacctggtagtacagtggaaatcttgtcggaaacccctattaaagagaggagcagtatcatcaacccccttttgcagagccagcttaaaaatgttaaagttactcaccgggtggggtgtcctttgaactacgatactctgaaggaaacaataattaacgtacgagaatctgccaagtcagataaagaggttccactgtcaatagttgtgatatctgacagagactggtttgttggagcagatgctgcacaggctgataaacagttggcatacacccttcttcttgctgaaaacatttgccagaaacatggcgttatggttgagaatcttgtatcagaaatcgttgacatgggactaggaaaacaaatatctaaaataagaccatccctttcatttattggagcagaggaaataatgagtcgtgtgacagcacaagttgcggaaagtagtgagctgaatgaagtatggaaggatatcctgaacgctgaaggcgatgagatctatattaaggaaattgggctgtacatgaaggaaggagagaaaatatcattcttggagctctctgaaagagcagttttacgccgtgaagttgcgattggttacatcaaggacggcaagcagcatattaatcctatcaacaaatcggagccgctgtcccttgaaatgaatgattcgctcattgtgatatcggagtttgaaggtgaacaaccaattatgatgggcggagaaacttcaggatga

SEQ ID NO: 20983 - DNA, 360 bp, Zea mays
  Peptide Sequence Number=SeqID_62762
atgggcggagcacggagaacgcgctggcgatggaaatatggcggacatcgcggcgcggcggccagggtgcgcggaggcagaaccgaacaacacagcggtggtgtggacgcctacgctccgctcttaagtagtagagatgtgctcgcgtcggcccgtgcgccgcctcccgtcctcaactccagattagatcatatggcgcttcgagtgcgcaacgcgctcggcctcgaccgtggcatgttcttcgaggcgttcgccgccgccgtcgacatctccttcgcacgcatgctccacctgaccgcaaacggcgatcatgaagtcaaaggagcgatcacacggcgtcagcgacggcgtctgctgtga

SEQ ID NO: 20984 - DNA, 369 bp, Zea mays
  Peptide Sequence Number=SeqID_62763
atgaacaagacaccggcactcaaggtgccattacaaacggaactccggttcaacctccgcgggtacgaacaaccccccacattggaggacccgcggggcgataaggctccaaggtcctccccctacgacccgagggctgggtcccatgcgtcatgcaagctggcccagggcagaagaagccaaaccgccacgcgcggtgtcaaaggttcacacttagccaataaaaagaccaagtattgggttcaacaaaagagcaaagagataaccgaaggcacctctgaggcgctccgctataattcaccgaacttccggtgctctaaggaagagcggctctggaacttgccagcttcgggaattcgcaacggctag

SEQ ID NO: 20985 - DNA, 935 bp, Zea mays
  Peptide Sequence Number=SeqID_62764
ctctgcactcattaactagatcaactgctgcagtgtctgttccacccaatgcaaatcacaaggttgaaatcatgaatgagttgcctgaggacaagagcattactgtatacaggtgtggtcctttagttgacctatgccgtgggccacacatcccaaatacttcctttgtcaaagctttcgcttgtctgaaggcttcatcatcatattggagaggaaaagttgaccgcgaaagtctgaagagagtatatggaatttctttccctgattctcgacgtctcacggaatataaacattttctagaggaagctaagaaacgtgatcatcaaatattagggaaagcacatgaactcttctttttccatgaacttggccctggaagctgcttcttccttccacgtggtgctaggatatataacaaactgatggacttcatgcgacaacagtacagagatagaggataccaagaggtgttgagcccaaatatttacaatatgcaactatgggaaacttctggacacgtcgcaaactataaggagaacatgtttgtttttgagaaacaggaatttggacttaagccaatgaattgtccaggacactgtctaatgtttgctaatagggttcggtcgtatagagtgatttcctcacggttgtgtccttcacaaaggaaggatgtgaagccacactattatcaagcaacaaaaccagagttgtgtgacacaattataacaaaggaatcatcgcccattagcacactaaaattggcgcatacagagaacgcacctgcaaagtgggatcatttgaacatagttcagcaaagggccgacacacttgagtcaatcctcgagctctacgcaaagcttttggaggagaggctcgatgagctcgccgacatttttcgaccattcgtgagagagtcgtgtcatccagagagatga

SEQ ID NO: 20986 - DNA, 435 bp, Zea mays
  Peptide Sequence Number=SeqID_62765
atggcaatcgccgggcagtgctcctcctgctattatacgtcacccaccctgcagctccaccgacgtcacagccacctgccgcggcagccccaagccgcacgaagagcgcggcggccgaggttgcaggtggccgcagctgccgacagcgggcccatcagggcggccacggacgccgagttcttccagccttccgacaccaggccaatcatgctcttcgacggcgtctgcaacctctgcaacggcggcgtccgcttcgtgcgggagcacgaccccaacaggtctttcatcaagtctgaagcggtgctgaggataatggagtacctcaacctgcccttcccgcagctcgccgtcttcctcaagttcgtccctctgttcctgagggacttcgcgtacgacaacgttgcgaacaacagtgcagtgagcgataggcactga

SEQ ID NO: 20987 - DNA, 1461 bp, Zea mays
  Peptide Sequence Number=SeqID_62766
atgtcttcttcctctgtccaacaaacggcctttcccgagcaagaagccgatgcggaaggcgaaacgaaccctgagctctaccagcatttcgccaacttggtctcctccctgccgagctccaaaggcttgtccaacaacaaattctaccgccacggccaaggctggcactgcagcgaggtgggcatagtgggcgccatggtcaccgacgcgtgcttcagcgcgcgcccgtcggacgtcatcatcgccaccctgcccaagtccggcaccacgtggatgaagtcgctcctgtacgccaccgtgcaccggagagagcgtcccgtcgtcggcgccgccgccgccgaccagcatcctctcaacagctggggcccccacgacctcatcaagttcttcgagtaccagctctacacgcgggacagggtcccggacctggacaggctccccgaccctcgtctcttcgcgacgcacgtccctttcgtgtcgctgccgagctccgtggtcgccacgccgggctgcaagatcgtctacgtgtgccgcgaccccaaggaccacctcgtctccctgtgggacttcgtcaacaaatacttcagggtcaaggatgggctcgagcccctctccgtggaggccgccgccgagctgttctgcgccggcctgaccccgttcgggccgtactgggaccacgtgctcggctactggcgcgcgcaccgcgcggaccccgacaaggtgctcttcttcaggtacgaggagatgcagagggaccccgcggcgcacgtccgcaggctggcggagttcgtcggcctcccattcagctccgaggaggaggacggcggcgtggtggatgccgtcgtggggctgtgctcgttcgagcgcatgaggggcatggcgccgaccaagggtggcaggactgagttcccgatcggcgtggtgcccaacagctcctttttccggcagggcgtggtgggggactgggtgaaccacctgtcaccggaaatggcgcgccgcattgacgcgatcactgcagacaagttcagggcgtcgaccatcgagacgctagacaagctgtgtcgcgtgaaccgtggcgagagagtgacggcgggtgaggtggccagggcggccggggacgtcgcctcggctggtcttgcaatcgccctgggtgcatgtagagatggcaatggtgctctgggcctccgggctccggccgtccggcggtttggctccggcctccaagcgagcagcgctgcgtgctgcggcggcgggccggcggcggcgctccgaggctccggccgtccggcggtctggctccggcctccaggcgagcaacgctgcgtgctgcggcggcgggctggctccggggctccggcctctaggctagcagcgttgcgtgctgcagcggcgggccgtaggcgatgggtgcctgggtggctcctccacggctggcgggcgacggcggctggtttagggtag

SEQ ID NO: 20988 - DNA, 1305 bp, Zea mays
  Peptide Sequence Number=SeqID_62767
atggcgatcatcgtcagctcctcagctcgctcgacgctttttattctatcgtccattaccaaccatgtctaccgccgacaggtcgtctccgccctgaagacgacggccgccgcagcgaggcggcatacggccttcgccatgctgctcgccttcgtcacgctgctgcttgtgctggccactcgaccggcgcagtgccaccagcagagctacgacgtcgtcaggaacttccacgccgccgcggatggcaagacggacgatgccaaggcgttcctggcggcatggaaggcggcgtgcagcgacgaggccaggccagtcgtggtcgtcccgggaggacggacgttcctgctgagccaggtcacgtttcagggcccctgcaagtcacccatcaccatacaggatcgtagcgccgaaccgcatctggacgactcagccagccaacctcctggtcttccacggcgtcgacagcttgactctggacgggaacggcgagatcgacgggccgaggggccatctggtggggactgctataaccacaagagatgcaacgcccggccaattctgctggccttctcgttctgcgaccacctacgggtcacgaggatacggctgaccaacagcgccgacaagcacatgaccctgttccggtgcagccaggcgctcgtggacggcgtctccatcgccgcgccgcccgacagccccaacacggacggcataaccgtggcgtcgtccaaccacaccgtcatctccaactgctccatccgaagcggagatgactgcgtatcgatcctgtcgcaaacgagaaacgttaccgtcactcgcagcacctgcgggcctggccatggtatcagtgtgggaagcctgggaagatccgagagcgcggtggtggaacagatcgtagtgactaactgcagctttgttgggaccatgaatggtgtcaggataaagtcatggcagggagggaagggctacgcaaaagggttcctctttgcgggcctcaacatgaccggagtgcagtatcccatcgtcatcgaccagttctactgcccgcaaggaaactgtcctgtgaagcctggtggcgtggcgataaccgacgcaaggttcatcgacatccaagggacgtcatccaggcaggaagccatcaggctgctgtgcagccagagtgtccactgccatgggatctacctcagcaacgtcaacctttcctgggtcaaccacaccgccccgtccaacgctactattctgaacgcccacgggacaaccgagggcgtcgtcgtgccaaagatacagtttttacagcctttgtag

SEQ ID NO: 20989 - DNA, 771 bp, Zea mays
  Peptide Sequence Number=SeqID_62768
atgcaggcggcatgcaaccgcaccaagggggcgcaccctttcgacttcgacgcgtccagcatggaggcccaggcccacacgtcatggaccgggaaaggggataccacgaaagggatcctcctccgcgaaggaaacgggccccgagcccccctactgatcagaggttcgaaggctggcccctcggaagggttcaacagccgcctcagagcactcgggctccgcgcccactactggtcagaggttcgaaggtcggcccctcgaaagggttcaacggccgccccaggccactcgggctccgcgcccattactgatcaggggttcgtaggctggcccccaaagggttcgacagccgcctcagacgcagagcgagggatgaccctagggctcggactcggcctcggccccggaagacgacgagctccgcctcgcccgaccccagggctcggactcggcctcagccccttacggaagcaaggagacgtcagcaaggactcgacagccccgacagctgtccttccgccaggctccagcgctcctccgacggccacgatatctcatgaacagggcctctcgccccctcccacgcggacgcttgtaaccccctactgcaagcgcacccgacctgggtgcgggacaaacacgaaggccgcggggaccccccggggtcgaaacgccgacaaacgtctaatctcgacctcgacctcaagagaaatcttcgcctcgcctgagctcgcgttcggccaactgctagcaggggagcatgcacattaa

SEQ ID NO: 20990 - DNA, 951 bp, Zea mays
  Peptide Sequence Number=SeqID_62769
atgagcaagaggacaggacacgcgctagggacaaccggacaagtaaagaggccacgcgcagacacgcagccgcgaaacgaacggaaagacggcagctgtgccagccaacggagcaacggctgcctgcccccacctttcccggccgaagacgatgagagcagagcaacagccaacagcggggagtggaacggggcagatctgagcgaggcactagcagcagagcctttggttaagcaccactggttagagcaaagcgagggacaagggagggcagagcaagattaccggttccagtcgagcagcgagggcaaggtcaccgtgattgatgacgacggtgatggtgagctagagagcagaagactacgcgccgcggcctgcggggtagaaaaggaagccaaatcgtgggaagtgaagccgatccgatcgggcgagcgagattattatatggctggatcgacgccgacggagtggtgtgctggtgccgcaccgtcacgcacgcggcgcgcagcaacggggagcgagatccgagcttgggatggaatgggaccccggctcagtccggcctcgggcgccataggaagctctgcctcgcccgaccccagggctcggactcggcctcggccccggaagacgacgagctccgcctcgcccgaccctagggctcggactcggcctcggccccgaaagacgacaagctccgcctcgcccgaccctagggctcggactcggcctcggcctcggaagacgacgacctccacctcgcccgaccccagggctcggactcagccctggcctcagcagacggtctccgcctcgcccgacccggggctcggactcgacctcgaccacggaagacagactcgacctcgacctcggaggagcctccgcctcgcccgacccagggctcggaccgaccacgtcacatgggggccatcattaccatacccctag

SEQ ID NO: 20991 - DNA, 513 bp, Zea mays
  Peptide Sequence Number=SeqID_62770
atggcggcgttgcaggccaagttggaagacgacgaaatcgaagccttccgccgcgatgtgggtgaccaagtggtgtcgcaggtcgcggcaatggaggcggtggctctggaacgcatcgagaccatcgcagccaacacaactacgtgtggggcggtgttggagaacgtcaattcgatctacgagtccaggcggtcgtggattgaaggatatattgagtcactgcagacttccgtcgaatcggatcgttcagatctccatcggctgaccggtgtcctcaaacatggcagccatagcgcgcttgacaaccaggcgccagagatggagcgaccaactgcgcttcagaatttcaccaatggcctggtagggcatggcgatgcacatcggcctcgggagtatggtggtggagcctcgttcttcccaatccatctcccgaacaatggaagaagctggaaccctagtgaagaagaggcaatctcggtggcaggattcttccatggcaatgaagcattataa

SEQ ID NO: 20992 - DNA, 216 bp, Zea mays
  Peptide Sequence Number=SeqID_62771
atgtccggatctggtgcacccgccatccgagtgtttctggtgaagtaccgtggcgtcgtccgcccaaaaccggtgtctccgatatcaaatgtcagggaccgtctccctcacaacgacggtcggccggcacagcgaggtctgaaagatcttgaggcagcgagcacgcaagagatgcatgccacaagctaccactcccgcagccatccaaaaccataa

SEQ ID NO: 20993 - DNA, 750 bp, Zea mays
  Peptide Sequence Number=SeqID_62772
tatcctatgcaatttctaagcctctatgcaattttccagcactcggctttgctagatctcgacaatgacactgcgttttttggtgtttttgatggacatggaggaaaagtagtcgccaaattctgtgcaaaatatctacacagagaagttctcaggagtgaagcctatgcagctggtgacctgggtgctgctgtccacagagcttacttcagaatggatgaaatgatgcgaggtcaaagaggatggcgggaacttcaagcacttggagataagataaatcagtttagtggcataatagaaggcttaatttggtctcctaaagcaagtgattcaaatgatagacatgatgattgggcttttgaggagggaccacactctgattttactgggccaaattgtgggagtacagcctgtgtagctttgatcagaaataagcaactcgttgtggcaaatgctggtgactcccgctgtgtcatctcaaggaatggtcaggcatacaatttgtctagagaccataaaccagagctcgaggcagagagagagaggatacggagtgcaggcggtttcgttctaatggggcgtgtaaatggaaatctaaacttgtcaagagctatcggagacatgaagttcaaacaaaacaagttcttgccccccgataagcaaatcctgactgcgaaccccgacataaacattgtcgagctatgtgatgacgacgaattcattgttttggcatgcgatggcatctggtaa

SEQ ID NO: 20994 - DNA, 330 bp, Zea mays
  Peptide Sequence Number=SeqID_62773
atgggggtttaccttagcactccgaaaactgagaaggtatccgaagatggggaaaatgataaacttaaattcggagtttcatctatgcaagggtggcgtacaactatggaagatgctccttatgcgtcttacctggatactgacacaccgacacaagtgatggaatccgactcagactcggatatccaactcagcatgattttactcaacttcccaattgtgacttggaatccaattgggtgtgaagagtctgattcgccaaaaataaatgtgctttcaatgtcccaggttactgggtgtgcttatatggaaacttgtagaatgtcctag

SEQ ID NO: 20995 - DNA, 729 bp, Zea mays
  Peptide Sequence Number=SeqID_62774
atggtcaaccctgttcagcagtacagtggtttgtctacacagccactggagacggtgtgtcgggtcaacatgggtggtccgaagatcactcctgacaaggttgaatcacgattcgcccgaaaccccgctcgtcagtcgctcaaaactccgcctcgctcgagcccatcctcgggcgaaagcagcgctcgggagaaatcctcgtttcgcgcgagggcccctcttcatggaatggcagtttccatctcacctgagcccatctcggataggaggacagccccgagcccaacctcagtcaaatgtcataggaaccgtggagacgtgcatattaaatgcgacgattcgtcacgcagtcaaacagggagcgatgggaccacggtcccatccactttcaccaactacgatgatgcacgcccaagaataacgaacattgttcccccactccggtcactgttcccgaacaactccggatgggacatgcacgtatctgagcccagcctcacccttggaagagaattccgtctctctcgaagatggcctcagcctcaggagaagactctgcctcgcctgagctcgacttcggtcaaccgcaccggcaataactccccgcaaacccagcatgaggccactccgacaaccgtactaacccctcgctgcacggctgcatgccccgcaggctcgaccaaggcctcaggaggaacctccgttcgcccgagcctggcctcggcttag

SEQ ID NO: 20996 - DNA, 447 bp, Zea mays
  Peptide Sequence Number=SeqID_62775
atgggtgagataggcatggaccagctgggtctggccgaggctgccgccgccgtgaaggaggagggcatcctcgacgatgacgaggagacgtcaccgatagagcaagtgcgactgacggtgccgacgacggatgactcgtcgctgccggtgtggatgttccggatgtggagcatcgggcttctgtcgtgcgcgctcatgagcttcctcaaccaattcttctcataccgaacggagccgctggtggtgacgcagttcacggtgcagcgagccgctaacttcctagagccgctaactcccgtgggccacttcatggcccgggtgctgccgcataccaggttccgggcgcccgcgctgttgggcagcagggcgtggagcctcaacccggggcccttcaacatcaaggagcacatgctcatatacatcttcgccaacgccgacttcacctaa

SEQ ID NO: 20997 - DNA, 150 bp, Zea mays
  Peptide Sequence Number=SeqID_62776
atggcgccgacgcggggcgctagaggcagggtgcgtctgtcggtgatgaacgcgctggagatcctgcgggagaccgtgcgggtgctgcgcggagacccgcacgcgttcacgtccatcctcttctgctgctctgctcggcgtccaggttga

SEQ ID NO: 20998 - DNA, 117 bp, Zea mays
  Peptide Sequence Number=SeqID_62777
atggcgggcatagctgggattgcgcaccgaagaagaacgccgccgcggatcaggggcagggctaaccgtcgcaagtcttctggtggcgcgtaccggttccctgtcgtcccgatgtga

SEQ ID NO: 20999 - DNA, 1644 bp, Zea mays
  Peptide Sequence Number=SeqID_62778
atggcgacgacggcccatccggcgctccccttgctcatcgtcctagcatgtgccggcgccgccagcgggttctacctccccggcgtcgcccccgccgacttccgcaagaacgacttgctcgccgtgaaggtgaaccagctgagctccatcaagacgcagctgccatactcctactactccctccccttctgcaggccggacaccatcgtcaacagcgccgagaacctcggccaggtcctccgcggcgaccgaatcgagaactcaccctacgtgttcgagatgatggagcctaaactgtgtcagatcgcgtgcaaggttgttctgaccgagcagggagcaaaggacatcatggagaaaatccacgacgagtaccgtgtaaacatgattcttgacaacctccctatggtcgtcccgattgagagattggatagagacgcgcctccattctatcagcaaggtgtgcacgtgggtgtcaagggccactacgctggggaaagcagtatccagtggtcatcccgctgggacacctacctccgcacgcctgacgatcattggttttccatcgtgaattctctgaccacggtcctcttcctgtctgtgatggttgccatgatcatgctccgaactctgtaccgcgatatttccaagtacaaccagctagaggaccaggaggaggcccaagaggagtctggatggaagcttctccatggcgatgtgttcaggcctcctgccaatgccgacctgctgtgcgtgtacgtgggcacaggtgtacaattctttgggatgctgctggtcaccttgctgattgccatcctggggctcctgtcaccttcaaaccgtggagggttcatgacagccatgatcctgctctgggtcttcatgggcctgcttgcagggtactccattgcacgtcttcacaagatgttcggggggctggaatgggagaaggtcgccatcaagacggtcttggtattccctggagtcgtcttcgtgatattctttgccctgaacaggctcctctggggcgtgaaatcatctggggctgtgccattcaccaccatgttggcactggttttcctgtggctcggaatctcaatgccactcatcttcgtcggcagctaccttgggtttaggaagcctgccatacagggcccagtgaggacaaacaagatcccacgcctgataccgcagcagccatggtatatgaacccagccgtctcggtgttggtcggaggtatcctaccctttggtgcagtgttcatggagctcttcttcatcctgacaacgatctggatgcaccagttctactacatcttcgggttcctgttcctcgtctttgtgatcctgatagtgacctgcgccgagatcaccatcgtgctttgctatttccagctgtgcagtgaggactaccagtggtggtggaggtcctacctgacacccggctcgtcggctctgtacctcttcctgtatgcagcattctatttcttcacgaaactgcagatcacgaaggcggtctccggcgtgctctacttcggctacatgctcatcgcggcttatgccttctttgtactcaccggcaccattggcttttatgcctgcttctggttcaccaggcttatatactcttcggtgaagattgactag

SEQ ID NO: 21000 - DNA, 232 bp, Zea mays
  Peptide Sequence Number=SeqID_62779
ggtcttccgcgatgggatctcctccatcgatgagctgtggctcgtccctttcggcaatgggcgtgtctcggccgatagaaccgtcacttgccaggtcagttcaatgcctgacaccgtatcgttctcgttgtttcttgaactgggtatgtccgtatgtgcgttcctcaagaagtccaactgcaagtttgagaggtttgggttactctactggaagctaaagcaaaccgactaa

SEQ ID NO: 21001 - DNA, 414 bp, Zea mays
  Peptide Sequence Number=SeqID_62780
atggctggcggcgtgagggcggatatgtggcggtcacggcggacgtggggttcgcggctggcaggcgtgcggagcggctggcaggcggttcgcgcgggcgggcgtgtggtagcggcgggtttcgtggaacgtgcattgcggctggcaggcgggcgtgcgggtgggattcagcaccgacaaggcagcagcagctccattgccagaccaaggacgccgcgccgccatgacgtgccggtcgtcgccgatttgcacaccatcgtgccgttacaaggaggacgaggaggcaagcagacgacgcccgcagccagcaccggcggcgtggacgtgcagatggcgctggccctcgcgctcagcaacagcggcaagcggctccgcgttcttcgacgagccgtgcaggatgcgggcgtacggtag

SEQ ID NO: 21002 - DNA, 465 bp, Zea mays
  Peptide Sequence Number=SeqID_62781
atggacacgacgatttgtttcccgagacgacacctcgagggtgtcggtggccttggcctcgtggaagttacggatgagcgtgggcaggatgtgggagttctccgagtggaagttgtcgtgcgggccatagaggttggtgggcatggtggagacggcatcgaggccatgctagacgtggtaggcctagcacatcttgatgccgacgatcttgggacggcgtaccacccgttgcgcaaacttggggtagatgcaagaggagccgaggaagaggagcttgtgaatggagccctagtgcagcgcagtgtccaaggtgatgaagtaagcgggcaaggcggagttggcgtggatgccgccgagcttggcgaccacctacaccacgtagcgcaggcgctccgcagcgaagaaggcctccaagtcggccgaccgggtcaggtcaagcttcgcacgggtgtggaccacgactga

SEQ ID NO: 21003 - DNA, 1569 bp, Zea mays
  Peptide Sequence Number=SeqID_62782
atgaagattgttgggaagtatgtgccgaagacagagactttgaggagttgggatatgcgcggttccaacgttaggttgaaccgcgtttttgagctgaaccatttgtcgtatggtggttacccgaagggagactatgccgacattgctagccgccgagggaagcaggcaaggccattggttgatgagggcctctcacgggacaaggctctgggtgcggctgtcagaaaaagaaaattaggtacagcagctgaggatttggggctgagggcttctgatcattttgttggggatttgctagagacaaggaatgttggtgctgttgtatcggtagtgatggagaagggtcgccaggatgcacagcggaagaaacgtcgggcccacgtcaggttggcggacctgaggcgggaggtgaaggtggcgtggcccagcgcgaagcctaccgctttagacgccggtatgcccccgcccgccgtgcctgccagtgggcgaaggcccccctcgccatcgcgcattgctgagacaacattggtggggcccgaaggagtctccatggaactttccgtggacgactacttggtgggtggggtctccatgttcgatgcccagacggggttgcctcttgctgagtctggacagctggctgttgtgccggcggcgtcgtctactggcccggtggtcacggcgaccgggacgaagggtgacacggggacctcggcggaaccgtgggctagattttgcgccagcgacgaaatcgcctctactgccgctgcgacaggtgtggccgcctcagtcgcacaacagctgaaatatgcgaccgccttcacggaacgtattgctttgggggtgctaaccttggagttttccaccgagaggcagcgacttgagggaaggattgagcgcctccggacgcaacacacagaggcagttagggacaagtcggcgacggagaacaaaagccgcaatttgcttgataagctttcggcggcagaaaaagaaaaggaagacctcagccgtcgtcttgcggaagaaaaggagggcacggaaaaagctcgcacggaggcccaagctgcccgcgtagaagctgacatcgcgcgtgttgaggctggtcttgccctcaagcgcgccgccgacgcggagtcggagatgaaaagcttgtgcagctatactgagaagacggaggcctcgcccccacgccggatgtgggttcctcacagtcgtggcactgtccaggagagggctgatcgagcactggcgcaggttccgacatccgggtctgcgcaagcaaaccccgatgatgttgatactaatgttttgacgactgcgaatgcaacgccttttaatggaaatgtgtttgagggatctgaacttgggtcatggtcctcggacggggatgaatttggaattcctttttcgtgggttgaggaatcttttgaggacttagattacttcgttgcattggatctggtcgcgtcggagtgtccgttgcgaccttctacgcacaaagcgctggccgcctcggccgaagcgagggctgaagacccacagaggcgaagagtggtgtcaaaatag

SEQ ID NO: 21004 - DNA, 567 bp, Zea mays
  Peptide Sequence Number=SeqID_62783
atggcgaagtgggcgtcggccgcaagggctacgacgacgacgacgatagaccgacttgacgctctcaacagctgccttgccatgagatatgaggcactgttgcttagagatgctaaatactgcaacgaccttcacttgcaagtgtcctgtcaggagtggctaacttttgcaacagattgtcttgataatggcttctacaccattgcctccaaggcttttgcaaatgctcttgtgcacattcatccaagccacctagggcatttggactctgctaattccattgaggagaaggacaagatcattgagataacaggactccagaacttggccaagtcattatctgcacaacattgtggcagagaaactgagtttactttaacttttcaaataaagtccactaaatacatggaaaggagagcttcaagtgttcatgagaagtataatttgcaatcaggaaaaccaaagttaacaagaagttcaatgttcaggctagggattaaaacgaggaacataaagaaattgcttcgtagccaggaaaggaacttgggggatttaacgcaatcttag

SEQ ID NO: 21005 - DNA, 384 bp, Zea mays
  Peptide Sequence Number=SeqID_62784
atggcgcagacgacgggcgacgtcggcggcatctcttcttcccttcctagctcctctcggttctcacggttctgcttcgctgggggctgtggcaggctcgggacagcgttctgggagttcggtcaaggggggactactgatcgtcgagaaaccagtatggactctgcatcttgggcacatcgaacttgggaaaaagaaataaccggcccatggacgcacacgtcggtcacacgcaaacaagagtgtgtcgtgatgaaggggctatcaaaagagccccactcgcagtggtgcgcacacggagagacttctggtgtacagggcccgccttccagcgcccggatcagccacgagcagggctggtcggctaggccaactgggatgtaa

SEQ ID NO: 21006 - DNA, 294 bp, Zea mays
  Peptide Sequence Number=SeqID_62785
atgccgctccatgcaattgatgaagcttgggagttgctcaccttggaggatggtgtcgagacagtgctagaacagactaggcagtttatgagagcattatctctgtcaccggttgcttgggagggaacaaatacagggactgccatgagattgtcttgttggtcttccgccatcttggccaactggggaacccatcacaaagcttattcaccagcaattgtcccgcacacagttctagatgacgaagcagcctcgctaggcatcgctaacaatcacaccattagaaaccactaa

SEQ ID NO: 21007 - DNA, 369 bp, Zea mays
  Peptide Sequence Number=SeqID_62786
atgaccattgtcgttgtcctctgctatgacacagctccagttcagacattccctgaggaagcagccacagcagagtcgcctgggaagtttgaagatgccacctctgaaaatgcatccaacagcgaactccccacgggctcaggcgcaagtttcgcagatttcgtggacaatgcgaagaagaaagtgatggatgtggtccacaatataaccgactttttcagggacttgttcaatgactcagccgaggcccagaccggagcaggcccttcagctgagaagggcttttctgcaacagagatggctgtgggaggatccttcatggctctgaccatagcggtcatcctagttgttctgttcaagagggcatga

SEQ ID NO: 21008 - DNA, 591 bp, Zea mays
  Peptide Sequence Number=SeqID_62787
atggcagcctctagtgagggtatgttgctgccatctttggtgaacgaggaggatgtgcaccgtcgcagcgcaaggtcacccgatgaagccctatcgcatccacatggcgcactcgctggtagtccactatgccctccaccacctcctcgatcgtctcctaccccctacccggcctctaaggttgacatccgctgcttccacttcgatgactacgtcaccttcctcgcatccaccactggaaaaccgggtgtcctcaactcgtgcgccattaagcgcttcaacattggtgaggactgccccatgttcgatagtttctttatttcccttctgccagtcctctattggggaagcatcgacgctgccatcaatctcaaccatgtggatgccaacatcaccgtcaactgggcagctagcctccaccgcgctaagaagagtgaggcctctaggttctgctacgttaacaacatcgtcctcgccgtcctcgagctcctcatgttccacagggctcgcatgctgatttaccttttactacttacgtttaacatttggacacttgtctttatttttggaggagctagtttattatattga

SEQ ID NO: 21009 - DNA, 531 bp, Zea mays
  Peptide Sequence Number=SeqID_62788
atgtgcatcactccctttctccaagcacgagtgcgtctccttctccgctcgtccgctctcttcctcctcctgcagccccgtatgccgcctcacaccacacccatggttcatcatcgtgcctccaatcctctactcgccaccgcacatctcgctgtccaaacacatttcctgatttcctggttcatcctcctcccgttcagcttcctccagatctcgccttcgctcattgtaagtggcaagaagggagttccaggaggccgcatcgagacagttgatctcgtcgaacacccaacgcgtgaaggtgaggcacttcatccgttcgatgtggcagcgagggggcggtggacgcagtgggaggtggtggtgtccaacgaccgtggcagtaggcgaggcgaagcagctaccggtggtggggcgagagtggagcccacgtcacatgtcgtaccacgtgcaagggggttcttacgcgagctcgcagtcatcgccgaggcggtctccttcatcgtcacagtcgcccgaggcggctactga

SEQ ID NO: 21010 - DNA, 285 bp, Zea mays
  Peptide Sequence Number=SeqID_62789
atggacgttgtggtgatcacactgtcacgagagctgagcaaactacagcctgcatgcttgaccacatcatggtcgagcgccccccgcctgctcccccgcgtgccaatcccttcccccgtcgtgccctcgatgcatgcctcctggccccaccgcgccacaccccacgccggcaagtctgacgttcaaggaatctgcaaggaagtcttcgaggacctgtcatacaataacatagggctcctggacatcaactccctccttgtcgccaccctcatgttttataagtga

SEQ ID NO: 21011 - DNA, 150 bp, Zea mays
  Peptide Sequence Number=SeqID_62790
atggcgggcggaagagagcttgccggagctaaggaggggcgtttggccagcgaaggttttgctgactggatcaagagacagagaggggagaaatcaggaattgagctagggatcaaggtgaacacgctcggtctttggctcaagggctga

SEQ ID NO: 21012 - DNA, 345 bp, Zea mays
  Peptide Sequence Number=SeqID_62791
atggaggaggtttggctcggttcagccaaccagcaccagcctgtggtgcaccggacattgtccggtgcccaagctggcccagcggtgaactggctgctctcgggatttggcgggggcgacgtggatataaatcaccggacggtctggtggtgcaccgaaatgtccggtgagtcatcagcgccctcacccaagactccagcgacgaactcgtcgctcttgggaaatggaagaggagccgcggctaaaaatcaccagactgtctggtggtgcaccggactgtctggtgagccaaaggcgcccacggccaacggtcgtctgcgcgatcaatgggcgacacgtggctga

SEQ ID NO: 21013 - DNA, 234 bp, Zea mays
  Peptide Sequence Number=SeqID_62792
atggcttttactgaggcaaggctcccggtgatggacggactccctattacggttcactgcgatgtggtaatgctcctaggcaggtggcgcaggtacgaagacggcgaactccggcgaggacaccgcggcacgaatcgtagcaccgacgaggatcgcggcgcggggtcatcggcggcgagatacactgcatctaccgatctttgtcaggcactgtaccatcagaactcccattag

SEQ ID NO: 21014 - DNA, 255 bp, Zea mays
  Peptide Sequence Number=SeqID_62793
atggaggaggtttggctcggttcagccaaccagcaccagcctgtggcgcaccggacagtgtctggtgcccaggctggcccagcggcgaactggttgctcttgggatttggtgggggtgacgtggctataaatcaccgaatggtccgttggtgcaccggactgtccggtgagtcatcagcgcccgtgcccaagacttcggcgatgaactcgtcgctctcgggaataggaggaggcgccacagctaaaaatcactag

SEQ ID NO: 21015 - DNA, 1332 bp, Zea mays
  Peptide Sequence Number=SeqID_62794
atgagcaccgagtccggggagctgctcgggatcgaccccgtcgagctccggttcccattcgaattaaataagcagatctcctgcacgctgcagctgacgaacaagacagacaagcaggtcgcgttcaaggtgaagacgacaagcccgaaaaagtactgcgttcgcccaaacaacggcatggtggcgccccggtccaaggctgacgttgttgttacgatgcaagcgcagcgggacgtgccaccggacatgcaatgcaaggacaagttccttgtgcagagcgccactgtcgccaaggaggtcgtgccaaaggaggtcactggagacatgtttaccaaagattcaggcaatgtagtggaagaagtgaagttgaaggtagtttatgtagcaccatcgtcctctcaaagcgaaagatttgaggatggtaatctcggcagtttgagttatcaagaggaaacaaaggaacctaaagaatcagaaaaaataatcactgagatactttcctcatccctaaaccccactgttcctaccttcttcgtcctcgcggcgccgtcacgcacggtggctgctaacatctggtatcaaagaccaccgatcgccgagcctggagggtgttcctcactacactcgccgcacaaggatgggggagcaacagatcccattattgccacggcgctggaggaccaagcacgcgcgctcaagatgaaagcgaagacgctagactccacccagaagctcctccagcggatctgcgaacgattcgacgagcaaaatgttcgctggcgcgagcttgagcacacggtggcaaccagcgcctccgacctgtcggcgctgcaggccaaagtggatgcggccgatctggagcgcatcgtggaggaccacgtcggggcacatgtggaggcgttcgagcgcacggcctggcaccgtctcgacgatctcgcagcaacaaccacaacgcgggtggcggcactggaaaacgtccaccaggtgttcgacgcttggcgcccacgcatcgactcatccatggacgcgatgcgggcggagctagccaaggtctcccgcttcctcgagcgtggagcgcgcccagactacgacgtgcccaccggcgtccttggtccgcacgagtcggcagcggccgggccttcggctcccgcaaccttcgccgacagccaattcagcaaccgcatcgactcagctacacgggagggtggtctagggtttgtctatacccaaaaccatcccccggcaaatggacatcttcccaagctcaaccttccagtttttgacggggacagtcccaaattgtggcaatctacttgtgaagattatttctga

SEQ ID NO: 21016 - DNA, 234 bp, Zea mays
  Peptide Sequence Number=SeqID_62795
atggctcggctggctgatgatgggcggctgttgcgtttgagctctggtggtcaacgtgaacgtgctgccacggccgaggacctctgtgtaactgtgttcctgctgttgctgtgtgcgagtagagaccgcgcgctgctgcgatgcgagttgcgtgatgctggattgcaggggagtatgggggagggagtcgcacggaggaggataagcttgaagcttcgtgtccggccggggtga

SEQ ID NO: 21017 - DNA, 1851 bp, Zea mays
  Peptide Sequence Number=SeqID_62796
atgccgttcggcttgaggaatgcgggcgcgacgtaccagcggtgcatgaaccatgtgttcggcgaacacattggccggacggtcgaggcctacgtcgatgacatcatagtcaagacgaggaaagcctccgacctcctttccgaccttgaagtgacattccgatgtctcaaggcgaaaggcgtgaagctcaatcccgaaaagtgtgtcttcggggtacctcgaggcatgctcttagggttcatcgtctccgagcggggcatcaaagccaacccggagaagatcgcagccagcgtcagcatggggcccatcaaggacttgaaaggcgtgcagagggtcatgggatgtcttgcggctctgagccgcttcatctcacgcctcggcgaaagaggtctgcctctgtaccgcctcctaaggaaggccgagtgcttcacttggacccctgaggccgaagaagccctcaggaacttgaaggcgcttctcacgaatgtgcctatcttggtgcccccagctgccggagaagccctcttgatctacgtcgccgcgaccactcaggtggttagcgccgcaattgtggttgagaggcaagaagaggggcatgcattgcccgttcagaggccagtctacttcatcagcgaggtactgtccgaaaccaagatccgctacccacaagttcagaagctgctgtacgcggtgatcctgacgtggcggaagctgcgacactacttcgagtctcatccggtaactgtggtgtcatccttccccctaggggagatcatccagtgccgagaggcctcgggtagaatcgcaaagtgggcggtggaaatcatgggcgaagcaatctcgttcgcccctcggaaggccatcaagtcccaggtcttggcggacttcgtggctgaatgggtcgacacccagctaccaatagctccgatccaaccagagctctggaccatgttcttcgacgggtcgctgatgaagacaggagccggcgcaggcctactcttcatctcgcccctcgggaagcacctatgctacgtgctacgcctccatttcccggcgtccaacaatgtggctgagtacgaggctctggtcaacgggttgtggatcgccatcgagctaggggtccgacgcctcgacgctcacggtgactcgcagctcgtcatcaaccaagtcatgaagaactcccactgccgcgacccgaagatggaggcctactgcgatgaggttcggcgcctggaagacaagttctacgggctcgagctcaaccacatcgcccggcgctacaacgagactgcggacgagctggctaaaatagcctcggggcggacaacggttcccccggacgtcttctcccgagatctgcatcaaccctccgtcaagatcgacgacacgcccgagcctgaggccccctcggcccatcccgaggtaccctcggctcggcccgaggctctgcagacgatacccatcatctggtcttttgctgtgtggggtctggacctcgtcggccccttgcataaggcacccgggggctacacgcacctgttggtcgccatcgacaaattctccaagtggatcgaggtccgacccctaaacagcatcaggtccgagcaggcggtggcgttcttcaccaacatcatccatcgcttcggggtcccgaactccatcatcaccgacaacggcacccagttcaccggcaggaagttcctggacttctgcgagaatcaccacatccaggtggactgggccgccgtggctcatcccatgacgaatgggcaagtagagcgtgccaacggcatgattctgcaaggacttaagcctcagatctacaacgacctcaacaagttcggcaagtga

SEQ ID NO: 21018 - DNA, 657 bp, Zea mays
  Peptide Sequence Number=SeqID_62797
atgccttggcatgaggaggcagctttccctgctgttgacgtcaccgccgtcgatgcaagagaaggcagatccaaccctaggcggtggagccagagcaggggcgctcctcggcagatgaggtgccagcaggcaggatgtctggtcccttccccgccgaagcagcgccactaccaccctgctacccagcatggccaacgacgactggcgcggtggcgactgggaggaaactaccgtgaggcggaactcttcgtgcgggcacgggagcgaagagcggacgcggatagcgagcggatgctctatgatttggccacaggctatgcgataaaaaaaaaccttatacaattcagtaaaaacatattcgaattcggtaaaatcatatacattacgacgacaaatcttaatacaacatctcctgtccagccccttgacggcggaggccagttcgtggaccgcgtctactacgtggaggtgagagacatcgccacgctccgcgacatgacggctgtgaccaccacggtaagccattgcatactcgacataccctgtgtgatagtgcccaaagcagcgaccgtgatgtctcttcgaatcagtccacttacttcgatgctcctcaattccaaggacgaagagactggacaaagacaaaaggatgaatag

SEQ ID NO: 21019 - DNA, 387 bp, Zea mays
  Peptide Sequence Number=SeqID_62798
gaggccaagatcctcttcgtcggtctcgacaacgccggcaagaccacgctgctccacatgctcaaggacgagcattctggcgcctttctttctttgctcttgccgccacaggcaattgatgatttcttctcgtgccggccgggagacggcgcatgcgaccacgtaggactgcttccagaggtcgaactggaagtcgtcaagcttcttctcgtcgtggatgagcgacgccaatgcgagcgcctgctgctagtggtgtttgttcgaggtttccaagacgagtgccctagtggccagggtgtcacgctccacaagatcgtgacagccatagaaggtggtgtatcggttgctaaggcgcagcgtctttggaaggctgtagtcgggccgtga

SEQ ID NO: 21020 - DNA, 600 bp, Zea mays
  Peptide Sequence Number=SeqID_62799
atggaggaatcccacaccgtcgaggagttcttgcagccgcctttggctacattggcctcaacaggaaggatcatgtggtcatggacaagaagtacttcccttgcagaggtcgacagcctccaaggggactccactagggcgaggaaggtgctaaaatggaagcccaagataatgcgagattctaaaactggaaattctataggctttggctttgtgagctatgagtccttcaaattatctgatcaagtaataaaggccatgaacaaccaacatatttgcaaccatccaatcattgtttcttatgcttacaagaaagacacgaaaggtgacaccatggcacaccagcaggtgtcaaacttgataaggttcatgaggcaagaagaggttgttaaagcaatgaatctttttgaaggagcacaggagcacaacagggtgagcaagagatctctcaagaactgggtggaaatcatgggtgcttaccatcattggatatttcacctgtggtccaaaacccaacaatttacaaaggcatactgcatagtctttccttcactcacccatctatggaactgcctgcctgtgatgcaggagatcaagtag

SEQ ID NO: 21021 - DNA, 321 bp, Zea mays
  Peptide Sequence Number=SeqID_62800
atggcgacgtcaccgagatatgatcctcaagaacgtcaacctacagcacgcgatatggtgtcgatatatgtatcaatttcaatagaaaggttgcccaactctccacaccttggaatggctggctatgtgggtatttatagtgccctccccaaaatagagccattggagaaagcagacttttctgcattgcacctgaccggtttggtgcttccatgtcaggtcttctataagtctttaagagtcttctttgaggtgttgcattctgagagcctcggtctaatccactttgcatcccatgaactacaaaacataaacacttaa

SEQ ID NO: 21022 - DNA, 585 bp, Zea mays
  Peptide Sequence Number=SeqID_62801
atgtttctggtggattggttgtgcgacttgtttgtctccctgcggcggctgtggcagaaggaggccaagatcctcttcctcggcctcgacaacgccggcaagaccacgctgctccacatgctcaaggacgagaggttgagtcagcacgcgccgacgcagctcccgacgtcggaggagctgagcatcgggcggatcaagttcaaggcgttcgacctcggcggccaccggatcgcgcgccgtgtctggaaggactactacgccaaggttgacgcggtggtgtacatggtggacgctgccgacggcggccgttttgacgagtcgaagacggagctcggcgcgctgctgtcggacgacgctctggccggcgtgccgttcctcgtgctggggaacaagattgacattccgcaggcagcgcccgagcatgcgcttgcctactacctcgggctcaccggctgcaccaccggcaagggcaccgtggacctcgccggcaccggagtgcgccccgtcgaggtcttcatgtgcagcgtcgtccgtaaaatgggctatggcgaagggttcaagtggatgtcgcagtacatcaattaa

SEQ ID NO: 21023 - DNA, 321 bp, Zea mays
  Peptide Sequence Number=SeqID_62802
atgccgctcccatcgtcgctcgagctggacctgttccaccgcgcagcggacgcgggcacgggcaccgccgccgtacgcttccctttcggcaacatccccattacgcacccgtactatttcttcgggcaggctgcagccgccgtggaagcagggtgccgtgtgctcaagctggcgccggcggtcaccgtggcacagagcgactcggactgttcgttggtagtggacctatcgtcgtcgccaccagccactgtgtcggcgaggaagcccgccgtgttcgatctcgacctgaactgctcaccgctgacggaggcgggagcatag

SEQ ID NO: 21024 - DNA, 522 bp, Zea mays
  Peptide Sequence Number=SeqID_62803
atggcacttgatgatgttgtaaagaccacaattactggcccgaggataaaagaagctatgtatcgcaccattcgttggattgacaggtgcatagctgctcacaagaaacctgatgtccagaatttatttgggattgtgcaaggaggattggatcctgttcttaggcgagttcatctagcttattatatgtattacatttatccttttcccagatatgcaattggtggtcttgctggtggcgaagacaaggattcattttggcgtgttgttgcccaatgcactgctggattgcctgaaaataaaccacgatatgtcatgggtgttggctatccacttgatattgtagtatgcagtgctttaggtgcagatatgtatgactgtgtttatccaacacggactgctcgttttgggactgcacttgtgcctgagggtgtcctaaagttgaaacataattcaatggcgactgatgaacggccaattgatcatacgtgttcatgcatgattcgtgcgagggattcttga

SEQ ID NO: 21025 - DNA, 585 bp, Zea mays
  Peptide Sequence Number=SeqID_62804
atgagcgaggcgacacacaacgaggacgacacagggcggggctcgattgcgggctcgcttggagacgctgctgcgcctgcagtttgtggaggggttcgaggactcactcggcctcggccagggctccactcggttgtacgcgacggtggacctcggccgggcgcgcggtggttgctctgcgggggtagggcgcggatcaggcgctggctggaagcagggcacgcgcgggagaggcccagccgccagccatgggcagcaccggccaacgtgcctgcgagcgggcgtgtgggtcgtcgctgccgcggcactgcactgggcaggcgagcgtctaccgtagcgcaggggacgaccggcttcgaggacggcgaccgctgctgcagctctatagatctgagcgtcggtataggacgaagggaggatgagagagctgcgtacctggtaactgctgctcgcgagatccggatccagggaagaagttcctatctgtgtagagggaaggagtcgtatataaatagaggtggggtgtggcgaagcgaggaggaggttgcacgcacgagcgttgcgcgacgagatgaagcgaggtga

SEQ ID NO: 21026 - DNA, 228 bp, Zea mays
  Peptide Sequence Number=SeqID_62805
atgctccttagtgcacccgattccccctcccagcggatgggattcctcaccggagttaccccgatccgcctgaagctttccctccgccgttctctcgcacctggtctcggtctcatggccgacaacgagcagcccgtggttcctgagtgtgttgtcgaagaccttcctgagcaacaacctggtgaaggcaagtgtcctctaacctattatgtcctatttactttataa

SEQ ID NO: 21027 - DNA, 738 bp, Zea mays
  Peptide Sequence Number=SeqID_62806
atggatcttcttagggctgccattattgggcccaagggaacaccctaccatgatgggcttttcttctttgatgttcacattccctctgcttatccttctggccctccgttggtatattaccactctggaggacttcggattaatccaaatctatatgagaatggaagagtgtgtcttagcctgttgggtacctgggatggtagaggttgtgagaagtggaacccagcacaatcaacaatgctgcaagttcttgtctccattcaagctctcattttgaatgagaagccatattacaacgagccaggatatgagtccttcgccaccactccgaatggacagctgttggctttgaaatataatgacgatacctttctgtactcatgcaggactatgttatactcgcttcggaggcccccagagcactttgcagaccttgttgctggccactttcgggtgcatgggcacactattctcgcagcatgcaaacactacatggcgggtaatgatattggctcagtagtgccagaggaggaggaagagtcagcatcccgcagtgcaccaaaggcaaagccaggagtgatcaggacaatccctctgaacagacgctacgcaggctcatttgatactagcttgaaggtgctgtacgaagatcttctgatggaattcaatgtgaagggtgctgacacgaggaagttcatgattgagaagttgaagaaggaccaacctgcaggcacctga

SEQ ID NO: 21028 - DNA, 183 bp, Zea mays
  Peptide Sequence Number=SeqID_62807
atggtatcttcggacttggagcagaaccgcagtgtgggaagcacaaagaatacgaaggttgacacagagccgaagctatgcgtaagggaccttcggcatgatagcagaaaagggaaccgacttaaaagagaaaaggctatttggacctcggtggatcactatagagtcattaacaaatgttaa

SEQ ID NO: 21029 - DNA, 957 bp, Zea mays
  Peptide Sequence Number=SeqID_62808
atgagcgcaagaagtttagtaccatccgtaggggatgaagattatgatgaggacgaggtggcccaaattgagcacttcaactcccaagccacaataatactcctcgcctctttaagtagagaggagtacaacaagttgcaaggattaaagagcgccaaggaagtttgggacgtgctcaaaaccgcgcacgagggagatgagctaaccaagatcaccaagcgggagacgatcgagggggagctcggtcgcttccgccttcgcaaaggggaagagccacaagacatgtacaaccggctcaaaaccttggtgaaccaagtgcgcaacctcgggagcaaaaagtgggatgaccacgagatggttaaggttattcttagatcacttattttccttaaccctactcaagttcaattaatttgtggtaatcctagatatacactaatgactcccgaggaagtaatcgggaactttgtgagctttgagtacatgatcaagggctcaaagaaaatcaatgagctagatgatccctccacatccgaagctcaaccggtcgcatttaaggcgacggaggagaagaaggaggagtctacaccgagtagacaacccaatcacgccctcaaagctcgacaacgagggaaatggcgctcgtcatcaagagctttctgccaaattctcaagcaaaggagggggaaagattacaagccccgctccaagaaggttttgctacaagtgtgtgacaggggcgacgacaagaagggtagaagaaaggagaagaagaaatactacaagaagaagggtggcgacgcccatgtatgccgcgagtgggactcggacgagagctcctccgactcctcctccgacgaagacgccgccaacatcgccatcaacaaaggccttctcttccccaacgtcggccacaagtgcctcatggcaaaggacggcaaaaagaagaagaaatga

SEQ ID NO: 21030 - DNA, 288 bp, Zea mays
  Peptide Sequence Number=SeqID_62809
atggcggctctcagcccccttacggaagcaagaggacgtcagcaaggactcgacagccccgacagctgtccttccgccaggctccagcgctcctccgacggccatgacaccacgcgaactgggtgccaagacctctccggctgccacgatggcatctcggagacaactgatcaagccaaggacagaggcaagaagagcttcgaggtaccaagtgcatgggagaaggtcaagaaggctgaggaacccaaagccaagggtgaagaagaaggcttgaaaagtcaagggtga

SEQ ID NO: 21031 - DNA, 591 bp, Zea mays
  Peptide Sequence Number=SeqID_62810
atgcctctgtacagcttatatggtggtggtagtcacagtcacagccacctcgctgcagctggtgaccatgagatgccgccggcgccagcagcagcagcagcaggggccaataagtctcagctgagccagatgctcctcgcctcgtcgcctaggtcctgcgtcaccaccagcctcggcagcaacatgctcgacttctccaacaacggcgtgcccccggcgcccgatcagctgaagagccaccaccaccatcaatccgataactcatccgagtgcaacagcaccgtaacaggttcggccatcaagaagcctagggttcaggcctcctcttcagcacaatctactctaaaggtgaggaaggagagactgggtgacagaataactgccctacaccagatcgtttctccgtttggcaagactgacacggcgtccgtcctgcaagagaccattggctatatcagattcctactgggacaaattgaggctctcagctacccctacatgggccacggcaatgggacctccattcaaaatggaccaacaactggagaaaggaaccatgcagggctcctaccagatcaataccccggccag

SEQ ID NO: 21032 - DNA, 414 bp, Zea mays
  Peptide Sequence Number=SeqID_62811
atgccacacccttttccacctcctattgcgctcggctgcctcgccggcgacctcgccgcctcgagcacctgccaccgcgccgtggaccggctaccccaggcaccctccggccgaactgaacctacccccgagatcccctacccccgcccgtgcctcgccaccactcccccgtcgcaaaaccaggctcccggcggagaaccgccgcgggatttcaccagcggtcgaacctcggccggctccctccccccgtcaccgttccacgccatcagccccccttcctctggcatgtgggcccgcgccacggcattgtccccacgccatccccactggctttccaagtgggctgcctgcccacgcggccgcgcgctcgctcgcgctcggctgggccaaaaactcctcccccggcccagctag

SEQ ID NO: 21033 - DNA, 213 bp, Zea mays
  Peptide Sequence Number=SeqID_62812
atggcgaacgatgatcacgtggagggctcaaggccggccctgcgcctgaccgacgccctcggcgccaccggtgccggcgcctatggcttccgcatcgtccacaccttctccatcctgctccccccgcaccccgtctcccaggggcgaagccaggatccgaagacagagggggcaggcttagccttcaagcaaccaaaccaggacacaatataa

SEQ ID NO: 21034 - DNA, 645 bp, Zea mays
  Peptide Sequence Number=SeqID_62813
atggccactgaccgtctcctccaccttctccgagcgccgacaggctctccggctgccgccaccacccgcgcggctggttggggtcgtccacggacacagcgcgtcgacgtctggcaggttgctgcggggattcgccgcgcgtccgtgtcctgctcgagcactagctctggcgggcaggggggattaacatataaggatgccggcgtggacatagacgccggcgccgagctcgtgcgccgcatcgccaggatggcacccgggattggcggcttcggcggtctcttcccctacaatgacgattatcttgttgctagcaccgatggggtggggacaaagctgaagcttgctttcgaaactggtattcatgatacaatcggcattgacctggtggcaatgagcgtcaatgacattgtaactctaggtgcaaaaccattgttcttcctagattactatgcaacgagcaagcttgatgttgatcttgcagagaaggttatcaaggggattagggatgggtgcgaacaatcagattgtgctctcctaggaggggaggctggaaacattgatgacgcagagatgcggcgaacattcaatatgggcattggaatggttcttgtgttctgcaccactactcccgctagaaagtga

SEQ ID NO: 21035 - DNA, 1302 bp, Zea mays
  Peptide Sequence Number=SeqID_62814
atgcccggcataccgagggatgtcgccgagcactcgctagacatccgagccggagcccgacccgtcaagcagcctctgtgccgattcgacgaagaaaagcgcagggccataggcgaggagatccacaagctaatggcggcagggttcatcaaagaggtattccatcccgaatggcttgccaaccctgtgcttgtgagaaagaaaggagggaaatggcggatgtatgtagactacattggtctaaacaaagcatgtacgaaggttccctaccctctgcctcgcatcgatcaaatcgtggattccactgctgggtgcgaaaccctgtctttactcgatgcctactccgggtatcaccaaatcaggatgaaggagtccgaccagctcgcgacttctttcatcgcgcctttcggcatgtactgctatgtcaccatgctgttcggcttgaggaatgcgggcgcgacgtaccagcggtgcatgaaccatgtgttcggccaacacattggccggacggtcgaggcctacgtcgatgacatcgtagtcaagacgaggaaagcctccgacctcctttccgaccttgaagtgacattccgatgtctcaaggcgaaaggcgtgaagcttaatcccgaaaagtgtgtctttggggtaccccgaggcatgctcttggggttcatcgtctccgagcggggcatcgaagccaacccggagaagatcgcagccatcaccagcatggggcccatcaaggacttgaagggagtacagagggtcatgggatgtctcgcggccctgagccgcttcatctcacgcctcggcgaaagaggtctgcctctgtaccgcctcttaaggaaggccgagagcttcacttggacccctaaggccgaggaagccctcgggaacctgaaggcgctcctcacgaatgcgcctatcttggtgcccctagctgccagagaagccctcctgatctacgtcgctgcgaccactcaggtggttagcgccgcgattgtggtcgagaggcaagaagaggggcatgcattgcccgttcagaggccagtctgcttcgtcagcgaggtactgtctgagaccaagatccgctacccacaagttcagaagctgctgtacgcggtgatcctgacgcggcggaagctgcgacactacttcgagtctcatccgataactatggtgtcatccttccccctgggggagatcatccagtgccgagaggcctcgggtagaatcgcaaagtgggcggtggaaatcatgggtgaagcaatctcgttcgcccctcggaaggccatcaagtcctag

SEQ ID NO: 21036 - DNA, 204 bp, Zea mays
  Peptide Sequence Number=SeqID_62815
atgacggtcctggtgaagaggctcaagtggacctgcgcggtggtgtcgggggtctcaagctccctcggcgaggcagcggacgaggaagggtctacccagggcggggagcagcggatgcgacgccgaggcggagacggcagtgacgaagccaccaggggggccagggtgggcctgacaccccccaacgggtgtcggggaccataa

SEQ ID NO: 21037 - DNA, 1371 bp, Zea mays
  Peptide Sequence Number=SeqID_62816
atggggacggggtcgagcatcctgggcgcggatggagagtggggggagacgtccctcggcgacatgccggagagctgcgtggacggcggtactcctctacctcgaccccgccggagatctgccaggtggcccgtctcaacagcgccttccgcggcgccgcctcggcggactgcgtctgggccgccaaagcttcccgccaactaccgttaccttgcggccctagccgcggccgccgatgacgagggctgtggcgatggagatgccagcggcaagcgcttgaccaagaaggagatttacgctcgtctgtgccgatccactttctttgatgccggcagaaaggaattctggattctgaagaacaagggagccctttgcatgagtatatcatcaaaggcaatgactattaccgggatagatgatcggaggtactggagccacctcgctacagaggaatcaaggcagcaggggcggacgactagcagtggtgacgatgtcatagagcttggaggagatgaagccgtaaatccacgaaaggacgtggagatccatgtgaacccagtggggaacaacagggaatgtcgcatcacattggacgtggtcggcgagagcatacttgccgagagccaggaggagacggcgccacttggagaaggatgcgacaccggttgcatcagcatcgacgacgtctccaccgctggcagcagcattggtgatgtcgttgtcggcggcctcctggaggcggcggcgctatgcatcggccagggcgcgctcgtgtcgagcgacgtcatcctggagccgacgacgttcggcagtcgtggcggcagctgcgtcacgcttcgcttggagggcggcggctgcttcggcatcgcggcgtcgtgcagcatcggcttgttcccgctcaaggcgacgagcctcggcagcacggagctcagcggcatcggccttggctgcggcaccagcggcgtccatggcggagcaatggatggggagcttgagttctgctttcctgctggtgcctacagccttttttttcatcttcacctgggtcgaccctataggcgcatgggtcgttggctttgtggaactgagcatgttcatggttgggatgtcacgcccacacggttccagctcacgacctctgatgagcagcaggcgacatccgaatattatctgcatctacatgaacaagggggctggaagctttaccatgttggtgattttgtcatatcaaattccgatgagcccatgaaactcaagttctcaatgatgcagatcgattgcacacatatgaaaggcggcttgtgcgttgactccgtgtttatatatcctaaagggtacaagcctgagaaggcgaacatagtctgcacctag

SEQ ID NO: 21038 - DNA, 318 bp, Zea mays
  Peptide Sequence Number=SeqID_62817
atgggacatcgcccattaacctcaaatcttcctcttgatggatccccgatcaagatcgcacttattcacgacagtggacttgtgctcgcccatggtggtggacctgtgcttacccgtgtggcggccgaggttcccgtgcggtggtcagggccaggaccatgctcaggggatgatcgtgcctcgagatggctagagaaggaggggttgtcggagccaagcatggaagaggaagaagtaccaccctcactggttggagccgtcgcacgagatatgaaagtggacgtggtctcacaaacaaaaggagatcacagatcatag

SEQ ID NO: 21039 - DNA, 705 bp, Zea mays
  Peptide Sequence Number=SeqID_62818
atggatccactggatttgattgattctaggacgggcacatcgcaagttcttttaaatgctaaacctgttggttcgttctggtggaaagatattctcaaaatccaagacgtatttaaggaaattgcccaggtggagattggaaatggaaaatccactctcttgtggcgtgatcgttgggatggtctgcgcaaatctataaaattcccagagctttggtcttttgcctccatcaaagacatcaacattaatcaagcaaggctagcttcaccgaatgaaatgttccacactcccctctctgtcgaagcgtttgaacaactgctttcacttcaggacattttggcaaatcttcagttgcatgaccacaatgataaatggtgctgtaatgcctcttccaatttgttttcctcccagaaggtctattctcacttgatcggcaaccatcagtctcaccctctcttctcctggttatggagatctaaatgccaacctaaacacaagatagaagagatggttattcacttatttttcagatgtaaattttgctcggagatgttggttacttctggacatccacccgccgagaacaacagatcttctacataccttaatgaggattcaaaggagattgcacgtctcatggaggttggaaagtatcatcattatgacgtggtgcatttggaggagcagaaacaactggatttttaa

SEQ ID NO: 21040 - DNA, 645 bp, Zea mays
  Peptide Sequence Number=SeqID_62819
atgtttgccgagtgcttgaccctcggcacaacagtctttgccgagtgcttggcgatgccgagtgcccggcgctcgttaaacaatcgctttaccgagcgcaggactctgccgagggcggcactcggcaaagtcggctttgccgagtgcccgataaaaagcactcggcaaagccgccggcactcggcaaagggccggattccggtagtgtcaacttcatgtgcatcgattcactaccaccatgggtcgcgcgtccttttaaatctggtgtctttcgggccaggtgatgccctggctctcctagctagtctggttgacgagcaggtggcgcttgcgcctacagacccctcggattctgcttctatggctgatgttgcctcgtctccaacattgggtggaccagttgatgcgccagccctccctgatgctttggtcacagagctggtggcgcctgtgtctgcactcctcctggttgatgaccaggcttcctcaaagcatttacttggggattgttcggccttggagatttgtcccctcaggctatccgcaagcgtttcccctaaatttttccccctaaatgttactatgcagccacgtcagcaagaatccatcccctatattcaatcgtcccgcaactgttccccctaa

SEQ ID NO: 21041 - DNA, 1794 bp, Zea mays
  Peptide Sequence Number=SeqID_62820
atgcagacagtcgagtggaggccgggcgcggactccgtcaacttcagcccggctggttgtccgacaggcgactggcgtgtaccgacgacggtggcggtgttggccggtgacgaggatgatatcacgcttcccggctgcaggagccggtgcgggaacatgagcatcccgtacccgttcggcgtggaggccgggtgctacctccccggtttcaacgtcacctgcaggaggaggaacggcgatggcccagcggcggcggcggatgagctgctgttccttggcgacggcaccgtgcaggtgctggagatctccatccccaacgccacggtgctcatcaactccagcgctggctacttcgatggcgacaagtacgtttccttgtccagtccgggcacatggagcggcgcgctcgggagcggcgacggcgacggggtgggggtgtacagtctagcgtgggggaggaacaagctcttcgctatggggtacaacgtgcaggtccgcctggaggcggataacgaaacctccagcgtctgcgtctccttgttcttcgagggcaacttcgccgcgccgaccgacgactgcgccggcttcctctgctgccagtctcccatctgggatcagcgcacatcctacaggttcaaggccctctcgctgaatgggtcggcggcgagcctcgaatctgacacctatgcctggatattggattccgagttgcgcttccagtacggcgcgccgcaaaaggacgcgctgacactgccggcgttgctggactggaggatcaaccacacgacgtgccacgccaacgcttcttcgccggcgtgccgcagcaggcatagcttctgccatgacgggtccctggaagtgtgccgcagaaacgactccctttgccacaactcgactgctggctttggtagggcgcacatctgccgctggccgcctcacactgttccttcaattcagatgtcaacgaatgcgaccatccagacacctacccttgtcatggcatctgcaccaacactgacggaggatacaagtgcgaatgcgttcctggcttcgcgggcaatgcttctgtaccaactggatgcaaaggcgctccacagtccagctcttggccttgatgtcgaacacctagagggcatgtcggccgccatcgccatcgagtgcgctggtgagcaccaccttctccctggcaccgacgtcgacgatgcgccggtcttgaggcccgacaggtgtgtccccaatctcgtgccaaccatagtgagtgcacatccactctatgacggcgttgcccttgattcaccatacacggccgtagacgatgatgtgtgtggcgcgtgcacactcgagcttgcgccacgcccgcaatgcagcaagaagcatcaggcgtgcacgccactagtagatggcgcccaagtgaaggagtcgaccctcgcgcgcatgcatcccgagatccgttgcaccaaccgctcccacctcgccgtcatgcacgccttaggggtgtcgttgttgctctcgtgccccctgggatccgtcgccgcggccgctgccacattgtcgtcgtgcgcaactcatggggccgccgccgcgtgcgtgccctcgggatccgatgccgcagccgctcccacctcgctgccgcgcgcgcctcagggggacaatcaccgcgcgctggcctcaagaatccgccgccacgagcgtgtcccccagatccaccgtcgcgagcgtgtcccccagatccgccatcgcgcgcttgctcccaggatccgccgccgcgcgcgcctctcaagggtgggggcgtaa

SEQ ID NO: 21042 - DNA, 1113 bp, Zea mays
  Peptide Sequence Number=SeqID_62821
atggctaccaccgtttgggaaatggggttagcaattggtggtggaacaggatttttgcttttggcacttggggcacccatcatatcacacatcagtgaaaggatgatcattaccattggggagctagagaaggctacaaacaacttccatccgtctcatgaagtcggtggtggagggcatggtgttgtgtataaaggacttttagacctacaagttgttgccatcaagaaatcaaaaattatagtaaaaagagaaattgatgatttcataaatgaggttgcaattctttcacagatcaaccataggaatattgtcaaactccttggttgttgtcttgaggcagaagttccactattggtgtatgagtttatatcaaatggcactctttcgcaccatctccatgttgaaggaacaatttcactctcatgggatgaccgactaaggattgccctcgaaatttccaaagctttggcttatctacattcatcagctacaacaccaatacttcacagagacatcaagtcatctaatatacttcttgatgataatttaactgcaaaggtatcagactttggtgcttcaaagtacatcccaattgatcggactggagtgactactgatgtgcaaggaacctttggctacttagatccaatgtattattatacatcccgactaactgacaagagcgatgtttttagttttggtgttcttcttatagagttgcttaccagaaagaaaccatatgcctacagatccgatgatggtgatggtctcgtttcagaattttcatcattgctagatcaagggaccttggttgacattatagatcctcaaatcatggaggaggataaacaagtcgatgaagttgccaaactagcagcaaagtgtacaaaattgagtggagaagatcggccgacaatgagggaagttgagatggcacttcaaaacttaagagccacagagaagcatgctcataataatacaacatcaacgaataaatatgaaaaaggtaaaacctctcagtacatgccatttggggggctcgccatagaaacaagtagacaatatactatggaagaggaaatgttgttgtcagcaaggtatccacgatga

SEQ ID NO: 21043 - DNA, 243 bp, Zea mays
  Peptide Sequence Number=SeqID_62822
atggaaggtggctcgtggagggatggcccaatggcggtgttcgctttggcgttcaacgcggaaaaattagtgaagacaaccgatcaagccaaggatggaggcaagaagagtttcgagataccgagtgcacgggagaaggtcaaggagaccaggaacccaaagccaggggtgaagaagaagacttgcaaagtcaaggttgatcgagttaagaagagttatggtgcatcaagaatcactacataa

SEQ ID NO: 21044 - DNA, 330 bp, Zea mays
  Peptide Sequence Number=SeqID_62823
atggcggtgctagaggacgagtgggagaagttgccgccatggaagaagagagtgaccgggaacgggtccgaggatgacgcgccggcgagggggttgagagcaaccgatgtcatgggcgcacgcggagaaccatcattacctgttaccgggagacttctcctgaggccgaagctaaggttgggcgcggttgtgactcctcccgaggccgagcctggggccaaggcccagggtcgggcgaggcggagatcttcttctgaggccggggtcgaggccgaggcccagggtcgggcgaggcggagaccttctcccgaggccgaggctgaggcctga

SEQ ID NO: 21045 - DNA, 2043 bp, Zea mays
  Peptide Sequence Number=SeqID_62824
atgtcgacgacatatacaaccaagagcaatggcaccacctctgatgacaacaagtggccgaaagatcatgtgaagaagtcggccagtgttgacaggccgccgcttgtccggaccacaaaactttctacaattaccatcaagctatacaggctcatgataattctccggatgggcatcttcgtgctgttcttcaagtggcgaatcggcactgcgcttgtcatgattagctccacaggcaccgacgacaaaagcacagttcttgggatgtggatggtgtccatggctggggagctctggtttgccctgatgtgggtgctcgaccaggtgcccaagatgcagcctgtccgccgcgtcgtctacctcgctgcgctcgacgagccgatgcttccggccatggatgtattcgtgaccacagttgacaccgagaaggagccaccactggtgaccgtgaacaccatcctctccatcctcgcggcggactaccccgcagagaagctcacgtgctacgtctcggacgacggtggcgctctgctcacgcgcgacgcggtcgccgaggctgcccggttctctgcactgtgggtgccgttctgccggaagcacgcggtggagccgaggaacccagaggcctacttcagccccggcgccagtaatggcttcaaggcgtggagggctgactataagggaacggcgtggccggagctggcaagggaccggaggcgcgtgcgccgggagtacgaagaactgcggctgcggatcgacgctctgcaagccggaggacgtgcggcggtagacgccgtcgctgccgatagaagctgctggcggcgaggcgccgcggaagatcatgccggagctgttgaattgctagtcgataatcccggtcccggcagcacgccacggcttggcgtcagcggcaccgtagacggtgtcagcaatcttctggacctaagctccgtcgacgtgcgggttccagcgctggtgtacatgtgccgggagaagcgtcgcggtcgcgtgaaccacggcaaggctggtgccctgaacgcgctgctccgtgcctcggccgtcctctccaacgcacccttcatcctcaaccttgactgcgaccactacgtgaacaactcgcaggctctccgcgccggcgtctgccacatgctcgacggcgagggcggcaacggcaacgacgtggcgttcgtccagttcccgcagcgcttcgacggcgtcgaccccgcggaccgctacgcgaaccacaaccgcgtcttcttcgactgcactgaactcggcctcgacggccttcagggacccatctatgtgggcaccggctgcgtgtttcgccggtcggcactatacggcgtcgacccgccgctctggagaccccagggcgacgacgctggcaagggcgctgccaatggcattgagaccgggaagttgggcgtgtcgacgccgttccttcgctcggtatatgcggtcctgacgaaccaatcggaccaatgggacacggtcagtatttcatcaccgccgtgctcgttcgacgcggccgccattggcgaggcaaccgcgctcgtctcgtgcggctacgaggaccggacggcgtggggccgggacatcggctggatctacggcaccgtgacagaggacgtggccacgggcttctgcatgcaccggcgagggtggcgctcctcttactgtgccaccgcgccggacgcgttccgcggcaccgcgcctatcaacctcacagaccggctgtaccaggtgctacgctgggcggcgggctccctcgagatattcttctcccgcaacaacgccctcctcgccggccgccgcctccacccgctgcagcgcctggcgtacctcaacaccacggtgtacccgttcacctccatctttctcatagcctactgcggcctcttcccggcgatcccgctcgtgaccgggaacggcgccaccaccggggccttcttctcaataatcatcaggccgccgtctgccacgtacatcgcctttgtggcggctctgatgctgacgctcgccgtggtggccgtcctggag

SEQ ID NO: 21046 - DNA, 180 bp, Zea mays
  Peptide Sequence Number=SeqID_62825
atggtgctggaggagccttcgtgtgcggaggaccgcctccgagctcttgacgctgagcacttcggacagtctacgaccattgacctcgtgtgcgggcatcttagggttccacggtcaggggaattgtccgcccagatctcccggatgacgctcatcgtcggatgcatttgtgaactggag

SEQ ID NO: 21047 - DNA, 303 bp, Zea mays
  Peptide Sequence Number=SeqID_62826
atgcccacccacgcgcccagctcccttcttagaggcccgccagtgccctgcgcacgccccttgcctcatttcacacatcttcaccctatctcgtgctctgctcacgccgccagccgtcgccggagacccgcgcccgcgttcccggccatccagctcgccggagactgctccaagcctcaccgagctccgccccgaggtgagacactcgtccccgtgcccaatttcccatattgcgccctatgttcggccaatttcgccttcgccggtgctcggccgtggaagtccaccgtgctcgcgcagtga

SEQ ID NO: 21048 - DNA, 161 bp, Zea mays
  Peptide Sequence Number=SeqID_62827
atgatgatgatgatgatcctcatctcaagcgtaatgccggaactgccatcaaggaaaccgcttcacttttctcatcccctcattgtcttatggtaaagggagatggcaaggatctttggcgacgaagcatgcccccaacagtagccccttcgcggtgctag

SEQ ID NO: 21049 - DNA, 465 bp, Zea mays
  Peptide Sequence Number=SeqID_62828
atgggcaagagaaagaaaggcggaagttcgtcgcaccattccggcgataagcggaagcgcgagccgagccctccctcggaggacttcgacgattccgagtactcggaggaggagttttcctccgagtccgaggggtcgccgtccaccgacgagattgcgatggcgcccaagcggaagaaccagaattctgctgctgcgccacagccgccaccctacgtgtgggcgcgcgagcagaggcgctcgcccgcgccgttcgcccagccgctgggcccgcctgtcagtggcgcccagcccactgttcttcttcctcacaggaacaaccgcccctttggcgtccacgtcgtgcacccgcggagctgcaaacccctcgccaacttccctccctcatgcctcctctcacagggccatcacctcgcgcctcccttccgcgccctcctcttgccattggcgccttgccgcgcttag

SEQ ID NO: 21050 - DNA, 408 bp, Zea mays
  Peptide Sequence Number=SeqID_62829
atggcctcgggagaaacatccacctcacccgagcatggcctcgacctaaataacatcgacaaaaggacgcctgacgccaccaacccttccataaagataactgacaacgggatggctataggaactactgggctggtgtcgagtctactttacgccatacgggacgaattaccatgtgcttttcacctgatcattgtttcaacaactatggctccgacaacacatccacaagataggctcgggtacacgtccgagaccccgatcctggcattaactctctacttggtcaagatgcgggatataggggtcgaacgtccttccctgatcagagacaagcacaaggacagaagccattctgatggccatgctgctataggggctcgggctcaccacctctcctcattatga

SEQ ID NO: 21051 - DNA, 204 bp, Zea mays
  Peptide Sequence Number=SeqID_62830
atggccgtcaatctgaacgatcgtacggggagaaaggatataaatttggacgggcatgattgggccgtgtggcatgtcaacgctatcgtctgcgctcaggtgtatgggttttggaaggccaccggagcagcgacgggttcacggacgcgcggaccacgtgaggcgagcggtgggtggcccactggccctggcctgctgaaatag

SEQ ID NO: 21052 - DNA, 354 bp, Zea mays
  Peptide Sequence Number=SeqID_62831
atgaagaattgcatagagaagatgagtgggtggtgtcaagcagtggagcttgaagctttggtaattgaaggatggaggctcaagcaacctagccgtcacggactcacgctacgcgttcgtccgacatccctaggcttcacccgctggccggagaaaataccagaaaataatagatatggaaagtgccaggtcaaattcggcagttcaagtttcgagcaggaggtcaaagaatatgtcagggcttaccggtttcctaatggctgtgggccggtccccgcgtgcgacatgacgaggcatcagccagcaccgaatataaaagagagcgtgcccgtgcagggagagagatccgaatag

SEQ ID NO: 21053 - DNA, 933 bp, Zea mays
  Peptide Sequence Number=SeqID_62832
atgtgccacatgtccgcctgcgccctgctctcctacgccgccatcgcctggctgcgcgtcgtgcccatgcagctcgtgcgctcccgcgtccagctcgccaagatcgccgcgctcagcctcgtcttctgcggctccgtcgtctccggcaacgtctcgctgcgctacctccccgtctccttcaaccaggcggtcggcgccaccacgcctttcttcaccgccgtcttcgcctacatcatgaccgtcaagcgcgagtcctgggtcacctacctcaccctcgtgcccgtcgtcaccggagtcatcatcgccagcggcgtgagttattctgccgcttctgtctcatgctttctcagtagatctgttggagtcgggattggatctgagtcagggaggagtgggatggagctgacgaaacaacaggtggatctgtcatcgaccgcctctgtctcgggcgagcctagctttcatctgtttggattcatcatgtgcataggagcaactgcagcaagggcgttgaagacagtattgcaaggaattcttctgtcttccgatggggagaagcttaattctatgaatctgttgttgtacatggctccaatcgctgttatcttcttgcttcctgcaactatctttatggaggataatgttgtcggcgttacaattgagcttgcaaagaaggatttcacgattgtttggttgcttttgttcaattcttgcttgtcgtattttgtcaatttgaccaatttcttggtgaccaagcatactagtgcactgactctacaggttctcggaaatgcaaagggtgcggtggcagttgtcgtctcgattatgatattcaggaatcccgtgtccataacaggaatgctcggttatactctcacagtttttggcgtcattctttacagtgaatcgaaaaagcgcagcaacaagccatga

SEQ ID NO: 21054 - DNA, 198 bp, Zea mays
  Peptide Sequence Number=SeqID_62833
atggggtacccgaaacctgaatacccgatgggttttacccgatataaaggcgggtacgggatgatttctctacccacaggtaaaaagaaggcttccactccaagttcctcaagtgaagaagaggaagaagaagaaagtgatgatgaagaacataatcaaccatcaacatcatcctccaaggacaaagaaacaatctga

SEQ ID NO: 21055 - DNA, 639 bp, Zea mays
  Peptide Sequence Number=SeqID_62834
atgacgatgatggcgccgcatccgcagccactgccgctgccacagccgccggcgccgttcggggacaccacgctcaccaaggtgttcgtgggcgggctggcgtgggagacccacaaggacgccctccgcgagcacttcgagcgctacggcgacatcctcgaggccgtcatcatctccgacaagctcaccggccgctccaagggctacggcttcgtgacgttcaaggaggcggacgcggccaagaaggcgtgcgaggacgccacccccgtcatcaacggccgccgcgccaactgcaacctcgccgccctcggcgccaagccgcgccccccgccacacatcctccgcccttcgccgccggccaccccggcgccgcacgcgcccgcgctcccctcgcaacaccagcccacgccagccatcgccgtggggtccaggggcgtgtcgccggtgccgtggtactaccacccctccacgacgccgccgccaccggccgcgcaccactacgcccacggcgcgcaccagcagtaccacggcgtgctcccgttctaccccgccgccgccgccacctacgggtacgtacacgcacgccgctcccagctccgaattccaatcccccgcccgcgacaaggtacgtttcgctag

SEQ ID NO: 21056 - DNA, 465 bp, Zea mays
  Peptide Sequence Number=SeqID_62835
atgatgcaaatctcccccgtccccatcttcgctgcatttcagtcaaaacaacatcgccgaggaagtatttcgtccggccgaaacgcgagcatcgtccagccatgggattcttgcacaataacgattaccctgcaggcacagaaagattacccaccagacatgcaatgcaaggataaattcttgattcagagcacgaaggtggccaccggtaccgagatggatgagatccccctgatacgccacacgctatacacggttacattacatgtgcgcagttcaacaaggaaggctgataaggtaatcgaggaaatgaagctcaaggttgtctacacattacctagctacggaggttcaaatgactctagcgtatcatttttaggaagccggagcttcaaagcagcgtctgacgatctgatgatgctgaagaatgcaagccttgaagagcatttccccaagaatatctga

SEQ ID NO: 21057 - DNA, 1053 bp, Zea mays
  Peptide Sequence Number=SeqID_62836
atggacgggtctccgccggtcgccgaattccagccgacggtgacgcacggcggccggttcctccggtacaatatcttcggcaacctgttcgagatcacgcgcaagtaccagcctcccgtcatgcccatcggccgcggcgcctacgggatcgtctgctcggtgatgaacttcgagacgagggagatggtggccatcaagaagatcgccaacgccttcgacaaccacatggacgccaagcgcacgctccgggagatcaagctgatgcggcacctcgaccacgagaacatcatcggcatcagggacgtgatcccgccgccgatcccgcgggctttcaacgacgtgtacatcggcatggagttcatggagacggacctccaccagatcatccgctccgggcaggagctgtcggaggagcactgccagtacttcctgtaccagatcctgcgcgggctcaacgccaactgcgacctcaagatctgcgacttcgggctggcgcgcccgtcctccgacagcgacatgatgacggagtacgtggtgacgcggtggtaccgcgcgcccgagctgctgctcaactccaccgactactcggcggccatcgacgtctggtccgtcggctgcatcttcatggagctcatcgaccgccgcccgctcttccccggccgcgaccacatgcaccagatgcgcctcataaccgaggtgattggaacgccgacggacgacgagctcggcttcacccggaacgaggacgcgcggaagtacatgcgccacctcccgcaattcccgcgccggccgttcgcgagcctgttcccccgggtgcagcccctcgcgctggacctcatcgagcgcatgctcaccttcaacccgctgcagaggatcacagttgcggaggcgctggcgcacccgtatctggagcggctacacgacgtcgacgacgagcccgtctgcacggagccgttctcgttcgacttcgagcggcaggctctgacagaagaccagatgaagcagctgatattcaacgaggccatcgagctgaaccccagtttccgatattag

SEQ ID NO: 21058 - DNA, 363 bp, Zea mays
  Peptide Sequence Number=SeqID_62837
atgggtgcggtgcgggtgcggactacggaggatagggacgctgtgctgcgacagtgggccatcgtgtcagggtctcggcgcaccggcgagcgggttggcaattggccgatagccttcgaggcgagtaggcgacgacgacgacgacgacgcgttgttttgctggcgctggcgctggcgccggattggacggcgacggggacggggagaggtggccggtctgctgcggcgtttgtgaccgttgggccagggctgatgacgatacgatttgcgtgcgtgcgtgaccggccgcgcctggcgcggtggtttttgaccgcccacgtcgtcgtcctcagtggcgacgtgtggaaatggaatgacgactag

SEQ ID NO: 21059 - DNA, 204 bp, Zea mays
  Peptide Sequence Number=SeqID_62838
atggggggatgggagcgagataacgtgctggcagtaggagtgcctctagccaacggggaccaaggtgttgaggtaggggtccctggaggcgaaaggaaaggcggagacggcgtcgccgaaggcaggggcaccgtagggtggcgtcgtcagggccggcgaccaccatcagtgactcagatccaggggactgacgaggagctctaa

SEQ ID NO: 21060 - DNA, 192 bp, Zea mays
  Peptide Sequence Number=SeqID_62839
atgacgctgacagcgccccagactcagcggctcaactggatagacttcctagagcggttgcacggcaagcggatgctgctcatggacaactcgatgaactggaaccagttcgagtccatgctctatgcgaggctttatggaacaaggccagatgttcgagacgcactagcattgtcaggtaatatattgtag

SEQ ID NO: 21061 - DNA, 672 bp, Zea mays
  Peptide Sequence Number=SeqID_62840
atgagtgcctcaattgttggggatattggttcagttggtatctggatgaatgagaaggagataaaattaggattactgaagatcgctgccatcaaagcccctggttttggagagcgcaagactcagtacttggatgatattgccatccttactggagcaactgtaatcagagatgaagttgggctgtcacttgacaaggccgacaaatcagttcttggaacagctgcaaaggttgtccttacgaaagagtcgacaacaattgttggtgatggcagcacccaggaagaagttactaagagggttgcacagattaaaaatctcattgaggctgcagaacaagaatacgaaaaggaaaagctcaatgagaggatagtgaagcttgctggtggtgttgctgtcattcagctggtgctcggcgacgcgatgggcggtggtcaagcctcagtcgagcagtgctcaggcctcaggaggccagtgggcggctcttcgaccttaagcgcacggtgggagcagcattttcagaagctggtgctcggcggcgcgatgggcggtggtcaagcctcagtcgagcagtgctcaggcctcaggaggccagtgggcggctcttcggccttaagcgcacggtgggagcagcattttcagaagtgtgcgagcctacctgtcagaaattag

SEQ ID NO: 21062 - DNA, 393 bp, Zea mays
  Peptide Sequence Number=SeqID_62841
atgaccgccgccagcgcaggccacaccgccacccatcccacggcgcgcgtcttcatcccgcgcgcgtcgctcgcgccgcgcgcaatcccgcccgcgcgccgtgatgcccgccccaccaccccgcccaccatcccggcgaggagaacatcccgcgcgcggcgcccgcgccaggcaccctgccccaccaccccgcccgcgcgagcccccccgcccgccatccccggccaccccgccctggcccgccatccccggcgaggacagcatcccgcgtgcgtcgcccgcgccaggcaccccgcctcccacccccctcccccgacgcgccgtgatgaccgccgtgggggtaggatgctctcgcatgaacttgtgaacaacattcttggagtgactgagtaa

SEQ ID NO: 21063 - DNA, 2271 bp, Zea mays
  Peptide Sequence Number=SeqID_62842
atgaaggtatgtcaaacagtcggtgtttcaggaggtacaaatcgtaagggagataaggacaaaaggaaaaaggggttcaatggtgttcagaaccggggaatcccaggaccgaagaataaaggtcgatgcgctccccagggaagaggggttggcgagagaggagttgcgcaggcagttgggggagcaagcgtttttatgggagatagtcccgtgtgtccaccctgtgttgttgcttgtacggttgaaatttgtggtggttggtggtggcgatacgccattgataaggcaattaaggttctcgtttttgttgctaaattgttgatcgatgcggtggttggcaggaagctggctgagaaagggtacaaccggagcgccaagaagtgcaaggagaagttcgagaacgtgcacaagtactacaagcgcacaaaggagagccgcgccggccggaacgacggcaagacgtaccgattcttcacgcagctggaggccctgcacggcaccggagcggctcccgcgtcggtggcgtcgcaggtgggcccggcaatctccggcggggtgtccggggcagcccggccgtcgtcggccgtgcgcgtgcctgccgagccgctgcctgcggtgtcggccggcgtgggaatgccgatgacgacgacggtgggctacccgagcatctcgacgtccaacacggaggacgactacacggacgaggacgactccgacgacgagggcacggaggagctggtgggcggcggcgcggacgatcagcgcaggaagaggaagagggtgtcggacggcagcgggaagatgatgaggttcttcgagggcctgatgaagcatgtgatggaccgtcaggaggcgatgcagcagaggttcttggaggccatcgagaagcgtgagcaggaccgcatgatccgcgaggaggcgtggcggcggcaggagatgactcgcctagcgcgcgagcaggagatcctggcgcaggagcgctctatggcagcctcacgcgacgctgccgtcctctccttcatacagaagatcaccgggcagaccatcccgatgccatccattgccgcgcccaccatcaacgccatgccaccgccgtcgcatccgaagccgccgccgccccctcagccgcaccccacacccattgcctccgtgtcgccagccccgccgccaccgcaaccaccagcttcgcagactccgcccccgcagcagcagaagtcgccaatgccggcgacgccacaaacgccagcaccgcaacggcaaagcacagacattgttatgacaccggccgagacgacgccgcacgccgacacccaggggcacgaggggtccggtggcggcgcgacgtcgtcccggtggccgaaggctgaggttcacgcgctgatacagctgcggagcacccttgacacgcggtaccaggagaccgggcccaaagggcccctctgggaggagatctccgccggcatgcggggcatgggttacaaccggaacgcgaagcggtgcaaggagaagtgggagaacatcaacaagtacttcaagaaggtgaaggagagcaacaagaagcgtcccgaggactccaagacgtgcccctacttccaccagctcgacgcactctaccgcaacaaggcggcgatcacctcatcctccggcgccggagccatggtgcacgctaacgcatcgtcggcaccgcaggagatggtcacggtcacggccgcgacgcccatctcacagacgccgccgcctccaacacagccttcccagtcccatcacgcggcgaagaacggcggcagcagcaactccgctggcacaggcactgggaacggcagctacgcatcagagcacggctccaggggcatgcaaacgcaggcgagcaacggcagcgctgcagccagcatgttcgtcggcctcggcggcggcgcggcctcggcagcgaagaagccagaggaaatcatgaaggagatgatagagcagaggcagccgcagcagccgcaggcggtggtaggcggctacaacagaatggacggcgcgggcagcaacaatatggacgacgacgacgacgacgatgaagacgactacgatgagaacgataacgacgaagatgacgccggcaacaaaatgcagtacgagatccagttccagcaccaccatcagcatccgaacgttgtcaggtcgaacgccggcgccggtggtggcaacccgcccggcaccaccgcgcccagcacggctgcggccccgacaacaacagccggatctttcttgggcatggtccagtga

SEQ ID NO: 21064 - DNA, 632 bp, Zea mays
  Peptide Sequence Number=SeqID_62843
agacacttgtacattcaactcttgaacactgtgaggatgctgatttcacatttccagttcattttaacttcagagagcacacaatatatgttcgatgccgcccctatctcaaggaattcttggatagggttgccagcgtgtttgagacaattattttcactgctagtcaaagcatttatgcggagcaacttctcaatgttcttgatcccaaaagaaagttgttccgtcatcgtgtttatcgtgaatcttgtgtctatgtggagggaaactacatgaaggatctgacagtacttggacgtgacttaactcgcgtaatgattgttgacaattctccgcagttggaacacgctatgaataaagatgtattggtgtggaattcctgcatgtcgtggttcatggatttaaatgtaaagccgctttcctcgttgcaggcctttgggttccagttggacaatggcattcctatagaaagctggtttgatgatcccaatgacatggagctgctgaaattgctcccgttcttagaaagcttggtcggcgttgaagatgtcaggccttatatagcaaggaagttcaacctaagggagaaggtagccaccgcatcttctcttacaatagacatgcagatgtga

SEQ ID NO: 21065 - DNA, 1416 bp, Zea mays
  Peptide Sequence Number=SeqID_62844
atgtacctgcgtctgggccagatcgacgccgtcgtgatctcctcgcccgcggcggcacaggaggtgctccgggacaaggacgtcgccttcgcgtcgcggccgaacctgctcgtggcggacatcatcctctacggaagcatggacatgtcgttcgcgccgtacggcgcttactggaggatgctgcgcaagctctgcatgtccgagctgctcagcacacacaaggtgcggcagctcttggccgtccgtgacagcgagaccatttcgttggtcaggaaggtccgggctgccggcggccagagcggagagccggtcaatctgggcaggctggttttgtcctgctcgatggcgatcaccggcagggcgacgtttgggcagctgtgcggcgacgagctcatgtcggtcgtcgacgtggcggtgctgtacggtggcgggttctgcgccggggacctcttcccgtccctgtcgttcgtggacgtcgtcactgggttgacacgacggctgtggcgagcgcgccggcacctcgacggcatatttgacaagatcatcgccgagtgtgaggcacggcagcgacaggcgaagacgacgaccgggacaacgaacggagatggcgacggccttctcagcgtcttgcttaggatccgagacgagggggagaccggcatcagcatgactagtatcaaagcaatcttatttgtaagtgcggtgaaatatatatatggtgctgctgaatcttgtctttctagttcaaaaagtcaattcttgctcatcgatcatcaggacatgctcgccggcgggacggagaccacgtcgtcggccgcggagtggatcatgtcggagctgatgaggaacccggaggcaatggccaaggcgcaagccgaggtccgccgagtgctcgacggcaagagcccgcaagaccacgaagggcaaatggacaagctcagctacacgaggatggtggtgaaggagggcctgaggctgcacccggtgttccctctccttcttcctcgtctctgccgggagacgtgcgacgtcggcggcttcgaggtggcccagggcaccaaggtcatcgtcaacgcgtgggcgttggcgaggagccccgagcattggaagcatccggaggagttctggccggagagattcgccgacgacactagcgtcgccgcggcggcggactacgtagggtctcagtttgagtatatcccgttcgggagcggcaggaggatgtgccctggaaacacctttggcctcgccgcgctggagctcatggttgcgcggctgctctactacttcgactggagcctcccggatggaatgcggcctgacgagctggacatggacaccgtcgttggttcgaccatgcggagaagaaaccacctgcatctggttgcgtcaccgtgcaaggagatcgagagctga

SEQ ID NO: 21066 - DNA, 378 bp, Zea mays
  Peptide Sequence Number=SeqID_62845
atggtcaagagcaagaaaggagggagttcatcgcaccactccggtgacaagcagaagtgcgagccgagtcccccctccgaagacttcggtgactccgagtactcggaggaggagttctcctccgagtccgaagggtcaccagcctacgcctctcccccggtatcgtctgatgactcagacgattcccaggggatcgccgccgaggtgtggacgtacatccgggccgtcgagcgccccgggctcgagggctcggatgagttggagatctcctcgaacgaggaggactcctccgactcgtccgaggaggggagcggtggcgacggcggcaagggcgacggcggcagcggcagggccagcggcaaagcacctctagcttaa

SEQ ID NO: 21067 - DNA, 609 bp, Zea mays
  Peptide Sequence Number=SeqID_62846
atgggctgcttggtggtttgggtcacctgctggctgagttttttcgtgaaagttggtctttttataaaacgacaaaaaccgccctcggcgttgattgctggaggtaaaatccctgaaccccagcttctgtgccgcctgatcgctggtcttgcttccaatctggagaagcctgaccatgactctgccatcaagaggtgtgtttcctttactctaaaggcaatcagggtggccgtcatcaagaaccgcatgaacatggattcctcagctcgtggtgaggctctccatgccatctggtgttgttttatggatcaaggccttcgccgtattcagcgtgattcaaatatggtgaggctgtggacagtccaggatcaattgtctgcagtcaaaatcatatgtactttcttccgtctctcaccggattttcatttgccattgcaagagcctattgccatatgcttgcaacagtgtcaccacaatcaccacttgaggctgaagcaagtaagtacgaccatggtccaccacccagggtttagtgaccttgctgtggatgtcctagcagctttgcccaattgcaatcttgctgttcgaaagaatcttctgaacctgatg

SEQ ID NO: 21068 - DNA, 144 bp, Zea mays
  Peptide Sequence Number=SeqID_62847
atgggtgttctaaggcgacgtgaagggctcagggaggtcggggacagtgtggcgagcacgagcgtgggcatggcaccggtgcaaaggcatcgaagggtagccgtccatggcggggtggcttggcggcaacgcgacctcactcag

SEQ ID NO: 21069 - DNA, 243 bp, Zea mays
  Peptide Sequence Number=SeqID_62848
atggcgagtggtcacccggtcacagtgtacagggatgagtcggtgccaaacttcactggtgaacgagtaatagcgaggagacagggcggacggtggccggcgacgattgcgccgacgccgttcacgggtgaggacgaaagggctgacagggtggcccgtttgcctgaggaagagcgggcgcgagagagcggggtaggtgcggctgacgagcggggccaggcggtcagcgggggaggggggaaa

SEQ ID NO: 21070 - DNA, 1668 bp, Zea mays
  Peptide Sequence Number=SeqID_62849
atagtcaaggaatgggtgaagcagttgactcgtaagaaaggatatgctgagcaattggttgaacaagcaaatgcaatcctttttacttttgggtcttacagattgggggttcatggacctggagctgatattgataccctttgtgttggaccttcatatgtgaaccgagaggaggatttctttgtcacactgcatggcatattagctgagaaggaagaagttgctgagttgcaacctgtacctgatgctcatgtacctgtattgaaatttaagttccgtgggatatcaattgaccttctctatgctagcatctctctttcagtgataccagcggatttcgatatttctcaaggatctgtactttgtgatgttgacgaagcaactgtgcgaagtcttaatggttgcagagtggcggatcagattcttcggcttgttccaaatgttgagaatttccggacaacactcagatgcttgaagtactgggcaaagagaaggggtgtttattctaacattactggtttccttgggggtgtgaactgggctctgctggttgctcgtgtatgccaactctatcctaatgctgtgccaagtatgctggtttctaggttcttcagagtttttactcagtggcaatggccaaatccagtgatgctatgtgcgattgagaataatgatcttggtttttctatatgggatccacgcaaaaatccacgtgacagaaaccatctcatgcccatcatcactccagcctacccatgcatgaactctagttacaatgtttcaaccagcacactgagggttataatggagcaatttcaatttggcaacaaagtttgtcagattgagcgggatactaaaggaattttgcagtgccatccgtacccatgcgagtattcagatcccacaatagagtgtgcacattgtgccttctacatgggcttatcaaggaaagaggggttgaaaaaacgtggtcaacagtttgatatccgtgggacagtagatgaatttatgcgtgaaattggcatgtattcattgtggaagcctgggatggatctggctgtcacccatgttcatagggagcaggtcccatcttatgtatttgagcaaggatacaagaaaccctgccctacaatgcatgcaaaccaacaagagcagtctgatggagatggaacatttagcccatatctggagagtcagcttaagagaaagtacatttccgatggagatggtcatgtggatctttgcaaatctgtaaaaagggcttcagtaagcccacctggtgtgggaaccccacctcatcttggaaatagtgtcagtaacgttgtttgtgacagtccagtcaaattcgtttcaagtgtcgtttgcagcggagcgcatgcttcctcatcacatgatgatataaatatagaacaagcacaattaactacttcaccatatggatctgaggatacctcagcatcaggtacaagctgtgcagcagtgggagcagttattttggctgatgaatccagcaagctcggtaacttgacatcagatcttgaagttgatacaattcagacaatgccactgcacacatctttagaatgcgtcgctcaaaagggtgaaacaaagcttgaggaaatcagaaggttggcgagcaacaattgtgctgagtttctagagagctaa

SEQ ID NO: 21071 - DNA, 330 bp, Zea mays
  Peptide Sequence Number=SeqID_62850
atggaggcaagaaaagcttcgaggtaccaagtgcacgggagaaggtcaaggaggctaaggaacccaaagccaagggtgaagaagaaggcttgcaaagtcaaggccaagactcagctcggcttggacaccggactgtccggtggtgcaccggatagtgtccggtgcgccaggctgaactctggtgaacaggccactctcgggagaagcccggtggcgtacggctataattcaccggactgtccagtggacatattgagacaggatctccgattccgctacaacctactcgaaggatcttctcattccactgcgtacgaagtcttcgagtag

SEQ ID NO: 21072 - DNA, 138 bp, Zea mays
  Peptide Sequence Number=SeqID_62851
atggcgggatctgtcggcaaggccagggcggcgctgcggtcgtccccgaagcggtacagcggcacggacccaccgttgtctctggcggggccgacgttggcggatctgcagaggacggccgagctggagaagctctaa

SEQ ID NO: 21073 - DNA, 495 bp, Zea mays
  Peptide Sequence Number=SeqID_62852
atggacaaaggtattcatggccttttgacagaaaaacagacttcaaggtacaacatgggccatggtaccgccgccggcctgcagcctcggccgcccgccgcgcgtccttcagctgcgccgccgtcggccgcgcgtcctccagcctcggccgcccgccgcgcgcccgtcctgctgcctgcatccaccgagctgcacggtgcctggcgcccgctgctccccgcctcccagcagcctggcgtcgccgccgtcgaattccacacgccggcctgcatgcgaggctgcgcccggagctgctcgtgcccgcatcgaggggccacgctcggggctgcctgcgcgcctgcgcggctgcccacgccgccggggaggcaacgcccacttggagaagccgctggtcaccagcaggctgctgctgcacgggggctgctgctgcacgggggctgctgctgctgctgcacgggggctggaacaggaagacgagatctgtggtctgagtag

SEQ ID NO: 21074 - DNA, 438 bp, Zea mays
  Peptide Sequence Number=SeqID_62853
atgcttgcaaacaaggtgcatatgccctatgatgatcatgagagagcactcaagttactacatgctctagattggagggtttgggaggtgaaggtctcgacgatcatcgagttgccaaactatgagactccaactgtggatgagcgtttcggcaagctcaagtcctctaagattcaccaccagacttgggccaatattgagaacccttgtgcacccaccacggctctagtgtctagaagtgatgttgtggccggatccaatgatggattctttaactgtggagaccttgaccacttcatcgccaactgctccaagttgaagggcaagatagataccgacaagcgtggccaccactccgaccagcgtaagggcaagcacgagtacacctccgacaagcacacgtacaagggaggttcgataagaaggcgctcaaggtga

SEQ ID NO: 21075 - DNA, 123 bp, Zea mays
  Peptide Sequence Number=SeqID_62854
atggattgggggctctgcttcaaccgggacaacaaggaagcagtagatgcagcgccgcgtagaaatcacggcaagcgctcccggaatttcccaccggagcactgccggccgcctagattgtga

SEQ ID NO: 21076 - DNA, 141 bp, Zea mays
  Peptide Sequence Number=SeqID_62855
atgcatgcggaccgacctactctgaccaccgcagccgacgatccgtacctcgaagtgatcgctagagacccccggacctcacccgacccctcatcggagcaacctcgccgccgcagagaacataggaaacttatatcttga

SEQ ID NO: 21077 - DNA, 174 bp, Zea mays
  Peptide Sequence Number=SeqID_62856
atggagctcgagttagaggttgatattggtgtggaatctaaggaagtgtctgcaatacaaggacagtgttcgacagcgaaggtgaagatcatgcggtttggtgtcgatgggtcaggagcggtgaaggacgagcgctgcgtcttgatcgagggactagagaagtcgggtgaatag

SEQ ID NO: 21078 - DNA, 99 bp, Zea mays
  Peptide Sequence Number=SeqID_62857
atggtgcgcagcctgcccgagtgccgccacctcttccacgtcgcgtgcatcgacgcgtggctgcagatgcaggtgacgtgcccgctgtgcagtgactaa

SEQ ID NO: 21079 - DNA, 399 bp, Zea mays
  Peptide Sequence Number=SeqID_62858
atgctgccaccggccgcgtgccttgttgcccgccgcctcctcggcatcgcctccgcatcagcgtcggaagccgccggccgccgggtagcttcctctccgatcgcttctgcagtcaacttcgccgccgcgtccaggggctctgtctccagcaccaggcccttctccatggctcttaactacgtgagcgcggcggagtatgcggcggtcgcgctccgcccgaccgattgcgacgggtgctcgggattgttggggacgcggcgcgattcgcggaaggattgggagggggcgagcgtggtcgggcgagcgggggcgaaaatcccggaggtcgggcgagcggaggcgggggcagtctacgctctgctcttaatagttagtagagattttgatgggacccaatag

SEQ ID NO: 21080 - DNA, 246 bp, Zea mays
  Peptide Sequence Number=SeqID_62859
atggcaccggactgtccggtgtgcaccggacatgtccggtgcgccaacggctctcaggctgccaacggtcggcttcgctatttaaggaaggaaatcgggcaccggacagtgtccggtgtgcaccggactgtccgggttccccaaagctatgtggtcaacaacaactactatgcatatgggagtaaaatgttgctagatgggttgcaggttttagaagctgcatcaagttttgggcaattgggctaa

SEQ ID NO: 21081 - DNA, 348 bp, Zea mays
  Peptide Sequence Number=SeqID_62860
atgaacttggcgtccgtcgttccctgcgcgcaggcattcctcgcgttaatgactcccgccgctggctcccaccgtcgggtccacacgcatgcggcggcctccaagagcggattggcctgccgcgtcgcgcgcagcgggggcacccggtggctgccggtctcctgtgcagccgggggcggtgcaggaaaatcatttttagggtgttacatcagtagatccatacagaacaatccggcagtgaagaccattattgtcagtcttgtcttgtgccccattgctataatcatctttttcattgggatcaatctcaataggtgggatggcttgtataaattcgtcaacctctaa

SEQ ID NO: 21082 - DNA, 249 bp, Zea mays
  Peptide Sequence Number=SeqID_62861
atgtacgagcagttccgacttcccaagacgggcagcacatggccaaaggaactcgatgacgtctacacccaaacaccgacacacatgggtgaagcctgcggtgcgccatcgttgccaagcctcgacacaccccatgcgaggcagctccgattcttcaccaacgagcttgaagccatagcgccgagcaccgggagcaagcagatgcccggagcgacaaaggcccaaacaccaccgagacaagcggaatga

SEQ ID NO: 21083 - DNA, 699 bp, Zea mays
  Peptide Sequence Number=SeqID_62862
atggactggtgcctctgctgcatccgcgtgtacacgctgtccatcgccaactcgttgtacctgggcgtcacggggattctcgtctacgtgctcgcgcgatcgcactcccgcaccacgtccggcatcgtcgtggcctccgtcttcctcgtcctctgggtgagcatcggcgccgtcatctacgcctccttgtgtttcgccttcttcccgtgggctgcgcttgagaacgcgcgcctctgctgcgtccgttgcaccgccgggtggctgcggcgcccaagtggcggcggaggcagcgccttgccgcagtatgcggtgcggagtcggagtcatgccatgaacgagcttccgggggagcccacggtgcgtgccggcgaggcgcgcgtagccgcagcggctgacatcccggcgtacgagctgcgcgacgacgcctggcaggggcagcctgatggctcgtctgattgcgcggtgtgccttggcgagatggagacgggcgatatggtcaagcggctgccagtgtgcctccacatgttccaccagcaatgcgtcgacaaatggctgaacaacaactcgacctgtccggtgtgcagattaagcttcatgaaaaagagcctgagtaggactcatgggctcggccacgagcccaaggacttggcaatcaagaccgagagggagcctaaacctagaaagattctagaagcgtag

SEQ ID NO: 21084 - DNA, 783 bp, Zea mays
  Peptide Sequence Number=SeqID_62863
atggcgcttttcaccgagtttgggcctcaaaactcggcggtgaggtttcgacaggaatcggagacggcacgtggtgtcatcgtgaaggttcttatcctggagatccgcaggcagcaccgccagcgacagccgccgagtgtccggcccaacggctgctccctcgtctgctatggcatcgtcgtggccaccgcgtcgctgctcctgctcgccatactcgctgccacagtcagcatcgtcaaggcgtgcgccctcgccggcgctgtcgcggtggtgttcagcgctgcgggctatgtctctcggtggtgcgcagcagaggacggcgctgctcatgcgctggcgctgcccacgacgatggcgacgccagccgcgcgcggccgcgcggtgtgtggcctcgttgacgcggcgatcgacgcgctgccggcgttcgcgtacgcgcgccctgccacgtgtggcgcagaaagtagcagcaagtccggaagactcgcactctgcccggtatgcctggaggaggtcgaggccggcgagatggtccggcagctgcctgcgtgcggccacctgttccacgtggagtgcatcgacatgtggctgcactcgcatgcgtcgtgccctctgtgccgatgcgacgtctcgccgcaggcagttgctatgacggtcacggaagctgcagatccaccgcatgatgctgcgaggatgtttgttagagtagataaactagacctcaaagttccgaaaagatttctggaaagctttcgaagggtgttcaggtctaaagatcaattttga

SEQ ID NO: 21085 - DNA, 2787 bp, Zea mays
  Peptide Sequence Number=SeqID_62864
atggcaagttggcaaccacctgcagctctacatctacgcacacatctccgtgatctcttcagcctcgcgactgccaccaaatcggtcttggcaggttgctgcgccaaatcggccggtcttggcaggttgctgcgccaaatcggccggtcttggcaggttgcgctagctacccataggttggctggagagatgagggccggggggtgcacggtgcagcagtcgctgacagcggaggccgcggcggtggtgaagcaggcggtgagccttgcgcggcggcgcgggaacgcgcaggtcacgccgctgcacgtggcgagcgcgatgctggcggccgcacccgcggggcagctgctgcgcgcggcgtgcctccgctcacactcccacccgctgcagtgcaaggcgctggagctgtgcttcaacgtggcgctcaaccgcctccccgcgtcggcatcgtcgccgctgctcggcggcaaccaccactgctaccacccgccgtccctgtccaacgcgctcgtcgcggcgttcaagcgcgcgcaggcgcaccagcggcgcggcggctccgtcgagagccagcatcagcagccggtggtcgccgccgtcaagatcgagctggaccagctcgtcgtctccatcctcgacgaccccagcgtcagccgcgtgatgcgcgacgccggcttctccagcacccaggtcaaggccaacgtggagcaggccgtgtgcagcagcagcaccatggctacggccgcagccgcacccagcaaaaaccctaaccctagcagctcggccaccaccacaagcccaccgcctaaagaagctaaagccaagccgccgctcgcgctccaccaccaagcgcgcgacgaggacgtcgccgccgtcctggactgcctggcctcgcggagcaagaggagggtcgtcgtcatcgcggagagcgcggccgcggccgaggccatggcgcacgcggccgtggacaagatcaagagaggcgaggtgaagcacgagcacgacgcgctgcgaggcgcgcaggtcgtcagcctccgcgtgtcgtcgttccgtgagatgccgagggaggaggccgagcggcggctcggcgagctgcggtgccttgtcaagcagggcaggaggcagcgggtcgtgctcgtcgtggaggacctcaagtgggcggcggagttctgggccggccacgacggccagagcgggaggagaggcgggtactactactgcgccgtcgagcacgtcgtcaacgagctgcgcgccctggcgagcggcggcagcctgtgctggctcctcgggttcgggacgtaccaggcctacacgaagtgtcgggtggggcagccgtcgctggagagcctgtgggggctccagacgctcaccgtgcccgccggcagcctcgcgctcagcctcacctgcgccttcgacgacagtgccctaggcacagtcaatcagtccctgaaagcgggctctgacgcggatgggaacgggccggcgtcttgctggccgcttttgggcggcagccagctgagcctgagctccagatgctgcggcgacggcgattgctctgccgcgaggatcgacacgaaagcggcgttgcctcggccctctgtctcatcgtccaacctcccttcctggcttcagcattgccgtgatcatcaggagcctactacgagccatcttacggatcttagcaagagcaagacatggagctccatctgcagcaggccgtcgcagcggatgacgctgcatttttccgcaccggtgtctccggcctcctccatctcctcctacgagcacggcggcgaccagtcgtcgcagacgccgcctcagcactcgtggctccttgctggtctcgacgccgcgcaccaccggtgggaacccaagcgcgagaccagcgggaataaggccgccagcaggtcccacgactccggcgcctcgaacggcggctccgtggaggtggagtgccgcgccaggttcaaggagctcagcgccgagaacctcaagctgctctgcggcgcgctggagaaggaagtgccgtggcagaaggagatcatcccggaggtcgccagcgccgtcctgcagtgccggtcagggatcgccaagaggcgcgacaagtcgaggtcggcggacgcaaaggaggagacgtggatgctcttcctcggaggcgacgccgacggcaaggagagggtggcgagggagctcgccagcctcgtcttcgggtcacgcgacagcttcttagccatcaggcctggtgcctcgtcgtcgtcgccgccgcggtcaggttcctccgagggtcaccggagtaacaagcggccacggatgtcgccgccgccgcctggggaggagtcggcgccggcctgcctggaacggttgcacgacgctgtatccgagaacccgcaccgggtcatattcatggagggcgtcgagcaggctggccgggactgccagctcggcatcaaggaggcgatcgagagcggggtcgtgcggaaccgagctggcgtggaggtcggcgtgggcgatgccatcgtcgtcctgagctgcgagggctttggcagcaccggcaggtccagagcttgctcgccaccgagcaagaaggtgaaggtagagatggaggaggctaaggaggagcgcacaggtgacattgaacacaacggagatggtggttcctcgtcgtctccgtcgtgcatcgatttgaacgtggacatggagagtgaccaggcggacgagggaagtctcgatgatgatgtctgtctgctcacagccgtcgacaggaccctgttcttcagaagacaggggtga

SEQ ID NO: 21086 - DNA, 288 bp, Zea mays
  Peptide Sequence Number=SeqID_62865
atggtgggctactctgacgctgccgacacgaccccacgcgtcagatccttccctaacaaacccgcccgcactatccggatctccggctcatggcgcgagattctcggcagcggccctaccacgattctggagcctcggcctaggaaaaatcaagttgaaattaaagacggctttgttcagccaaagtctgctcagtctaggtgcaccggactatccggtggtgcaccggacagtgtccggtgcgccaggcagactcatgcgaacttgatgctctcgagaagtaattaa

SEQ ID NO: 21087 - DNA, 234 bp, Zea mays
  Peptide Sequence Number=SeqID_62866
atggaggccgagcgagtcctcggcgttcggccgttttgcggcggccgcttctacgccggaggcgtccccgtcggcctccgccgtggtgtcgcgaggaaggaagaaatcgaagaaatcgacgaggggacaaggttatctggtgaatatgacaggcagacagctgtaaacactctttatggaaatggtgtgctcctcacgaagtcaaaacttatcgacggtgtatccgaaggatga

SEQ ID NO: 21088 - DNA, 567 bp, Zea mays
  Peptide Sequence Number=SeqID_62867
atggcgtggcgagggatgacagattgtccccacgcgccagagacgcgaatcgcagcgcaagcgtgggagaatgccctggcgagtgggccccgcgtggaagtgaagcgcaagcgcgcgcagcgcacgcgtgccgccgcccgccgctgtgccacagtgccagactgccagtgccttccactagcggccagccttcctccgttagccgacgccgctgtccccgtccagccgtccaccgctgtccccgtccgccgacggctcgatgccgagccgctgtccgcctgtccggctggggcctgtctctatccctccgtggctccgcccctgtgcctccgtccgccgaggctgaggcgtcgagctgctgtccgcctgcgggccgcgggcctgtggcctgtccctgtccctccgtgctccgtccgtcgagggcgagccgctgtgccttccggcttcgccgtccgaggagcccgacgactacgagccccgaggcagagccctgcaagcgagagcgtcggagaggacgcaacagggtgtagctggcgagacagcagtgacaatggcaggcctaggtag

SEQ ID NO: 21089 - DNA, 363 bp, Zea mays
  Peptide Sequence Number=SeqID_62868
atgtatgctttcgtctccctcgcgctcggatccacggagcgttttgacggttcggccgccggccgcagcagccagcaggcaagccagagccgccgctgcggagcctgcgctcggagctccgcctgcaccaagctcatcccgccgtcgccgatcatcgtgagcaggcgagtatttccttctccctccctccacccgacgcccaaccgcctccttggtccctgcccactcggccaagcggcaaggtcggccagaggccatggtgagggtgaggccccgacgcagcggccagggcagagccccctgcgcgtcggacctagtgtgcctagccagcccagcccccttgccggtgtggctagcctatag

SEQ ID NO: 21090 - DNA, 714 bp, Zea mays
  Peptide Sequence Number=SeqID_62869
atgtggaggggaaactcaccaatggtgacgatagggaagggcgaccatggctccgtgcgcggctttggttttggagggctaatgggggggggtctgcttatatgcacgtggggcgaggataggcaatgggcagggatgaggatcctcctaggcggagtccgcatgaatggcgagatccacggccaacgcaacaacccaaatccggcgcccagtctattgcgttctgatgtagaggacgcccctgacaccatgggcccccggcgcggcgaaagcaaggcctcacgaagcacccgttcgagcaggcccgattgccagcggttgcagggggttgtggacggagacgctcggtccacgcgcgccggcgggaagcgaagaactgcgacgtcgacgacggtgctcggagcttctccgagctcaagcgaggggctccgggttcttggctcggcggcgaagcaagggcggtgttcggtttggacggtggtggacgagggaaagcgcggccacgaccttagctcgcatcggccatggcgacgcggcgtcggggtggaagaagaaagcgagggcgagagtgggtgtgagagagtgagacgagagcaaaaggaggcgagagtggctgggtgctcggtgaaatggagcaggcgcgtctgctggcttgcccacccgcgcggacaaagaacggcgcggagcagggcgcagcgaccacgtgtcttgtag

SEQ ID NO: 21091 - DNA, 105 bp, Zea mays
  Peptide Sequence Number=SeqID_62870
atgacccaccaagccaaggacgccgtcgagttcaccgtcgaccgccgatactccccgaccctcgcctcgttcgcctcgtcgccggttaagttgctgattccttag

SEQ ID NO: 21092 - DNA, 246 bp, Zea mays
  Peptide Sequence Number=SeqID_62871
atgaaagtggtagtcataccacagattaagctcccgggcgacctgaccacggcgtacggcagaaattcgaggattctcgacgacaacgagcaattggtcctcagtgtcactatcaaacgcgcccccgagcacgagaaccgtcagaggcttcacatcgatgacctagggcttcactccgaaggggtacgggtggtgacaacgaaattcaccgtggcggcgcggtactccgatctcacgggtagttag

SEQ ID NO: 21093 - DNA, 186 bp, Zea mays
  Peptide Sequence Number=SeqID_62872
atgggtggtaacaaagctcaggcatgtctgatggccttcaacaccgtgggcaactacattggtaccagagatttggtccaggagcacattgctttcaaggcaaaggatgaagctatgaatactgccttcggtgctcatggaaagagaagactgaacagagtttttgatgtaattggatttgtctaa

SEQ ID NO: 21094 - DNA, 651 bp, Zea mays
  Peptide Sequence Number=SeqID_62873
atggggtatggcaggggccttgtggacaccaatgtcagggatatcacatccactcctaattcgaagcaagctggtgcttatgataaagctcatgcagagtgtgggcgctctaggaatgtggccggagctggggagcttcctgcgtgcggtgcgggcgctgatgccaaagatcacggtggtggcagagtcgaaggtgaaccacaacacgcccacgttcctggagcggttctacgcgtcgatgttcgactacatggagagtgtgtcaatggctcatgcacacctgtgtgcggggtagtgggcgtgcaccaagcagctggtgctcgaggaggagattcgtggtgtggtggcatgggaagactttccttgcctgactatatgcttgaatggaaagttttgttgggacaacatatagagtactcgagttgcacgtgtgctgattcatgttcattacgaacattcaactatgatgggtacctaccaatgagatatctttccctgcataattttaataagttttggacatgcaggatggcggtgccaacatatgagctaatgtttgggaaactctcctctcgtaatgtgtttgaggattactttgatcaagctcagaatatgaactcaaggatcatggtgatgctaataaaagtatag

SEQ ID NO: 21095 - DNA, 264 bp, Zea mays
  Peptide Sequence Number=SeqID_62874
atggggaaattgcgaggcgcattaagtgtactccaaagctcaacggttcatcacgaggacagcaagatggttaatgtgatcaagggtctgttgttcatctcctgtgatgttcctatggcgcagttgattgtgaatctgaatgcctcgatgccaccatcagagaagttcatcgtgcacatgcttgtgcatcctcgtgtggcagaaatgatcaggagtaagatatctgagttcagggatcagaacatctacgagaagccacaatga

SEQ ID NO: 21096 - DNA, 393 bp, Zea mays
  Peptide Sequence Number=SeqID_62875
atggagatgcggcagtatatggagtgtatgaatttagaggctaagaaacactgtctcaagagaaatcccgatgctgaggacgacgaggacgaggaggaggacgatgacgaggacaaggacgacagggtgggcgaggaggtcagggaggagtgggagaaggagaagctgcaggtgattgaagaggacgctctgtgtcggaaagccgcgaggcgcatcctcgactatgatcccaaacaggagggcctctactacacccggatcttctatgtcaaccaccacaccttcgacctcgacgaggagtgtgagtacaatctgactgcgtctcatctatcagtcctcccacctcttgccaagttgccacgttgtaacatccagcccactattctaaagtag

SEQ ID NO: 21097 - DNA, 207 bp, Zea mays
  Peptide Sequence Number=SeqID_62876
atgttggtttgcagttgggcagtatccttcagcggagaaggttcaatacttgctattggtggtgaagatgggcatttaagagttttcaactggcctaccatggggtctgttctcacagaaatcggtactaaaacatcgattaaggatcttactatcaggagcagtggcccattgaaggggaaatgtgcctttgggccatttctataa

SEQ ID NO: 21098 - DNA, 213 bp, Zea mays
  Peptide Sequence Number=SeqID_62877
atgccgcgcgaggggtacagtgatcccgcccccgccagctccacccgtgacgccatggtgagggcctcgtggctcaatggccgagcagcccctgcagcgaggtggtgcacctgccggcgcgacgccgtcgccctctgcgaggacaacctcgtcgccgcgctgctcatggtccacatgctctactctctcgggtccttcgcatttgctccctag

SEQ ID NO: 21099 - DNA, 1371 bp, Zea mays
  Peptide Sequence Number=SeqID_62878
atggataaccacatccatagtcagccagctgctaacctctactaccagttcggcatggggactgagcagcaatacccaccaccgttcgcctcaccaccatccaccaacatcccgcacatggactggaacccggccacgatgctagacaacctcaccttcatcgaggagaagatacagcaagtgaaggacgtcatccgcacaatggtggacaacgccgggcaggtgcaggtccagtgccaccaccaagcaggcgagctgctggctcagaagcagaagcagcaggtggtcaacgcggacctgacatgccttatagttcagctcatctccaccgccggcagcctgctcccgtcactgaagaactcgtcgttcctcagccacccccaccctgctggccacgtggacatggctaaccatgttggcccaagctcgagcctagtgcctaatgcgatgaccgtttctgaagactatgaggagctgttcaagggatggaccgatggcggcattgaggtcgacgacgacggcgttcttgtcgaggagcaggaaattaccaaggacggagacagcctctcgtacgagctgctgcagctggaggaggacgagatactggcgccgcacacgcacttttgcaccatctgcgggaaagggttcaagcgggacgcgaacctgcggatgcacatgcgagggcacggcgacgagtacaagagcccggcggcgctggccaagccgccgagggacccgggcgcggagcaggagccggcgaagcggcggtactcgtgcccgttcgcggggcccctcaagaccatcctgtgcgtgaagaaccactacaggcggagccactgcgagaagagccacacctgcggccggtgccacgccaagaagttctccatcgtggccgacctgaggacgcacgagaagcactgcggccgccgggacaggtgggtgtgctcctgcgggacgagtttctcgaggaaggacaagctcttcgcgcacgtcgccttgttccaaggtcacacgcccgcgttgtcgtcgccgctggaggaggagccgccgaaggcttgctcggaccagcaccagaccggccgtgctgggagccgtcgggaaccagcgaaagtcccagctggctcagtgggcggcggcagcggcagcagcttcgtgtggggtgcctcgtcctcaggggagaacagtgctctggatatcaaaggttttgttgatggatgcagtggtgacttcctctcgacggcgaactttggctccttcaacctcagcttcgggcctgctgacgggttcacaggagagccttctagtggtggttcgttctcgatgctacctcctgagcactttcagagtgctcagaagaaggggcagaactga

SEQ ID NO: 21100 - DNA, 369 bp, Zea mays
  Peptide Sequence Number=SeqID_62879
atggccccctgccccacccagctcgcggcccagccatggctgctcggacccggcgcggcgcagtcggcccccagcgcggccccacggcctgcgtggtgtggtcggcccccggcgcgtccccgccgctcgtgcagcgagttcagccccggcgcggccccgctgcttgctcgcggcgcgcagcgcgacgtgcgcgcggctcggccctggcgcggctcgttcgcggcgcgtcagtgcggcctcgcgcgcgctagtgctcgcatggtgcgcgtggagtcttggcgcggttgtccacgttgcaaccactactcaggagaagatgaagccgtggaggaagacttccaggagttccaagattacgacgagttctag

SEQ ID NO: 21101 - DNA, 156 bp, Zea mays
  Peptide Sequence Number=SeqID_62880
atggctccaatatggcttgtgatgatttggaacgattctggacttcagcaggacccccaggggcgtgggaagggtctggcactgccgcaccctgacagtgccgggcttttgagcggcactgccgctgcacaacctgcttcacgaaaaacaccataa

SEQ ID NO: 21102 - DNA, 255 bp, Zea mays
  Peptide Sequence Number=SeqID_62881
atgcgaggtggtgcacgggtgcggagtggtgatgatggagcaggtgacacaaggcagcaagtgcgacaaggggaaggggggcctgttgccggcgacgatggcggtgggtgcgctgcaaaagggggcgtgggtggcggtagtgcgctgcaaagggggtgtggggtggtggtagtgcgcatggaggcgggcaggaaaacggggggcacgaagaaaacctttcttaaaaaggaagaaaacacacaagctcagcaatga

SEQ ID NO: 21103 - DNA, 291 bp, Zea mays
  Peptide Sequence Number=SeqID_62882
atggcctcgcacaaacagcttgtcgtggttgaccctggcagcgtcgctccaccatctctgctggtgttaggcattggaacgtcagtgctaccggggtggaggcagcagccgctggcctggccggcgatgccggtcgtcgggcacacaaagttcgacgtccacccggagatgccatggaagtctggcagtgaagagttgtgcttgttggtgcggtggtggcacgggctccgcgtggcaaaggagagccaggaatcgatcctgatagtcctccaccgtggagcggaaggatag

SEQ ID NO: 21104 - DNA, 228 bp, Zea mays
  Peptide Sequence Number=SeqID_62883
atggcgtcgggcagagccgcagaggcgcggctttgccgtgggactttgggatgtggatgggctcatgcctcgtgggcaccgcggcgcgtcatctcgagtcaagcacgactgcccgaagacgtggagagtagaggaagctatggcgggtgtcgatcaaagatgtcgtcttccccagtcgtcgccctcaagcttactgaccactggggctcacctcaccaaactccatga

SEQ ID NO: 21105 - DNA, 348 bp, Zea mays
  Peptide Sequence Number=SeqID_62884
atggcatcaatgtgtggtgcgctgcataagtcgacgtctctggcatcgaaagctgctcggcgaagtcctcttgcttgggtgctagtggcagagggctttgatgtggaggattttgatgatgcggtggaggagggaggacttggatctcttgatgatgatggtacaagtgattgggttggtgagggatctgctcgttgtggtatggttgctggtggtagtggtggggtgataagtatgtgcgacaactcgttggttgtcagctggctaatttctggccatcctatctttggtggccttagtttccgggcaatccctggtggggtgtgcacaatcttcgccatgaaatag

SEQ ID NO: 21106 - DNA, 657 bp, Zea mays
  Peptide Sequence Number=SeqID_62885
atgcagagaaagcccgcgcggaggctcaggtcgccagcgctgatgctcaggccgcccgcgcggaggcccgaaaccgctcgcaagtgcaccaccgacatggagttggagctgaggaacatctgcagccatcatgagaagacggagtcctccaccagcgttggggtcgagcgggcgcacacactttttgtggatgcgtaccgtgagctcggcgcgcagaccgttccctttgatgaatcgggggaggaggtgatgaatgaggaagaagttgatgacctcgccgaccttgaaagtttggtgacacgggtgggtgccttggtggaggtgggagctgaagggcatacaatgccactagggggtgttgctgaagaccctatggcggcggctgattcggcgcagctaaagggattcaataggggatgggttccggtgtccgagcctacgcaagtaaaccctgatgatgttaaaattaatgatggtttgatggatgcgagcacgacgtttcttagtggcaatatgtcggagggatcggattttgggtcgtggtctttggaggatggggaattggaaagtcctttctcgtgggtggatgaatcttctgaagatgacttagattattttgtggcattggatctggctgcatcggagtctccattgtga

SEQ ID NO: 21107 - DNA, 339 bp, Zea mays
  Peptide Sequence Number=SeqID_62886
atggccccagtagagagaacgcggagagagagagatagagccgcgggtgccgcgggttctggcggcgctgcggcttcaagcaaggtgtcgggcgaggtcgctggggagtacgcgcgaagcattgtcgcacgacaaccaggaagcgagggtctcggtgtaattataccgcggtggggatttcacagcgcacgcctggcggacgaactgtggatgggcgcggtcggcatcttaccgaaccgggccttcatcgctaaatcgaaccaagcgtcaggaattctggtgagaatcaccactctagctgtctccgctttatttttctgtgccgatagcagttcgtaa

SEQ ID NO: 21108 - DNA, 315 bp, Zea mays
  Peptide Sequence Number=SeqID_62887
atgaaggccctgaaggtcgagctgcacaagcgaagtgcccaaggtcgacgccccccgcgaagactcaggcactatcttcgccctggcaaaccggagcgaagaccattgaagacttcggagcttggacaatcaagaccacgaagaccatatgttgcaatcttccgcattgtaaaaaggggcctgtgtatagtccggtccatgctgcagggcccgcccgtaggccgccatgccgacagggggacgaagaaaaacattgttgcccaagtgaactacgtctactcgcatcaaaccattttccactctcccaccgtttaa

SEQ ID NO: 21109 - DNA, 480 bp, Zea mays
  Peptide Sequence Number=SeqID_62888
atgctgcggatggaggtgcagcagcagcagcaggagtcgggagtgagcggcggcgtggtggcggacgcggcggcggcatccggggcggatgccgcgccgacgacgacgacgatggtggccgcggcgccgcactcggcgtcggcgctggcggtgtacgagcgggtggcgcgcatggcgggcgggaacgcggtggtggtgttcagcgccagcggctgctgcatgtgccacgtcgtcaagcgcctgctgctgggcctcggcgtcggccccaccgtgtacgagctcgaccagatggccgccggcggcggcgggggcagggagatccaggcggcgctggcgcagctgctgccgccgggccagccgcccctgcccgtcgtcttcgtgggcggacgcctcctcggcggcgtcgagaaggtcatggcgtgccacatcaacggcaccctcgtcccgctcctcaagcaggccggcgcgctctggctctga

SEQ ID NO: 21110 - DNA, 1758 bp, Zea mays
  Peptide Sequence Number=SeqID_62889
atggaaggcggcgcgcacgagttcgacggctccaccttcaaggagtgcttctccctctcgtggaggaacccctacgtcctccgcctcgccttctccgccggcatcggcggcctgctcttcggctacgacaccggtgtcatttcgggagctctgctctacatccgcgacgacttcgtttcagtggacaggaacacatggcttcaggaaatgatcgtgagcatggcggtggccggcgcgatcatcggcgcggccatcggcgggtggaccacggaccggttcgggcggcgggcgtcgatcctggtggccgactccctcttcttcgcgggcgcggcggtgatggcgtcggccacgcgccccgcgcagctcgtggtgggccgcgtcttcgtcggcctcggcgtcggcatggcctccatgacctccccgctctacatctccgaggcgtcgcccgccaggatccgcggcgcgctcgtcagcaccaacggcttcctcatcaccggcggccagttcctggcctacctcatcaacctcgccttcaccaaggcgccggggacgtggaggtggatgctcggcgtcgccgcgctccccgccgtcgtccagttcggcctcatgctcgcactgcctgaatccccgcgctggctctacagacaggggagggcggaagaagcagaggcgatcctgcggcggatctactcggcggaggaggtggagcgggagatcgaggagctgaaggagtcggtggcggcggagcgtgggtcgtcggagaagctgagcctggtggcgctggtgcggacggcgacggtgcgccgggggctggtggccggcgtggggctgcaggtgttccagcagctggtgggcatcaacacggtgatgtactacagcccgacgatcgtgcagctggctgggttcgcgtccaaccagacggcgctggcgctgtcgctcgtcacctcgggcctcaacgcgctcggctccgtcgtcagcatctacttcatcgaccgcacggggcggaggaagctgctggtcatcagcctcgtgggcgtcatcctctcgctcggcgtgctcacggccgtgttccacgagaccgcgtcccactccccggccgtgagcgccaccgagaccgctcgcttcgacgcctcgctgacgtgtccgtcctaccgcccgtcgtcgccggccagcggcggggcgtcctgggactgcacccggtgcctcaaggcggccgcgggttcgagcgagtgcggcttctgcgcgtcgggcgccggcaggctcctcccgggcgcgtgcctggtgtccaacaacacggtgcgcgacgcgtgccacggcgagggccggctgtggtacacccgcgggtgcccgagccggtacggctggctggcgctgctgggcctggcgctctacatcatcttcttctcccccggcatgggcacggtgccgtggatcgtcaactcggagatctacccgctgcggtaccgcggcgtgtgtggcggcgcggcggccaccgccaactgggtgtccaacctggccgtggcgcagtcgttcctgtcgctgacggaggccatcgggacgtcgtggacgttcctcatcttcgggggcctgtccgtggccgcgctcgccttcgtgctcgtctgcgtgccggaaaccaagggtctcccgatcgaggaggtggagaagatgctcgagcgccgggagctcaggctcaggttctgggccccgcgacacacacaagacaacggcaaggagagtggcaagaatgccggcgtttga

SEQ ID NO: 21111 - DNA, 789 bp, Zea mays
  Peptide Sequence Number=SeqID_62890
atggcgaccagcgacgagctcgcccagatcgacatctctaaggaggagaaggacaagctggtggcggaggtgatgcgctacgtgctcttcaagacgcaccagagctccgactgccccatcaagcgggaggagctcaccgggatcatcaccaagaactaccgccagcgcgcgctgcccacgctggtcatcaacgaggccaaggagaggctcgccgcaaccttcggctacgagatgagggagctacaaaggacccgcgcgccggccacgcgctctggccggccggcacagcggcagtttaacgcggatgccaagagctatgttctggtcagcatgttagaccctgaggtgtacagcaagtacgtcgaggacaaggccgccgcccatctgtccggcttcgctttcgctgtcattggcattattcatcttgctggtggcaaaatgcccgaagaggacctctggcatcagttgaagcgggtgggtttgaacgagactgatgaagctcaccttgttcttggcaacaataagcaggcgctcgaacacctagtgcagcaaaggtacttgctgaaggagaaaattgctggaccggaaggtcatttcgtgatgtacgagcttgccgagagggcgttggatgaatccatcagcgtgaagattaaagatcatatttcacaggttatctgccttgcggtaggactagctgactcttatcaggctgggaagctacatatcatcttgcatggatacgaggctcgtactctgcatgcagattttgtacaggagatgtgtgcttga

SEQ ID NO: 21112 - DNA, 639 bp, Zea mays
  Peptide Sequence Number=SeqID_62891
atgtcgatccggggtcgacgagcactagaccttcttcggttctctagcgaccctcccccacaaccacggtctcgcgcgagcttggtcagcttcgtcagcgaagctgggcagcaggcgtgggcagtcgggcgcgagagcttggtcggcttcgtcagcgaagctgggcagcaggcgtgggcagtcgggatgatgcttgtccgtgctgttaagcttctcaagaacctccacttcatggcgaagcccgctgcgattgacttgataagaagcattattcaggctgaaggtgcttccacagagcaggcattatcatcagctctaacaagtattatggatgcgctgaacagtactgactggaatacaaggaaggctgtctcactagctctttcaagtattgcgatcagttctgggtatttggttacctctttcagaaattcctgccttcgctcccttgagtgtagtaaatttgacaaggtaaaaccggtacgtgacaccattatatacatgcaattcagctgtgaaaagctattccagggtctcatactcctgaaccatgaagctggatcatcaacaaaagataatgaagtcaagatttgttgcgagaaccaaaaaattacgctaatggttatgaggcgaatgtag

SEQ ID NO: 21113 - DNA, 321 bp, Zea mays
  Peptide Sequence Number=SeqID_62892
atgaaaggcctgattccgttggtgtaccggaccatcgtggagtacaggaaggcgaggcatcaggtcgccatcgcaagccgcgtgctgtacggcgaccaccagcagcagccgtgtggttcgtcggcgctcttccgcgtcgttgaccctgcagcaagcagcagcagctggcacgccgcgtcgtcgtcgatgtccccggccacgtcgccggcggcagccagggccagcggcagcctggcgtcgccgctcctccgctcggcgtcgcgccgccagctcgcaggttcccagcaactgagcttgtcgttcaactgcacatatacatag

SEQ ID NO: 21114 - DNA, 147 bp, Zea mays
  Peptide Sequence Number=SeqID_62893
atggcgtatgtacatttggatgagaaaagagtacgcactttttgcaggatcgagggtggccgtgccccgtgcgtgcactccacgaatcacgctgatgacagatgtggtccggtccaatcaagtaaattcagatttttaaatacgtga

SEQ ID NO: 21115 - DNA, 879 bp, Zea mays
  Peptide Sequence Number=SeqID_62894
atggggagaactccgtgctgccacagcaatgggatcaagaagggacagtgggcgctggaggaggacaagctgctcgtcgactacgtccaggccaacggtgccggaaattggcgcatgctccccaagctcgcggggctgaaccggtgcggcaagagctgccggctgcggtggaccaactacctgcgcccggacatcaagcgcgggcacttcacccccgaggagcacaactctatcctccagctccacgccatcatcggcaacaggtggtccacgatcgcggcacagctgccgggccggacggacaacgagatcaagaactactggaacacgcacatgaagcagcagctccgacaggaggcgctcgccgtcgccgtcgccggcgagggcgctggcgcgcagctcgccaaggcggccgccgcgtcctgtcccgtcgctcgccacatggcccagtgggagaccgcccgcctcgaggccgaggcgcgcctctccctgctctcgtcgacctcggccacgacgatcgtcacctccgccaccgcctcttcctcctcgtccaccgtcgcgcccgagcacgcggcgcccgacatcttcctgcgcctctggaactccgaggtcggggattctttccgcggcaccgcagtgaaggggcatggtccggcgtcgagtggtgtgccggcggcgctacctgctgagctcggcgacgacgattcctcggccgcgtcgacctacgggaccgaggcggcggcgagcgacgactaccagtcgttcctggacctggcggcgatggaggagttcgggctgctgcaaggccggctcgacgcgttctcggtgctcccgcatgtcgacgtgttcgccgaggcgccctgctgcctgttcgagtag

SEQ ID NO: 21116 - DNA, 543 bp, Zea mays
  Peptide Sequence Number=SeqID_62895
atggaggcgataatcaagcagtccaattccatcttctcgcctataatagtctcctggtccgcacatggcggcggcagctctccttcgccgccggcatcttcgtggaccgcacgcttttcctcacgccagagttcgtgtcccccgcccgtctccgctcaccaggccgtcacaacatatgtcgatttcaagaatcagcccgcggcggcgaccgctgagacgaacgctttcgccgagcatgccacggcgggcgcatacgcagctagccttctgtccggtggtgcggtggaccgcgagaccaagatcgtcctcgccaacggcatgcacttcaaggcgacgtgggcacagtcgaccccgtcggacaccgtccgcgatatagtccgcgattacttctaccgctccgacggcaggcccatgcgggtgccgttcctgtcggacgctgccatgcagtacgctgagagcttcgacaccctcgcctgggcttttacgtcgaccatactatcgaccacgctgttattaggtttcatctatcatatcgcgctttag

SEQ ID NO: 21117 - DNA, 1041 bp, Zea mays
  Peptide Sequence Number=SeqID_62896
atggccgcggccgggctgggcgtgaaggcgacgccgttcacgtacgcggcgcacgcgctggccgcggtggcggcggcgctggtgctggtgtggtgcgtccacttccgcggcggcctcgcgctcgaggcacagaacaagaacctcatcttcaacccacgtcagcggtgcggtgcagctttagcaatatacggaccgaccgaccgtagcgtatgttcgtcacactgttcccggaagctgggattttacctggaaatcgtcagatttgtgagctactttgagcgtttgatttcctgggaattgtatggcagatttgatctggaggttcatcctgttcttatgctgatcggctacattatcctcggcagtgaagcgctaaacgttggtttctcccgaatcccgatccactgtatggcagccattatgatctacaaggtgtttccgaacctgaaccacgacacggccaagctgacgcacctgatcctccacgccgtcgcgaccgtgctcggcgccttcggcatctactgcgcgttcaagtaccacaacgacagcggcatcgccaacctctacagcctgcactcctggctcgggatcgggaccatcgctctgtacgccattcaggtgctcggcgccttcgtttcgcagcgtgcccctgttctgttctgttctgttctgttcgcttctgttcttgcaggtggattagctaaccgtctgcagtcgatgctgtgttcgcagtgggtgttcgggttcgtgaccttcttcctccccggcgcggcgcccggcgtgaggcgcggcgcgctgccctggcacgcgctcttcggcctcttcgtctacgttctggcgctggcgaccgcggagctcgggttcctggagaagctgaccttcctggagagcggggggctcgacaagtacggcgccgaggcgttcctggtcaacttcacggcgctcgtcgtcgtgctgctcggcgccttcgtcgtcgtcgccgcagtcactccggcgcacgccgaggaaccgcggggctacgccccgattccggtcagctag

SEQ ID NO: 21118 - DNA, 273 bp, Zea mays
  Peptide Sequence Number=SeqID_62897
atgggcacaagccacgggaaggctccatcaaaggagtccggcgccaagggaagggaggaatcacctccacgagtcaagttgcatcggagtggcaacaagaagaagaagatgaagaaagtggtctactacgagaccgattctttgtcgccatccacctctagctccgacgtggcgtccgtcacttctaagcgccatgagcgcaagaagtttagtaagaccccctacgctatccccgcatttctaaacgcgctcctttactttccgtcccattag

SEQ ID NO: 21119 - DNA, 297 bp, Zea mays
  Peptide Sequence Number=SeqID_62898
atggtgcaggaggataaagttatcatagaagcacatctggggggtaaatcttctctttataacttgacatgcatgggtgcagaccaaccggccgggcttatgagggcggacctcaccgggctggcgtgcacaccccttcttggttttgtactcgtcgtaggactaggtctcgacctggagcttcctactatgcacggaccgttggtgccgttcctgcatagatccatcaaaagaatggacccgtggggagtccagaagggtttccgagggaaggcaggcttcggccccgtagactag

SEQ ID NO: 21120 - DNA, 1515 bp, Zea mays
  Peptide Sequence Number=SeqID_62899
atggggcccatcaaggacttaaaaggcgtacagagggtcatgggatgtctcgcggctctgagccgcttcatctcacgcctcggcgaaagaggtctgcctctgtaccgcctcttaaggaaggccgagtgcttcacttggacccctgaggccgaggaagctctcaggaacctgaaggcgctcctcacaaaggcgcctatcttggtgcctccagctgtcggagaagccctcttggtctacgtcgccgcgaccactcaggtggttagcgacgcgattgtggtcgagaggcaagaagaggggcatgcattgcccgttcagaggccagtttacttcgtcagcgaggtactgtccgaaaccatgatccgctacccacaagttcagaagctgctgtatgcagtgatcctgacgcggcggaagttgcgacactacttcgagtctcatccggtaactgtggtgtcatccttccccctgggggagatcatccagtgccgagaggcctcgggcaggattgcaaagtgggcggtggaaatcatgggcgaggcaatctcgttcgcccctcggaaggccatcaagtcccaggtcttggcggacttcgtagccgaatgggtcgacacccagctaccgacggctccgatccaaccggagctctggaccatgtttttcgacgagtcgctgatgaagacgggagccggcgcgggcctactcttcatctcgcccctcgggaaacacctacgctatgtgctacgcctccatttcccggcgtccaacaatgtggctgagtacgaggctctggtcaacgggttgcggatcgccatcgagctaggggtccgacgcctcgacgcccgcggtgactcgcagctcgtcatcgaccaagtcatgaaaaactcccactgccgcgacccgaagatggaggcctactgcgatgaggttcggcgcgtggaagacaagttctacgggctcgagcttaaccacatcgctcggcgctacaacgagactgcggacgagctggctaaaatagcctcggggcgaacaacggttcccccggacgtcttctcccgggatccgcatcaaccctccgtcaagatcgacgacacgcccgagcctgaggcgccctcggcccagtccgaggtaccctcggtccagcccgaggtaccctcggcacagcccgaggcaccctcagctcggcccgaggcgccctcggttcagcccgagaaggcgcccgggggctacacgcacctgctggtcgccattgacaaattctccaagtggatcgaggtccgacctctgaacagcatcaggtccgagcaggcagtggcgttcttcaccaacatcatccatcgcttcggggtcccgaactccatcatcaccgacaacggcacccagttcaccagcagaaagttcttggacttctgcgaggatcaccacatccgggtggactgggccgccgtggctcatcccatgtccaatgggcaagtagagcgtgccaacggcatgattctacaagggctcaagccttag

SEQ ID NO: 21121 - DNA, 1563 bp, Zea mays
  Peptide Sequence Number=SeqID_62900
atgtggtatgccggcctgttgaaagccaactcaactcaaatggagattatgcaccgtggttggaaatatgcacttgctggtggtagaaatctcttcagcaatagcactatagcagaacgcgacctgtcaaattcatctctccaaggattcttggcaccagagatcgggtccttgagatctttgcagactctagaccttcacgcgaatcggctggacggcactatccctcctgagcttggcaagctgggaagcctccttgagctacggctgagcaacaactgccttacaggcattgttcctgcaagtaatgattccgacgtggaatccgccagcacctctgatcaaactggattgtgtcagctatctcagctaaccaatattgatctctcgtataacttcttggttggagatgttcccgcatgcttacagcaaatccaaagtgaacaagtgtactacataattacaggtgaaactaatcaggacagaggcaaagacaatgatgctgatgagaatgtgcagaaaggcctgccagagccactttggcttctcattctggaagtcatcgcagcagtttcattgctttgcttcttaacactttgtaccatgactggcctccgaaggtgcagagccagatcctctgggtctgagaccagtgttccatggacaagagctgtaagctggaaggagaacaccgtaatctcaatcgatgatgacctcctggtaaatgtgccaaagataagccggcaggagctggcagaggcttgcgaggacttcagcaacataattggatcgtctcaggagacagttgtgtacaagggaactctgaaggatggccgggaaatcgctgttgtgtcgctgtctgttccggtgatagaaatgtccagaccgagtcacgaaaatgtcgcaaagatggtgggatactgcaaggagtctgatccattttcgagaatgctagtctttcagtacccaccaaatgggacactctacgagcatctgcacgatggagatgggtggcagctatcttggcctagacggatgaaattagcactcgccatctcgagggctctcagatacttgcacactgagctgcaacctccgtttgcagttgctgcactgacgtctagttcagtctacctaactgaagacttctccccaaagataatcgatttcgagaggtggagatatcttgcgaccaaaccaggatttggctcactaaatggcgggtcagtcaacagcgttacagattctcggcataagcgcttcatggacgtccaggccaacacttacgcgtttggcgtgatcctgctggagctggcaagaaagcacctggagcatcccgaggagttcggcaagctggtggacccgaggctgcagagcgtgaaccaggagagcctgggcatcgtctgcaacgtggtgaacctgtgcatcgacctggagccgtcgcggcggccctccatgagcatgatcgcggccatcctggaggaaggcatcgaagcgtcggcggccaccttgctcaggaattcgtctctggcctgggccgaagccgagctggccatctcctag

SEQ ID NO: 21122 - DNA, 681 bp, Zea mays
  Peptide Sequence Number=SeqID_62901
atgcccaaaaggagatctggcgttgtactggtcatcgcgggtcatctccagataatcttgtctttagcctcctgttatgactggacacaatatctggcgcactggggcgccgagtcttcgctcccggagctcgcgcagcgcgccaagagctgggagacggcgtccgggctgagccgcaaggcgttccggtcgggccgcttcctggccgggttcaacgcgctgcgccgcggcccggtcccggtcccgggggagctcggcgcgctggccgtgctggccaacgccggcgagatggtctacttcttcttcgaccacttcacgtggctgtcccgcgcgggcgtgctcgagccctggctggcgcgccgggccagcttcgtgtcggccttcggcgaggccgtcggctacgtgtttttcatcgccatggacttcatcatgatcaggcggggcctgcggcaggagagggagctgctgagggaaggcgccaaggacgccgcggagaaggaggtgcggaggatccgggtggacagggtgatgcggctcatggcgacggcggccaacgccgccgacctgatcatcgccgtcgcggaaaccgatcccaacccgttctgcaaccacgccgtcacgctggggattagcggcctcgtgtcagcgtgggctggctggtacagaaactggccctcgtga

SEQ ID NO: 21123 - DNA, 306 bp, Zea mays
  Peptide Sequence Number=SeqID_62902
atggcccggaagcggatcctccaattgtgtgcagcggcggagcagtcggatagccggataggcgggcgggcggagggcaggcagctgatggcaggaagtggcacagctctggctaatctcatgaatacgcaattcccgactctcgaaatggtgatggttttagtatacgaacgctgtgctgtaccgaaatctctcagccgccatcattcgggctatgtcgacccctggctccatagcctaaggctcggcacaacccgtcatgtagtgccctgcgggaagtctgcacaatcaggcctagtccgatag

SEQ ID NO: 21124 - DNA, 159 bp, Zea mays
  Peptide Sequence Number=SeqID_62903
atgaaggacgcaagcgggagcgcggtgggggaggagtcgaaaacgggtgggagctggtgcagcggcacagatgtataccatatttatattcttttcactacactaactacactaaatgatcttaaactgaaacatcttatcagtcgtaaggacgcatga

SEQ ID NO: 21125 - DNA, 282 bp, Zea mays
  Peptide Sequence Number=SeqID_62904
atgccacatgctccactcaccctagtgcactacagcgatggtcctatcgttgtcaagggaggtgaggaaggttgggagtgtgggactaaaggcctgtttggttcagaacctgccaacctggcctgggagtgctcggctaggaaggtcgatccagccgctgcgctcaaaatcaacgtccttggggagctgcctggcccaggcagtttatgcttgatacttctgtcttcttcacacatgttcaacaagactaatcatctcagtgaacaacaattcttgttctga

SEQ ID NO: 21126 - DNA, 339 bp, Zea mays
  Peptide Sequence Number=SeqID_62905
atggtcccggtcgagaaaatccccgaaccctggcctcccatcactagcgggccgtcaccgcccactctgcgcaacggcccagtcggagggtggcgtgcaggactgatatctggagctgcagcaatccttgggcgcttcctgctatacgtctggctgacggaggctgctgcacgagcagcagaagccataggcaagttatggttccatagattgtcagatgcaccaatagcttcatcccaccccaagatggagtccatttctttcggcgagttcagcttggctctggagaaggccctgggcaaacatggaagccagccgaagcaagttatcaagttctga

SEQ ID NO: 21127 - DNA, 177 bp, Zea mays
  Peptide Sequence Number=SeqID_62906
atggagaatgagcagggtgctttgccagagcctgcattaggatttaactgtgttggaggaaatgctgcttctctaatactcaagcttttgaagcaaggaggcaccatggtgacatatggtggaatgtccaagagacctgtcactgtccctacttcatatttcatttttaaggaataa

SEQ ID NO: 21128 - DNA, 774 bp, Zea mays
  Peptide Sequence Number=SeqID_62907
atggcgccgcagtcccggttgctgccgccgctgttgcaggttcttcgccgctgccgcgcatcgcgctcccacttctctaccgccccctctcttgtctcgccaccatccaaggccgtggtctacgacgagcatggcctgcccgagcaggtgctgaggctggtggacgtaccaccggcggagatcggtgaccgcgacgtctgcgtcaggatgatggctgcccccatcaacccctcggacatcaaccgcatcgagggcgtctaccccgtcaggcccccgctccccgccgccgtcggaggctacgagggcgtgggccaggtccacgccctcggccctgctgtcaccgcccggctgtcaccgggcgactgggtcataccgtccccgccatcgttcgggacctggcagacgtacattaccaagcatgagaacgtctggcacaaggtccgcagcgatgtacccatggagtacgctgccactatcaccgtcaacccattgaccgcacttaggatgctccaagactttgtaaaactcaatcctggtgatgccatagtccagaatggcgctaccagcattgttggccagtgtgttattcagcttgccaaagtacatggaatccacaccatcaacattataagggacaggcctgggtcagaggaagcaaaaaacaaactcaaacaacttggtgcagatgaggtgttcacagaaactcagctagacatgaagaatgtcaagagcttgctggaaggttgcgacctgacgttgacaaatgcagtttag

SEQ ID NO: 21129 - DNA, 1179 bp, Zea mays
  Peptide Sequence Number=SeqID_62908
atggcggcgagggtaccggcggccgatctcaaccagcacctctcctcgccgttcatcgcacggcgctgccacggcccaggtgaagccgccctcgaggcgcctctcagcgtacgcatcaaatccagaacgccgcggcgacgcgcggaatccacgaccacgaggatcctctgcaggtgctcacgatcactcctatcctacccgcgatgtgccgttccaatttgcgcccaaaaccaaacccgctcctcgaattccctgacaatcgcgagggctctgacacgatcgaaccgaaggggcgcagaggcgcagccgggctctggaggagggaggaggagggagccgctgcggcgcggggccgtcagcgcgcgcctcccggtgccggaccacatacgccggccgccctacgtcggcacggccgccgtcccggaggtgtgccccgaccggcaggtgcacgacggcgagagcatcatgcggatgctggacgcctgcgagctcgccgctcgggtgctgcaccatgccggggcgatggtcaagccctcggtgacgacggacgagatcgacagggctgtgcaccagatgatcgttgacgccggcgcctacccctcccctctcggatacggcgggttccccaagagcgtgtgcacgtcggtgaacgagtgcacctgccacggcatccccgactcacgcgagctacaggatggcgacattatcaacatcgacgttactgtctacttaaacggataccatggggacacctcgaggacgtacctgtgcggagaagtcgacgacgcaactaagcagctcgtgaaggtcactgaagagtgcatgatgcgcggcatatcagcctgcaggcacggcgccagtttcaaggaaatcggccagagaataagtgagcacgcggagaagtacggatacggcatcgaccccttcgtggggcacggcgttgggaggatgttccactgcgagcccatcatatggcatacctacgattacgagcccgggttcatggtcgcaggccagacattcaccgtagagccgacgctgtcgatggggagcacgcagtgcgtggtgtgggacgacgggtggacggccgtggcggcggacggcagcctcagcgcgcagttcgagcacaccgtgctggtcaccggcgacggcgcggaggtcctgaccgggttcccgtag

SEQ ID NO: 21130 - DNA, 306 bp, Zea mays
  Peptide Sequence Number=SeqID_62909
atggtgaggctgacaacaactaagtccagcctcaggcgcaacaggaagctccgcttcgcccgaccttgggcctcggcctccgaaggaggtctccgcctcgcccgaccccagggctcggcccccgcctcggcctcggaaggtggtctccgccttgcccgaccccatggctcggcctcaatctcgacctctggaaagaatcgcgtcctcgcccgaccccggcctcggcctcaggaggagtctccgcctcgcccgaccttgggctcgggccgaccacgccacgggggtacttcattaccctacccctaa

SEQ ID NO: 21131 - DNA, 390 bp, Zea mays
  Peptide Sequence Number=SeqID_62910
atgtgggtggaaggtggcgatgagggtgggacaacatcggcgatgggtgccggcaccgatagaaagcacatgccgagcacgttgacgagcgcgtgtatgatgctcaccagcaggagcagcgcggagggagacgacggcggaggccagcgcgaaagtgagcagcgagcctgcagctttcccctcacgatctccatctccattggttcgcctcgccacgaacaacgaaccccacgctctgcattgcagttcaccctggtgagcgtcgcctactacaacctgccggggctgcagggaaccagttctggctggtctcgtacaacatcttggcccaggtttatgtcaagagtacatgtttcctcattctccatccgtgtgactcaagcttcataa

SEQ ID NO: 21132 - DNA, 528 bp, Zea mays
  Peptide Sequence Number=SeqID_62911
atgagagtgaggctgacagcagctaagtccagcctcgggcgccataggaagctccgcctcgcccgacccccagggctcgggctcaacctcgacgctggacgatggactctacctcgcctgaccccagggctcggacacaacctcggcctcggaagacggtctccgcctcgcccgaccctagggctcgggctcaacctcgatgccggacgacggtctccgcctcgcccgaccccagggctcgggctcaacctcgacgctggacaacagactccgcctcgcccgaccccagggctcgggctcaacctcgacgctggacaacagactccgcctcgcccgacccccgagctcggacacagcctcggcctcggaagacggtctccgcctcgcccgacccaggggtcggactcagcctcgacctcggaagacggactcgacctcgacctcgacctcggaggagcctccgcctcgcccgacctagggctcggaccgaccacgtcacagggggagccatcattaccctacccctag

SEQ ID NO: 21133 - DNA, 561 bp, Zea mays
  Peptide Sequence Number=SeqID_62912
atggcacgacggcggcgagcggctttatctacggcggtgagcaaaggggagggctttggggtcccgaactccatcatcaccgacaatggcacccagttcactggaaagaagttcctggacttctgcgaggaccaccacatccgtgtggactgggtcgtcgtggctcaccccatgacgaatgggcaggtggagcgtgccaacggtatgcttctgcagggacttaaaccgaggatctacaacgacctcaacaagttcggcaagcgatggatgaaggaactaccctcggtggtctggagtctgaggacgacgccaagccgagccacgggtttctcgccgttctttctagtttatggggccgaggctatcttgcccacaaacttagaatacggttccccgaggacaagggacgcccgagggcgccacaagcttactcctccctgggaagggccgttcatcatcgccaagattttgaagcccgggacatacaagctggccaacgatcaaggcgaggtctacggcaacgcttggaacatccgacagctacgtcgcttttacccttaa

SEQ ID NO: 21134 - DNA, 540 bp, Zea mays
  Peptide Sequence Number=SeqID_62913
atggcccccccttgtgacgtggtcggtccgagccttgggtcgggcgaggcggaggctcctccgaggtcaaggtcgagtctatattccgaggttgaggtcgagtccgagccccgggtcgggcgaggcggagaccatcgtctgaggccaaggctgagtctgagccctggggtcgggcgaggcggagttcatcatcttccggagccgaggccgagtccgagccctggggtcgtgcgaggcggagttcgtcgtcttccggagccgaggccgagtccgagccctggggtcgagcgaggcggagttcgtcgtcttccggagccgaggccgagtccgagccctagggtcgggcgaggcggagttcgtcgtcttccggagctgaggcctagacgggggccgagccctagggtcgggcgaggcggagcttcctatggcgcccgaggccggacttggctgctgtcagcctcactctgtcgagtggcacagcagtcggagcgacgcaggcgacgctgtcttcttgtcaggccggtacgaccgtacgagtga

SEQ ID NO: 21135 - DNA, 1482 bp, Zea mays
  Peptide Sequence Number=SeqID_62914
atgacgccgacgccgacgccaaagctggctcccgcgaggcggcaaatcgctgaccgtgcgagcggtagtgcaggtgcagcggtgtcgcctccccgcttcggctcgggcctgggctttttcgcgtctgcttttgcggctctgcgcctggccgcctgctccttccccacccaagcaacgcagacggcggccaaattccaagatcctccctacctcgccctcgccttgctttatatgtgggctgcggccgagaagagatggattaaaaataatttctcaaatttgtccgcgcaacccccactctcttcctccctatccaccccgttggattgcctcagcggagcggtgcactctcgcaacgcaaacaagttctacctcgaggctttaccacacgtccacagtcatgttggcacacggttgccatatcgcgccgcggaccctcctctcttctgctccccaccatcaccgctgatccgccctcacctcccatcccccgccaatctcggcgtctgcgccctctcgccatcattgcgtgcgcgcccatgccccgcctccatagcccctttcatcggcgccagatccgcattcgcctccgcctccgcctcagatccctacggtgcgatgcgagggaacggcccatgccccacgccccgccccgtccacatgaacgcccctgcgtgcccccgccttccaccgaccgcgattgcagcagtaacgtgcccccatcctctccccgcgtgcaccgcacccatccctgtgccccttccaagctcggtgttgactaccattgatggcgcccagcctaccctcgccctcgcccctgcctcggcgtccccctccatgccatcctcgcccacacgcctcagcgcaggtcttcgaccaccgctacttcttccccccacacccagtcttcggatcttgcgcggacaggaagggcatgtgggtgtcgccgccgccgccgttctagggatggcagggcgggtagaggcgactggcaaggtcagctgtgtcggcaaggagcgcctcgtggttccctgcacgaactcgctagagtcacgctcgacagcctgggccaagttcatggcgatgtgggtagagtacttcctttgtgttgtattctccacgtttgtgccctcgccgagacagtcgatgtgcgctgtattccccgaatcctcgccccgcccgcccttgaagcaggccatcctggccgctattgctgttgcgacgactctctccgtcctattcatcttgtccttcaccgacacactgaccttgacggatacattgtccttcctggggtttcggacccgggacgacgataatagggacagcaaccggaggtacctttactggggaagtcacgaagactgccccggcaagcactgcggctcctgcgcgggcctcactgagattatgttgcctttgtgtttacttgcagggatcctctgctatgccctcaaggtggccctcttcctcgataggtaa

SEQ ID NO: 21136 - DNA, 624 bp, Zea mays
  Peptide Sequence Number=SeqID_62915
atggagcaggcgcgccatagggagcttcacagcgcgcggacgctagggaaccgcgaccatgggctggggcttgcggggaaccagggagggaggtcaaagctagggaagagagccgccatgggaaagggagaagagctgggcgcgacgctgggagatcaggccgggcgccaggaagaagaccgagcaggggcgccgcggtccgagcgccatggacaagcggagcgcgcaggggcgagctcgcgcggaaccggggagagggagagctcggcgagctatggggatgaccacgaggaggcgaggcacggcgaggcgcgtatcgaaagagctactgagattaaagacaacgacacgcgccatggcgaggcagagatgaaggatgagcacatgaagggaaacgacgatgctgtcgcacacagcgcgaaggtgaacgataacgacatggatagtgctggacatggccgaatccgttcagagcttcaaaatgacggcaaccagattgacatcgggactcgacggcattgcaacaccaccacaagacagaggcgaactcgcaacgacggcctagaacgggtgcggaggctgacagcatcgaactccgcaatgggcagcgaggctcgacgatga

SEQ ID NO: 21137 - DNA, 609 bp, Zea mays
  Peptide Sequence Number=SeqID_62916
atggcgacaggcgagagactgcggaataaggggggaaagggaaataaaggtgtgcaaggaccccatatgtacctagtccaggaggacgaccgggaactaggtgcctacgcgcggatctcggcaatcggtggaggtgggttgagccaatcagccgagacgagggatccctcagccaaactcacgcgcgcggttgagctaggttccgcgaagaagacgcaacagaacggaggggataagactgacgtcatggccccacgagtcagtggcgcggcgtgtgagcacgagggcgcatggcggctaggggaaccgagcttgaaggagcgccgaccatgggaccgagctcagcagggaaatctagcccagcgcaggaacacactatgggagcagaggagcgcgcgcgcaggaactaagctcgaagaggatgaacagagacgggagagactcgtccagcagccatggcgatcttgggagaccccgacgcgctgggaaatgggagggaagaggagcggcgccagggagcagggcacggcgctagaggaagatggggcggggatagagaagagctcgtctgggcggtggcttgaagatggaggcaagacacgcgcgtag

SEQ ID NO: 21138 - DNA, 345 bp, Zea mays
  Peptide Sequence Number=SeqID_62917
atggatggcaacgtggggagtagagatggcaacggtggggagctcatagtggcaggcgcgaccaaggtggaatcggcaccggcgaggtgggtggagagctcgattgggggcaccggctggggaagccatgatcatgggctggcgccatggcaaaaagaggggctcgacccaatgcccaaagccgaccagggaagggcgtcggtcaagccttgccgccctcctgtgcattgctgggcacctccagcgcccatggggagttcatgcagggcaaggacgccagggaagctcggatttgaggggaaacagggggagagtggccctggcgcggctgagcgtgtgtcctga

SEQ ID NO: 21139 - DNA, 363 bp, Zea mays
  Peptide Sequence Number=SeqID_62918
atgacgcgggcctttattgtgcagaatagcacgtcagcgaatttcaacggcgaggtacgggagcatgaccaaaatagggacatgggtgtggccacgatcatcggcgccgggaacccaaggcaggggaaaacggcctatcgggatcaccgggacgacaaacagaaccaagccgacgaggtggtgagcatgttggtcacgtcgcaggcgaggtgcaccgtgcacggcaagggagcttgtcgagatattttgagaattaagatttttagcgataaacaaagggtcgacatactatacggcaaacggctacacactctattttccgaatcacgaaacggagaatccgaggtttacgattttgactaa

SEQ ID NO: 21140 - DNA, 306 bp, Zea mays
  Peptide Sequence Number=SeqID_62919
atgggcagcaaattaaacgcagctcagctgggactagaaagaaactgggcggccagatccgaccgtaccgtggccctcggcggtgacgggaccgccggcggccggggcaccaccacgtacgccggctccgaaatggtaggtccaacgtatcatggacacgacgacgatgcgcctgcccgctcccggctccccccaccggaccaaacccgtgcgccttggcccgatcatctcgcgctgtcttccaagttccaagcacggctcggcaggatccgcgacgggatccacgcaaaagatcgcgccgattaa

SEQ ID NO: 21141 - DNA, 765 bp, Zea mays
  Peptide Sequence Number=SeqID_62920
atggctagtggaagagctctttcagaaagtttgacatcatctgatgaatcggttgatgagttgtttacaatatttgatgatgtgcgaatgactgctgtgaagataactgatgtgatcttgaactttattgtgagattaacctctgttttgataaggtccacttttagatacatggttcttgatcaggatggactcatttgggtcctactggatggaggcccatcacgtgctttttttgagacagatgtggatttgatgcaacaagatcttgctattctcaaggatctctttatagcagagggtcaaggtttaccaatagatatagttgaaaaggaggctagacaaactcaccagatattggacttatatatgctgaagaaaacttctgcagtaaccaacttgattagatccccacctactggtttccaggccgatgcagttattgatatgctgataaatgcaagtgaccaaatgcctcacgatcctgaagctacaaatgctcgaagaagatatgtacatgatgccaacacccttcttcgagttttgtgtcataagaaggataaaattgcctctacattcttgagaatccagtaccatcttccaaggtgttcagattatgatgatgttcctgtgaaggatgtgtcatctaaagtacctatcttttcagacatgctgaaaagaggtacctcattcaattggtctgagacagggcaacaaagctttagaattatgaagaagaaactgcaagaagctacttggcagtaa

SEQ ID NO: 21142 - DNA, 282 bp, Zea mays
  Peptide Sequence Number=SeqID_62921
atgggtttacggttacattccaaacgcccgtgtcagcagctgcgtggtgcaaaaatcaggaccagagtttcccacgcattgctttttaaggctcgggagacgacaacgcgagaggcgagctggcggagcgacggcgttgcgcgccttccggcgtgcgaggcaggcggcgagttggctgacgatgaagagcatgaggtggggtacagctcgggcagtggaggccgaggtgcgggctcgagcgagaaagagttaagcgagagaagagttgacacctgcgtctaa

SEQ ID NO: 21143 - DNA, 2052 bp, Zea mays
  Peptide Sequence Number=SeqID_62922
atggaggaggaagcgttctttgactcgcgagaggagctcacggcgtcgccggcgcccagcccgggccctgcattgccgtggtcgggaagcctcgacagtgtgtgtcagaggagggagcggttcatgagaagcatgggcctagagtgctgcccggctcccctgcaggccgatgccgtggccaccgtgggcgatgtcgacaaggaggaagaggctgtgccggaatttgggagatcgtggtcgcagtcggatgagaacgactgctccatgtcgagttggtccacggaggagacgaagagcttagaggatggtgtctcggatgacaattctgtcagtggatccagccgggatgatgctagcagcaaggtgagcaggagtttcagttcgttgtccttcatccagaggctcatgagccgcagtggtaagctctctggtgttcccaaggcggtcgagaggaggagaaacggatggcttcggaggctgggcttgaggtctggtatcctcgatcatggaggcgatgaggctagcaccagctcctcagagagtgagcaaaacaggggtggaaggtatgaaagggtcaaggtccgcagctacaggaagcggtcgaaagaactgtcagcagtttatcaaggccaagtgattaagggccatgatggtgccatcctggctatgaagtttagtccggatgggcagtttcttgctactggaggggaagatggagttgtcagggtctggggcgtcgcgcagtctgaggactgcaaaatcccaatggatgatccttcttgtgtttacctcaaagctcatcgccagagtggcttgggtcctgttgatgctgacaatgagaagaaatgcaaagttaagggcgtgaagcaatctgcagattctgcctgtgttgtgattccaacagtggtgttccagatctcaaagcaaccactgcatgagttccgtggtcactctggtgacgtactgagtctgtcatggtctaacaacaagcatctactgtcagcatcaacagacaaatctgttcgcttgtgggaaattggatctgcaaactgcatcactgtttttccgcacagcaactttgtgacttgtgtccagttgaatccaaccaatgagaatcaattcatcagtggatccatagatggcaaaatccgtgtgtgggatattcccagatgcagtgtcattgattgggtggatattagagacataataacagcggtttgctatcgacctgacggaaagggagcagtggtcggaaccattactggaaattgtcgattttatgatgcatcagataatctcctgaggtttgaaacacaagttgcactcagtggcaagaaaaagtcttctcttaaaagaatcactgctttcgagttctcaccaagcaacccaagtaaattaatggttacctctgctgactcgaaggttaaaattcttgaaggaaccactgtgactcagaattatagtggactccgtactgggtcttgccagtccttggcaacattcactcctgatgggcagcatatagtttgtgcaagcgaagactccaatatttatgtatggaaccatgaaaaccaagacgaggcttcactgaaacatgcgaaaaccatatggtcctcagagcgcttctactccaacaatgcagccatcgcaataccatggaatggcccgaaacccagaaacccggtctctctggcctcccaaatcttgtcaccacaaggagataacttgtggtgcatgagtaaggctgtcaagtgcagttcgagtcagagcgaagattctgctatcaacagttttgtgtcaaggtttgctcctggtattttcaatttgaatcaggagttctcctctgagtccacttgcagaagttcagcgacctggccagaggaaatcctgccgtctcgctcgattcgtgcaattctggacgagtcgcagtacaagttcctaaggaactgtttccagagcacaccaaactcgtggggtcaagtgatagtcactgcaggatgggatggcaagatcaggtcgttccagaactatggcttaccggcgcaccagtga

SEQ ID NO: 21144 - DNA, 765 bp, Zea mays
  Peptide Sequence Number=SeqID_62923
atgcatgtggccaggttgctggtgaggggcggtcgcggcgccggtgaccaggggagtggcggccgccaactagggagaggtggggcggtgtccgagccaaggagccggtggatgtcgaggatggaggggcccatgccggcgcggctcgcggttgtagtcctgctcgcacgatggcagctcgcccccacacacgggactctagtcgtgcgagtctgcgactacgccaggagagagggcaaaggggtggtcagcggctgggacgggagccacccccgggagggaaggatgagcctcccggggcagcagcgtggaacggtggcggctggacctgggcggggaggtggcggctgtgggctgtgggaggggtgggacgatgtccgagccaaggagccggtggacgtggaggggcccatgccgctcgccaccacacacgagactctagccgtgcgagtctgcgactacgccaggggagaggtggacgccgcgccgtggaggaaggaggcgacgacttcctcaacgccggcgaggacaggccgcgccgtggccggtgaaggggggggtcgcggccgcctgaggcgaggtgaccggctcgtcggggagctcgcacgcggcccggacgggagagaggtggtcggccgcgtgggagctgggcgtcgtgcgccatggacgaacgccactagcgcctgcgcgtggtcgggcgtgacatgcaacgcgcgcgccacggtcatcggcctcgacctctccggccgcaacctctcgaacctg

SEQ ID NO: 21145 - DNA, 216 bp, Zea mays
  Peptide Sequence Number=SeqID_62924
atgctggagctgtatcgccgcgaccggcgcaggctcctcagcttcctgctctccgccggcggtggaggcggccgggccctcgatctctcccgcgtcgacctcgacgccgtcagcgccgactacgcgctcgagtgcgtcgcctccggcgcccattttaatgcttcggaagccacgaggaggtacttcgacgagaggaggtaccctatcatgctgtaa

SEQ ID NO: 21146 - DNA, 399 bp, Zea mays
  Peptide Sequence Number=SeqID_62925
atggcccaccgcgcgcaggtgctggtcgaggccgagggtttgggcgcggagctaggacttctggctggctcacgggagacggagagggtgaaaactgaggagactggccctgcgactgcgagtgcggggtgcgcgcaaatcagcggagggacagagacagccggacccggagtcccggacagggactttggtgcggtgaacaaggccggacgtgtgaggcagagacgaggaattacagaccgcgtcggggccccgcgacgcagcaaaactggactaccggtccgcttcctcctttcgaaattcatttcctccggcggcgctcaaattttgcttgtcaatgtcatggttggatctagagattcctattcctatgtgttaaggagggctacgtatcattaa

SEQ ID NO: 21147 - DNA, 417 bp, Zea mays
  Peptide Sequence Number=SeqID_62926
atgggatcattccagagaacaggagttttgtcgtcctcgccacacttcgtcccactggacgaaacggacaacgcattcctcagcgtccagttcttcaacgtcttccccatcgggaagctccggcccgacctcaggcgtcataggaagctccgctccgcccgccccagggctcggacttgggctcagcccctgaagacggcgaactccgctccgcccgacccagggctcggactcgggctaagccccggaagacggcgaactccgctccgcccgacccagggctcggacttgggctcagtccctgaagacggcgaactccgctccgcccgacccagggctcggacttgggctcagcccctgaagacgacgaactccgctccgcccgacccagggctcggactcgggctcagcccctga

SEQ ID NO: 21148 - DNA, 246 bp, Zea mays
  Peptide Sequence Number=SeqID_62927
atggacgaagtcgaccaggcggccctcaccaacactaagaaatctaaggttgccttcgccgacaacatcccacaatcatccaccaaaacgtccctcctcatcaccgagcccgatggtgaaaactaccagcctcataaccaggaactaccaccatccctagaggcatgtatttacacttgcatctcagaaacccaagatgttgaaccattcaatccacggagtcacccctacaaggccaaaatatga

SEQ ID NO: 21149 - DNA, 2238 bp, Zea mays
  Peptide Sequence Number=SeqID_62928
atgtattcggccaaccactggggcggctcgttcgagatcgccgatggcgcggcggaggacgaccacagccgcaacatggacctggaccgcggcgcgctctcggcgcggcagcaccacgagctggacgagacccagcagagctggctgctgggcccgccggaggccaagaagaaggacaagtacgtggacctcggttgcatcgtcgtcaagcgcaagatgctctggtgggccttgtggtgcgtcgtcgccgctttcgtcctcatcggcctccccatcatcatcgccaagtccatcccgcacaagaagccaggcccgccgccgccagatcagtacacagatgcgctgcacaaggcgctcctcttcttcaatgcccagaaatccggccaccttcccaagaacaatggcatcaagtggcgcgggaactctggcctgtcagacggctccgacgccaaggacgtcaagggtggcctcgtcggcggctactacgacgctggcgacaacatcaagttccacttcccgatggccttctccatgacgctgctgagctggtcggtgatcgagtacagcgccaagtacaaggccatgggggagtatgaccatgtcagggagctcatcaagtggggcaccgactatctgctgctcaccttcaactcatctgcttccaccatcgacaagttatacgctcaggtgggtactgctaagatcaacggcagccggccggacgaccattactgctggaaccggccggaggacatggcatatcctcgcccttcactgtccgtgagctccgcccctgatctgggtggcgaggtcgccgctgccctggcggccgcctccatcgtgttccgcgacaacgccacctactccaagaagctcagccagggcgcggccaccgtgtacaagttcgcgcggcagtcgggtcggcgcaccccctactcgctccgtcagccggacatcgagtactactacaactccaccagctactgggacgagtacatgtggagcgcggcgtggatgtactacgccacgggcaacaacagctacctcaccttcgccaccgacccgcggctgcccaagaacgccaaggccttcttcaacatcctcgacttctccgagtcgctcgccggctaccacaacgccaccagcctcaacatgtgcatgtacttcccgcgcttcgccgccttcaacttcaccaagggcgggatggcgctcttcaaccacggcagggggcagccgctgcagtacgtcgtcgccaactccttcatcgctgcgctctacgccgactacatggaggccgtcaacgtccccggctggtactgcggtccaaacttcatgaccaccaacgacctccgtgagttcgccaggtctcagatcaactacattctcggtgacaaccccaagaagatgagctacgtggttgggttcggcagcaagtacccacggcacgtgcaccaccgtggcgcgtccacgccgcacaacggcgtcaagtactcgtgcaccggcggctacaagtggcgcgacagcaagaaagcggaccccaacctgctggggggcgccatggtcggcgggcccgacaagaacgacggcttcaaggactcgcgcaacaccttcgggcagaacgagccgacgctggtaggcaacgccggcctcgtcgcggccctggtggctctcaccagcagcggcaggggagtcggcgtaaccgccgtcgacaagaacaccatgttctccgccgtgccgcccaatgttccccgccgcgccgccaccaccgtcatcatggaagccatgacgaccgtgaacattcatggtcatacgattttttgtgatcgatcactccccgcccgaggaccaactggatcctgcgctacccagctccctggtgtcggcgccgatgtctgggccctggtgtcagctcccacgcaaccgctgcaatacatcgtgcccatctcaccacacgccgacatgtgggcccaactcgccaaccccctcctccattgccacgtgcacgaagcggacttcactgtaaccatcgtgcggggagcttgggctcaggctagcgtaaccacgatttccccaaaccgacctctagcgacaataaaagggtggagtcgagtccttttctcccatttctcttcgccccgtagcaacagacgacaggtgtcacacttggatttaaggaactcgggcgcgaacataaacaacatatgtgctgggaccaagtcttacacatatgatgaatag

SEQ ID NO: 21150 - DNA, 1359 bp, Zea mays
  Peptide Sequence Number=SeqID_62929
atgaagccgggcggcaccctcaagtcccggcgaggcagtgccggggacgaggaggaggcctacatcgtcggcttcccggtgaccccgcgcaaagactactgctggtcgtcgtggctgctcaaggccgtggtggtgctggtgatgctgatggccggcgtgttcatcgggctgtcggccaacgtcaacgtgtcgcgctactactactacagcagcattgggtcctcgtcacccttgttatcttcttcctcttccctgcaggccggcagcagtggtaataataatggcgatgtcgtggctgcttccaccgcgagccgcagctgcaggaataataatactaagaagaagaggatccagcagaaggtgacggcggcggtgcttctggacttccgtggtttcgtggatcccggcccgacatggggccactcgatgtcggaccctgagctgttctggcgggcgtccatggcgccgcgcgtggaggagtacccgttccagcgcgtgcccaaggtggcgttcctcttcctgacgcgcgggccgctgccgttcgcgccgctgtgggagcgcttcttccacggccacgaggggctctactcggtgtacgtgcacgcgctgccaggctacgcagggcgctaccggccgtcttcgccgttccacgggcggcagatcccgagcggggaggtgtcgtggggctccatcacgctggtggacgcggagaagcggctgctggcgaacgcgctgctggactggtccaaccagcgattcgtgctggtgtccgagagctgcgtgccggtgttcaacttccggacggtgtacgagtacctggtgaactcggcgatgagctacgtggagtcctacaacatcgatgtgccccagtgcgcggggcggtacaacccgcagatggcgccggaggtgctggaggagcactggcgcaagggctccgagtggttcgagatgagccgggacctggccgtcgacgtggtggcggaccagcgctactacgcgctgttccggcgccactgcacgccgtcgtgctacccggacgagcactacatcccgacgttcctgcacctgcggcacggcgcgcgcaacgccaaccggacggtcacctgggtggactggtcgcgagggggggccgcacccggcgcgcttcggcaaggctgccaccacggccgacctcatggccgccatccggagcaacggcacgctgtgcctctacaacggcaagcccaccacggtctgctacctcttcgccaggaagttcgcgcccagcgcgctgcccatgctgctcaacttcagcaacacgctgctagacttctgaattttctcattctgttttttttcccttttctactgagtgtctag

SEQ ID NO: 21151 - DNA, 348 bp, Zea mays
  Peptide Sequence Number=SeqID_62930
atggccgtcgctgcccgctaccgtacctggcctgctgctgattgcttccacgtacgcgccactcgatctgtcgccggccggtggaacaagcagacggcgaccgaaatgcagggttgtaggcctgtagggacatcgtcggccaccaggaggagaggtaaggggacattaggtcgccttgacacaaccccttttacattcaaaccagggacccaagatgacgttgttaacgacgacaatagttctagagatcgaaagaagcctgattgtctaggagatccaaagctcaaaggggacacgtacaagggtgctgagccccaacatatgggcccaggggcaaaacgaaagtaa

SEQ ID NO: 21152 - DNA, 471 bp, Zea mays
  Peptide Sequence Number=SeqID_62931
atggtgggtgaaggcgacctcggtgacgatctcaggggtgcaggagatggacgaagatgctcggtccacacacgccggcgggaaccgaagcacgacaacgtcgacgacggactttcatggttcctccgagctcaagcgtgggctccgggttctcggctcacgacagagaagcaaggactgggcacggtttggacaatgtggaacggtgggagcgtgaccatgagctcatctcgcgtcggccatggtggcttttcatggcgaggaggagatgaggaagacgagtggagatcgaccaagcaggtgcaaagcgagagcagagggaggcgagtgcgatggcgtgctcggtcgaacgaggcaggcgctgctgtgcgcttgcccatgcgcggtgacaaggcacgacgtgtagcagggcatgacgaccatgcgtccgggatttctagtggagactatttcttggtaaaaaatgcgtag

SEQ ID NO: 21153 - DNA, 303 bp, Zea mays
  Peptide Sequence Number=SeqID_62932
atggctaaggatgctaaggtcaccatcaccgaccaagaggatctggtggtggatctatccactgagttggtggagaaggaccctcaaactaagcaaatgagtgcccaaatcagggagcttgaagagcaggtggaagaaaggaaccacaccatcgaggagatccatcaggacatggaagaagacgaggacatggatatcgagggggaggatcccgagccagcttctagcttggacaccactagcatagctcgctctggggggccaccttgtccagagtctagcattgcctcacatgctcgctag

SEQ ID NO: 21154 - DNA, 273 bp, Zea mays
  Peptide Sequence Number=SeqID_62933
atgtggggtgcttacgacgatgactttgaagaggttggcttccttgggcgggagcgaggaccccatggctacgacagggtcagcgcggcggcgcgaaccctagggcggggcaaggaaggggaaggagggagggttttggagtcgcaaggcggaaggtgggccgtggtgggtgtggcaacatcaaacaccatggagttcattgcgtcaatgtggtctcagaaacgacctaatacttgcaagagtcaagaacgttgtatcgtgtttgggtcgtag

SEQ ID NO: 21155 - DNA, 333 bp, Zea mays
  Peptide Sequence Number=SeqID_62934
atggatgtcgacgaagttcctgaaaggatctatccgaagaatgcttgtagagttgaggtcaatgtcaatgcatacttcagctttaaagatggaaaaaagaaagatagtcagcttattgacttactaagggcatctcaactagtgaagttcctaatgatagtgagcagtgaacatgatgtcgaggacatacctagtgcaacgaatgttgttgaggatatgcaaattggggaatttaaatgggcagaagtagcagaatatggagaaacaactgcaggtccactgatggttgaagaggacgaaaaggaacacttcatgactgttggatgtgattga

SEQ ID NO: 21156 - DNA, 162 bp, Zea mays
  Peptide Sequence Number=SeqID_62935
atggagagggtaagatttcctggcttcgtcgggcatacaccaaagcgagcaagaaaatattaccttggtgattctgattaccccaacagaaagggctaccttgccccatacaaggacacaagtaccacattacagaatggcaacatggcagaaatcctatag

SEQ ID NO: 21157 - DNA, 678 bp, Zea mays
  Peptide Sequence Number=SeqID_62936
atggcgccgttcgcgccactacctcatcagtacaacaacacctgcaagcacctcaacacgacgatggccgccacttccggcaacaacaacagcaacggcagcaccgctaccgcggctggcggtgcggcggccgacggcatggccgcctacctccagcacctgcagcaggcgggcgccgaggcggcggccaagagcggcggcggcggcggcgcggcgcgcggggagcagtgcccgcggtgcgcgtcgcgcgacaccaagttctgctactactacaactacaaacacggacagggacagggacagggacagagcggcggcctcctcggctcactgttcgcgctcggcgccgcgggcgcggggccgccgctgctcgaaggccgcggcgcagggtcgtcgttcgacttcgacctcgggctcggactcccgacgggggccttacacctgggcgcggccggacaaatgcaaggcctcgggctcatggggggaggaggtgcctccgcagccgggtcgtcgtccttcctctggcccgccgcggggctgctggtggacaacgacagcgtggacacgtggaagatgccaggcgccgctgcgggttcaatgtggccagacttctcttttccggcggcagcggcgccacaaaccgccggattgcttcatggcggaggccacctgatgtga

SEQ ID NO: 21158 - DNA, 144 bp, Zea mays
  Peptide Sequence Number=SeqID_62937
atggccgtggcccctgggccctggcccccctgccccgcgttttgcatggcaatgccgaccgattctacccgtcactatgggggtgtttggttgcccctgctaaaatttagcctgggtcacatcaagcgtttgactttcaaatag

SEQ ID NO: 21159 - DNA, 2397 bp, Zea mays
  Peptide Sequence Number=SeqID_62938
atgaacactgtgtgtgaagtttgtggggatattggttacagacaacttctgctttgttgcagagactgcaagcgttgtgctgtgcaccaatactgtttggacaaagttgtctacgaggcatcattaataaaatggttctgttatgaatgcctacaaaggcgtggtgaagttactcgcatcagttctctagagaagttgtcaagtgaaagaccactaagtcaggtccattctcgttctccagtacagcagctaattaccaagagtgtagagtcagtaagggatgcagggccttggagagatcggaaaaatgaatcaattgcgactaaatatccatctctcaacagaacatatccttcaattaagaagcacactaaaaagaagccgattgtgaaaccaatgggtaactgcacaaatagaaaagtgcgaatggctaaagttaccacccatacaagtgccgaagcgtcacgttcttgtgaaaccattgggacagaatcatctaagagcaaccatgggaagaaccagcaggtggaccatgcaaaccctgtcgcattgaacactgagcagtctttccctttgattgtgaatagcttgggtacattgggagataatcaccagtatcacctcttagaaacaacagaagggttggcttgcaaattcaagaaagttccacaatcactcgcagcaccattgaaaagattagagaagagagacaatgtggttttgggatcaaataatttagggtcatcttgtttcacagctgaccttggaagctcggttcttggaaaaagtggagacaaatcgaatagaatgaaggatattggtgcaaacttgtcttccaaacacaatgatcatggcaatcaggcaaatcaacacactttagttggctcgaagaacatggaaggcaagtctgtaaaggctaaacatactgtggttgatgcacataaaaacacgtcttggacagtggactcactgataaacgtcaaggacaagtctgaagtatatggtgatagtaatagggatatcttaaatgatgtcacagtccagctggatcatagggctagcaatgagttgctgccgagaagcacggccaccaatataccacagctagccactctggaaaacgatgttgtggacacagtcatgccatattcacccaatggtggttgtgaggaatcattttcctgccctggcataaaaaacaccccaagtgttcgagaaagaagtgtagatcccattaatatttcaagtgattctcatgataccatagaagcatccgaaagcagtgaaagattcatggaatgccaaaaagctagcttgtgtcgtcgcaggaaaactgtgaagatggctatggtgtcctcatcatctgaggagtcaggagaagacactatctctgaaaacgtatctttggggtatgttttggcatgtagaagttctctatctaaagcacaaaagaagagagtaacgaagcttattcaggaaattcaacctgaattcacagtttttatatcaataatgcggatgagcaatgtgaaactcccaggtcctcttctgggaattaccaaggaatatgcaattgcacatttcccagataaaaccacaaatgtcactcttgagacgcctggcaagagcaagaagtggcatcccaaattctacaaaagagatgaaagtagaaagaacttgcttatgggacaatggctagactttgtccgtgacaatcatgtgcaggagggagatatctgcctctttttaccgacaaaagatgagataagacacacatttatggtctatattcttcatgaaacaacccattctagatgtggggctggctttcaaagggttggcccatgccttggtggtgcatccagtgcaaagatggcttcagaagttcatattgaggatgaaccaaccgctggagaacatgtttcgtcggacagtgatatgccagaaaattctcatgaacctctggagagcggagactcggatgatccatttgaacctccatactttgtaccatgcaggagtcctctatctaaatcccaaaagagaatggttgagcagcgagtgcgagctatccgatctgaagttcccatttgtgtggcagtaatgaagaacaataacgttggcattgctcagcgttggatgctagaattatgttcacgatatgcttcggtatatctcccaactaaagggcaaaacatattgctccagtgcaaggggaagacgtgggaagccaaaatgatgtttcataatggcagaaggtggtttcttaatggaggttggcccgattttgctcgtggcaatggcctgcgcgtcggtgacatgtgtctattcgaactgaagaagaaaaagagtacgcttaccatggcagtccatatcattcgcaaggagcagttttag

SEQ ID NO: 21160 - DNA, 1047 bp, Zea mays
  Peptide Sequence Number=SeqID_62939
atggacgacgctttcgtgcaggccatcgaataccggcctgtgtcgcccatcccccaggccaccggcattccggtcgtcgacctgtcacccctagctcgcatgccgccatcgccaggcgccatgaacgcgctggcggccggggtgggcgcggcgtgccgggattggggcttcttcctggcggtgggccacggcgtgccggacgcgacggtggcgcgggcggtggaggccgggcgggcgttcttcgcgctgccgccggagcgcaaggcggccgtgcggcgcaccgagcaggcgccgctcggttactacgacgccgagcacaccaagaacgtccgggactggaaggaggtgttcgacgttttcccgcacgagccgcggtcgcttgccggggcggccgacgacgagctggtgttcgtgaacaagtggccggacgacagcgaactgccggggttccgagcggcgctcgaggagtatgcggcggcgatggaggagttggccctaaagctgctggagctgatcgctcggagcctgcacctgagacctgaccgcctgcacggcttcttcggagacgaccagacaacgtacatgcgggtcaaccggtaccctccctgcccgaggcccgacctcgcgctcggcctcggccgccacaaggacagcggcgccctgaccatcctgctccaggacgacgacgtcggcgggctcgaagtgcggaggcgaaccgacggcgagtgggtgcgcgtggagcctgttcgtggctcgttcgtcgtcaacgtcggcgacatcgttcaggtctggagcaacgacaggtacgagagcgtggaacaccgggcgtcggtgaactcggagaaggagaggttctccatcccctacttcttcaacccggctatggccaccctggtggagccgttggaggagatggtgagcgaggagaacccggcaaggtacgcctcgtacagttggggcgacttcttcagaaccaggaggagaagcaacttcaggaagctggacgtcgacaacattcagatcgcgcaactcagaaaggacaaatga

SEQ ID NO: 21161 - DNA, 735 bp, Zea mays
  Peptide Sequence Number=SeqID_62940
atggatgagcccgagaaagtgaggggcagggaggatgcggcgtcgggccacgaggctggcggcgccgaggaggccggggatgggttccagctcgtgatccatggcaagaagaagaaagagggcggccagcggccaggactgcgggactgctggctctggctttggcgccgggccagtgcgggcgttgaccagggagaagggagccgcgccggtgccgggggccaagtgaatcataggcatgttgatatgggagaattagtatgcatgttggtattttcaaagctgaaggaaaacctacctgttgaacagttcgttgacagaaatgttcctgacagagaaccagtgaagccagctgatttagaggatacaccatttacgctggttcaagatcacaaaggcttaacagaattagctaagaagttgaagagcgtaactgaatttgctgtagatctggagcataatcaatataggtcatttcagggcttcacctgcttgatgcagatttcaacaagaacagaagactttattgtggacactcttaagctacgcctatacattggtctctatttgcaagagcctttcaaagatccaacaaagagaaaggtaatgcatggtgcggatcgtgatataatgtggctccagcgggacttccacatctatgtgtgcaatctttttgacacaggacaattatatataagtggctttacttctgcccagtccagcggaaatgtttga

SEQ ID NO: 21162 - DNA, 1023 bp, Zea mays
  Peptide Sequence Number=SeqID_62941
atggcgttcacgacgctcggcggctgtggggcgcaggcttcagtgcggttggctccccagaatggaatccttggatctaattcgaagccattcgcgggcatcatactcaagaaacctcagcagattgttcggattctagcgaaccaccctcagtttcatataaaagtgatgactgcagatagaaaagctggcgagcaatttggatcagtatttcctcacttgataacacaggaaattatcaaaagcttaccccgacacttaaagattgttgatctctcagcggacttccgactacgcgacatcaatgagtatgctgagtggtatggacattcccacagggcaccggaacttcagggggaagctgtgtatggtttgaccgaacttaaacgagatgacataagaaatgcacgcctggtagcaaatccagggtgttatcccacatctattcaacttccgctcgttcctttggtaaaggcaaaactgatcaagctaaccaacattattattgatgcaaaatctggagtcagtggtgcaggacgtggggctaaggaagcaaatctttacactgaaatcgctgagggtatccatgcttatgggataacaagccatcggcatgtgcctgagattgagcaaggacttacagatgctgctgaatcaaaagttactatcagctttactccacatttgatgtgtatgaaacgtgggatgcaatctactgtgtatgttgaattggcatctggagtgactcccagggatttgtatgaacacctaaagtctacttacgagaatgaagaatttgtcaagctgttacatggtagcaatgttccttgcacaagccatgttgtgggatcaaattactgcttcatgaatgtctatgaggatagaatacctggaagggccatcatcatctctgtcatagataatcttgtgaagggagcatctggtcaggctttgcaaaatcttaatctgatgatgggactgcctgagaatatggggctgcaataccagcccctgttcccttga

SEQ ID NO: 21163 - DNA, 465 bp, Zea mays
  Peptide Sequence Number=SeqID_62942
atggacatactgcaaacctttatcgttcaaagtaataaaggcagcaccggacagtccggtgaccgtccgaccgtactagccactcttgggctcggccaggtttcctcggctaaaaatcaccgaactgtctggcgtgaagacaaccatcggctctctaccacgacagccacaaccaacgttcagatggtgcaccagatagttcggtgcccccatgggacagtccggtgcccacctgaaatggaaagtgatcaatcagggatcttttggcagttgcattgtgcagtgtctggtgcgccaccggacaatatggtgcacctgcagacaaggaaggctgggagcttccaaatgaagctccagtggctcctaggtcccttggggctagaaaaggaccccctaggtgtcatggagcagtacccaagcatactggaactccaaacctctgcgaccacactgttgatttgttag

SEQ ID NO: 21164 - DNA, 453 bp, Zea mays
  Peptide Sequence Number=SeqID_62943
atggacatgccattgatggcgttaatggccgccgaccgcctctccctctccccctccttctctacaaaagggcagccgagccctcctctcttcctctcccttgcacatcgccggagccattccggaccgtccaccgccaccgtccgcgtcctcccctgcagtgcccaagctcgtcgagaccctgcccgcctcgccggacggttcaagccctgcccagactgtctgcggccgcgccgagtcccgccgagccacgtcgagccctcgcctcgcaacgcgcacccgcccggactgtctgtcgtctgcgcccgcctcggccgagccctgttcgccaccgcgcctcaccggaccgtccgccccgttcgccggactatccgccactgttctccaccgtccaccaccatccgttcgtctaaggttgaagacaacccaaatttggatttatttttgagttag

SEQ ID NO: 21165 - DNA, 432 bp, Zea mays
  Peptide Sequence Number=SeqID_62944
atggctcttggggcagctcggcacggcgctagggggctctggttcgctagacgacgagaactcgcggcggcagcggactccgacctgcacaggggagaggttgagcgcggaccaggcagaggagtcgaggaaaggggaagccatcgcgagttcccgatgcacaaagctcaggcgaagctcaccatggccatggcgctggcagaagcccagcgacaacggcggaacggaggggcaacggtggtagcggcgctgcaagctggggtaatcgaagatgagcgtggtgttgatctccctactatgcacacatcagagtggcctgggcctccaaaccctcatgttggacaaaatagggacatcctagaaattgagaagttaattgatgcttactctttcattcagagcaaggaaacatgtcccttcgcaacgacctga

SEQ ID NO: 21166 - DNA, 231 bp, Zea mays
  Peptide Sequence Number=SeqID_62945
atggccaggattagatctggtgggcgggcgcgcaggcgcgagcgcctgacaggtgggcccgaggtgggtcaaggcactgacacgcgggacccatgggtcagcggtgcgctgagggcacggggcgcgctggccactagatctcagatcaatggccctagttccacgaaccacgcgaaccgttattcatacatccaggccatcagattaacgttggacgagtgcattcactag

SEQ ID NO: 21167 - DNA, 591 bp, Zea mays
  Peptide Sequence Number=SeqID_62946
atgggcaacttcgaggacgcggaggggttgctgctcgagtcactgaacaaggacgccaaggatactgagactctcgccaacctcacggtgtgcagcctgaacctggggaaacctgcaacgcgctacctcaaccagctgaagctcgcacacccggacctggtgaagcgaatgtcctccgctgcagagagcttcgacagagcctgccaagcaatggggagcagtggtaggagcgaggccgccgcttccgatcccgggcatcacgacgctggagaacgtacctgcgcgcaggggggttgcagatccgaagacgtgtgggagacgaaggggcggcgccggactgatctgagccgccaccacctctgccagccgaagtggagcacttcttctctaggagctcgtcgaggttcatctgctgctgcctacactcctggctgcagaaggccacctcaccatgtagatggtgtcacggccatggtcgaggcggcacttggggagcacgcaggccttgaggaaggttgtcgtctatccgatggggatctgcgcgggagggcgagggccgcggcgattccaccttcaccgtggcgagattag

SEQ ID NO: 21168 - DNA, 327 bp, Zea mays
  Peptide Sequence Number=SeqID_62947
atgacagttggcacgctaggtagggggagtgctattgtactaagatacgctttccacttcgatggcccaatcatcaacattcgccagaggcacactaggacaaaggtggtggaagccccgtcctttaccctggcggcggtcgtcgatcgccaaccgacatccattctcggcctgctcgaggatgactcgagccacggttcgaccagggtcaactccgatgccgaggaggcgctagaaagggcctgcttcgtggcaatggccccgctatacaaaaatggcaggagagacaaggaggcccccaatcaagaggaggagtaccaacgatag

SEQ ID NO: 21169 - DNA, 729 bp, Zea mays
  Peptide Sequence Number=SeqID_62948
atggcgaactcgaccgtgggtaccacgccggcgcaggagcaccagagagcgcgggacatggcgaggcaggctaacggcggtgcggatcaactccgagcttaccaaggcaacagatgcgatagggactcaacggcggtcgcgaaacagtggcggtcttcgggtgttgcactcgtgcagaaactcgaccacatctacgacgatgtcgagtggaggcaccttgaagccaaaaggcctcgaccaaggaaggtgtctgaacagctcgctgaaagcattgacgacacaaagtatttcctcaaccccgcacaaaacatggtcgtagccatgatgctccgatccatcctagagttgggcgagccagaagcaaagacgatgtatatgaacctccgcaacctcgtggagagggccgtggtacaacaagccgagattgatcgacagttcaccctcaacaccaagagccacgggcccgcaaatggcctcatcctggagcatgagggcacaacccacccggtccacatggatgagcgacctcatgggggtcacctcggggacatccaccatgcccgacgcatcctcaataacaggcgattacagcaggaggaagttgagcagccgcgcgagaggtggtgcgagcacagtccaagctcatcggggtgggccaagcgctttcaggagggaaataaaaaaagtgcagttccccccgaaggtgcgtgcgccagccaacatttctaa

SEQ ID NO: 21170 - DNA, 702 bp, Zea mays
  Peptide Sequence Number=SeqID_62949
atggagaggacgaagggagaccgctcgggcgtggtcttcgttggtgtagcaagctacgtggagcgtgtcgttgccgagagcgcattccatggcagtggcctggcattggggcaaatgatctctagcttcgatgagatcgacgctattgggatcatcgaagatacagggtttgaggcaccaaatcgattgggtccgacattccttacaaagactatctgctatgtgttcccacatgagccttccctcgcctttctcctgcctagctacgcttcgatccacacgcgctttgcgatgtccgtagcattagacaacacattcgtcttgatgccatgttcctcagagtggtgctccgagagaccgaccatcatgcagcaccttggtgaggtgcttagagcctacgactggctcgatgacgagagggtacaccttgcgatgtgggatgctattgaggtatcatggaactaccaactctattgcatggacttctcaatgagcggccgtgatgcggcgcttatcgccataggcctcggccccaccgaagatcatgaggcaccctgttggttcagggaaatctttagcggggagctcctactttgttggttttgtcggctcctccagccttgccttcttggcgggaggtttggagataaagcgcttcaagagctcgcactctcgaagcttgtgcctgatggggaagcctag

SEQ ID NO: 21171 - DNA, 747 bp, Zea mays
  Peptide Sequence Number=SeqID_62950
atggatggctttggtgatgatggcttgagggatttgttcccacggtcggatcagattgtcggcctcggtggatacgacttcttctcccagagcgagtcaagcatcccccatggtgatccccatggctttcaggcactggatctcaattcacaagtgcaagagttcccagatatgtcgatgtatacatgtattatcgaaggcagtggcgctcgagtcactggaggagggcgtgcctttagtgctgccggattgcgcgctccacgccagggcacccgtggaggagggcggaccgtgattgccatcgggttgcgcgtgcctcgcaacagcacccgaggaggaggccgtggtcgatccatgcccgctagggctgacagcgggggagctcgtgcaggaaccatggccgtgggtgctgctggcggcactagttcgtgtggatctatggtcttcggtgttgtaggccgtggcagccgatccatgtctgctagtgctgcaagcgttggagtcgtgggtcgtggtggtcgacgggtagcaagtggcagggctcaagatgttgcgggacaagaaaccatcaaccttgatggcgaacaagaaggcgctgatgaaggttttgcaccggaccccaagactccagaatggaagaagctaaaatatggttcaccagactacatagatgagctagatagaggaaatgttccaggatattgttgtagatgggttcagctcctacattccagggcaagaatttga

SEQ ID NO: 21172 - DNA, 408 bp, Zea mays
  Peptide Sequence Number=SeqID_62951
atgggcaagaacaacaaacgcaagcgtgagccgactcctccatcagaggacttcagtgattcggagtactcagaggaggagttctcctctgagtccgaggggtctccaactcccatccctctgcgtgagtcgtctgacgattcagacgactcccaagggcttgcggcggaggtctggacttacatccgggccgtcgagcgctccgggctcgagggctcggatgagtcggagtactcctcggacgaggaggactcgtccgagggcagtggcggcgatggcgacgacgacgacgatgacgacgacgaaggcggtggcggcaacggtgacggcggcggcaggggcggcagcggcggcagcaaggatggcgacggcggcagcagcaggggcagcaacagggccagtggctag

SEQ ID NO: 21173 - DNA, 300 bp, Zea mays
  Peptide Sequence Number=SeqID_62952
atggcgacgcgcgcgggcaggctagctaatcctggaatggagcgtgtttttaatgtgtgcactgacgcgcgcgggccggcgaccgagatcctgcgcgcgcactgtgggacgtgtcgagaaaaagatcctgtgttcctgagattcatcggtcagagagagcataggagaaagacctctagattaccgggaacctctgatcaacgggagggtaagagaatcgtctatcctgtatcttcggactcgtatcagagagggagaagctcaaaagatacgaaggttgacacagcgccgaagctgtga

SEQ ID NO: 21174 - DNA, 1443 bp, Zea mays
  Peptide Sequence Number=SeqID_62953
atgatgaacctatcggctgccgctgccgccgccgccaacgcctgcgatgagttcccctacgcgccgcccaacgcggccgctcccccttctctgttcccaatcatggagcaggagagcagcatccacagggagcatcagcagcagcagctgggcctgggctacaaccccgagcccaactccctggcactgctgcccccgtccgacgccgcccaccacaccactatcgccgccggcccccacgacatcctccagttctaccctgcttccgcctcgcactacctcgccgcctccaacccctacggccacttcgccgggagctcctccttccaccagtcgtcgtcgtcgtcgtcgtcgtactactaccctccgccgccgcaggccgcgcccgagtactacttccccaccctcgtcagctccgccgaggagaacatggccagcttcgccgccacgcagctcggcctcaacctcggctaccgcacctacttcccgccgagaggcgggtacacgtacggccaccacccgccgcgctgccaggccgagggctgcaaggccgacctctccggcgccaagcgctaccaccgccgccacaaggtgtgcgaccaccactccaaggcgccggtcgtcgtcaccgccggaggcatgcaccagaggttctgccagcagtgcagcagtttatttcttcctcggcattactctttttcacttacttcctccttgccattactcgtttccatttatttccttgacttctgcgatcccttggcattttcgatcgagcagctagctattacttcaaacagtgaggtggctgtacaatgcaagggtatacaggggcctctcccaagaatgattcaccacattgagacacaccatatgagtcagctgcaaaactccaagctgtccgcattgcagggaagaacagtattccatctgctggatgagttcgacgatgccaagaagagctgtaggaaacggctagcggaccacaaccggcgccgacgcaagtcaaagccatcggatgctgatgccggagacaagaaaagagcacatgcgaacaaagcagctcctgctaaagacaaagcaggaagtagcagcaagcacatgcacattgcagggttgggtacacagatcctggggagcacactcttgtccaaagaacaagatcaagccatggatcttggagaagtggtgaaagaagcagtggatcccaaggggaaggcatcaatgctacagcatcacggcattcatcagcaacaacatcacggaatccatcagcaacatcacggcttccccttccattcatcgtcagcaggctctagtgacaccacatcaaatatagctcaagtgcaagagccaagcttagggttccaccatcagcaccatcaacacagcaacgtcttgcagctcggtcaggctatgtttgatctcgacttcgatcactag

SEQ ID NO: 21175 - DNA, 372 bp, Zea mays
  Peptide Sequence Number=SeqID_62954
atgggccctcgtggtagtgtcgagactcctaggcagaaggggttgaactttcagggccctgaccattttcccttcaccatcaaggacgaagtcaaggttcccaaaatggtggggacaaggtgggggtcggccgctggtagcttcctcgagaaggagctactatgctatggcaaaaccgactgccacattgtccgtatgcgtcttggtcacctagttgtctctactcgtgctcgttatgctggacaacatgggcggtgtggactcatggcattatcattgctacctctgcgccagtcgacccttagcatccgtagcctaggtctcggcgtggctcatcgtgttacgaactttgcagattgcctacgcatttag

SEQ ID NO: 21176 - DNA, 135 bp, Zea mays
  Peptide Sequence Number=SeqID_62955
atggatgagtaccccgctgtcgcatcctatcgtaggaagagaagaaaccctggcaccgttgatcggaagggcaatggtggagatcatatctgggatatcgattcggccaaggtgaatccgtccagacaattttaa

SEQ ID NO: 21177 - DNA, 3756 bp, Zea mays
  Peptide Sequence Number=SeqID_62956
atgggagagtgcggaggcgcgagtgcgaagcggcgatgtaggccgctaagcaggagcagcaacatagtaggaaacacatggcatcgtggtggtgagggaggatggagcgaaataggagcgaagcacctccccctcgttgctggcggccacgagatcgtgacccgcgagcctttgctgaacttcagggttcctgtaccggaagatcttgcccgctacgagaatagcagctcaaatgggagtccaagcagtgaaggtcagggatccttattggatcagtacaatggtgtaaatgatgcttcccatggcctgcaccggaagcggaaaaggcatcttgacggtgccagcgatgatgatgaggcagatgcctatagtaacaaaataactgaggagcaataccgtgctatgctcagtgaacatgtccagaagtaccggaggtcaaagttcaaggagggtgcttttagttctgatcctcctcgtgtggcaacccctcaattaaaacacaaaaatggtggtaaaaaaaatatgaagcgcataagtgatttcagcgatgatgtggcattagatgggatagaagcctcacatgaatataatgggatagagtgtattaaaactcatggcggttttaataagcttgttgcaactcttgattccacttatttagatatgggggatagtacacgttacttagttccagagggttatgataagttagcatcatccctcaatctccctgtttcttctgatatacgtgtcgaggaacacttcttgaagggcatgctagatttacgcaccctagcagcaatgcttggtactgaccaaaggtttgaggcttccaatcgtggtggaatatctgaacccctgccacaatttgaatctctcaaagaaagggtaaaggtgcaggaattttctcttcaagttaccaaggacccctttgcaattccggaaggatcagctgggaggatacgaaggtatattatatcagaagctggcgatttgcaggttcattatgttagagtcatggaaaaaggagatacatatgagattatcgagcgtagcttaccgaagaagcaaatagtaaagaaggaaccttcggtaattatgaaagaagagtctgaaaagacttacaaactatggcagtctcttgctacaaaaagcataccaaagcatcacaagaattttactgctttgataaagaaacgacaagtagatgcgaagcgcttctctgatagttgtcaacgagaggtaaagctcaaagtaagcaggtcactgaaactgatgaggtgtgctgcagtacgcacaagaaagtttgttaaggatatgcagatgttttggaaacgtgtagacaaagagcagtatgagttgaggaaaaaagaggaaaaagaagctgctgaagctttgaaacgggaagaggagctacgtgaagccaaaagacagcaacataggctaaattttctgctgtcccaaacagagctttatagtcatttcatgcagaacaagactggtggttcagcgccgcctgatgaggaagatgtccctgatgaagaagatcctgaggaagctcaattgaaaagagaggccttgagagcagctcagcatgccgtctctcaacaaaagatgaagacaaatgcatttgatagtgaaattgtgaggcttcgtcaaacttctgattctgctcttccaactgatgattcatctagcatggaccctagcaagattgatctattacacccctcaacaatgcctgagacgtcttctgtgcagaccccggagttgtttaagggtgtattaaaagaatatcagttaaaaggcttacagtggctggttaattgttatgagcagggcttgaatggcattcttgctgatgagatgggtcttggcaaaactgttcaggctatggcattcctgtctcatttggctgaggacaaaaacatatggggcccctttcttgtggtggctcctgcatctgttgtgaataattgggctgaggagttgattagattctgccctgacctaaagatacttccttactggggtccagagaggatgattcttcgaaagaatatcaaccccaagcgtctgtatcgcagagatgctagctttcatattcttattacaaactatcagatacttgtgaatgaagagaagcttttgagacgtgttaaatggcaatacatggtattggatgaggcccaggctatcaaaagttcaagcagccagcgatggaagacattactgagcttcaactgtagaaaccgtcttcttcttactgggacaccaatacagaacaatatggctgagttatgggcacttcttcatttcattatgcccactctatttgacagccatgaacagttcaacgagtggttctcaaagggtattgagggtcatgctgagcatggaggagctttgaatgaacatcaacttagtagattgcacgctattttgaagccctttatgctccgccgggttaagattgatgtcattgctgaaatgaccaaaaagaaagaagaaattgttccctgcaaattgagttctcgtcaacaagttttctatcaagccataaaaaataagatctcgcttaacgagttgcttgctggaagtcgtggcagtctaaatgacaagaagttacttagcctgatgaatattgtcatgcagttacggaaggtctgcaatcaccccgagctgtttgagcggaatgagggaagctcttacttcaactttgctgaaatcccaaactcacttctttctcccccatttggggaattgcaagatgtacactatgcaggcaagagaaatcccataatctttgagattccaaagttagtttatgagggaatcatctccaacatggaaaattctggaaacatctgtggatttcagaatggatatttgaacaggctgtttaatatatttttgcccagcaatatctatcgctcagccattccagaagttagttcatcaaaagagtctcttctatcatctggtgcatttggctttacacgtttgtcaaatctgtgcccagttgaagcttccttcctggctactgcttcattgtttgagagactagtcttttcagtaatgcaatggaatatgaactacactgctgaaattctggatgaattccttgattcagaagataccggcatccagtccagtcataatgattccacaaaagttcgtgcagttgcccgtttgttgctttcttctacaaaggtcaagcccagtttgcttaggacaaagattgggactgggccaattgatggcccatatgaagcactggtgctttctcatcgcgacaggctcgcttcaaacattaggcttcttcgttcagcatatgcttttattccgccagctagagcaccacctccctttccccttcaccagataaatgtttggtgtgctgatcgaaattttgcctataagttcaccgatgagatgtatgatccttgggccaagaaactgttcctgggatttgctcgtacttctgagttcaatggtcctagacaaccaattgctcctcatcctttgatacaagaacttaatactgatttgcccatcattgagccgatgctgcagctaccctataggatatttgggtcttctccaccgatgagtaattttgatccagctaaaatgctcactgattacatgaatttcagaaaattcaagtatttcagacttgatgggtcttcagccatctcagaccgccgtgacatggtccgagattttcagaacaggcccgtttcttctctgtag

SEQ ID NO: 21178 - DNA, 645 bp, Zea mays
  Peptide Sequence Number=SeqID_62957
atgcgtcctcacctgatcatttttggcgcactgaagatgatcaacatcattgcgcctagctggagagtcatccgtgccacagacatgatcgacaaaatccgcaaagaccctcagctcaaggaagagatctgtttcaatccgtacatgtacacaggaaacctcgcactgcaaataggctgcaaactcctttccgtcggcctagacatcaagaagagcctgcacgagaggacgcgcgtccacgacacatcgccgggcgcgctgactaccaccgtgcgcgccgacaatgtcaacgccatagcgtgcgtcgccggtgacagcggcagggttttccctgtcttctcgctccacgttactgcgccagaggtcttgttcgcgcccgtagggctgctcgacatgttcaacgccgatgacgtcgtcaaggagtgtgtcgtgactagcggtgctggcggcagggccatggcactcaggtccatgggtcgtgggtgcggcttgttcagcgcctactattcgcaggagccggtgaggtgcctgctggacatggttgaagtggagttcagttatgatgttgacatcgacctcgtgttcgtcgacctgcccgtactagagcaggagcggtaccagtggacactggagattgtggtgtag

SEQ ID NO: 21179 - DNA, 162 bp, Zea mays
  Peptide Sequence Number=SeqID_62958
atgaattcccgagagtggccagttcgccagaggccagcctggcgcaccggacactgtccgagccgctccgcacagttctgggtctgcgccgcagacatctacaccatctacgagctacgagcggggttcttcaaggatgatggcgaggaggaggccatgtga

SEQ ID NO: 21180 - DNA, 129 bp, Zea mays
  Peptide Sequence Number=SeqID_62959
atgtccgttgcactcaagaatatattgaattctaagatgtgtgttcacaacctgaacgggctcggctccaccgtggcggtcagcagctcctccaacctccgacttcgccttccaccggtgctgaattga

SEQ ID NO: 21181 - DNA, 207 bp, Zea mays
  Peptide Sequence Number=SeqID_62960
atgggtttatggctgataagccctgggggagccttggggccgtgttgggagccgctggccctggcctccgccatggatgagtaccctggtgtcgcgtcctatcgtaggaaaagaagaaaccccagcaccgttgatcggaagggcaacaatggagatcgtatctgggacgatatcggttcggccagggtgaatccggtctttatttaa

SEQ ID NO: 21182 - DNA, 402 bp, Zea mays
  Peptide Sequence Number=SeqID_62961
atggcagacgacatggactccctcttgagggacctggccaatgtcagcattgcacccgaagcactaccagccacacctgcaccgactcatctagcgccatcacctccggtgtggggaacgccagtcccccatgccatcgagcaagtggtaccagctgcgccggtcctcccacccgtgggtcaggaggaaccggtcgctccttggagagacatgacaggggctgggggagaaccgtccgtgttcaaccccatccccttcgcgccaagctttgacaccagctccgtctccaatacgtatgttgggcttccgttcccctcagggtgcctggactctgaggaggaagacggcccaagcttcgccctggacttatccgagctgagggatcccgagtccatgctgtag

SEQ ID NO: 21183 - DNA, 1104 bp, Zea mays
  Peptide Sequence Number=SeqID_62962
atggagctcaaatcactaagaatgccaatcgagtgcgcaaagacgaactccaagcgccgggccaacgcgctgatctttactgccactaaagcggtgaagcgcggcgtgggggagccgtctcagcagggtgctgaggtggctgtgcccgctcctggggcgccggttgagcccgacatggctgcggccgaggtggctcctccgtgtcccatgtcgttggctggggccaccttcatctccttcaaggatgaggcagaggctacgccacgcgtcatgccgcccacggtccccgacctcctgtgccatccccgacacttcgaagttgcaccgagctcggaggcgggacacaccaagggggccagcacctcggaggagccgtggaggatagtctacgggccgctgcatggtgacgagatgatcatcgagccccctatcatggggtctactggttacctcatccgctctgggccggacacctcgtttcaggcaagaccacccttagcgtggatgttgaccgagggtgactcgtacttcatcctcgacgacgtcaaggagcgggatatgtgggccaagttcagggcgctaggccttaaagcgccacagcgccaccggactgtgttgcttcggtcgaacaagcagctggcccagaggagcgccgaagtggcaaacctgacgtcccgatgcgaggggctgaaggaggagggcacgaccgaccgtgaggaggagggcctgcaagcggtgacggaggagcgcaactccctcaccaagtccgtggaggatgaacactccatgggcagggctttgaacgcccggatagaagaaagatctggagggcatgacctagaccgtggtgcaacaaggggcgagctaagggaggtgtccaaggcagtggtggacctcttccgagaccttgacgtggtgggcgtgcctcggggtggaccccgcggcctcacatgcaagccctgggtgacttcgtatgggaggctgatcgacgccgtcgaggggccgaggaccttgctggcttgtcactttgaagtcgaggtgtcgcctcttcctccatcgccaactgctaccgagcctcctgcgggacctcctccgacagcatga

SEQ ID NO: 21184 - DNA, 213 bp, Zea mays
  Peptide Sequence Number=SeqID_62963
atggccgataaaggcaaaggcaaaagcatcgtcattagtgatcctcgcacgtcgaacatatcacaaggagggattgctcggaaggctctggacaagaagactaacaagtctagaggcgctgaggggtatgctcaatggagcaaccaagcacgactccctgactcgagcatcgaggacggtccgatggtcatggccgagaaagatgcaatctga

SEQ ID NO: 21185 - DNA, 264 bp, Zea mays
  Peptide Sequence Number=SeqID_62964
atgaggcgcatcaaggagatcgtctactacgacgacagcgatgagtcgtcttcttcccaaaaggacgacgacaacgactatgagaaaaagaagacggggtatccagatagtcgagaacggaatgaaatggaacttcctgatattggcattttggctatactctgttcgcaacatcctacaacttgctctcttttttgctttcccatccggagacatataccaccaaagggccaatcgctctccgcatattcagtcaagttatga

SEQ ID NO: 21186 - DNA, 164 bp, Zea mays
  Peptide Sequence Number=SeqID_62965
atggccatagtcgagtccgccagaccgcctggagcacacccgagccatttcccaagcctcaggagccctgccgtggccggtcccctcgtctccgacaacgagcagctcgtgattcctgagtgtgttgtcgaagatccctctgagcaacaacctggtgaaggcaa

SEQ ID NO: 21187 - DNA, 375 bp, Zea mays
  Peptide Sequence Number=SeqID_62966
atggggagggaagtatcagagcttgaagctttgaatactaaaaaggacaagcgaattgcatcgctcgaggctgagctaaaacgagcaaaagaggaatatgaagctgaaacgatgaagataatgcaagcatctgccgaactgccgaagcagcagttaaccttgacaccgctcagcacaagagtactattgcgcatggataggcgcccgaagcactgcttcagttttgctgaaagtcgggtgcaatcatctgaagccgaagcagcaactgtcagggctgtaaagaaagccatagatgacgttgtcctcaaaatgtgtgagcaaatctatggtgaagtgatgcaggtcaacaaagggaaatcatgtgaaacacaatga

SEQ ID NO: 21188 - DNA, 717 bp, Zea mays
  Peptide Sequence Number=SeqID_62967
atggctatcgcggagagctgtgttgatgcggtggtcatggagatggtggctgtctactgcggtggcctctatgccgccaagccagagcttgctgcccgccgcattgaggccatcggctttcaggttgggcaccagctctctgagaggacacgcacaggaatgggatgtgggacgggagccgtgaaggaagagtccccggaggcgaagccagaggggcggagggtggggcagcgcacgcgcctgaagtatcaaagggtggcgttcgactggagtagtggatggctgccagcacagggttggtggacggggaatgggagcgaagctccatggcgcgtcggcaagaaggaggagagcctggcggcgatggtgtttgtcggcgccgacagcaggtgcggctggggggcattgacgacggaggggaaggcggcggcgggcgtccaagggaacagcggccggcgacgggtctggtggaggcacagggggcgcgcgacctggggaggggagggcgggccctggacgcgggcgcacggcatgggggcacacagtccaatggcggcggcaccggcagggcaggacgcgggcggtgggggaggcgtggccggcgtggaggcaacgccggcaagaaggggaggatgcgaccgagaagcaagtggccagtggggaggaggggtgcctgcggccaatgtttacaagtcgggcgaccagctggtcgagtga

SEQ ID NO: 21189 - DNA, 528 bp, Zea mays
  Peptide Sequence Number=SeqID_62968
atgggcggagtcgcggtcgcggggcgtttcgttttcgttgaggtgaaggaatcgcgcgggccctgcgttgacgcgtgccgagggggtgcgatcaggtcaaggaacaaggggctgcacgtctggagaggaaaaacaaagtatatggagagagaagagaagaaaactgaggtcctgagtgaagtttcgaaaactctaaaaataccacggttttcagtggaaaaaggaaagcttgtccacgagtggagtgtggaaccccctcctatgcacatcggggtagagacaggcctggttcctggagatctggatgccagccttcaggtcctgcacaaagtgtttcaactcgaggtcttagacctttacatacgattcacttgggataagcattgctcgcacaggagcaccgaaaggccgagggacgggggaaagacgtacaatcgaaattgcggtgatctaatgtcgcaggccacggcttcaagatttgagaaacctccaactccgacgggctgggctgggtgccagggttcttag

SEQ ID NO: 21190 - DNA, 1182 bp, Zea mays
  Peptide Sequence Number=SeqID_62969
atggccaaggtgcccgatctcggctccgacttcgcccagaagctgctcagggacctccgccgccgccgggagcggctcggcttcgactccaccgccgccgcgcctcgggctcggggcgagctccaccagctggatctccagggagcccctgcgaccttggccatggccgacctccacttctcccttggcaggcgctgccctcctctggtccgagctcgagcaggtgagctcgccccatggcctcggctcctagcctccaggctcggctacgaggacaccacgctcgccctcaccctccgcctcccgggctccgactccggccgttcctcctcgctcgccgcgccctccgctgcgccgtcacccaaggcgcgggtggtggggtggccgccggtgaggtcgtaccgcaagaacgcgctcgccgactccagcaaggccaaccgcgcagccaatttcgtgaaggtggtcgtctcccgccgctcctcggcctctgctcctcccgcgcccggttcccatcgccgctctcttccccagcgcgtcttcttccccagccgcgccgtgtcgagctgcttcttgcgcacgcgccgtgccgagctcgcccccgacctctgctcttccctggcgcgtcgcgttcttccctgcacttgcccatggcggccgagctcccagcctgcgcgccctccggttctctgtgtcgcgcgctgctccagctcccacggcgcgcagcctccctctcggctcaccggatctcccagcgccgcgcccagcttctttctccctcagctcccgcggttctctctccatctccctccgttctctgttgcgtgcccagcagaactcccttgcgcgcccggattctctccttccctactcgaatttggtcaggcccgtgcagctccctggcgccctgcttcctctgttctctccctggacgcgcacagcgttccgtcgaactcctgcgccgtgccctgctcaggttccatggccgcaccaaattccctgcgcgcgctggcctacaactcgactgcacacctccctacttgtcatggccaccgtgccctgctccctgatttctgctcgccgcgcgcgctcatctctctgttcgcctctgcgcacaactctccgagctccatggccggttccctgctcgccggggatgctcctgctccagctcaacctcgcctt

SEQ ID NO: 21191 - DNA, 1944 bp, Zea mays
  Peptide Sequence Number=SeqID_62970
atgaaggagtccgaccagctcgtgacttctttcatcacgcccttcggcatgtactgctatgtcaccatgccgttcggcttgaggaatgcgggcgcgacgtaccagtggtgcatgaaccatgtgttcggcgaacacattggccggacggtcgaggcctacgtcgatgacatcatagtcaagacgaggaaagcctccgacctcctttccgaccttgaagtgacattccgatgtctcaaggcgaaaggcgtgaagctcaatcccgaaaagtgtgtcttcggggtgccccgaggcatgctcttggggttcatcgtctccgagcggggcatcgaagccaacccggagaagttcgcagccatcaccagcatggggcccatcaaagacttaaaaggcatacagagggtcatgggatgtctcgcggctctaagccgcttcatctcacgcctcggcgaaagaggtctgcctctgtaccgcctcttaaggaaggccgagtgcttcacttggacccctgaggccgaggaagccctcgggaacctgaaggcgctcctcacgaatgcgcctatcttggtgcccccagctgccggagaagccctcctgatctacgtcgtcgcgaccactcaggtggttagcgccgcgattgtggtcgagaggcaagaagaggggcatgcattgcccgttcagaggccagtctacttcgtcagcgaggtactgtccgaaaccaagatccgctacccacaagttcagaagctgctgtacgcggtgatcctgacgcggcggaagctgcgacactacttcgagtctcatccggtaactgtggtgtcatccttccccctcggggagatcatccagtgccgagaggcctcgggtagaatcgcaaagtgggcggtggaaatcatgggcgaagcaatctcgttcgcccctcggaaggccatcaagtcccaggtcttggcggacttcgtggctgaatgggtcgacacccagctcccaacggctccgatccaaccggagctctggaccatgttcttcgacgggtcgctgatgaagacaggagccggcgcaggcctactcttcatctcgcccctcgggaagcacctactctacgtgctacgcctccatttcccggcgtccaacaatgtggctgagtacgaggctctggtcaacgggttgcagatcgccatcgagctaggggtccgacgcctcgacgctcgcggtgactcgcagctcgtcatcgaccaagtcatgaagaactcccattgctgcgacccgaagatggaggcctactgcgatgaggttcggcgcctggaagacaagttctacgggctcgagctcaaccacatcgcccggcgctacaacgagactgcggacgagctggctaaaatagcctcggggcgaacaacggttcccccagacgtcttctcccgagacctgcatcgaccctccatcaagatcgatgacacgcccgagcccgaggcaccctcggcccagcccgagaaggcacccgggggctacacgcacctgttggtcgccatcgacaaattctccaagtggatcgaggtccggcccctaaacagcatcaggtccgagcaggcagtggtgttcttcaccaacatcatccatcgttttggggtcccgaactccatcatcacccacaatggcacccagttcaccggtaggaagttcctggacttctgcgaggatcaccacatccgggtggactgggccgacgtggctcaccccatgacgaatgggcaagtagagcgtgacaacggcatgattctacaaggactcaagcctcggatctacaacgacctcaacaagttcggcaagcgatggatgaaggaactcccctcggtggtctggagcctgaggacaacgccgagccgagccacgggcttcacgccgttctttctagtctatgggctgaggccatcttgcccacagacttag

SEQ ID NO: 21192 - DNA, 879 bp, Zea mays
  Peptide Sequence Number=SeqID_62971
atggcacaacatcccgtaccctccgcgccagattatcaggccgagccccgcggttgtcgtgcttttcaacgccggtgtatacgagttgggcggcccccacaaacaaactgcgccatcaagtcggcaccaaaaatcggcatctatggttcgcggtgttcggcgttcggggaccggcgcgtggcggatcgccggcgcggtcgcgcccgccgaggggctcgtccctgcctcgggcgtcgcggctggcgggacggcctggtggcggacggacatcggcaccgccgtcgggtacaaaccctgccacgggccgcgttgacctcgcgctgtgcccccggggacagcgcccggtgggagatcggctccgccgcgggcaggctgcactgcgccgtgcgcgacggcggcgacgtcctggtgttccggctcgacgacaggcgcggtggctgggagctggccaccgtggtctccgtctgcgagatactgcagcggccttggcaaccggagaccacttttgagctgtccgactccgaggacgacgacgacgacgaggcggcggcgggtcaggcagagttggagcgcgtgggtgctgtcattgccgtggccaacaggtacagcaggagcagggtacgggtgccgagagacgacgtgaggctgctgccgtttcagggcgccgatgtggaggtggtgctgctgtccggctggagggtggtggcgttcgagacggtgacgcggcgccggcgtgaggccgtcctgccggtgccgggtcagccgaccaccaaggattggggcgttgtggagtacatcgcgcacaccaacacgctcgcgctggtcggccccgtggtgttcatggagcctccggatgatcaggaagaggtgtcatcgtaa

SEQ ID NO: 21193 - DNA, 1653 bp, Zea mays
  Peptide Sequence Number=SeqID_62972
atggagtcaaagtcacgaccggatgcgcaccgacaaggcagcagcagcagctccattgccagaccagggacgccgcgccgccatgacgcgccggccatcgccgattcgcacgccaccgtgccgttacaaggaggacgaggaggcaagcagacggcgcccgcggcgaacgccggcggcgtggacgtgcagatggcgctggccctcgcgctcagcaacagcggcaagctccagaacgtgcatctcgtggcgcgccagggcggcagcggcggctccgcgttcttcggcgagccgtgcaggatggcgtcgcaggcgcggcgcctcctggctcctggcgcgcacgtcggcaaggtggcgatcggcgtccagaatctcaacgacattctcgtggcgtactcctccggcggtgctgccggcgcgaggaggggctcggttgagatcgggaagcagctgctcagaggtgccatggacctcgaggagtcgctcaacatgctcatgatgctccaggacgctacagactacatggaaatggggagctcagggaacgacggcaaggtgctgctgctggagggcactgagagctggaagaggtccgcgccgcgttcgacgagctctgcctctgcaaggctggtagagatcgtcgacgatgattcagggaccgagcaggccgacgatgcgaagagctcgtcagatacgttcatgcagatcgttcctcacggcatgtctcagagttacagacggaaccacatctcgccctcgcagctcgccggtgctgcaaccaattgcaagagcaatgcttcgagtggcgagaaggatggttcaaaggtgaggatgcccggtctgattgccaagttgatggggctggaaaaccttccgtcagcgaagacggctgcagagcgcaaggagacagagagcgcattctgcatcagttattatgaaagtattacagtgcactgttctgatggcattttttttgctggtccaaacatgcaggatgacagcacagtcagactggatcatctcatgaaccccagtaacccgaatgatttgagaaaccacaatatggatgttgtctcatgcgattccttcacagagaaccagctcctgcttgcagagatgttgctgaaggatccctacctactcgaaaccacgaaggcgatcaccgggttccacgtcccagccagcgcagctcaggttaacacggggaaatggctagacgaaggcaacagggttctttcagacatcgggcgcgaagtgatcagaaggaaaggcaagcgaatggaggcgatggtggatgtcagcgcgacacgtgccgctaacctgaagctgcggactctggacgatctggtcagggaactggacagcgacatccagtctctccacgtcccgaggaaaattcagcaacggggggatgaccacagcacagctgagaacctgaggatggtcctccgctacgacatggagagcacgcactcggacgctaactcggtgtgggactttggttggaaccgcgcgtgggacctgccggtcgagaagaacgaagtcgtcagggatttggagaagaacatattgggtggtatcatcactgatgtagcaagggagcttatcgatgtatccatgcgccagcgccatggcccatgggtgctgtgcctgtga

SEQ ID NO: 21194 - DNA, 818 bp, Zea mays
  Peptide Sequence Number=SeqID_62973
atggatggggggaaattggatgatgaggtgatcatccttgattccaccatatgggaattgtgccttatggattgtgcgtccgaaggcgcgtggcccctatccgggtgggatggtgatgtgcttgtgccttctttcacgtggctgctcaagctcctcctgctcccgacaccggttgtcgatgatgtgtcgggcgttgcgaatgtcctcgaggcgatccttcaggaaaacatatgttcttgtggtgggaaggatagattttggtacatcgcccttgcctctagctcgtctggctcggggatggaccaaagcatcatggttgttggccatgttttgtctgaggttgaggaagtattgtgcctcatcgttgctctcaacgaattggtcacacaccttcctcgcccacggtttcttggcttcgaggcgtctccgctcgatgtcgccgtaaactcggtcgagcttctggacgagagcgtggagctcctcctcgtgggaaaggattccgagttgggctccatcgaggcaaggctcaaatcatcctcgagcatgtcgaggatggatgctagcttatgcgtgctggttgaggcgtcgcttaagggcggtagtgcacctcttgaggcgtcgcttctttgccttgctcttggtggaatgcatgggtcatgtgcctacaacgataggtatgtcagggcaggaaagttggagttcgctcgtggcggtggtgaggaagtcgagggagccaaacatgatgggctcctaggagtgaaagtctcgcctccagtgaatgctgaagaattggccatcagagtggaggatgtctacta

SEQ ID NO: 21195 - DNA, 201 bp, Zea mays
  Peptide Sequence Number=SeqID_62974
atggattgcctttgtgaggaggggtcccaacttcaatgggtccttcgtgagacgagagctcgggctgaggaggctgagtcgactctcaaaggggccaacgctcgtctaaaggtgacaaagttagagctcctaaaggagcataatgcggacattaggaaggcggaggaagaggcgaaggcggtggcaaagggcaagacgtga

SEQ ID NO: 21196 - DNA, 651 bp, Zea mays
  Peptide Sequence Number=SeqID_62975
atggaggtccttgtgtcggagggtgccttgtcctatcacagggacaccgaggtaagatccaatgttctggcccagggtgaggagctagcgtcggaccctatcacgatcgtgaagaacgcgaccactcggaagcgctcctcccgcccatgcgacaaagggggtgcttcagtttctcaagccctcacatttccaacactgacggtgatgactcctttggctattgcagctgccctgccttctggtgcggcggccacccctctcgtggcaggcgcatcgacctccctgacctcccaagagtcagtcagtacggccatccccgaggtggccctccctaatgcgccagccctaacatctggcctagagggagtctcagtgaccaggatgattgttctaagtgaagctccgacggtggaggcggtgatcgtcaccctgccactgacatgccttgccctcccgcccctgagcactgcggcggtgggcggtcaatctggggcgacggcgttgtccatggatgtcattgggtaccaggtacagcctccaccggccaccattgcctcaaccttcgcgggggttgtgttgcctacagtgcccgaagaagtccactggggccttacccctttaccctttaaggattggaggagcgtgggatag

SEQ ID NO: 21197 - DNA, 558 bp, Zea mays
  Peptide Sequence Number=SeqID_62976
atggaggttcctcctgaggccttggtcgagcctgcctcgggattgaactatctacattcaagaaagatagtacatcgggatgtaaaaactgaaaatatgctgctcgatacacagcgaaaccttaagattgctgattttggtgttgctcgtgttgaggctcagaatccaaaggacatgacaggcgcgactgggacacttggctacatggccccagaggtgcttgaaggcaagccatacaacagaaagtgtgatgtctacagttttggcatatgcttatgggaaatatactgctgtgacatgccatatccagacctcagttttgcagacgtctcgtccgccgtcgttcaccagaacctgcggcctgacatccctcgctgctgcccaagcccaatggcgaacatcatgcggaagtgctgggacgcaaacccggataagcgccctgacatggacgacgtggtgcggttcctggaggccctcgacacgagcaagggcggtggcatgataccagaaggccaggcaggcgggtgcttgtgtttcttcagagcccgtggtccttag

SEQ ID NO: 21198 - DNA, 120 bp, Zea mays
  Peptide Sequence Number=SeqID_62977
atggccgccgccgcggttgctactgcaccgccgcttggtctgcgctggggtgcttgggcacaggatcgatggctcgggtgtgttgactggtttggatctaatcaaagccatccgaaatag

SEQ ID NO: 21199 - DNA, 387 bp, Zea mays
  Peptide Sequence Number=SeqID_62978
atgtacacctatactcacgtccgcggttgtcgggtgcttcgctcaccatctcgtgctcatcttttactccgctccttcaccgcagacccggtcgtgcagatcgccaggaactgtgcccccatcggtgagcagtcaccgacttcatctccaacgactccggcgaagacaggcggctccagagcgcgcgtcacggagatctccatcatcaccgtgtccagcagcggggtcccatgcctcacgtttgggacatggaatgcatcgttcctcttggaggtgccactcggcgtcactgtctcgctcttcgatgagggccacagtgggggtcgcaccgttgatagcggtgtcgtgatcgaggagcgcttgaatcttgtcatacacgcccgctag

SEQ ID NO: 21200 - DNA, 3087 bp, Zea mays
  Peptide Sequence Number=SeqID_62979
atgcctggcatatcgagggatgtcgccgagcactcgctggatattcgggccggagcccgacccgtaaagcagcctctgcgccgattcgacgaggagaagcgcagagcgataggcgaggaaatccacaagctaatggcagcagggttcaccaaagaggtattccatcccgaatggcttgccaaccctgtgcttgtgagaaagaaaggggggaaatggcggatgtgcgtagactacactggtctcaacaaagcatgtccgaaggttccctaccctctgcctcgcatcgatcaaatcgtggattccactgctgggtgcgaaaccctgtccttcctcgatgcctactcagggtatcaccaaatccggatgaaagagtctgaccagctcgcgacttctttcatcacgcccttcggcatgtactgctatgtcaccatgccgttcggtttgaggaatgcgggcgcgacgtaccagcggtgcatgaaccatgtgttcggcgaacacatcggtcgcacagtcgaggcctacgtcgatgacatcgtagtcaagatgaggaaggcttccgacctcctctccgaccttgaagtgacattccgatgtctcaaggcgaaaggcgtcaagctcaatcccgagaagtgtgtcttcggggtgccccggggcttgctcttggggttcatcgtctccgagcgaggcatcgaagccaacccggagaagatcgcagctatcaccagcatggggcccatcaaggacttaaaaggcgtacagagggtcatgggatgtctcgcggccctgagccgcttcatctcacgcctcggcgaaagaggtctgcctctgtaccgcctgttaaggaagaccgagtgtttcgcttggacccctgaggtcgaggaagctctcgggaacctgaaggcgctccttacaaaggcgcctatcttggtacccccagctgatggagaagccctcttggtctacgtcgccgcgaccactcaggtggttagcgccgcgattgtggtcgagaggcaaggagaggggcatgcattgcccgttcagaggccagtttacttcgtcagcgaggtactgtccgaaaccaagatccgctacccacaagttcagaagctgctgtatgcagtgatcctgacgaggcgaaagttgcgacattacttcgagtctcatccggtaactgtggtgtcatccttccccctgggggagatcatccagtgccgagaggcctcgggcaggatcgcaaagtgggcggtggaaatcatgggcgagacaatctcgttcgcccctcggaaggccatcaagtcccaggtactggcggacttcgtggccgaatgggtcgacacccagctgccgacggctccgatccaaccggagctctggaccatgtttttcgatgggtcgctgatgaagacgggagccggcgcgggcctgctcttcatctcgcccctcgggaaacacctacgctacgtactacgcctccatttcccggcgtccaacaatgtggctgagtacgaggctctggtcaacgggttgtggatcgccatcgagctaggggtcagacgcctcgacgcccgcgatgactcgcagctcgtcatcgaccaagtcatgaaaaactcccactgccgcgacccgaagatggaggcctactgtgatgaggttcggcgcctggaagacaagttctacgggctcgagcttaaccacatcgctcggcgctacaacgagactgcggatgagctggcaaaaatagcctcggggcgaacgacggttcccccggacgtcttctcccgggatctgcatcaaccctccgtcaagatcgacgacgcgcccgagcccgaggcaccctcggtccagcccaaggtaccctcggctcagcccgaggcgtcctcggttcagcccgaggtaccctcggcccccgagggcgagacgctgcacgtcgaggaggagcagagcggggccacgcctgatcgaaattggcagaccccgtacctgcaatatctccgccaaggagagctacccctcgaccaagccgaggctcggcgggtagcgcgacgcgccaagtcgttcgtcttgctgggcgatgagaaggagctctaccaccgcagcccctcgggcatcctccagcgatgcatctccatcgccgaaggtcaggaactcctgcaagaaatacactcgggggcttgcggccatcatgcagcgcctcgagcccttgtcgggaatgctttccgacaaggcttctactggccaacggcggtggctgacgccactagaattgtccgcacctgtgaagggtgccaattctatgcgaagcagacccacctgcccgctcaggctctgcagacgatacccatcacctggccctttgctgtgtggggtctggacctcgtcggtcccttgcagaaggcgcccgggggctacacgcacctgctggtcgccatcgacaaattctccaagtggatcgaggtccgacctctgaacagcatcaggtccgagcaggcggtggcgttcttcaccaacatcatccatcgcttcggggtcccaaactccatcatcaccgacaacggcacccagttcaccggcagaaaattcttggatttttgcgaggatcaccacatccgggtggactgggccgccgtggcccatcccatgtcgaatgggcaagtagagcgtgccaacggcatgattctacaagggctcaagccccggatttacaacgacctcaacaagttcggcaagcgatggatgaaggaactcccctcggtgatctggagcctgaggacaacgccgagccgagccacgggtttcacgccgttcttcctggtctacggggccgaggccatcttgcccactaacctggaatacggctccccgaggacgagggcctacaacgatcaaagcaaccaagctagccgagaagaatcgctagaccagctggaagaggctcgggacaaggccttactacactcggcgcggtaccagcagtccctgcgacgctaccacgcccgaggggtccggccccgagacctccaggtgggcgacctggtgcttcggctgcggcaagacgcccgagggaggcacaagctcacgcccccctag

SEQ ID NO: 21201 - DNA, 1254 bp, Zea mays
  Peptide Sequence Number=SeqID_62980
atgttcttcgacgggtcactggtgaagacaggagcaggcgcaggcctgctcttcatctcgcccctcggaaagcacctgcgctacgtgctacgcctccacttcccggcgtccaacaatgtggctgagtatgaggctctggtcaacggtttgcgcatcgccatcgagctaggggtccgacgcctcgacactcgcggtgactcgcagctcgtcatcgaccaagtcatgaagaactcccactgccgcgacccgaagatggaagcctactgcgatgaggttcggcgcctggaagacaagttctacgggctcgagctcaaccacatcgcccgacgctacaacgagactgcggacgagctggctaaaatagcctcggggcgaaccacggttcccccggacgtcttctcccgagacctgcatcaaccctccatcaagactgacgacacgcccgagcctgaaaaggcctcggccgagccagaggcaccctcgacccaacccgaggcaccctcggctcagcccgaggcaccctcggcccagcccgaggcaccctcggttcggctcgagaaggcacctgagggctacacgcacctgttggtcgccatcgacaaattctccaagtggatcgaggtccgacccctaaacagcatcaggtccgaacaggcggtggcgttcttcaccaacatcatccatcgcttcggggtcccgaactccatcatcaccgacaatggcacccagttcaccggcagaaagttccaggacttctgcgaggatcaccacatccgggtggactgggccgccgtggctcaccccatgatgaatgggcaagtagagcatgccaacggcatgattctacagggactcaagcctcggatctacaacgacctcaacaagttcggcaagcgatggatgaaggaactcccctcggtggtctggagtctaaggacaacgccgagccgagccacgggcttcacgccgttctttctagtctatggggccgaggccatcttgcccacagacttagaatacggttccccgaggacgagggcctacgccgaccaaagcaaccaagctaatcgagaagactcgctggaccagctggaagaggctcaggacatggccttactacactcgacgcggtaccagcagtccctgagacgctaccacgcccgaggggtccggtcccgagacctccaggtgggcgacctggtgcttcggctgcgacaagacgcccgagggcggcacaagctcatgcctccctag

SEQ ID NO: 21202 - DNA, 693 bp, Zea mays
  Peptide Sequence Number=SeqID_62981
atggacgatggcaaaggctacggttcaactgaggctggtggcatatcgctgatgatccagcgggaggagtgcggccgcatctgctccgccggccgtgtctcggagaacgtggaggtgaagatcgtggaccacgtgaccggcgaagctctgtccgtgggccagaaaggggagcttctgctggacgattcaggtttccttctatctttctcgtccttttcagctcaacaagatgttcgttctgaactcgcagggtatgttggcgacgaggaggccaacgctagcagctttgattctgaaggctggctgaggactggggacctttgctacatcgaccaggacgggttcctgttcgtggtggacaggctgaaagagctcatcaagtacaagggctatcaggttccacctgcagagctggagcttgtcctgcagtcgttgccggaagttatcgatgccgcagtcatgccgtatcctcatgaggaggcagggcagatcccagtagcgcttgtggtcaggcagcctggtagcaaggtcacggaggctcaagtcatggaccacgtcgcccagagggtggcgccttacaagaagatccgcaaggtgctctttgtcgactccattcccaagtctccggctggcaagatactgaggaggcagctgaccaaccatgtgcaggctggcgctgtttctagaatgtaa

SEQ ID NO: 21203 - DNA, 852 bp, Zea mays
  Peptide Sequence Number=SeqID_62982
atgcccctaggcgtagtgcgcgtcgccttatgtaatgaggcggcggcggcggcggcggcggccacggcaatcctcaacagcggcagcacccgcaccagcgggccgcgcagaggaacgccggcccgtcgtcgtcgtctcctcgtcgtcctcgtccgcgtcgcagagctcacgcagtggaggctgccggtgcaccacccgccgcaggcctcaggaaccggcggcgacgcgctgctgagcgccgaggagaagttcgcgacgggggaggtggtggcggcgctgcgggcggtggagcgggaaatggaggccgcggcgaggccggtgccggcgggggtggtggccggggtggtcgcggcggtgcgggagccggccacggcgcgcctcgccgccaaggtgctgctcgtcgtgctgctggaggagggcaaccgggagacggccgtggaggccggcgcggcgtcggcggccgtcgaggcggtggcggcgtccgggccggcgggggccacggccgaacgcgcgctggccgcgctcgagctcctctgcacggcccccggcggcgcccccgccgtgcggagggaggcgctcgcggcgccggtgctggcgcgggccgtggaggcgatggccggccgcggccgggagtgcgctatcggcgtcctggccgccgtatacggtggcgctgccggcggggaggacggggcctcgtcctcgccgccgccgccagcagtggtgaaggcggtggtggcggcgatgcagggcgagtgcagcgcgcgtgggcgtcgcaagggcgcgcagctgctgcgcgcgctgcaggagggcggccgcctcgggctcgcgtgggacggcatcggcgatcagtga

SEQ ID NO: 21204 - DNA, 375 bp, Zea mays
  Peptide Sequence Number=SeqID_62983
atgttgaaacatgagaaaagagtggtggcgaagaaaaatcttgatggaccggaaggaatttctttgggtgcttctaaaagattagttcagaactcggtagatcatcttaagatattagaaaaggagagaattaaagagtcgtctgttaaaatcagtcaggataaccatgtagagttaggagaatcagatgtagaagatgatgatctatatactcttggtgacctttcaggtgacctgtcagaggagatcatggaatatcttactgattctaatagaaagggctactccaaagctgagttaagtaccttttgtgggagcagaggttttcttggcaatggtgcccttctagaggccgatcgggaggtattctactag

SEQ ID NO: 21205 - DNA, 534 bp, Zea mays
  Peptide Sequence Number=SeqID_62984
atggcgcctcccgttgacgtggctggtctgcgccctaggttggtcgatgtggaagctcctccgaagccgaggtcgagtctgtcttccgtggtcgaggccgagtccgagccctgggtcgggcgaggcggaggtcgtcggctgaggccagggcggagtccgagccctggggtcgggcgaagcggagttcgtcatcttttggggctgagcccgagtccgagccctgggtcgggcggagcggagttcgccgtcttccgggacttagcccgagtccgagccctgggtcgggcggagcggagttcgccgtcttccggggctgagcccgagtccgagccctgggtcgggcggagcggagttcgccgtcttccgggacttagcccgagtccgagccctgggtcgggcggagcggagtttcctgtggcgccttctgcaggacctgactgcctgtccgtctcactttgtcaagtggcactgcagtcggtgcggcgcaggcggcgctgtccttctgtcaggccggtcagtggagcggcgaagtga

SEQ ID NO: 21206 - DNA, 1272 bp, Zea mays
  Peptide Sequence Number=SeqID_62985
atgccgccgccgctcctccaggcgcgcgactacatgggcgccggcgccacccctctgtcctgctcctccagcggcgagggcacggggccgcacctcgcgctgcggctcgggctcccagggtccgactcccccggccgcgacgcggggccggagccggaccacgcccacgtcgacgccgcgctcaccctcggccctgcccccgcccccgcccccgcgcctcccagggtcggcgcaaagcgcgggttcgccgactcccgcgaccggtgcgcgaagcgggacgccactgctgcggatgacgctgctgggggagtgaccggggaggagaagcgggtaggtgcggccgctgccggagctccgccggctgccaacatggatggagccccatacctaaggaaggtggacctcaagaccttttcgagctatgaggacctttcgcttgctctggagaaaatgttcacctgcttcatcactgctgatggtgaagtcctcctgacagatgtgcatggccatgttgagtgctacaccttgcagggaacatggtcaccattggtcaccgtgacccgcatggctgatgcccttcaggaccaagaatatgtccttacttacgaagataaagatgctgactggatgctcgttggtgatctcccctgggacgcggacgggggccgaccctggcagctacagcctggtgctggtgctggtgctggtggcggcgaccggatcaccaggcgtccagtcaggccgagggggacccaacggcacggtggccagtggcagtgggtgacgaggaccactgcgatctcgacgccacatgcacggctcgggttggggacttggggttgcgggctcgacgaccagacccagcgtcccgcggcgcacgagagcgggagcgggaccagccagagcaaccagcattgcctcggcagtcagcccagcgcgcgatgccgatatgccatcggtgttcggcgggcgaccgcgacggaacacggccagttgcttgcgcgccttgactcgcagtcgcagtcgcagcggcgcagcgcccgcgggcacggacggacaagccccagtggctggtcacatggccgcgggcccgccccctcccctctctgcctacgcctacggacgccgtccccgtttcgccatgccgttgcccgttggagcatgggtatccgcccgtctgcacgcgaatacctgatgcatcctattctcacctccaacgacatgcttgttacgattcttatcccaccgcaagcccaccccagcaagcaataa

SEQ ID NO: 21207 - DNA, 471 bp, Zea mays
  Peptide Sequence Number=SeqID_62986
atgtctgagagtagggacgttctgtccgaacagtataaatcttgcggccattgtgtataccgcctggagctcaaaacacggaacaatataggatttggatttcgtgatagtgttatttttctttaccagggaaaattggcaaaagctaatcatggcaaacacctgtcacacccggtttcgctgttgccgggcactggcagtgtggccgtacgcccgcgcaggcaccgatcgctatcagcgaggggcgtccgggacgagatgacgaggcatctggttgtaagattcatgggtgacgcacgcaggcaccaatcagccagcaagagaacgggggacgagggcagggcgcaaggctacggcgatcgctgccccgcacatgccacgggcatgcttgccccatatgggctatggggtggtagtggtacccggatcccggcggcagccttgctgatcgctttgcctgtccccttttga

SEQ ID NO: 21208 - DNA, 351 bp, Zea mays
  Peptide Sequence Number=SeqID_62987
atgggagtagggagtgaaattgcggaacgagacacggccattgactgggccgtaaattcgcgctctttcgcttgggattgtgaggccaaggctctagcccgggtagtggaactaagcgcatccttggaaaatctgcaagtgtattgtaacaccatacatgaagaggtgcacgttttatatgaccggctgcatccaaatgtgccaccagaagttgcagctatgggagctagaccatctggagcagctaatggaggacctgatggggagttggacctttttgaagcccctccttccctgaacctcgcagatgaacgttctcctaaagctggcagtggagcggcacaggactag

SEQ ID NO: 21209 - DNA, 303 bp, Zea mays
  Peptide Sequence Number=SeqID_62988
atgcgcgctcgagaagtgccatcgccgtccgccgtgatctcgggttcgttccgtggccgccgtcgagccttcgccgtgtccgttgccccggtgagctctgtctcctcgctagaatctcaggacacccctcggtttgccccttccccctctattcctctctgctcgcgctcaccggactccccaccgtacaatcgtgtcgtcgtagccgtcgacccgaggctccgctgtgttctcaccgtcgctcaagcgccccagagccttctctcgaggaccttcagcgacgaagcagacccccaacagtag

SEQ ID NO: 21210 - DNA, 291 bp, Zea mays
  Peptide Sequence Number=SeqID_62989
atggcaacaaaatcaacccgagaacctccctgcatgcaattcccctactgcccttgcccctttggtggtgacgacgaatcgagtggaggctcttaccgaggatccctgggtggaggcgaactcgaccacgtgcggatggagctttgctacaatgccagcgaggaattgacccccgatgtgcccgacttcgcgcccaacaccgttaaaaacttgttctgcgcgctgcagcgaactccgttgactgggcacgaggtcgcaatcacgacagcgatgacgtcaccagcgctctga

SEQ ID NO: 21211 - DNA, 558 bp, Zea mays
  Peptide Sequence Number=SeqID_62990
atggttcattcggattgggacggtggatttttgactctcgtctctgcatctgtttctgcaggggaatcagatatgccacaggctgcgcgatggtgttgcgcttgcttgggtttgggtacaccctcgttgacgcgaacctcagcctcaacttcctcccttgttctgtctcccacccccgcagcttgcattgaccacagaggcacagcggagcatccggcgaggacctgcacgcttgaaaccgacgacgaggccatatgctgttcttgttgcgaagatgaattatctagcttttactgcagcatctttgcatgcccccctttttacacggtgacacagtgttacatgggcaaggtcagcatggtacaagcctacaaggagaaagtttatccaaaaaacaaggtatgtttggttcatgctaatcctcacctccttcccttgctgccgtctcagcctgatgataagtatgagttcgcagacttttcagtttgtgtctttccccatatacaggttgaagaggatgaagagccaaaagaaggtgaagaggcaaatggttgctga

SEQ ID NO: 21212 - DNA, 354 bp, Zea mays
  Peptide Sequence Number=SeqID_62991
atgatgatgaacatgaagtttagggccacagtcatagtttccagcatagcagtagtgttgaatatggactatggccttgatccaacaatagggaaggccataatacaggcagctgaggaggtcgcagagggaaagttagatgatcacttcccacttgttatctggcaaactagcagtggcacacaaagcaacatgaatgccaatgaggtaattgcaaatagggcatctgagatccttggacacaagggcggtcagaagtatgtgcacccaaatgaccatgtgaataggtcacaatcttcaaatgatacatttcccactatgtttattattcatggcgttgacatttctaggtaa

SEQ ID NO: 21213 - DNA, 555 bp, Zea mays
  Peptide Sequence Number=SeqID_62992
atgggtgtgtacatgcctgatcctcattttccatattctgttactgaccatatctttgctatgttaccctgctttactgtttacaattcggagcttgtacagaaagcagcaatcaatgacattgctgagagtgtaatgtcattcaacatgaattacaaggacactagtctttttggtgtctatgctgttgctaaggctgattgcttggatgatttggcttttgcaattatgcatgagatgagcaaattgtcataccgggttacggaggaagatgttatccgtgcacgtaatcggctgaagtcctcaatccaactccaccttgatggttcaactgctgttgtcgatgacattggccgccagctgctgacctatggacgaagaatttctaccccagagctttttgcaagaatagatgctgttgatgcaagcactgtgaagcgtgttgcaaaccgcttcatctttgatcaggatgttgctattgctgcgatgggactgatccaaggacttccagactacaactggttcagacgccggacctacatgctccgttactaa

SEQ ID NO: 21214 - DNA, 111 bp, Zea mays
  Peptide Sequence Number=SeqID_62993
atggcgaacgaggtggcggcaactgaggcgaggatgatcattatcgtgcggagggtgcgccgtggcccatatggaccatccgctgagtccgtccctgcgcggaggggatga

SEQ ID NO: 21215 - DNA, 1782 bp, Zea mays
  Peptide Sequence Number=SeqID_62994
atgcaggcggcatgcaaccgcgccaagtgggtgcacccctccgacttccaacgcacccaacatgggggcccacgcccacgcgtcatgcaaccggcgcgccggtcgctacgtgcaagcaactgcaccgccactcgcactgttgccacgcctcctcgactgcggaaccagtaccgcgactcgaggcggcgcctctggcaggggaagcgagtgacgctccgccttcgccataatgaccgcgtcaaaaaaggaaacaggctccgagcctccctactgatcagaggttcgaaggctggcccctcgggggggtttaacagccgcctcagagcgcgtgggctccacacccactactggtcagaggttcgaaggccggcccctcggaagggttcaacggccgcctcaggccactcgggctccgcgcccactactgatcagggggctcggactcgggctcagccccggaagacggcgaactccgctccgcccgacccagggctcggactcgggctcaaccccggaagacggcgaactccgctccgcccaacccagggctcggactcgggctcagccccggaagacgacgaactccgctccgcccgaccaagggctcggactcgggctcagccccggaagacgacgaactccgctccgcccgaccaagggctcggactcgggcttggccccggaagacggcgaacttcgctccgcctgacccagggctcggactcgggctcagccccggaagacgacgaactccgctccgcccgaccccagggctcggactcgggctcagccccggaaaacgacgaactccgctccgcccgacccagggctcggactcgggctcagccccggaagacgacgaactccgctccgcccgaccctagggctcggactcgtgctcagccccggaagacgacgaactccgctccgcccgaccccagggctcggactcgggctcagcccctgaagacgacgaactctgcttcgcccgaccccagggctcggactcagccctggcctcagccgacggtatccgcctcgcccgacccaggggctcagactcgacctcggcctcggaaagacagactcgacctcgacctcggaggagcctccacatcgcccaacctagggcacggaccgaccacacatgcaatgatggcgccccgcacgctctatgacgacggcggctctcagcccccttacggaagcaagaggacaatagaatacaagttgtttgccagacactcgaagcacgggcatatctcctcgctaattaaaacccgcccgaccccgatccgatccatcatccaaatatccaatgcaatgcaatgcaaagcgccggcgccgcccacgggcgatggcgaccggcactcgcaccgcaccgaccacctcggcgcgcctgcagctttccttcccgtccagcatccagccgcgcggacaaaacagcgggcgggcgggcgggcgcgcgtaaaccaccgcgcggacgcgactgcatgccgttgccgttgcggtcggtacggtggggacggcaaccggaaagcgacagcgcaccggccggccggtatcgccgtcccccgtccgggcagcgccacgaagcagtggatcgttcggaggatggacgggggttgtctggcctgggcacactgggggcagagcgcagcttcctgcgtggctcctgcgttgtacttttcagtagctggtagcctggtacgtctacgacgtcggcacggcagcgggaaaccgtgtttggctcgcctcctcggagtagagactggagagtag

SEQ ID NO: 21216 - DNA, 4002 bp, Zea mays
  Peptide Sequence Number=SeqID_62995
atgctccgatctcaggaccgccgacccttccgcccgccggatcgggctccacggcctccccacccccaccgcgaccagcacaaccacaacgaacaccggtaccagcctctctcccacccccacatcgaccgacgctacagcaatgaacaccggtatcagccccgcggccagcatcagcgcggttgccacgtgcagccgccccttcgcccgtcgcagttcgaggtattcctcgtccgcccgggccccgatttatccgcgccgaccgccattgaggtggaggccctcctcgcgggcctcccgtcgccggccccggccagcatatccgtccaatcctccggccgccatgccgcgcgcctcgtcttcacctccatcccggccgccgcggccgccgcgcgcgagctctgggcgctccgcctcgaggggctccacctcctcaccctggacctcccgcaccccgccctcgccgcccacgcctcgccgctcatcgcctcgctcttcgcctcccacgcctcccgccttcttgactctgacatcatggtcctctcggccgcccgctctgccgagcttgaggcgtccgtacgggatctagacctcgagaagaagacactggagtctgagaaggaatttgtcgactccaaaattgcggagtacaaggaggcgatgtggtcgatacagcgggcaatgttgcgtggatcgggggacaaggaggagggtgtcgacttgtttgcggctgtagatgatggggaggtggactttgttaaggtgcatatgatgctgctgcgtgagtgccggaggcttaaggagggcctgccaatctatgcataccgcaggaggattcttaaccatattttcgccaaccagtataacccaagagaagttggcagtcgtgttcctctccatgccacttctgttgggcacagctgtgaagtagcgagacacactaaccaagaatgcacctacaattgcattcttttgtggatagaggtagtatggttcttggttcaatactataatactgaaacttttactggagtatttgcgaagagacttgcagtgtttccaaatctcccaagtgaccaatataatcaacgagttgagcccttgtttgttttctttctcaatctgtttaatcacccaagaccaccaactgagaagcttgctgtatctgctgagaagaaaggtcatgatttaataggagaaacaggttctgggaagagcacacaattggttcagtttcttgctgactcaggtgttgctggtggtggttccatcatatgtactcaacctcgaaagcttgctgctatatctttagcacatagagtagatgaagaaagtaagggttgctatggggacagttctgtgttgtcatattcaaccttactaagttctcaaggttttggcactaagattatattcaccacggacagttgtcttttgcactactgcatgagtgatgtgaatctggatggcatttcgtatattattatcgatgaagctcacgaaagaagcttgaatactgatcttctgttagctatgatcaagaagaagctgcttgataggctggatttgcggctcattataatgtctgctactgctgatgctgacagacttgctgaatacttttatggctgtcaaatatttcatgttagaggacggacttttcctgttgaaattaaatatgtcccagatgtatcagctgaggcttccttgaatagtgtaccaagtatttcttctgttgcttcctctactgcttcctatgttactgatgttgtacaaatggtaaacatcatccacaagaatgaagaagagggtgctatacttgcttttttgacatctcaactggaagtagaatgggcctgtgaaacattcagtgatccaaatgctgtggtacttccgatgcatggcaagctttcttctttagaacagaatcttgtcttcaaaagctaccctggaaagagaaagattatcttctgcacaaatatagctgaaacatcattgaccataaaagatgtgaagtatgttgttgattgtggcttggccaaagaatacagatttgttcccactagtggtctcaatgtactgaaagtcaactggatttcccaaagctctgctaatcaacgtgctggccgtgctggtcgaactggagcagggaagtgttacaggctctaccctgaatctgattttggtatgatggaagtgcatcaagaacctgaaattcgtaaagttcatcttggcaccgctgttcttagaatacttgctttgggtgttacggatgtaaagtgttttgagtttattgatgccccagatcctgaggctatcgctatggctgtgaataatcttgaacaacttggtgctatagaatgtaaacgtagtggatttgagctaactgacattggacatgatctggtcaaattgggtattgagccaaggcttgggaaaatcatgcttgattgcttcagctatggtttgatgaaagaaggtttagtcctagcctctgttatggcaaatgctagtagcatattttgtagagtgggtactaatgaggagaaatataaagctgaccgcctgaaagtccctttctgtcaccctgatggagaccttttcacctcacttgctgtttataagaagtgggagactgggtatggtaacaaaaatacatggtgctggcagaatagtatcaatgccaagaccctgaggaggtgccaggaaactatatctgaacttgaaaaatgtctaaagcatgagctaaacattatcgttccaagttactggagttggaaccctgagaagcctactatgcatgatacatcgctaaagaagattattctatcatctcttagaggtaatcttgctatgttttctggacatgagaatcttgggtataaggttatttcagcagaaatcttgtcggccgtgaatcaatatttggtatgtgtaactgctgttggtcttaacgaagtgcttacagttcaccccatgtcttttattaagcaactggaggagagtaaattgcagaggaaagtgattactgggataggaaataaatcgctgagaagattttgtggtaaatctggccaaaatctgcagaatattatctcacttctgagaaaagattgcagagatgatcacataatggttgatttagacttcagtagcagtgaagttttattatttgctaaagaacatgacatggaaaaggtcttttgcaaggtcaattatgctttggaacttgaagctaaattgctgagagacgaatgtgacgagagaagacctggtagctctactattgcactatttggctctggtgctgaaatcaagcatttggaacttgggaagagatatctaacagtggaaattctgcatcaaaatgctcgtgttatagatgaaaaggaacttgtttgtttggtagattctcttgttcctggtatagcaaattttcataaaaccgggaattttcagacaaacttagatgaaacaaagtgggggaggtttacgttcctcaaaccggattatgctgaagatgctatttcaaaattgaacgggattgagtttcatggttccttactgaaggttagtcctgtaagcatttacagccactcagggctaccatttcctgcagtaagagctaaagtttcttggccacgtaaggcaagcaggggagttgcacttgtaacatgtgctagtggtgaagctgaatttattgtaaaggactgctttgcccttggagttggtggaaggtatgtcaactgtgagataatccagtgcgagcatgtatttcatagtactgtctcctgtccgatgcgcatttacaatgttatcagccaagatgttggtgctctacttgagagcttccgtagccaaaaagtgaccaccactaccaccataaccggcgccaagcagattcaagccgagggcaagcagattgagcagctgacaaacaacgcgatggagctgatggggaagatgtttacctgccaggtgttagcagtggtgtggctgtag

SEQ ID NO: 21217 - DNA, 1149 bp, Zea mays
  Peptide Sequence Number=SeqID_62996
atgggaatcctctgcctcggtgcttcctccacactgctctgcggggaggacaggaacaacgtactcggcctcggctgcggcaacgagctggtggaggtggggagcggccatgacggcttggactccgtcgtcggcgccgtgttccccgtggacacagatgaggccgtgcgggcgttgttggagaaggagacggaccacaagcctcaagacggctatgcggagaggctggagcgcggcggattggagtactcctggaggagagacgccatggattggatttgcaaggtccattcgtactacaggtttggaccactcagtctttaccttgctgtgaattacctggatagattcctctcctcatatgatctcccacacgataagccttggatgcgacagttgttgtcagttgcttgcctagcactcgctgtcaagatggaggagaccgtgctccctcttcctgtggaccttcaggtctgcgatgtgaaatttgagttcgaagcaaggactattgggaggatggagcttcttgtgctggccaccctgaaatggagaatgcaggctgtgacccccttcactttcatcagctacttcctcgacaagttcaatggtgggaagccgccgagtttggcactagcgtcacggtgcaccgatatcataattggcacactcaaaggttcaattggctctttccgtgccgctcatcgtctgttcaattcgcttgcttgcattgctgatggcgctatgtttgggtgtgcctatggatttacaggctctacattcttgtcattcagaccatctgagattgccgcggcctcagctctagcagcagtttctgagaatcaggttgttggctcctcgagtgctctttcagcatctgaagtccctataaataaggtgatgattgctagatgctatgagctgttgcaagagcaagcgctggtgaggaagacagggcacgtcaatggaagcccttcagtgccgcagagcccgattggcgtgctggatgcaacatgcttcagctttaggagtgaagatgcaagactagttgtttcggtcgacaaccacgagttctggttcatgggtctcgtcaactacgatagcgcggtaaagaatcttcaggaggctgctcgtggtgttcacggggcatag

SEQ ID NO: 21218 - DNA, 528 bp, Zea mays
  Peptide Sequence Number=SeqID_62997
atggggaacatcttcgtgaagaagcccaagatcaccgaagtggacagggccatcctcaccctcaagacgcagcgccgcaagctcgcccagttccagcagcagctctcagatattgaactagcaagtaaacaaaaggctgtatttgaaagcctgaaggctggaaacgctgcccttaagtctatacagaatgagataaacattgatgatgtccaaaagctgatggatgacacagccgaggctaaggcttatcaagatgaaataaatgctgttctgggtgagcagctctcggctgaggatgaagaagctgttatggctgagtttgaaaacctagaagctcagcttgccgtcgagtctttgccagacactcctgttactgaagtaagacctgaagagaaaatgaaagctccggctgacacagaagctgtgcctgaggacatagatgaggctattgagctccctgatgtgcctatgaaagcgccagagaggcctgaagctccagaaaaaaccaaaggtttctgtctcgcgtaa

SEQ ID NO: 21219 - DNA, 1425 bp, Zea mays
  Peptide Sequence Number=SeqID_62998
atggacaccgcgctctgcgacgacctgctgcaggtggtgttcggccttctaccgccctccgctgcaccggccgtgtccctcgtctcccgccgctggctcgcactcctcagggccgcgacgtcgtccctcagcctccgcctgcctgcctcctcggcggcgaccctcgccgccctgctgtctcactaccccttcctcgccgccctgaccgtggtctccgctggtacgccggtccacgacgccgacgccgtgctgctcgctgtcgcggccgcgccggccgcttcccggctctccacgctgcggctcttgcccgattgggcggtctcccccgccgcgctgctcacggtctgccctgcactcgccggtctgacgtcgctccacctcaccgctgtccgccccctatctttccgctggctcaagctgttgccgcgcctcaagtcgttcgcccttgtcaactccgccgccaccgttgactccgcgggctcgagctcggatgacgccgacggcgaggccgaggacgtcgcaggacattgccgctggagaagctgtcactttgcggcatccgctccggcgaccgcgggcttgggtgctgtggcggcgctgcgcgcctgcgacggtaccggggacgggcccgcgtcgctggccttcgcgggttgccatgctggcttgctcgcgcttgagcttcgtgcttgccgtgctgtcgccgaccgtgtactcctccttgcagccgaccattgccgcacgctaacgtccctcctggtctatgacggcggcggcagcgaggcccttcaccggttcatccagcagcgtgctgctggtctgcacaccttggaccttcgcctcccgcttgacctgcacaacgatcatctcctcgccattggagctgactcagttcacaatgctacacatggcctagcttcacttcgcctccagagctgcgtccttatcacaggggacggcctccggtccctggcacgcacagccgccggagccggcatagaagagctcgccttggtgagttgcgacgtggtggagcgggagcccgggttgctgacattcctcagtcagagcatgccgcggctccgtcgacttaacctgtcttacaatgagacactgaacgacaaggtgatcggcgccatgctttcatcctgccggaatctcatcgacatcaggctcagggggtgccggggcctgacgggaggctcgctcctctcgctgcttaggcactgtgggcagtcactggagatccttgacatctcccgctgtccgggcattgctgtaggtaacgttgagctctttgcccagcgcgccgctaggttgaatcatgtgatcatcgaggagagcgcgatgtcggaggaattgaaggcaatcgctcagaaaaaaggcatgaaggttggctcattgccgtgcgaaggaggaccattctga

SEQ ID NO: 21220 - DNA, 399 bp, Zea mays
  Peptide Sequence Number=SeqID_62999
atggctaagctcagcctcaggcgcaacagtaaactccacctcgcccgaccttgggccctcgacctcaggaggaggtctccacctcacccgaccctagggcttggcccctgcctcggcctcggaagatggtcttcgcctcgcccgaccccagggctcggcctcaacctcggcctcggaaggaggaatccgcctcgcccgaccccagggctcggcctcaacctcggcctcggaaggtggtctccgcctcgcccgacccagggctcgacctctacctcgacctcgggaagaatcgcgtcctcgctcgaccccgacctcggcctcaggaggagtctccgcctcgcccgatcttgggctcggaccgatcgcaccatgggggatacatcattaccctacccctag

SEQ ID NO: 21221 - DNA, 1209 bp, Zea mays
  Peptide Sequence Number=SeqID_63000
atgtcttgcggctctggccgcttcatctcgcgcctcggcgaaagaggcctacctccgtaccgcctcttaagaaagaccgagtgcttcacttgcacccccgaggccgaggaagccctcgggaacctgaaggcgctccttacgaacgcacccatcctggtgcctcccgctgccggagaagcccttttgatctacgtcgccgctaccactcaggtggtcagcgacgcgatcgtggtcgaaagacgagaagaagggcatgcattgcccgtccagaggccggtctacttcatcagtgaggtactgtccgagaccaagatccgctacccacaaattcagaagctgctgtacgcagtgattctgacacgccggaagttgcgacactacttcgagtctcatccggtgactgtggtgtcatccttccccctgggggagatcatccagtgccgagaggcctcgggtaggattgcaaagtgggcagtggaaatcatgggcgaggcaatctcgtttgcccctcagaaggccatcaagtcccaagtcttggcggactttgtggctgaatgggtcgacacccagcttccggcagctccgatccaaccggaactctggatcatgtttttcgacgggtcgctgatgaaaacaggggcaggcgagggcctgctcttcatctcacccctcgggaagcacctccgctacgtgttgcgcctccatttcctgacgtccaacaacgtggctgagtacgaggctctggtcaacgggttgcgcatcgccatcgagctaggggtccgatgcctcgacgctcgcggtgactcgcagcttgtcatcgaccaagtcatgaagaactcccactgccgcgacccaaagatggaagcctactgcgatgaggttcggcgcctggaggacaagttctacgggctcgagctcaaccacatcgcccggcggtacaacgagactacggacgagctggctaagatagcctcggggcagacaacggttcccccggatgtcttctcccgagacctacatcaaccctcagtcaagaccgacaacacgcccgagcctgagaaggtctcagccctgcccgaggcaccctcggctcagcccgaggcactctcggcccccgagggtgaggcactgcgcgtcgaggaagagcggaatggggtcccgcctgatcgaaactggccaccggcgaggggatgcagccgggctgcctga

SEQ ID NO: 21222 - DNA, 339 bp, Zea mays
  Peptide Sequence Number=SeqID_63001
atggacccagcggatgccatcgcagcgtgtctcaaggaacgtacactagcggagcggctggcaacggtgtggctcatgcatcgccgccacctcgagctccggcgccagtcgaggctcaatcatcaagacgtcgtacgccgtattttcatgtgcgcctacagagttctctcgaagcgtcgtcgtcaacgcgccgttgtgggctcctcggctttgacgactgcatctgaggttgtctccacgctcgtgcatgtggagccggtagcgccagtcatcatcctctccgacgatgcagatggggagatcgattggacgacactgatggacgacgacgatgagtag

SEQ ID NO: 21223 - DNA, 936 bp, Zea mays
  Peptide Sequence Number=SeqID_63002
atgagcttggcggggcggcgcaagtcgtcgcacgcgggcgcgggagccggcgccggcgccggcgccctcgacgcgtccgccacgaagcacgccacgacgtcgctgcgcaagggcgggcggctgccggtctacgtggcgagcgtcttcttcttcctctgcgtggtggtgatgtacggcgaggacatccggtcgctgacgatcgagccgctcacgcgcgtgcccgcgccagcggtgccgggcaccacgggcgctggtgggcggcaagtcgtggtggtgccccggcgagacatctccgcttctgagaagcccgccgccgtgctgcaccgcggcgagcaggagaagccgaagaagcacgcggtgaccacgacgacgacgacgacggcgccgccggtggctgtcgagaagccgcagcagaaggtggtcgccaccgccgccgccaagagcgagaggaatacggccaagaaggcggcggcgaagaagaagaagaagccgcgcaggcagcagcgcgcggcgaagaagacggtggtgccgcccgcgctgggcgtgccggagacttgcgacctgtccaaggggcggtgggtgttcgacaacacgagctacccgctgtaccgggaggaggagtgcgagttcctgacgtcgcaggtgacgtgcatgaagaacgggcggcgcgacgacacgtaccagaagtggcggtggcagcccaagggatgctccatgcccaggttcgacgcgaagctgttcatggagaggctccggggcaagcggttcatgttcgtgggggactcgctgaaccgcaaccagtgggagtccatggtgtgcctggtgcagtcggcgtccccgccggggaagaagtacgtcacatgggagggccagcgcgtcgtcttccacgcctgggttcgtatcgtacctgccattgtccctttccgcctgctttag

SEQ ID NO: 21224 - DNA, 324 bp, Zea mays
  Peptide Sequence Number=SeqID_63003
atgcaggaatcccttgcaggaccgccatcacagcaaaatcctcccgagggcctccctacactgaccactcccctactgcccttgcccctttcggagaccgcaggatcaagggtgaacgccccggattttaaattgccaggcccgctcacaagcgtcagatcccgatcggacgaccccgagttaaagaagcgaaaggatatgtctgatctaatctcgaccgcaaaacgggagatcaacggctctagagttgtcttctaccccagacggatgaacacggccgcgccgccaggatcccacggcggagaccccgccggtgacacatga

SEQ ID NO: 21225 - DNA, 474 bp, Zea mays
  Peptide Sequence Number=SeqID_63004
atggggcacttcgtcaactccatggatccatccaacgtcgggggtgtaggtgatcagggactggaacaacatcgtctaggtcgtgctccgctcgcccaagggagcttccgagcgggtgagcctgtacggcggccaggtcgtctcatggaggaacgaccacgacgaggatctcctcttcatcagcagcaaggttcaagtttaaagaaatgtccacaaattcagaaaagtgcaacagtatactcttctttcaatcaagactattgggtgcaacgaagattgttcttactgccctcaagcatcaagatacaacactggattgaagaagtgatggacaagtatgttgaagcatcaaaaaagatgaacccagcaagcaagtctggagcgcggtataacaggagccctgggcttccaatagttaaaggaagcccaggccgatcatccctgcaatctggttcaacccagcgcaccgactga

SEQ ID NO: 21226 - DNA, 1587 bp, Zea mays
  Peptide Sequence Number=SeqID_63005
atgttccagcctcataacgaccaaagtaatgacaacggggatgaggaattcatagttgcactagttgctttggatatatggggggttcgtcaagtggggtttcaagaagacccatggcggaaactggtctcctgtttccatcctcttccacggttccacttccacccccatctcctcgccctcggcaagcccagcaaccccaatccccaatcccgtccgcttctttccccgtccccgaccttgccgaggaacctcccgctcccaaatcctagcctctcctccctcgccgctcccctccccatggaggacgaggacgccggcctcggcgacgggggcgaggcctcccctccgcaccatgccgcggcgtcgggcgaccgggcgcgggacttggcggcgtccccgaccagctcgcgctccgtgacgcagacggtgaacgggtcccaccgcttcgtgatccagggctactcgctcgccaagggcatgggcgtggggaagcacatcgccagcgacaccttcaccgtcggcggctaccagtgggcgatctacttttacccagacgggaagaaccccgaggacaactccggctacgtctcggtcttcatcgcgctcgcgtccgacggcaccgacgtgcgcgcgctcttcgagctcacgcttctagaccagagtggcaagggcaagcacaaggtgcactcgcactttgaccgctccctagagtccggaccgtacactctcaagtaccgcggatccatgtggggctataaaaggttctttcggcgtaatgctcttgagcaatcagattttcttaaagatgattgcttgaagataaactgtactgtgggtgttgtagtatcaactatggattattccaggccacattcaatagaggttccagagtctgacataggctatcattttggaactcttttggacactctggaaggtgtagatgtcatttttagtgtagcaggagagaagtttcatgcccataagttggtattggctgcccgatcttccttttttagatctgaatttttcgaccatgaatctgatgaagagaagaacgaaactggtacaggggatgaaatcaaggagatcgttattgatgatatggatcctgtagtgttcaaggcggtgcttcactttatgtacagggacaatcttgttaatgatgatgagttgatggcatcaagctctgactgctctatatttgatagtttagctgggaagttaatggctgctgcagacaaatatgagttgccaaggctaagattgttgtgtgaatcttacttgtgcaagcatgtttctgtaaactccgtggcaactactctagcattggctgatcgataccatgctatcgagcttaaatctgtttgcctaaaatttgctgctgaaaacctttcggctgtgatccggaccgaggggttcgactatctcaaagacaactgcccatccctgcagtcagagatactgcggacagttgccggatgtgaggaacaatgtagcagcggcgtgaaaagccagagcgtatgggcgcagctctctgacggcggcgacaccagcggtcgcagggtgaggccaagggtctga

SEQ ID NO: 21227 - DNA, 978 bp, Zea mays
  Peptide Sequence Number=SeqID_63006
atggccgtcatcgccgccgccgcattgctcccggcgaccgcgtcggcgacgacgtacatggtcggggacgagtccggctgggacgtcgggccggactacgacgcctgggccagcggcaagaagttcaaggtcggcgacacgctcgagttcctgtactcggagggctcccacaacgtggtggtggtggacgcgcagagctacgaggcgtgcgccgtgccgagcaacgcgccgacgctgacctccggggacgacagcgtggagctggggcaggccgggcggtggctcttcatctgcggcgtcgagggccactgcgacgccggcatgaagctcgccgtcgacttctcctcgagcatcggacgaaaccaggcccacggcccacctcacttcgctgcggcgagtcgaggcggggaagacgagctagcggcgaggatgttgtgggtagataagtaccggccgaaaaccctagacaaggtcaccgtgcacgaccaggttgctcagaacctcaggaagtttgtgtcggagcaggattgcccgcacctgttgttctatgggccgtcggggtccgggaagaaaaccctaatcctcgcgctcatcaagcagatgttcggcgctggcgcggagaaggttaagcgggagaacaagacatggaaaatcgatgctagcatccatgacgtgttccatgtgggcaccctcaagaagttcattggtgtgcctccaatagctccaccggccctaccgcatattcaccgtggcgcggtggctccaacaccagttcgtgtcgagcgcgctcgcttggcacgcgacgttcgccagctactcgtccactggcgcggcgaaccaccggaatcagccacctgggaagaccttgacgctttctgcgagcaatttccggactttcagctcgaggatgagctagaccttgaggaggggatagatgtcatgtgggggcaccactataccaggcgccggcgagcatga

SEQ ID NO: 21228 - DNA, 204 bp, Zea mays
  Peptide Sequence Number=SeqID_63007
atggatcctaaaggcaagggaaaggtgaccaacgagaaggagaaggagatcccctccaatgaaacacccaagggagagaccatcgactctgggtctaagacaactgatcaagccaaggatggaggcaagaagagcttcgatgtaccgagtgcacgggagaaggtcacagaggctgaggaacccaaagccaggggtgaagaataa

SEQ ID NO: 21229 - DNA, 381 bp, Zea mays
  Peptide Sequence Number=SeqID_63008
atggattcaacaaactccatagctgacaaggcaattggaaggatgcaagagttatcggacaagtttttttctgtagccagggaaacaatccgttcgggacaaggtttgaccctgtttgacgctaccaagcttcgtgtagctttggaggacatagcgtgcattctggagcagaactctttggtgttccaagaatatttggacaaggtgaacaacgttaacaaccatgttgatgagtactacgtgccctccgacttgtcctcgccaccaccgcctgaagcagaccttggtgaagactgggactttgctgatcacttcgaaaacttgtggggtgttgaatatgactcagatctgatgccatcctttagtgacaatgagttctaa

SEQ ID NO: 21230 - DNA, 417 bp, Zea mays
  Peptide Sequence Number=SeqID_63009
atggtcaagttgcctgcactgagaatgaagaggatgtttcatggtgatgattgtgctaatgagttcaaaatcaggaccatgaaatccatgaaagtttcacactttcatgtcagcgagttagagcagtcagctatgtcgaacttatcagataaaactcctcaagatgagccagacccaaccattcaacttgctgaccaggatattagggtaacagaagcttctggcttgcatgatctgattggaggaaaatccatgctcgaggatttaacatccgaagtgatagattcaccaaattcagagggtgactcctctgctaattatgatgacaacaaatctgtgttacatgcagtgaattatgttggcaaagattctgccactctggacctatctgaaattcaatgctgtcaaggtgtctaa

SEQ ID NO: 21231 - DNA, 657 bp, Zea mays
  Peptide Sequence Number=SeqID_63010
atgaggaggaagaggagccgtgggcgggagcggcggttgcggagcggtcgcgcgcggggtttgcggtgggcgggcgggcggatctcgccggtcacggctggtgggcgggcgggcggatctcgccggtcacggctggtgggcgggcgggcggatctcgccggtcacatcgcggcggttttgcggatcgcgacagtggaggcatgcacggagcggtcgcggcggggtggctggatggcggacgggcgggccgcgagatcgcggcggttttgcggcgagcgggcggatcgcgcggttgcggcatgcacgggcgggcaggcaaggcgtcttcccagcagcgccttcatcagccaccgccgtcgcgtcttcttcagctacaccttccgcaccgcggctgaaaatgcgccgctgccccagatcgtcgtcgtgggctccgccgacatctacgtcgaggtccaccgatccccgctcatcggcgagacggccgcgcgggcggcaagggcgccaacctggccgcctgcggtgcgccctacctacctcgtggcgcgcgtcggggatgacgccaatggccgactactcgaggacgccctagccgacgccggcggcgttgcaccgaccgcgtcgcgcgcgcggccgatgcgccatcgggacacgccatag

SEQ ID NO: 21232 - DNA, 351 bp, Zea mays
  Peptide Sequence Number=SeqID_63011
atggccttgttcaaccaaagccagctctgtctgggtgcaccggactgtccggtggtgcaccggacagtgtctgactgtccggtgagccaacggtcggccgggccaacggtcggctgctcgatccgcgcgagacacgtggccaagccaacggtcgggagggggcacaagactgtccggtgtgcaccggacaatgtctggtgcgccaacggctccaaggcgccaacggtcggcttcgccagagaaggaaagaaatccgcaccggacagtgtccggtggtgcaccggactgtccggtgctccaggcgacagaaggcaagaattgccttcccagattgctctcaacggctcctag

SEQ ID NO: 21233 - DNA, 516 bp, Zea mays
  Peptide Sequence Number=SeqID_63012
atggcaccgccgtggttcttgggtggcgccgccgtcccgagctggggagtggggggaaagcctctagccgttagatcgacattatgcgcaaatgatcaaaggaataacgtgttcccgatgatccgtggcggtctagttcaatcagagggatttgggggaactgtgaaattcgagctcgctggcgatcaaatgagggcaatactgggtggctgggtacttgactaccctacggagcttgcggtggcttcaatttatagagcgcaacagcggtggccgggaattgcagtggtgacgcgcggcggtcggaggagggggagtttactggcgcgcgtgattggtggcaaaccccgtggcatccactccggtgatcaacggagagctaaagcaggatgcggtgatgcgttggaaatgcctagacacgcgacacaaggccgaaaggcggcggtcaccggcgtgcatatcagaatccaccgcggcgagctctgtacggtggccggaatattttactggccgtag

SEQ ID NO: 21234 - DNA, 906 bp, Zea mays
  Peptide Sequence Number=SeqID_63013
atggcgagcagaggatccactcgcgtggtcctgtgcacgcggctgggcgagcagggcgtggccgacgcgcagggagcagggcgctcagcgcgcggcagagaagagggaagtagggcgcggcaccaggaacgagctgaggaagaaagtgagagattgagcgcgccgtggggaaaggaagcagggcacggcgcgtgcgcaggatggcgcgcgcggggaggagacctcggctggagagagcgcgcagctgagcaggcagctgggcgcgagcaggaagaagacgcacgagagggagagagctggggtacagggagacgagcggccgaactggagcagagcaggctccatggccgagggccagggccgctgggcgagatccgagccggggaggagcgccgcgagagctttccggcgaggtcgcggccaggtatggagttccatggcgcggactactccgcgcgctggaggaaagttccggccaggtgcggccatggggagctcggggcgccgtacaggggcagagcgagctcgctagggaggagaggggctgggcgaccgggcgtcgagccagaggggcgcggctatggcaagggagaagcgccagggagaacctcagctgccatgggagcaggggagctcgcggctgggcactcggcgatagagcaggcgcggctgggggttgaagagaggaaaagctgggcgacggaatcctcgctgccggcctgccgcgcgcgtagatatggatcaggggctcagggcatgggcgacgggatttttcatcccagagcggcggcaggaaatatcaagaggagagataaggagagggacgggagatgcacgtatgggatatttgaagaagagctgggcgtgcaagcggtggaaaaatctctaggagatcttgcgcgctag

SEQ ID NO: 21235 - DNA, 216 bp, Zea mays
  Peptide Sequence Number=SeqID_63014
atggcaatccattaccagagtataacaacgcaacacaggcattcttcggatacatcggatcaaatcctgctggaggaaccagagagttggaaaatctcatgtctcacaagaaatgcttatcaccccaatgtcatatacgccaagataagctgctgggatttcaccattgcccttggatattgctacaaggaaatcactagtcagcatccagtttga

SEQ ID NO: 21236 - DNA, 309 bp, Zea mays
  Peptide Sequence Number=SeqID_63015
atggctttgttctccacagtggaaacatgctctgtttccaccctgaactggtgctgcttgactgttctgctggctggggacccactgatcttgcgcttgcgatccttccatctctttacgcttcctctctgtcatgatagctctgtcaatcaggtgctgaaaagtggggaaggtgatggtgtcggggttggcatggatggcgaggcatctgaggcatctgaggctgaggtggtggctgctgctgctactgctgctgaatggcggccagagtctgaccgatggcttgaactacctgagtctgcatcatga

SEQ ID NO: 21237 - DNA, 180 bp, Zea mays
  Peptide Sequence Number=SeqID_63016
atggagagcaagctcaggaagatggtgaataaattcaagacaatgagcaagctcaagatggtggcatacatcaagggggagatgaagaagaagatcaagaggaggaagaaagcttccaaatcaagcaaatccaagattgcaccttcatcagccaagcgaagtacactaaggatattctga

SEQ ID NO: 21238 - DNA, 462 bp, Zea mays
  Peptide Sequence Number=SeqID_63017
atggggcaaaaatgggctaaatgtttgcatgcaaaaatagcaataattaagttcacacttaacgattctcatgcaaaactaaattacactacatttattttggaatatgagcacagggcagaaaaacatcatgagcttcttttaaataatgctcagcagcgccctccgggttatgctccactgccggtttatttcaatgttcataagtcagataataagaagggattcaagaaaaatttcaagaattccactggacctcgcaaattcaacaagcgcaaattccataagagaggaaaaggaaagggtaaaggcaagcctccaccacctaagggcaataaagtttgcacaaatgtggtaaacctcactactgttgacaacaagcttatccttccacaagatgatgaaacatatgacatgatcattgagtatctattgaaggatccatatggagatttgacataa

SEQ ID NO: 21239 - DNA, 873 bp, Zea mays
  Peptide Sequence Number=SeqID_63018
atgaggtcgaccagagaagaatcttcgctaccgccaatgggtctgatgcgcacagattgccacacgattgagctcgggcggaagaacggcgcggttctgttgcgttcggttgaggaggatgctcctgacaagcgggtcccacccgacagtggttcgaagcgcagaccaggagcaagccgcgtgggccgcgcgtgggaaatacgatattgggccgaggcaagggtgaggtgggattccctgcccacggtgagacacggccttgaagatccgacgagcagttcgccgcgcgcccttcaccgttttgcccgcgaagacccggaggagaaacttggtggcgtggtgaagctcaccgggtcgagctcgtgctccgaacagcaacagggatttggaccaatggcggcggcgcagaggtggaccaatggaggtggctgcgacaaagagcggaggcgagtgtgcgtctgcgccccgacgaccaattcacggcgcccccgaacaccagacgcagaactctcagatggtggcgagtccccctggcgagttggcatacggcgagcgcagctgcgcactcaacgattgatgacgatggaccgagctagcccccgagcggcggcgatgaggtcgaccagagaagaatcgctaccgccaatgggtctgatgcgcacagattgccacacgattgagctcgggcggaagaacggcgcggttctgttgcgttcggttgaggaggatgctcctgacaagcgggtcccacccgacagtggttcgaagcgcagaccaggagcaagccgtgtgggccgcgcgtgggaaatacgatattgggccaaggcaagggtgagggcacaacttctccatgtacaattcatgaaagaatag

SEQ ID NO: 21240 - DNA, 567 bp, Zea mays
  Peptide Sequence Number=SeqID_63019
atggaggacataataggtcagaggacacttgccttcaccaggtggttgctcagggaggggtccgagccgttcgatcaagatcggacggagggggggtccgagggggttcgaggggggtccgagccattcgatcaagatcgaacggagggaaatcagaccggaaaggatgagcggctgcgggtggcactgacaggcgggccagggcgtgtcaggcgcgcgtgcgcgaagcagtatcccacagtccaggccgtgcgatcaagatcggacgggggaaatcagaccggggaaacagacgtgtgcggagtggcgccgctcctctccacggtggtgaggtcgcttgagtcagggcaggcgcgagctagggtggctctgtggtcgccggagttgggcagagagggagagggcgccacggtgaactcaatggcggggaagggccatgaatccactggcagagagggtagaacggcggtgagaaggcttcgggcaggccgaagaaactccgaccgggctaaatcggtcgaccaccgcgtgagcacgacggaccgctgcggccgagcatcggcgaag

SEQ ID NO: 21241 - DNA, 1176 bp, Zea mays
  Peptide Sequence Number=SeqID_63020
atgtcagtacccgccgctgctaccgaaaagcaggttcagtgcacggggacacggccacaaccagcactcacacccgacagcgacggcggcaccacgcggccccgggacggagaaaggagtcaatcagccaaagccacccaccgcttttacccaccgatcggcgttgccgccgctagcattgtcggcttcagctccatccaaatccaccgccagcaagcaagcaagcaagccggcgccatgggtctgccgatgaggagggagagggacgcggaggcggagctgaacctgccgccggggttccggttccaccccaccgacgacgagctggtggagcactacctgtgccgcaaggcggcggggcagcgcctccccgtgcccatcatcgccgaggtggacctgtacaggttcgacccctgggacctgccggagcgcgcgctcttcggggcccgcgagtggtacttcttcacgcccagggaccgcaagtaccccaacggctcccgccccaaccgcgccgccggcaacgggtactggaaggccaccggcgccgacaagcccgtcgcgccgcgcggccgcacgctcgggatcaagaaggcgctcgtcttctacgccggcaaggcgccgcgcggggtcaagacggactggatcatgcacgagtacaggctcgccgacgccggccgcgccgccgccgccaagaaggggtcgcttaggttggatgactgggtgctgtgccggctgtacaacaagaagaacgagtgggagaagatgcagctggggaagaccgccgtcgccggcgtcggcgccaccaaggaggaggcgatggacatggccacctcgcacacgcactcccactcccaatcacactcgcactcgtggggcgagacgcgcacgccagagtcggagatcgtggacaacgacccgttcccggagctggactcgttcccggcgttccaggacccggcgatgatgatgacggtgcccaaggaggagcaggtggacggctgcagcgccaagagcggcaacctgttcgtggacctcagctacgacgacatccagggcatgtacagcggcctcgacatgctgccgccgcccggggaggacttctactcctcgctcttcgcgtctcccagggtcaaggggaaccagcccgccggagccgccgggttgggacagttctga

SEQ ID NO: 21242 - DNA, 1833 bp, Zea mays
  Peptide Sequence Number=SeqID_63021
atggaggggcgtgggaaccctccgcacaccaccactgatgctgtgatcaagaagccaaggagcgtcgcatccaggaagccaaggtccacggagcagctcacgtatgagtacaatggcatttgcccgccatcttggagcgctccccatgacgatgacactggcgttggagctggtggacatcggaggaaagagctacacctaaatagccctgaaatgaagggctccatggctcataggagcgacgtgcccaggaagataaggagggatgatagatctggaggcgaccatgatggccatggtcggagcagcaaagcaaaggatgctgccaagcatggaagtgaaaatgttcttgccctagagtgcacagcaagaaacaatggatcccctgataacccacagttggtccccagagatgactctatgccttgtgaaaataggtcgagaaaagtaaagctcaaagttgttagtcgaaccctacatgccaaaaatggccaggatgctggtggcagtggtattcctgccacgttggatggctctattcatcagtacaagcaaaagggttcgcttgcaagtttgctgtggcctccgccctgccgccaccacccccgcgagagatgccacgaggctcgtcgagcaggggcgcaagaaggggccgcggaagaaatcagggaaggggtggcgctaggggaaaggagtcaatctaatttaaattttggttccatactcatcatggctttgcaagattctggtggccacacaaacaaagagacccatggtaatcgtgttgaaggaaaacatggcaacgggcatgaaatttttccatcttctgaccttgttcgcaagagcaaaaggattcccaagaagaaaacacttgacggagattctgatgatgaagatggtgaattacgctatctggaaaaactcaaaggggctaaagttgcaccagatcctgtgaacactagccataaaggttatgattttggtgatgatgctctcaagaaaaagaagctatccaagctttctagaaacaagagcaccccatatgaagtggacgacgacttcagaatgtctcgatctggcagggatggtaggaagaagttgaatttaggggatgacaatgagtttatagaagaggaggaatctgagatggatgaaacgaatgggctaaaggaacctgattcacctcaaggtgtgaagattgaaacccctggtcttacaacaagacagcgagcccttcaaggcaggggtggcaatggtgaaagctttattgagtttcctgatggattaccagcagcttcatcaagaaagcaaaaggagaagctctcagatatggagatacaagccaaaaaggcagaagctgcgctgaggcgcaagatgcaagttgagaaggcagagaaagaacagcaggctgaagcgatgaggaagatactgggaatagattctgagaagaaaaaggaagagaagaagctgaaagaacgagaagagagggaaaaacaggcaagattggaagaatacaggaaaaactgcgtccagactgtcatgggcccaactgggactgtgattacattccctgagagcatggggcttccgagtatatttaactccaaacctgtcagctatccgcctccgagggagaagtgtgcaggcccatcgtgcacaaacccgtacaagtaccgccactccaagactctggtccctctctgcagccttgcttgctataaggccgtcgaggaccgtcctcctgcccaggggagtgaaggtggtggtggccagggaagcgatgctgggcagggaactgatgccgcccaggagagtgctgggaagcaagcatga

SEQ ID NO: 21243 - DNA, 327 bp, Zea mays
  Peptide Sequence Number=SeqID_63022
atggccgttccagatccgtcgagcccgtacaaggtgctgctgctgctgatggaggactacccgtacgcgtcggacgggctggccgtctggcacgccatcgagcagtgcgtgacggagtacctggccatctactaccccaacgacggcgcgctgcaggccgacgtggagctgcaggcgtggtggaaggaggcacgcgaggtcgccacgccgacctcaagcctcaaggacgaaccctggtggcccaagatgcgcaccacggcggagctggccaaggcctgcgccaccatcgtctggatcgctgaaaacatcagctcatttacaaattga

SEQ ID NO: 21244 - DNA, 2484 bp, Zea mays
  Peptide Sequence Number=SeqID_63023
atggcgactcgcgccggacgactgcccaccactccggcgcccgctcttctgctcctcctcgccttcccgtttctgctgcagggagttcttccgtcgcgagccggggacaccgtcgccgccggccgcccgctgtccggcggacagagcctcgtgtccaagcgtggcaagttcaggctcggattcttccgcccaggtgcaacagacaactcgagccagcgctggtacctgggcatctggtacaaccagctctcggtgcacaccacggtgtgggtggcgaaccgggggacgcccatctccgacccggagtcctcgcagctatctatctccaaggacggcaacatggtcgtcctcgaccacagcaggtcgtctaccgccgtctggtccaccaacgtcaccaccggcgtctcctccacgtccacggtcggcgtcatccgcgacaacggcaacctcgtcctggcggacgcgtccaacacttccgcggtgctgtggcagagcttcgaccactcgggcgacacgtggctccccggcgggaagctgggccggaacaagcgcacgggcgaggtcacgcgcctcgtggcgtggaaggggcgcgacgacccgacgccgagcctgttcgcgctggagctggacccgcgcggctccagccagtacctgctcaactggaacgacagcgagcggtactggaccagcggcaactggacggggacggcgttcgctgccgtgccggagatgacgtccaccggcgcgtcgcccgtgtccgactacaccttcggctacgtcgacggcgccaacgagagctacttcacctacgacgtcgcggacgagtcggtggtgacgcggttccaggtggacgtgacggggcagatccagttcctcacgtgggtggcggccgccgcccagtgggtgctcttctggtcggagcccaagcggcagtgcgacgtgtacgcggtgtgcgggcccttcggcctgtgcaccgagaacgcgctgccgtcctgcacctgcccccgggggttccgggagcgcgacctggccgagtggatgcaggacgaccacaccgcgggatgcgccaggaacaccgcactccagccttgcggcgccggcgccgccgctcgagacgggcagaagcgccgcagggacgacgataggttctacacgatgcccgacgtgaggctgccgagcgacgcgcggagcgcggcggccgcgagcgctcacgactgcgagctcgcgtgcctccgcaactgctcttgcaccgcttactcctacagcggcggctgctcgctgtggtatggggacctcatcaaccttcaggacacgacgagcgctggcagtggcaccggaggcggcagcatctcgatccgcctcgctgcctccgagttctctagcaacgggaacaccaagaaactggtcatcgggctcgtcgtcgcgggctcctccttcgtcgccgcagtcaccgccatcgttctggctaccgtcctcgttctaaggaaccgaaggatcaagtcgttgaggacggtccaaggatccctggtggcgttcacgtaccgcgacctgcagctggtgaccaacaacttctcggagaagctcggcggcggcgccttcgggtccgtgttcaaaggggtgctgcctgacgcaacgctcgtggcggtcaagaagctggaaggcgttcggcagggggagaaacagttccgcgccgaggtgagcacgatcggcacgatccagcacgtgaacctgatcaggctgctcgggttctgctccgaggggtcgaggcggctcctcgtctacgagcacatgccaagcggctctctggacaggcatctgttcgatcgggaccagcagccgggtgtcctgagctgggacgccaggtaccagatcgctctcggggtcgcgagggggctggactacctgcacgagaaatgcagggactgcatcatccactgtgacatcaagcccgagaacatcctcctggacgacgcgttcgtccccagagtcgccgacttcgggctcgccaagctcatgggtcgcgacttcagccgcgtgctcaccaccatgcggggcacggtggggtacctggcgcccgagtggatcgccggcacggccgtcaccaccaaggcggacgtgttcagctacggcatgatgctgttcgagatcatctcgggccggaggaatgtcggccagcgggcggacggcacggtggacttcttcccgtccacggccgtcaaccggctcctcgacggcgacgtgaggagcgcggtggacagccagctcggcggcaacgcggacgtggccgaggtggagcgggcctgcaaggtggcgtgctggtgcgtgcaggacgcggagagcttgcgcccgagtatggggatggtggtgcaggttctggaggggctggtcgacgtcaatgccccgcccgtcccgaggtcgctcatggtgctcgccgatccgtccaagtacgccgttgagttcttctcaggtttgccgtcgacctga

SEQ ID NO: 21245 - DNA, 261 bp, Zea mays
  Peptide Sequence Number=SeqID_63024
atggagacgcgcggcaagcggctcctcttccccgttctactggttctcatcgccgctgccgcggctccgtccgccatgtcccgtgacgagagagaggtgatggaggtgtccggtgcggcgccccagctcacggatctccacttcagcgtgcaccatgcggagcgcgcctacgacttccggcggtatgtcggcccggcgatggccatggtcaaccccgacctcgtgccgatcacaggggaccttaactgggcttgtcaatga

SEQ ID NO: 21246 - DNA, 1986 bp, Zea mays
  Peptide Sequence Number=SeqID_63025
atggccaccgagctactgtcgccgctcatcccgcaccagcagcgtcgacgcgctctcgccgtcgtcgtggccgcgcccctgcacgcgctcctcctggccgctgtcgccttctcccgctcaccggtggcggcaccggccagctcatcgaggctcgttgacttgacactcctcgccggcgctcgggggaagggagcggtgtgcttggatgggaccccgcctggttaccaccttcggagaggattcggttccggagctcacaactggctcgtcttccttgagggaggaggttggtgcaacaccacgcagagctgctccgagcgcaaaatgaccaacttcggttcatctaagtatatgggagcagtaaacttcactgggatactcagcaatgatcacacagaaaatcctgatttctacaactggaatacagttgtcataaggtactgcgacggagcatcatttgctggggatgcagaggggggagatctggatggaaccaaacttttcttcagaggattacgtatctggaaagcagttgtagatgaactcatgggaaaaggaatggacgctgctaaacaggccttgcttacaggctgttctgctggttctctagctgcgctactgcactgtgataatttccatggacggtttcctcatgaagtttcagttaaatgcctttctgatgctggattttttattgacgagaaggatttatctggagaaagatccatgcggtcgctcatcagtggagtagttcaccttcagtgtttctttcctgctgaactgattaagggcatcaccacccccacgtttattctgaactccgattacgattcttggcaggaatggtctagttgcaaagcagatatccggaactgcagttgcgcacaacttgatgtactgcatggattcaagaagaaattagtcagtgaattgaaggttgccgaagataacaaggactggggcctgttcattgattcatgctttacccactgtcaaacaccattcgatatcacatggaattcaccgatctcaccaaggctcggcaacaagccgtccagccgctccttctcagcgtcgctcctggacgccatctaccgctccctcgacgacggcgacggcgccgatgtcgttgttgacgtcgcgcgtgggagtgtagaggagaaggcggccgcggccgcgacagcgcagttctggtggacaaacaaggcggcgcccaagccctgcaggcaatcgtcgtcgaccgcggacagggacaggcgccggcgggaggcgggagttgcgcgcccgcgccactcggggtcggggtacgcgtcgtcgtctgactcgtcggctgctagctacagcagcctctcctgctcgtcggcgtcgaccgtaggtatcgagtctacgtgccgccgccacggcccggccccgccgcgggtgtcattgtcagaggaatccgtcgccacggacacggaggaggcgaccccgctgccacccaagagcaaaccaaagaagaaggccaggccatgtttccccgttgcaagaatccgaccaagggcctcagtgccaccaccatcgtccgggccacagccgccgtcgtcgccggcgaagttcgcatgcgcactcaaggctcttttctcctcagcgcgcctccaaaggaagcccaaggctccggcaccggcaagaacgacccctccgcccaaaatctcgcagcctccacgcatgtcgaccacgagcgctgcgaaggctgctgacgcaccgcagccgtcggagccgacgacggtgcggctccaccctgaagccgaggcgtcggtggtgcgacgaagggtggaggagctggtgcggggcctcgaggagctggaggaggatgaggaggggagcgacgccagctccgacctcttcgagctggagagccttcgtggcgccggcgccgacgagctgcccgtgtacggcaccaccagcctcgtggccaactgcgctatcgcgcaggggccagctcgttaa

SEQ ID NO: 21247 - DNA, 615 bp, Zea mays
  Peptide Sequence Number=SeqID_63026
atgtgcggagagtttgatgctgccactagacggggtcaatcagttacagtatggctgtccgcggatcacgggaaggcacggggatcgccaagcaagggccagggcggcttgacttaccctccggatgagcccgacgttgagctcgtcggcagtgaggagcatgtcggcgctggggttgcggtagaacatgaactcgcgctcgccgtcggcgcgcagggtgacgaaggcaagcgcggggcaaagtatcgaatgcacgtagctaagaaatgcacatgtgcacacataacatccagatcgtacatattgaatcgaacgctcgatggccagttgtcggcgtcgccgtggcccaacgccaagactctagctccgcactctgacacctcggcacagctccacgtcctgacacctcgactacagcattcatcacaagcacctcattctgatggagtaaagctgatagttgggatgtcattcgaatctttagaagctgtagaagagttctataagtcatatgctcatggaattggattttcagttcgcataggagctcaactcaaggtgcttgatgtggttgagagaacaagagatttttatgttctaggcaaggattcttaa

SEQ ID NO: 21248 - DNA, 437 bp, Zea mays
  Peptide Sequence Number=SeqID_63027
aagttaaggcttccgcagaagaggcaggaagatctattctgtacgatataaccttgttggtgtcctcggagctaaaaaaaagcccccccgccttttggctcattgtcagactttgccacctgctccaagaaagcttcttggagatggtgcgcgccgagaagctcgccggcgatggctgctccggcggcgaaggccaagtggaggtggaggtcggcatggggatggacgggaagggggtcacagagtgccggatatgccaggaggaggggaaggaggccgctatggactcaccctgcgcctgcactggcgctatggactaccatgtcgtcgtccctgctgagactgagatggcgactcttcagttcaccggattctttctgccttgctatgtaatagctcgctcttgctacgctttgcagcaccggaaacgaagacag

SEQ ID NO: 21249 - DNA, 201 bp, Zea mays
  Peptide Sequence Number=SeqID_63028
atgagccaaataagacttgtgctgctgtgcaacagaatagatcttcctgcctcttctgcggaagccttaacttctgtggaggttctgaagcgtgtgtttgctgtgcgtgttcatgttcgctgcggcaagtcggctataccctactcatatcttcagaaatgttccagctgcaactcgcagctcgaaacagtcgcagtgtga

SEQ ID NO: 21250 - DNA, 640 bp, Zea mays
  Peptide Sequence Number=SeqID_63029
gcatctgccattcgcattaggcgtccaggcggtccaggcggtcgccaagaaggcctctgcggctgcggtctttcactacggatcaataagcttgattgctgagccttgccggacagcacatctccgtgccatggaaattgccaaagaggctggtgcactgctctcttacgacccaaacctgagggaggcactttggccatcccgtgaggaggcccgcacccagatcttgagcatctgggaccaggcagatatcgtcaaggtcagcgaagtcgagcttgagttcttgacaggcatcaactcagtggaggacgatgttgtcatgaagctgtggcgacctaccatgaagctgctcctggtgactcttggagatcaaggatgcaagtactataccagggatttccatggagctgtcccttccttcaaagtacaacaagtcgatacgactggcgcaggcgatgcgtttgttggtgcgctgctccgaaggatcgttaaagatccatcctcgctacaagacgagaagaagcttgtagagtctattaaattcgctaatgcgtgtggagcaatcaccgccacgaagaagggtgcgatcccgtctttgcccactgaaactgaggtcttgcagctaatagagaaggcatag

SEQ ID NO: 21251 - DNA, 228 bp, Zea mays
  Peptide Sequence Number=SeqID_63030
atgactttcacgcaaagccttatgctggggaaagctctaaaaatccagcaagaaaccaaagatgctgaatatgaagcagccatttcagaccttcaaggcgaagttgaaaacatcgagactccttggagaactcgcatctacgactatgcgagaaagaaattacaacggtcgaggctacgaccgaaagacaattatgttaagcagctatggattaaaatactggtttaa

SEQ ID NO: 21252 - DNA, 252 bp, Zea mays
  Peptide Sequence Number=SeqID_63031
atggcgtccaccaccaccaccttcctcgttgtcttgctgcttgtagcagcgtccgcattgctggcgcgatcctgctcacctcacgacctgcacaagctgctgagcgtgaagcagacactaggcaacctagtgatgtcgttgacgtggaccacactgctgcccaactgctgcgcgtgggaccacctctggtgcaacgacgtcgagcacgtgaacaacatcttcatcaacaacgcggacgacatgcgcggctag

SEQ ID NO: 21253 - DNA, 696 bp, Zea mays
  Peptide Sequence Number=SeqID_63032
atgatttacggaagagtggatgagcttgtgtactttgccggtttgaaggagcagtatgaaattgtagttcatcattacattcagtataaatttgctccagatttgatcatgttagatgcttatgagactgttgaatcatggatgatggcgagaaacaggttgaatccagggaaactcataccagcaatgatgcgttatgtgagcgaaccacatgcaaagaatgaaacacatgaagttatcaaatacttggaattttgtgtgaaagatttgaacaatgtggaccctggagtgcataatctgttgctatctctatatgccaagaaggaggatgaatcccagcttttgcaatttctcgacacaaaatttggtaaaggacaaacaaatggccctgacttcttttacgatccaaagtatgctctccgcctatgtcttcaagagaagagaatgcgtgcttgtgttcgtatttatagcatgatgtccatgcatgcggaagctgtggcacttgctttgaaggtattatgcctctgttggaaactgcgccggagagacaaccctgcaggttgccggcgagttcctacctcccagactttcataaggaaacaaactagctattacaaggtaataatccggactgctatcagtcctgatcttgctgattggatccgtccatataagactgatccactaccatactag

SEQ ID NO: 21254 - DNA, 675 bp, Zea mays
  Peptide Sequence Number=SeqID_63033
atgaagagcttaggaagaagctgtggcttaaggttgctaaacatgtcatcgagcaagagaaaggaggaaatatgcaaatctctgaaggactacaacagccagattgagcagctcaagcaggagatggatgatgccacacgtggggcagataatatcagaagtgatattggtgccctcgctcagagatatacagtaattgaccgtgagcaggattgtggggtttgccggcgcaaaatattgactgttggagggttgcaccaggtagggagaagctatacatctgttggacacatggcccccttttatgtgtttccctgtggacatgccttccatgcaaattgcttgattggacatgtgactcgttgcagtaaccaggtgcaagctgagagaatattggaccttcagaaacggcttagcttgatggacaggaaagcagcaaaagacaatggggcaagtgttaatggcgaacctattacgagcacaaccccagttgataagctgagatcacagttggatgatgctgtagcaagcgagtgccccttctgcggtgatttgatgatcaaggagatttcacagccgttcattctcccccaagagtcggatgaaaaggcatcatgggaaatcaaacctcaaccaacgcctcaaaagattctcccgatgaccatgtctatttga

SEQ ID NO: 21255 - DNA, 768 bp, Zea mays
  Peptide Sequence Number=SeqID_63034
atggtggaggaacttgtagttgatgatacacctgaaacttcaagaggaataattggcctctgtagtgatccatctacaggacttttctatgcatatgatgaaagttctatattccaggtttccacttcagacgagggttgtgacatgtggcaagtttacttggatatgaatcattatgctgctgctttatcccattgccgtaatcctttccagcgtgatcaagtctacctagttcaggctgatgctgcatttgctgcaaaagagtattacatagcagcatccttctatgcaaagataaattacatcctgtcgtttgaggagatcagcctgaaatttatatcaataggtgagcagtttatgtattctttgtcatggcacataagattttatgttgctatttccaaggttaataatcggaactacaataacaccaaggatgctctcagaactttcttattgagaaggctcgataacctcaccaaagaggacaagatgcagattacgatgatctcaacttgggctactgagctgtacttagacaagattaatcgcctcctattggaggataccactgtcaccattataaattcagtagcagagcctaatagctctgaatatcgttcgatagtaaatgaattccgtgcttttcttagtgacagcaaagatgtattagatgaagcaacaacaatgaaactactggaaagagttttatttaggactacaggatttgtctgcaataaatcaaatgcaaacttgaacacttgcaat

SEQ ID NO: 21256 - DNA, 426 bp, Zea mays
  Peptide Sequence Number=SeqID_63035
atgcgtagagcagatttgggcagcgatcgtgacgaggccattgctaggggggagcacatcgtgcgaggtggcgtccgggggagcggtggcgcggtcgcattgcgcgtggagagtggcggcgaggttggggcaagcgaggttgggacggttggtgagaaggagaacgagtggacgacacaccaaggggggcacgggggtgacgcacgaagtcaggagtggagacgtagatcgtgggcgtgggcacgaacggtggagattgaccgaaggcagaacacgcagatggcagaaccaggagaggtgggtcatgcagaacttgctacaggaggccgattcttttatcctagggttggaaaggtgttggtgttcgactccttagactatgaccttttgagctatacaaaattcataagcatcttagagttgtag

SEQ ID NO: 21257 - DNA, 249 bp, Zea mays
  Peptide Sequence Number=SeqID_63036
atgtcgggagatgacgccaagaagatggtgatcggcggtgagaagtccgctacaagccacgagaaggctccatccggggagtccgcaaacaaggtgaagggatccccttcacacaacaagtcgcgtcggagcggtgacaagaagaagaagatgaggaaggtggtctactacgagaccgactcttcgtcgccatccacctccggctctgacacgccgtccgtaacttctaagcgccatgagcgcaagtag

SEQ ID NO: 21258 - DNA, 261 bp, Zea mays
  Peptide Sequence Number=SeqID_63037
atggcgactctcctccgaggagctgggggaacctcgcttccgactgcccttgcggtggctcgctcctcctcgcttgcaagagccgtgaccgctccgccgccagacccgcccgcgcaacccctcttctctcccagcttcctcgatgccggcggcgaagcacgccagatcgagggctccgccccgggagacgcagtcgccagcgcgcggaggaaggaggcggatgtttcagcacgacgggagctcgatccgtcgcgcggatag

SEQ ID NO: 21259 - DNA, 281 bp, Zea mays
  Peptide Sequence Number=SeqID_63038
ttccctgttcttgccccaatattgttcgcgtcccgcatcgactggcttgcctcccgtaaatttgcgtgtgacggattcttccccaatcgccgagcgcgcgcatcagctgatggttcccgcgtcggcggcggtgagagaaactttagcggcgccgttcgggatcacgcgttcgctcgtcgagatcctccccgacggcccgacctcaacaagcacgccccgaacgccatcgtgtgctcccctcccggcatgcctctgccatgcctccgacccgtcatcgcctg

SEQ ID NO: 21260 - DNA, 1257 bp, Zea mays
  Peptide Sequence Number=SeqID_63039
atggccgccgagcatgccaccgccgcggtgggtgagccgcctcccgccacgtcgcagccggcggagggcgtgacggcggcggcgggccagaggtccgtgcccacgccgttcctcagcaagacgtaccagctggtggacgacccggcggtggacgacatcatctcgtggaacgacgacgggtctgccttcatcgtgtggcgcccggcggagttcgcgcgcgatctgttgcccaagtacttcaagcacaacaacttctccagcttcgtgcgccagctcaacacctacgtgagcgccccgtcccgttgcatccatcgtttcgtctcggtctcttactctctttccgtgctgtgtatgagtgtgtctatcactctatccgcgtggcgctcactgtttgttgtcatccggggtatcccaatcccacgggtgcaggggttcaggaagatcgtgccggacaggtgggagttcgcgaacgactgcttccgccgaggggagaagcggctgctctgcgacatacaccgccggaaggtgtcgccggccacgggggcggtcacggtggccgccgccgctgcggccatcccgatggcgctgcccgtgggctctccggtgtactccggcgaggagcaggtgctgtcaagctcgtccccggagcccccgtcgctgcagcagcacccgccggcgccgtccgggtcgggctccggcggggtggtctcgggcgacgtgggcgaggagaacgagcggttgcggcgggagaacgcgcggctggcgcgcgagctcggacagatgaagaagctctgcaacaacatcctcctcctcatgtccaagtacgccgccactcagcagccggacgccgccaaggaggcggccgccgggaactgcaccggcgagtcgtcggatgccgccgcggcgcctccgctcccttcgatcctggagctcctaccctcgtgccgcgccgaccccgcgcccgctgcagccggaacggatcacgaggatgacgaaaaggcgggcgctaggctgttcggcgtctccatcgggcggaaacgaatgcgggacgagagcgaccaccacgccggcgtctgcgcagcggaggtgaaagccgagccggtggacgcgcgtcccgaccagcagcggcagcgcaacgccacggagccgcagtcgtggcccatttaccggcccaggcctgtgtaccacccgctccgggcctgcaacggctcgggcagcgctgggagcgaccacgacgggtccaacgactcgaggtga

SEQ ID NO: 21261 - DNA, 765 bp, Zea mays
  Peptide Sequence Number=SeqID_63040
atggccgccccgcgagccactcgtcccgtcgcattaactctgcggcaggacaggcggcacctttggcaggcgaagcaggcgacgcttcacctccgccatgatgaccgcgtcaaaaaagggaccgggaaaggggatactccgaaagggatccttctccgcgaaggaagcgggccccgagcccccctactgatcagaggttcgaagactggcccctcggaagggttcaacagccgcctcagagtgctcgggctccgcgcccactactggtcagaggaaactccgcctcgcccgaccccagggctcggactcagcctcggctccggaagacgacgaactccgcctcgcccgaccccagggctcggactcagcctcggctccggaagacgacgaactccgcctcacccgaccccagggctcggactcagcctcgggctccggaagacgacgaactccgcctcgctcgaccccagggctcggactcaggctcggccccgggagacgacgaactctgcctcgcccgaccccagggctcggactcaggctcggcctcggaagacgacgaactccgcctcgcccgaccccagggctcggactcagccttggcctcggacgacggtctccgcctcgcccgacccggggctcagactcgacctcgacctcggaagacagtctcgacctcgacctcggaggagcctccgcctcgcccgacccagggctcagaccaaccacgtcacagggggccatcattaccctacccctagctag

SEQ ID NO: 21262 - DNA, 216 bp, Zea mays
  Peptide Sequence Number=SeqID_63041
atggatgccaccatcccattcttatttcgacaggtgagtgacaagagcattggcctgttcttgcgatatgcattcaccagtaggtacaaagaggttctaatgtttgaatctgccagagaatcgatgactggtttcaagaaatggcgagcaggtgggatgagactgcaaaaggcttccattcttggccggaagaggaagacaaagctgcctgaatga

SEQ ID NO: 21263 - DNA, 1173 bp, Zea mays
  Peptide Sequence Number=SeqID_63042
atgggggagatcatccagtgtcgagaggcctcgggagccggtgcgggtctgctcttcatctcacctcttgggaaacatctccgctacgtgctgcgcctccatttcccggcgtcaaacaacgtggccgagtacgaggctttggttaatgggtggcgcattgccatcgagctaggggttcggcgcctcgatgctcgtggcgactcgcagcttatcatcgaccaagtcatgaagaactcccactgtcgcgacctgaagatggaggcctactgcgacgaagttcgacgcctggaagacaagttctacgggctggagctcaaccacatcgctcgacggtacaacgagactgtggacgagctggcgaaaatagcctcggggcggacaacagttccccccgacgtctcctccagagacatacatcaaccctccgtcaagatcgacgacacgtctgagcccaaggagacctcggcccagcccgagaaggcacccgggggcttctcgcacctgctggtcgccatcgacaaattctccaagtggatcgagatccgacccctaaccagcatcaggtccgagcaggcagtggcgttcttcaccaacatcatccatcgctttggggtcccgaactccatcatcaccgacaatggcatgcagttcactaggaagaagttcctggacttctgcgagaaccaccacatccgtgtggactggaccgccgtagctcaccccatgacgaatgggcaggtggagcgtgccaacggtatgattctacagggacttaaaccgaggatctacaacgacctcaacaagttcggcaagcggtggatgaaagagctaccctcggtggtctggagtctgaggacgacgccaagccgagccacgggtttctcgccgttctttctagtctatggggccgaggctatcttacccacagacttagaatacggttccccgaggacaaaggcgtacgacgaccgaagcaaccagactagccgagaagactcactggaccagttggaagaggctcgggacgtggccttactacactcggtgcggtatcagcagtctctgcgacgctaccacgcccgaggggttcggccccgaggcttccaggtgggagacttggtacttcggctgcggcaggacgcccgagggcgccacaagcttactcctccctag

SEQ ID NO: 21264 - DNA, 621 bp, Zea mays
  Peptide Sequence Number=SeqID_63043
atggcgaccggcggtggttgctgcgtcgctagggaccgacacggcggggcactgtgccgcgcgacgtgcttggagacctcggccttcgtggccaccgcggagcgcagcgccgccaccacctgtcggcctctgctctgctgcggcagtgccctccgcgaaaccgagtactcgacggagttgaacgcggcgcacatcaagctgctgcaggacgacgtggtcaccggtatgaaggagagcgccggcgacgcgctgctgcgcgtcacaaggacgccaacgcctacaagagggtcctcaagggcagggccggtcctgaaggggggcaagcggagccgtcgcaccgggcctccgatttgggaagggccccaagacagttttaacgttgagggcctggtggaggcggtgctggaggcagccaagaaggactacgcagaggagcagccgagacgcgcacgggccatcctggtacttaatgacattacattacattacatgatgctgccgccactacgaaaggacggcaggatcgtctgcgacaacacgctggacgccaggctcagcgtctccttcaggcaaaagcttcctgagatcaggaagaaactcttcagctaccaagtatcctaa

SEQ ID NO: 21265 - DNA, 312 bp, Zea mays
  Peptide Sequence Number=SeqID_63044
atggccgactgcccggcactggcgagtggcgagccgtgccggctgcaggctgctgggctggccgctggtggcgagtggcgactgacaagccaccaactccaagccggcgtggccgactgcccggcactggcgagcggtgccagcgtgctgccgtgctggctttcgtctggacgactggacgtggacggtgggctggtgggcggtggccgaccggctgcggctggtcactggtggcgcgcggtggccgccaggcgcccaggcggtgagccggtgactcagcaggacggcaagcgagcggcgacgcttggctag

SEQ ID NO: 21266 - DNA, 366 bp, Zea mays
  Peptide Sequence Number=SeqID_63045
atggaggacctgttgggttcggagatcgggaagaacgactacgattggtgcagctcatacaataagccgcccgagcgcctcctcgagtacaacaagcagatcagggtcttcctcagctcaaccggttcgccagacagggagagcatcaggaccaaggagaccctgatcgagctggacatctatggtagctcgcgctatgaagcaatgctgctgagcgaggacttgcggaacacaagctggctgcatggattcgacgacaagcccgaccaaagcccgctgtttgaccaccggttcgagccgctgccggagcccttcagccccgttatgacagccgctgcttgtaaagtacagtatgatcaccactag

SEQ ID NO: 21267 - DNA, 342 bp, Zea mays
  Peptide Sequence Number=SeqID_63046
atggcgtctaagcgcatcctcaaggagctgaaggacctgcagaaggacccccccacatcatgcagtgcaggtcctgctggtgaggacatgtttcattggcaagcaacaattatgggaccacctgacagtccctatgctggtggtgtttttttagtgaacattcatttcccgccagattaccccttcaaacctccaaaggtcctgctctccatctgctccctgctgaccgaccccaacccggacgaccctcttgtcccggagattgcccacatgtacaagacggaccggccgaagtacgagtcgacggcccgcagctggacgcagaagtacgcgatgggctga

SEQ ID NO: 21268 - DNA, 687 bp, Zea mays
  Peptide Sequence Number=SeqID_63047
atgcaggcggcatgcaaccgcaccaagggggcgcgccccttcgattttgacgcgtccagcgtggaggcccaggcccacatgtcatggaccgggaaaggggataccccgaaagggatccttctccgcgaaggaaacgggccccgagcccccctactgatcagaggttcgaaggctggcccctcagaagggttcaactgccgcctcagagcactcgggctccgcacccgctactggtcagaggctggcccccgaaggggttcaaatagccgccttcagacgcagaagcgagggatgaccctgggagtcccaccagagggaggcatcgagccctcggaccccgtcaaaaggagaccggccaagtccggcctcgggcgccataggaagctccgcctcgcccgaccccagggctcggactcggcctcggccccggaagacgacgaactccgcctcgcccgaccccagggctcggactcggcctcggcctcggaagacgacgaactccgcctcgcccgatcccagggctcggactcggcctcggcctcggaagacgacaaactccgcctcgcccgatcccagggctcggactcggcctcggctccggaagacgacgaactccgcctcgcccgaccccagggctcagactcagctttggcctcagacgatggtctccgcctcgcccgaccctag

SEQ ID NO: 21269 - DNA, 282 bp, Zea mays
  Peptide Sequence Number=SeqID_63048
atggcgtgcggcaccctcaagcgcggaggcgcgcccccggcggcgcggcgagcgcggctcgtggccagcgcgcagccagcgcggcgcgaccgacctcagcgtcccatggcgcggcagcccctggccatggcttcctgcgccccgacccttgtatcagcgagctccctggcgcggcggctggtggcaatgagattgatggttcttggtattgactctggtaatggagaagatgaagctgtggaaggagacttccaggagttccaagattacgacgagttctag

SEQ ID NO: 21270 - DNA, 1524 bp, Zea mays
  Peptide Sequence Number=SeqID_63049
atgggggagtcggagctggaggatactgggtcaaaggctagttctaacagcaatatccagcagaaagctagtgctttgcaagaggtggaggatgaaaatgaggcaaacaaaatgcaggagaacagtgtggtgtctaattcagacgtagctgagcaagcattgaatggtgaggataatagcaacaatgattcttctgctggtgttgaagaggcagggacaaaacatttgccagtatcctcaggtgaaaaggtctcagatgggaggcttgaacatagcggtgttctgaatgacaaggttgaagatgacagtactttgcatgagaagtctgaagatgacacaatgtcggaagaggtctctgttatggagagcaatttgcctaatgacgctagaaatttgctaaactattgtagttttgcaagagttccaacaagaccacgaacagtgcttgcaaacaggaatgttggaccaggtcaaagagaaattactgtgtctgaacagctcaatttggttacttctgaagaaatatccaatatggcaatggatggagaagctaacactaattccataactagcatcgaggaaggcagtaaagttgagctggttggccaagaccaagaacatgctgaacaaagcgctatctgcaatcaagtggcagaatcagtggcattccatgaaaaggaaactcgaggtgaaactgaagaaaaggaagaacagaagaacatccctcaacattatgaagttgaggataataatgagacaaacgaactgtgtcctacatttgcttctcagaataacttcaatttgcaagttgagaaaggaatacaaatctacaatttagatacaccgccacaagatgaattgttgatcgatccacccgataaagggaaaacagttgattcggagttattacctaacatcaaagcagaagatgctgttacagtggaagaggaaaagattggccagtctagctcatttaaaatacgtgatctcaacctggttggtagtccagaggttgttgacatgcgaggtgaccctcgtttaggccaaagctctactgctggatgtccagtagacctacaagataatcaacaagttgagtttgaaacagctcttggtaacaacccgaataatactgacacatgtgccccctttctgttgggaaataagtcagttcaagttattgatatcgaagatgacataccaattgaagccggtgcttgtgacacgtcaaaatcaaaaggtgagatggtatattctagcatggagagcatgatgaacccgcctccggtgaacaccgatgctctacatggtatccaagatgggtatagtcttgcaatttcagattaccttggtgctgatatgtcatgctaccaatcaatacaagcagaacttcaagatgggatggacgctaaacggtcagagggcattactgtgatggatgatccaatatacagttctcttagtgacataggttttatggaggtttgggaccagcaacctcaagactatgaaaagttcttctga

SEQ ID NO: 21271 - DNA, 924 bp, Zea mays
  Peptide Sequence Number=SeqID_63050
atggcggcaaccttctgcgctggacccgccgcatccgcggcagtaaaccctagctccgccggctgccgaccccagaacctaactcgggctgccgtgctgtctgcttgctggcggcccagcaggccgactcccgctttcgtctccctccggcgccccaatgccgagctgcggccgctgcgcgtggccgccggctccggcgttgacccgaaggtgaggtatttcagacttacttttgcggttagtgtttgttccatgactgctgccactgaagttttacaaagaatgactgatgcatacatgaactttgttgtcaacggggaagattttcctcccatgaaggacctaattcagctatacaggacagcttttctagaaggaaatgaggaggttcttggtgtagttgagaaggcaatcactgctgtggaaaaagagaagagtacgatagcttcccaatttgaaagtattacaaccgaaataacttctgggaaggaaaagtttattcgcttaaatgccgacctggagaatttccggaaacagactgaaaaggaccgtgcaaagttaacatcaaatatacgggtggaagttgttcagagtctgttacctctagttgatagttttgagaaaacgaatctagagaacaccccagagactgagaaggagcaaaagatcagcgcaagctatcaaggcatatacaagcagttagttgaaacactaagatatttgggtgtgggagttgtggaaacagttggcaagccatttgatccttcggtccatgaggccatctcacgagaagcatccatgcaattcaaggcagggattgtcatgcatgaagtccgcagagggttccatttgaaggagaggctgctaaggcctgctactgtgaaggtctctactggctctggcaaacaaagtgcaagctcatag

SEQ ID NO: 21272 - DNA, 156 bp, Zea mays
  Peptide Sequence Number=SeqID_63051
atggatccgccgtcggacccgaagccaatcatgcccctcgatgagatcgtcagcgacttcgagggtgtgctcgcggcagactcttgcctcacagccccagcgcaagatgtggacaactcctggttggattcaccactaaaggccgagaaacaatag

SEQ ID NO: 21273 - DNA, 291 bp, Zea mays
  Peptide Sequence Number=SeqID_63052
atggccaggggaggtagagggaggggcatcgggcagggcagagggctcctcacctcgacggggaaacaacaactacagtccatggatgaaccttcaactcgccatggatcatcggctactcgtcggagtagggcttcgagtgactacgcagagttcacatgcccgaaggccgctcggtcgagggaacagagggaggacacaggggatgggagagagggagaggactcacctagaaccgccatgtgcagggacatctgcttctgcgcgatttggatttggggagggagatga

SEQ ID NO: 21274 - DNA, 273 bp, Zea mays
  Peptide Sequence Number=SeqID_63053
atggcgtgcggcgccctcaagtgcggaggcgcgcccccggcggcgcggcgcgaccgacctcatcgtcccagggcgcggcagcccctggccgctgcttcctgcgccccgacccctctatccgcgagctccctggcgtggcggctggtggcaatgagattgatggttcttggtattgactctggtaatggttgtccgcattgcaaccactgctcaggagaagatgaagccgtggaaggagacttccaggagttccatgattacgacgagttctag

SEQ ID NO: 21275 - DNA, 2331 bp, Zea mays
  Peptide Sequence Number=SeqID_63054
cttaaatcgttgggtttttcatatgattgggatcgtgaaatctccacgacagagccgggttattataaatggacacaatggattttccttcaactgttaaagagaggacttgcttatcagggttctgtttttatgttcttagtgttgcatttttggttttcaatgatttttaggctggcattgatatcttacaatcaggctgaggtacctgtcaattggtgccctgctcttggaactgtcctggcgaatgaagaagtagtagatggtgtgagcgaacgtggtggctatcctgttatacgaaaggaaggacatgacctgggtgccactttattggtttacacaacgaggcctgacacgatttttggtgcaacatatcttgttgtggcacctgagcatgttttactgtcatctctaacatctgaggaacaacgagcacataagtggcaggtagaggaatacagagaactttcagcaagaaagagtgaactagaaaggactgaacttcagaaggaaaaaactggggttttcagtggttcttatgctaagaacccagcaaccggggaaatcattccaatatgggtggcagattatgttctaggaagctatggcactggggctatcatggcagtgcctgcacatgattctcgcgaccatgaatttgctgtgaaatatgaacttccaatcattaaggttgtaagtccaccgaatggtaattgtgatccagtggaggcatatgaagatgatggcatcatgattaattcatctagttcttcatctggactgaatattaacggaatgctttcccaagatgctgctaagaaagttactgagtggatagagaataatggttttggaaagaaaaaggtaaactacaagcttcgagattggctttttgccagacagcgctattggggtgaacctttccctgtgagctaccttgatgataccaatgaaatggttcctcttacagaagatgacttgcccttgacccttcctgaattggatgatttcactccaactgaggagtttgaatatgggtgtggggaatgggttagaaccattgacccttcatctgggaagcctgcgagaagagaaacaagcaccatgccacaatgggctggatcttgctggtactatttgaggttcatggatcccaaaaactgcagtatattggttgataaggctaaagaaaggtattggggtccagttgacatctacgttggtggtgctgaacattctgtcttgcacttgctttatgcaagattttggcacaaggttctttatgacatgggtgtagtctccactaaagagcccttcaagtgcctgataaatcaaggattgatactaggagaaattgagtatactgcatatagagacaatgaaggcagatgggtttctgcagactcagactcaagtttgattgattgctaccaagaaaaagtagctccagacaaggttacaaaagttggagatcattatgttctgaaggataatccaaacattcgtctgaatgctcgtgcctacaagatgagtaaaagtcgagggaatgtcatcaaccctgatgatgttgtttcagaatatggcgctgattctcttcgcttgtacgaaatgttcatggggccattgagagattcaaagacatggagcactgggggaatcgaaggtgtgcaccgcttccttggacgaacgtggagactcatagttggtccacaattatctgatggatcatataatgatggaaccatgactaccgaagatgaaccaaccttggatcagcttcgagttcttcacagatgtattgcaaggtacgccctggccataacacgggtgtgttataacttccaagtacacaataagagaaaagcaggcccatcttataacattcaggtcacggaggaaattcaggaaacaagatttaacactgcaatatctgcaatgatggagtttgtgaatgctgcatacaagtgggaaacccagccaaaatctgttattgaatcctttgttctgctgctttcacccttcgcgccacacttggctgaggagctttggtttcgcctcggacatccacaatcattggcctatgaacagtttccagaggcaaaaagtgagtacctggaggaatcaaagcttgtactccctgtccaaatcaatggaaagaccaggggtacaatccttgttgacaaagcgtgctctgaggatgatgtttttcaaattgcagcctcggatgagaaactctccaaatatcttgatgggaaaggcatcaggaagaaaatttatgtgcctggaaggatcttgaatgttatcttagatcaacaaaagtcaaggacctga

SEQ ID NO: 21276 - DNA, 795 bp, Zea mays
  Peptide Sequence Number=SeqID_63055
atggcgcaggaggctgcaccggcgaggccggtgggccccaccaggctcgtctacttcgatgatatgggggcactccaccactcatccgccaccgttctctccgtccaccaggaggagggcggccgggtagcggtggtgctggacgccacggtcttccacccgcagggcggcggccaaccggcggacacgggcgtcatctccgccggcggagccaggttccttgttgaggatgtgcgggcgaaagacggagtggttttccactacggaagatttgagggcacggagcaaggatgtgggactgtatttaaggaggggggaaccgttagcttgcaggtcgacgcagaacgacgcagctttaattcaaggcttcattctgctggccatttgttggacatctgtgttcacaatgtaggcctctttcatctggagcctgggaaaggctatcattttcctgatggaccgtttgttgagtataagggaataattcctccagatcaaataccggttaagaaaaatgaactggaaagagaggccaatagactaatttcagaaggagcgaaggtcttagcttctgtttttccttatgaggaggcagccatattatgcggaggttctttgcctagctacatttcaaaggatagcaatcctcgcattgttaagtttggggataaccctggtggtccttgcggtggcactcatgttgccgacatttcaatcatcaacagcctaaagatggcactcatgccacctaatttggcctacacagaaactgtcaggacagataaacggatataa

SEQ ID NO: 21277 - DNA, 321 bp, Zea mays
  Peptide Sequence Number=SeqID_63056
atggaagtcaacttgaaaaatgaactaccatactatggcttgatccacttgaagatgcaatcaactgaacacatagacctactaagcaacaggtgttggtcgggcctccactattggggcaaaacggtgggagcgaggcggcgatcccatctgtcagctacaggtgccgctcgggccccatcacggctggtaggacttgcttccgtcgtggtggggcatggatggaagggcgcgaaatgcagcacaaatttgggcatcgagagaggagcgggggctggaatgtggcgcgagaggtcgcggacggtggcggagccgtggtga

SEQ ID NO: 21278 - DNA, 741 bp, Zea mays
  Peptide Sequence Number=SeqID_63057
atgagcagggggagcagcagcgggggcgtgctctgctacccgcacgtgatcctaggcctcgagttccacaaggagatgagcgtggacgccgcgaggaccgccggcggcggcgagtactccatggccgacttcacgctgctcgcccggcgatcctacggcctgcctcgggacaaggccatccgtgtccacggccgcggcggcggcggcgtccggcccaggctgctgctcatctcccggaagtcgacgcgggcgttcaccaacgccggctccatcgcgcgggccgccgcctcgctcgggtacgaggtggtggtgggcgagccggcgcggcacgcggacctggcgtcgttcgcgcgggtggtgaactcgtgcgacgtgctggtgggcgtgcacggcgccgggctggcgaacctggtgttcctccccgcgggggccgtggtggtgcaggtggtgccgctgggcgggctggacgccatggccgcggacgacttcggcgcgcccgcgcgcgacgcggggctccgctacgtgcactacggcatcgccgaggcggagagcacgctggcgacgcggtacccgcgcgaccaccgcgtgctgagggaccccgcggcggtgcggagcgaaggctggatggcgctgcgggccgcgtacctggtgggccagaacgtgacgatcgacgtccgccgcttcagtggcgccttgcgccgcgctatggagctcctgcgccagacccacgaccacgagtga

SEQ ID NO: 21279 - DNA, 552 bp, Zea mays
  Peptide Sequence Number=SeqID_63058
atggcatgcgagaagaaacccgtcagtagttttaccgtcaggttggggttggcgcttcttgcaggatgcgttcttgtggcgatgatatcacttgccgcaatgttccggcatgacgcggttcctctgcagacattgagcttgttgttctcagtaggtccggtttcttcagtgatgtggggagaggaaagattaggctctcatcgtttcggcagaaacagagtgccggtgctgtgcgacttttcgagctcgaggtccgacgtgtgcgagctgagaggcgacgtccgcgtcctccccaacgctacgatcgtcctccaccatccgttggcgaggcgccagtcatggaggatgaagccgcacggcaggaagaacgaccggcacgcgctcgcccgcgtcactgaggtgacggtgactgtggcgacggcgtcggcgtcgccgcaccacacctccggcgccgccgccgctgctgctccccgatgcacggccaaccacaccgcccccgcggtcgtcttctccgtcggaggctacgcgggggaaacatgttccacgacctga

SEQ ID NO: 21280 - DNA, 228 bp, Zea mays
  Peptide Sequence Number=SeqID_63059
atgaagctgtggaaggagacttccaggagttccaagacttcgacgagttctaggcgtgggttagcggcaacccccagtcggctgcctgtgaaggccgcggttatctacgtttcttttccgcactttgatttattaaataagaatgacattatattacaagtgtaccttcggcttgagggaggtaaagagtacaagcgtgacgcaaaagcaaatgccaagtcaacgtga

SEQ ID NO: 21281 - DNA, 459 bp, Zea mays
  Peptide Sequence Number=SeqID_63060
gggaggctcggggattctcgaacggcgtcaagggcgtggcaagggcgcgagtcgacggtggcggagctacgacagagaaccggtgagcgtggaccaagcgaaccaaaggaattggggacaaattggaagatgtcccaccctgctggcgatgaggcggagcttaccgaggcaacgggcgcgacagagactcaacggcggccatggaacaagaggtggaccacagcgaatggcggtggagctccctgggcgcgtgcgcaaagtgagagagagggcgagggtgctcggctgaaggcgcaactgagcgggggagggcgagtgaatgagggcggtatcaagaaaaggctcgggcgcgtgggggcatggccggaaatcacgcggtcatgggcacgtccacgtcggagatcgcgggcagttcggggggacagtgccgacaggtggaccccacgggctagagagtga

SEQ ID NO: 21282 - DNA, 240 bp, Zea mays
  Peptide Sequence Number=SeqID_63061
atggtggtgttgggggccttcttcttccgaaggtcctcaaaaacatggctaaccattagttatgagcatgttattaagtattacatgagctttgttaccagaaaaggtgttgtaaggagaagcaagctttgttacgttgacgcaagaaggcgacgtaaaaagaaggtgttgttcaagctgctaagtgcaaatgacaatattatccctgtgacatttgtaaaccttgcatgtaatatttga

SEQ ID NO: 21283 - DNA, 282 bp, Zea mays
  Peptide Sequence Number=SeqID_63062
atggcgggcggaagagatgtcgccggagctaaagaggggcgtctggccagcaaagcgctaggggctaggccgcacgtcgggagggcgggccacgcgccaggagtaggggagagcgccgctagggaggggtgccgcgcagcggccgccgcggcccaggggcaccatgcaggggccgtcgtggcccaggggtgccgtgcgcaggagaaggaaggatgggggaaggaaggagagggagggatttaccaagggcacgacgaacggcaacaaccgcagcttctgtga

SEQ ID NO: 21284 - DNA, 744 bp, Zea mays
  Peptide Sequence Number=SeqID_63063
atggtgaagacaaataatgtcacaccgtcaggggaggagatgatcagaaccctcctcgccctttcagacatgacaagggcaaggcagtatatcttgagcagcagggggcaagaaaagagacagttggacatagccactcgtgcaacagttgccgccgcagtagcagcagatcaggcagagcaaggatgctcgttgaggattgcctccgatcagattgccttccgagtccatcgcctctcgtctctggctcgctccacccctgctcgattcgatccctcagacccagtcaccactcctccttcctccactatgtcagctcctgcccctcttgagccttccaccacacctaatgcgcccactttctccaccacactagattccacttctcgtgctcccgcttctgctccacctattcctccacctcgcttctgcgatcgtgatgagactgaggccactcttgatgcctccagacatcagttcggattctaccgcccagctcctaaggacaccgctccggctttagtagatccgccagcactagacttcaaggatgaggatgatgctattcgtcagtttgaggatcagggtgccactgctgacatctcttcagacgatgaggatctagggattctgccaccacctcctgtgccacctcgttcccatgatcatgaggctagtggctctagtgctgctcctccggctgctcctccagcgattgaccctgcgttggctgccatactttag

SEQ ID NO: 21285 - DNA, 723 bp, Zea mays
  Peptide Sequence Number=SeqID_63064
atggccttttcccctttaagtcggttcctttttccgctgttgagccgaagctattccgcccgtagcttcggagcagcatcatccttcgttctgaccatgcttcttacgtcgtgtacgacttcgatctatatccgaaggtacctgtttacatgttacaattggaaaacattgttaaaccacgtttttgaggaccttcggaggacgaaggcccccaacagtgaccttgccgtgaccttcctccatcctttctctcttctagcgagatctctcttccagcacggagaaaccctagccaccgcctcttcaatggaccgggttcctctagttgaagttgtagccgacgtgtacgacgacacgcgagcagctgccgttgctacagcagaagctcattcgacgaccatcattgcggagaaggaggcaatcgctgctgtgaatgatgaggctttggacaatgttgatttgaagtatcatgttagcatcaagaattctctgcgatacgcgattcaagagatgaggagacaatcaacactgttgcatataattgattctatctgttctagtatcctagaagttgaggggggcaagatagggaagtttgttggccacctggaccatgtctgcaagatgctcgagaagaattctattgtttgccaacaagatttggataataagtgttctagttgggacctatttgacccccttcggatgttgatgaactactag

SEQ ID NO: 21286 - DNA, 381 bp, Zea mays
  Peptide Sequence Number=SeqID_63065
atggaggaggacaccccggcatcaatccgtgagcagcaaagggggcttggagctccgaggatgcccggcgttggtgcggagaagggccctggtggatcgagcaaacccgacaaggatctccatcttggcaatttccgaacgcacacaatctatgttcgattggagcccttcaatggacgaatccacgcggggacgtcaatagtcgaacagttgcagtgcagactcgagggcaccgacgcgggtgctcatatcagccttaatctgacgcaaacgaccttccacagcggcgtccgaagcagtcagatgtgcttccacatcggcacgaagggaagacaagaactcaaagacagatctggacgtgtccgtcgccgtggactatag

SEQ ID NO: 21287 - DNA, 867 bp, Zea mays
  Peptide Sequence Number=SeqID_63066
atggccatgaaatcttcatcattgtgcaatccatttgtctccttgttcttcttcctcctgcggaagctcgccggtcatcggtaccaccgtggcaggatggcagtgccgacgaagccgagcccgccgccgccgccgctgcccacgttggacatgctacacggccagaccctagtggtcgacgtggaggcgtggatcctgcgcccgccggtgtccgccttcccgtacttcatgctcgtcgccgtcgaggccggcggcttcctccggggtcttctcctgctgctcctctacccgctgatgctcctcctcctcggcgacggcgcgcgggctaaggccatggccacggtcgctctcgtcgggctggaggagaaggaggtggccagggtcggccgagcagtgctgcccaagttcttcctggaggccacggcggcggagggcgtggcagcggtgcaggcggcagcgcgggtggtggcggtgaccgcaaccttcccgagggtgatggtggacggattcctgagggagtatgtcggcgtggacgccgtcgtggggcctgaggtgaggtcggtcggtggggtcctcgcggggctgatggacgatgaggacgcagatgaggtggcggcgaagacgcttcgggccgtgtttggcgacgacttggaggctgcgagaaagaagggcgccgtggggctcgtcggaccggcgagcagcggtagggtgcactaccttttatgtccttactactgcaagagagaagaaccaggcaggcaatacgatggaagaaagggctccatacggtggtatatattgacattatatggtgcaatatatagtggccagagccagacactggtggagcggcccgagactttttaa

SEQ ID NO: 21288 - DNA, 138 bp, Zea mays
  Peptide Sequence Number=SeqID_63067
atgacgctgggaagctccggcgccggatcgagcgtcgtggtaaggatagaattttttcattggttgagtttgtgcctgaaggctgacagtggatctatttggcatatttgtgctgccatggtgctttcatcagtctaa

SEQ ID NO: 21289 - DNA, 153 bp, Zea mays
  Peptide Sequence Number=SeqID_63068
atgagtacacctccagtaagcacaagtctaatgggaggttcgataaggaggctctcaaccacttccaagcgtagcaaaatcactccacccaaatttgctacccaagctatcagagatggagtgtttgaggaacctctgagagtcccaccttaa

SEQ ID NO: 21290 - DNA, 327 bp, Zea mays
  Peptide Sequence Number=SeqID_63069
atggtccgcattcagattaccttcaaaaccgggtgtgatagcggcaaggggggcagtgtaggtggtatcatgccctccgatgtccttggtgtcgccaagacactgcatggggaaagagcctgtgggagcttcctcctttgtggcaggagtagcgtcgccgcctctagcagttgcccggaagaaggttaccacccaaaagcgctcctcgtggtcggtgaaggacgcggcttctgcggcgaggggtgggctcacaactccattagttctcgtgcctccgttgttgagtggagcggctccttcggtcgtcatggtcgttcctccagctaa

SEQ ID NO: 21291 - DNA, 828 bp, Zea mays
  Peptide Sequence Number=SeqID_63070
atgacggaaggaggagtccaggaggtgaagtcagaggcgcggaagatgctgagactctgtgaggcagcgaggaggacggcgggacggggcccaacgccggagatgagagaggcctcgtcccccagcaagctcgctggacgcgcccgcggcgacgggagcacccaacacagaggggaagatgccagcggcggcctgaagaccggcgaccaccgtggagaagtgaagagccgcgttgtggctgtctgtggggaggaggtggggtgcgcgtgcgtcaatgccggagttgaagaaggcggaggcggccgcggcttgcctagcagcggcgtcagtcgccatggcgtctgcagcaaggtggggacggcggcggacatgacccggctgggggcgcggccgacaaggagcgcaaccgtcgggcgtggtctgcaggggggcgtgaccgacgtgggcgtggggagaggcgcggtctgcacaggggcacagccgccgggcgcggcctggagccgtggggagttcggctgggtggaggtggcgggcgcggcaaggagccgctcgtcgtcggtggggttgagagagggggtggcggtgggccgagctcctcttcctcctcgggacgctcctcctccgcgggaggaaggcgacagcggcgctcgggccaagcaggcacgcgatggggtggctgccgtgcgtgaggaagaggaggggcgggttcggcctggaggtggcccacggctgggggttgttgaagccggcggctgtgggtgggaggagaagagagagaaaattggctctggtaccaagttggagaatgaaacccttaaccctaactag

SEQ ID NO: 21292 - DNA, 1452 bp, Zea mays
  Peptide Sequence Number=SeqID_63071
atggggaagaggtttgcgtcagcactatgcagcagcattggccgtgtaaacccagagttgtacgccttgagtatcgggacatgggtaaatcaaaggaggggtaccaatgcttgtacctcacaggatgatctagaagcatggatggggagatatgctgaagttctatgtgtaaattgttggcaggtaaagagatacattgatcaatattctgctacttccgttattggatttccatcagaagacctgcaacatatcatggacctatattcaagagctcaggaaaattggtcagcttctctgataactagttcatcagagacatgtagtcaagaaaaagtagagaagggttcagttctgctgcagcaaattgatgcatacaatgacttcttgaagagttttgcaaagcttgctcgctctgcttggacagaatttgatttatggtcaatgggcattggtcttttacttatgatgttgtcagttatcattcaggcatccatgcttaactttgtttttcttcttttaaatattttcacacggtttggaattgaggttgggatgtcaaaacaattgcctgccccaacaattacaaaggatcatcctgtgagcgtcatttataaaatccttggtgctaattcttgcaacatcctcttggagctattccccatcatatctctagcctttgtggcttacattatgttgaaatgcctatcccgtgcaatctgtcagaggttcttgaagttctttcttttgtgtggaacaatggtgagttatttatctatagcgtttcattgggcttcagagactactttgtttgctcatgctgggactgttcaagaatttggaagaagtttggctcctcgcattgtttacactattggaggtctatcactagccatttctgcattttctcggatatttggttcaactgttcatttgaagttgaacaaaaggataattattttatcggctgtcatgctttgttcttggagtccaactattttgatcctgttgggaaggcaaggtccatttgtggcattgatttgcatgacaggaggtcactggtgtacatttgatggcctccgatatggtgcagctttcatcggttttgatcattttcatatcattcgacaaggccttctactttccattgacacctttggtatttctcatgtcctgccaattctaagccttccacttattgccatagtgtggtacaacaccatatccaaggacaacgaactgaaggacgtgattctcaacaatattaataaggtgcttttgatgtatggtcttataacaacaatcactgctacgctaacaatcatatgcgttgctattcaaaggcgtcacttaatggtttggggtttgtttgctccaaagtacgtattcgatgcaattggccttctcctcacagacttgttaatttgtttagcatcaatctactacagctga

SEQ ID NO: 21293 - DNA, 1239 bp, Zea mays
  Peptide Sequence Number=SeqID_63072
atgacacaagctaaacctgcccctagtggcaagaggaactggagcagtggcgggactgccgctggaaggaagaacaaggaaagaggagatgacaaagcaaaaggaatcagggttgctggttggaacaagggcgacaagaagaaagaagacaaagggcgccaagtaagtgcgggatcgaagaggcggtggagtgagggagtgccccgggttggtgtgaagagggctgtgtctgggtttgacaggaggaagaggaagatcgatgatgactcgtgggatgatgacggtggcaaggatgtttcatcttccaaatcaaagtttaccagaaagtgttcttccacaataagccgtcgaaaggtttctcctggaaaaggtgacagattgaagtctcaaacgttgtatgaggatgactaccgtgcagggaaaaggagtattagcaaagtttctgatgttagtagaggggtcaagaatcgactggtgaattctgtagcatccaaagggaagaagcttggtgcatccgaaggagtcatacgaacaaagaagggtggtgctaaagaagttgatttggatgaggaggctgttaatagcaagaagtcagatgacttggatcttattattgaagaagagaagcctcgccctcgccttactcgagtactggaccagactggtaagaaaataaagcccgctaagaaggttgtagttcctgacaatgaggaacgtgctcctcctaagaagagaaagcgaatgaagctagatccttatgacacttcaaacaaacggattgaagattcttctatccaagatgagaaggttctcgtgaattgtacacctgaagaagagactgaaatgtcaataaatgcaaaatttcgtgctatacagccaagttcttcaatcctttcatatgtggaagataatttactaggtcgtaggcgcttaattgagataaaaaatgctggctacaatgtcaagatttctgctcctctggataacgttcccttctcaaccagcacagaacgtgaacgcatagaagacattacaataaatttctttcaacttgcttcaaagttatgtcttgttgatttacctggatatggttttgcttatgcaaaggacgaagttaaggaatcgtgggaggaacttgtgaaagagtatgtttcgaccagagttggcctagaaagggtgccgcgctacgtcaacgctctaaccagtccaccgccacaagctttgtctgcatcagtttag

SEQ ID NO: 21294 - DNA, 273 bp, Zea mays
  Peptide Sequence Number=SeqID_63073
atggcgggtggcgaccagtcgagccaggactccaggtcggcactgagtgagttattcacttgttctattgtttatgctgctgtaatctgccaccagaagtttagagagcaaatattggttgagaatttactggttcatggtgccattgcagcattgctatcaatttgcaaaatgaagaacaaaccagttaatttaagaaaaaccttggccaacttgagagttgtagatgatgaatgtcagaaaaagggtgcagtggatgctgctaatgtttag

SEQ ID NO: 21295 - DNA, 369 bp, Zea mays
  Peptide Sequence Number=SeqID_63074
atggatacggaggcggtcccggcgctggcggtggtggacgcgcggttctgcgcggcgggcgcggccacgctggccgtggccaaggcgctgagcatgtccggcagcgacttcgccgtcacggacgcggccacgggcgcgcccgtgctgcgcgtcgacggcgtgctcttcagcctgcgccggcgctgcgtgctcgtcgacgccgaccgccgccccgtcctcaccgtccaagaatcgatcgaccggcggttcagcgtggtcagcgcgctgctggggaagaactcgtacagcgtcaccgtcaacccggggatcgactacgccttcgtcgtcgcgctcgtcgtcatcctcgacgagatgcattaccagcgatga

SEQ ID NO: 21296 - DNA, 168 bp, Zea mays
  Peptide Sequence Number=SeqID_63075
atgggcatggctgctccgcgcgcgccgctgcctctcccccaactgctgctcctcctcgttgccgcgctcctcgccgccgctcccctccctagggcggccagggcggacgagttcgacgtccgccgccacctctccaccgtcaccagatcattatccgcaaatgcgtga

SEQ ID NO: 21297 - DNA, 5865 bp, Zea mays
  Peptide Sequence Number=SeqID_63076
atggcggtgcatcgcaacagatgtggatttgatggggatcaactggcccttgggaagctgcagcaaagctttcttcaagagcttagctgctgggttttggcaagggctcgtcacctgcaaggggttgaggatgatcttaggaggaagaaggccatgcgttggaggaaaggggcaactcttgaatcattactcactgcaaactcagagtctcaaattacccccaaggatcgaacttctagaaaagttccacctaggacaacaaagttgaaatccaggcaaccacggagtcctgatcataaaaccactagcagaatcttgagggagcatctgcaagaagtgattttatcgcagaaaaaaatcatctccagatattcggtgaggcattactatgtgaaatttggatcgcctgactcaagtgaaactgcacctccttttggagaaatggacagttttggcgcccttgttcaatcttctggtaaattggatctgacaaaagttgttccagtaaacgaatctgatgctgtggatactaaatctgaacccattgatggatcggcttatttggagctaggtgataaacggaatctggggaaacaacatgaaccttttcaacaaaatggcatggtccatagctcagaaaagctgccggattgtccatacttggatattggagaaagtaataacagatcacatttgacatgtgaagagaaaccccgattggctgaggttcctgctgatcagaaagatgttgatggccgcaggcctgatgacatcgtgagtgatcaagacaacttcattggtgcttctaatgacacggacatggaaaacaaagaaggtcttcaaatgaaaactgaatgtgatcccagtgccagtgttgaactggttgaattgaaccgtcacaacaaggaaggtgacaaagtattgtatgccgaacctccagaagtaggtcctgcaatagactcgtcattgggattggataatgcaagcagtggtgaagaaccaacctgtgtggacttgccactgtcaagtgattctgctcccacagtgtcagccaccaatggtccaaactctggttcacaatctggcagacaaatgaatggtgttgactggtccacagacgaagagtcttctaacgatgtggatctaattgacgaagcgattcactctctgagtgatgatcatgctggtgctatccataattctgatgaacagtcaccgaatacgtctagcaactgggatgatatggctattggctgcaacaattacaccgagaaagtacatcatccagtggagcatgtccaggatgttgtactagatgatatttctatgatactgagcaaacctaatgatgtttcagaagacgaagataaaatcagttcagggaatgctgatgatttgtctctccaccctaccaaattgaaccaagaggaaatacaggagttgaagacagaatcggaagaaggcagatctctagaatcaggaagttcacctagcaaagcatcattgccaaataaggatcatgtgtcgatgaatgatgtagaagccgacactgttacaattcctaaagaaactgttgcagatactgcaccaacaggtttggatcctgatggcatcgacgagcgtcaagatggagttgcaccgaaatattcaagcatccacaatagtgtactgtatgaatcatatgatgacaagattgctgaagacacacactctttactagatgatggcctatcaactactttcgatgacgataagcatgttgcagaggatcatcaatttgttgttcttgaacaaaggacttgtccaactagcctcaacacatgcaaggatgattctatgcaaggatgtgccgtggccagggatttcactgatgctgaaaagcttccgggagtcgtttcaggtgtattagcttctcaactggagacagaatctcatgtaggagagacacttgcatccacgtcctatgcattcagtgatgatactgaagcactagagattggtgtccctctagcccctggtacttcctttctacctaacaccagtagttccttggtagaaaaacatgaattgactgaaacagaagaaattgcagaggttggtgaatttgtggttgcaaaagaatcaactactagcgtatttgcagttgatgtggtacctcccaaagagttcattgatgctaacatacatcctgaaaaggtagaggttctggctacaagtttgactgaagaagccactaggctggatttacaactacagtctccttccagggaagttttggaaacaacggaagctattcacagaaattttggggcagtagatgaatcaagagaagatatctctaagaagagtatgttgcagacagacaatagtcctcttattgtagagactacaagtgaaaaatgtagtgacagggatggtgatacacaatttctagtaaaatctgattatcaagaggaattactaaaagagggcagtcataatgctgaagatcgatctctctgcgatttgaacaaggatggtgcagtaaccttgaaaagtaatgcagttgagaaacaaccagtgaatgctggtcaagatttggcgtgggggatgcacgctcaagattctagtagtacaaacccgttcctggatcctgcctacttgatgagccacactcaaatttattcatcttccagtatgagtagccaaccatgtttccctgaagaagaggatttcctttcagagcttgtaatacaacatgacaatatgggagtaactgctgatgccctttgggaacctgcaactccacctgatgatgcgccattaccatcagaaattatgactgaagatgatttcagatccttctgccaagaatatcatgagatagatttttcatctgtcactaactgttctcacagtgaaccagcctcagattctaacaaaattccaaatgcttttctgatcagagagtcagattttccatgttataactctgccttgccagtgaagttagatcaggaagcctgtattcattctaagttctgttctgagtgtgtcgaatattcatgtgctgtggaaagacaaggcactacatcaatggttgtttctggtaaagaagatcgcgtgggcaaggacgagacaccaggagtagatttccatttaaattttctcgagttttccaatgataacagaagtcctgaattaaatatgctctccgttccagtggatttacggcaggaactgcatggcttgcctgaagttgattctcgtgatagttcccctttgctgcataaggagaagactagtgaagaatgctgcttttctttaagcaacaacgttgttgaagtgaaacaagagctggaaatccgtgctgaccttgttccacattcttctattaatgaaaaagtagatggattagatgaggctgtaccggtggaaccagaggcccatgcctgtgccttggatgaatatgacaaccaagatgtcccacacatttcaactagtgagaagaatgaaacccttactttgggcaaacctgttttagtccaggggccagaagtttgtgcctttggtggatttgaatgtgatcctccaatcattccatcaccttcagttgatgagactaaggacaatctagaagtcagaatgaatatgatcctccaatcattccatcattctttgaggacttcttttcaagcagaacagaagtcagaatgctacacctcaggtgaacatgattctcaaaccgttccatttcctttgcatgatgagaatatcaatgaactggatgatcctcctttgagcaatgctgacgaactggaccgggaatcaaaagcttgtgttccacatgaatgtgatgctcaaatcgctccatgttcaactgatgaggatatacatgaattggatcaccctcctttgagcagtcccgctttagtggatcttgaatcagaagaccatgtctcggatgaccgtgattccgaagtcaccccatgtttggttaaagataagattgatgaatctgtagatgctcaaccaaacctgcttcctggggagctagagcaggaaactcatgcaccccctgaattagactttcgagttgctccacaatcagcgaaagaatctgattgctcaactgaatttgattcccaggccgcaccatgttcttcaaatataccagtactagctaacacaacagtgtcgacttgtatttctgccatgcctagcagtgaggaaacgtatcagttgtctcctgttccaccacctactgtacaatttcaaaatgattcctacaaagatcctcaagctctactcgctgattcctacaaagatcctcaagcgccaccccctctccctcctctccagtggaggcttggaaagcctcggctaggacttctgagtagaaaaggctgtatgactgaacctgcaagggtaatagatcctgttttgcagatatcaagccaagagatggatattaggccaggtttgcttgatccaacggatagatctatagaaccagtatcctgtcaagaaatcaaagaagatagatgtgagagttctttgatagatcataatgatcaaaatgtggattttgatagattatcgaccagggttgcagtaactgatgttgcaaggactgaacacaggctatccttagagacttcagaggacattaagcaacaggggcatatttcttcatcggcaacaggagttggggaacacctggatgctgggttcacatcaacaatggcagatgaggaacatctggatgattctgggatgacacatggaacagctctatacttatcagaccctctgtttccattacctacatatgaactgcaggaccctcaaccagatactcgagaaaatagcgagcatcccagtcaaacacatggagctgcatctggggatgataagtcaatggatgctgttggcagcatggaaagcaccctaacaaaaggacatgtttctggaaataggtgctaccagcaacctcagcatggtgaatcgtcctcagagacttcagaccataaagagcatattacaaatgcatcagaggatggtgttaagcatcagtcaggtacaagtgaggcaccttcagacacagcaaagcattctgcaccaggcacgctgttgaaagggaatgtccaagagagtcaaattttacaggaacataatgtggggagttccgaggacgatcaaccaggaggcctgttgtacagcttagaaccagtggcacctcaaggggaaaacaaaaaccaggttaacaacccaggcctgttactggaatggcctggagatacaagtgagttggtcactggccttgaaaaaagttgctatgcgcatgctgagcagccacctgtgatgggatggactgttggacctcagatgcttcatcctaaatatggtattttagaagaagagagccaatttgagcctaatatcgccgacaatcatttaatcaggaagcctatttcgataaaaaacatcccaaggaatccactggttgatgctgttgctgctcatgatagaagctcgatgagaaaggtttcagagcttgcaccaccgactgacaagccgaagcctaacgagagaaacatgttgctagaacagataagaaacaagaccttcagcttgaaacctgttgctccagctcagcaaacagcaatgagatcccctgctagaaccagtactagaaacttgaaggttgccgctatcatagaaaaggcaaatgccatacgacagtatcagaggcgtctggccctggagacaaccgaactggcgcctcctgtggtggtgtcctacacattcgactcgccccgtacaaaaacactgcgggttagtgcatgggttagtctggttcctgatcgtgctcgcagacggtga

SEQ ID NO: 21298 - DNA, 606 bp, Zea mays
  Peptide Sequence Number=SeqID_63077
atggccggcctcgtcggcgtgctcccgccagctcgagggattctcgccgaagtgagtggcgctgctgctctcccgatccgatttaatgttttaattaaagttctatacaggtttgcagctgaaatttttcatgaccttcacgaagaggctatggctactgcttctagaggacatggtttaatgctccggttgcagcagttggaggcagaatttccagcagttgaaaaggctattatatctcagacggagcactcaaattatccacatgatgatggagctgagtggcattctaatgttcaacttaaacagaatgtgatcacacaaggagatatgcctcgtttcattatggattcatatgaagaatgtcgtggtccgccacaattgttcacattggataagtatggagctgttgtcttttgtgaacatctactatgtgcgaaagggcatctagctgagttggttaggtttgatgttgctggtgctggagcctccttaaaacgatattcagacccttctttcttcaagacagaacatgcctccaacatgatagaagcggatgttttaattgaaaataaacctcgtagaattaagcagttcaaaatttaa

SEQ ID NO: 21299 - DNA, 270 bp, Zea mays
  Peptide Sequence Number=SeqID_63078
atggccagaaaatccacacagaggctcagtttctttgtactcaaaattgatcggtgctacacagtgcgagggctagggcaaacacgtggggaatggtatcaccggaaattacgtggcccagcacatccgcccacggcacaggcggctccgaggcaaactcccaactccggtgaccaattcctatcccccaggcccccaatcctccccaaatcgatgctaccctatgtggaagagggtgaaggcctagaggagaaccttaccaggttgtga

SEQ ID NO: 21300 - DNA, 216 bp, Zea mays
  Peptide Sequence Number=SeqID_63079
atgagatgtttgtgtgtagttcatcagttcaaaaggcagtttgcacatcttgaggagcatcatagtgagaaggagaaagaggttctacactgcaaagagagcatgcttctttaccaaggtacaacagccataaaactgaatattatttggctagaacctgaaatggcggaaactctcaggaatcatggtgcaaccgtgcatagatcacttgtctaa

SEQ ID NO: 21301 - DNA, 696 bp, Zea mays
  Peptide Sequence Number=SeqID_63080
atgaccgaacatgctttagtggtttactacgacgtgcaaaagagagtaaagattttggcgaaccaaccaaaatcttattatgaagagagagcagcggtgctgcttgtgtttggtacttatgttgaagaagttgttacccagactttgccggttgctgagccgaagatacgctctcccgtactgacgaaggaggagaaggaaactaaggaagaagttgttgaggtgcctactcaagatgaggtgcctttatccagcctggagccgaagccagaagcgcagccaaaaccagaggcccacccaaagcctaaatcatcttctgatggcactcctcaaaagggaaagaggatgaccaacattttaaaagttgttctaaagccaacaaaggtgttgttgcctgccgcgccgaagaccatcggacctcctcacaacacacatgttgttgagagtgcgaaggctgagctagctgcggaggtggttgatagtccaacgattaatcttaacttggacaaagctggtgcttcgaaaacttatattatagccgatgctcttaacgaaaaagaaagggaggaagccaaaggttctaaagccgaaggttctaaagaagaaacaactatgatggcggttgaggtggtaccgcctagacgacatgagtacattattcggcacgcctctaggggaaaactaactgcgacctag

SEQ ID NO: 21302 - DNA, 348 bp, Zea mays
  Peptide Sequence Number=SeqID_63081
atggcgagatcgagatggccggtgacggacgatgtaggggcgaatggacgttcgagccggcgaggcggtgagggcggagcgggcgtcggcaggagcgagaaggctgctggcgggcgcccgacgggacaggtggctccgtgggcggtggcggcaatggaggcgccggcggggtgggcgctggcgagattacatttataccttcggatctacgaggtttacatgaagaagagagaagtacaacttcgaagagcgcgagtgaaagctctcttgtggttttggtgtttggatgacaactcaattaaaggactaacaagagtgttaagtgttgaacaggatgttgggagctaa

SEQ ID NO: 21303 - DNA, 750 bp, Zea mays
  Peptide Sequence Number=SeqID_63082
atggccatgcggtcccggcctcgccgctccgccggccacctataccacctccgcctcccccggctcctcttcctcctcccgttcgctctcctcctcatcctcctcgcgcgcctccccgcgctcctccgccgcgccaacgcacacggccgccagtgcatgccagccgccaccgaccgccccatccccttccctcaccccgtcccggacccccgcctcagccttgccatagtcaccctcgccgacgaggacgccggcgggcccgggcgcgcgccggtccttccgcggcgtgctggcggcatccgcgcggaacaaacgcgcctacgcggcagcgcacgggatacactggttactaacccggaaatcccgctggagagaattttattctcagtgatcggacataataattttgttgagtcacctgatcttgttctgacagaggatttcggtggtgtgaatgctggagttttcttcataaggaggtcaaaatggagtgagaagtttttggatacatggtggaaccagacatcatttatacagtttggttctacgagaagtggagataatgcagcactcaagcatctcatagatcacttatcagctgaagaaatgcaagagcatgttcggattgtaaaaatgcagtgcctcttcaattcctacccgtggatcctcacattgaaatcggtgcaccgcctgatcttccacctgcccactacgtggaaaggttccactttctctcgttcactctactag

SEQ ID NO: 21304 - DNA, 384 bp, Zea mays
  Peptide Sequence Number=SeqID_63083
ttctgctccgtgggtaatgcagaatgcttatcttctactgatcaccttttagttgtctttcagagtagatttgctgaagcgctactcaaagaattggctggaatagactttccctctgaaaggatatatggccttggcactggtccgaaggttaaagttctccagcagctgcagcaaatgctgcagcaccaaggcctaaaacttcatttcatcgaggaccgactagcgactctgaagaaagtgatcaaagaaccagcactggacaattggaacctctacctggtgaaatggggatacaacacacagaaagagagggaagaaacagaggctataccaaggatccaactcattgatctaccagatttcagtaggcagctcaaataa

SEQ ID NO: 21305 - DNA, 507 bp, Zea mays
  Peptide Sequence Number=SeqID_63084
atgagcggccttgacgcctccgctcgcgcctcttcccgcacctcgtgcggccccgtcttcgccacacacggccctgtcgaccccacctacgccatgtgtggcccaacaactatgccatacatgaccctgttgacgggtgcagcccactttgcagacactgctttcatctaccactgtcgcgggcacaacactcccacgctgctcgctgacccgggaccatcgacaagcaaggctttctttgcccacctcgccgttgtctatccccgccgcgagcaggccatgcccgtgcctcccgatgccccagcggcccacaccaagcctgctgtgtatcaccgggtcaccatccatcgcgacctcgggcatgtccacccgatggtgactcgacacgccactgacattcttcgccccattaattggctgatcctggcagctgatacgactgccagtcctccggacgcctccctagtcccctcctccgtttgcaccaccctcgccgacccccactga

SEQ ID NO: 21306 - DNA, 117 bp, Zea mays
  Peptide Sequence Number=SeqID_63085
atggccggggacctctacgctacaaaacccgataaaaattatccacttgatttattctatactaagtatttaatgacttcgaaaaatcgtaacttgagaaccgtaactccgatttga

SEQ ID NO: 21307 - DNA, 468 bp, Zea mays
  Peptide Sequence Number=SeqID_63086
atggctggcgttcgtctcgtcggcgtgcgtccgtcccctggccgtctggagaggtgggtggggagtctaccggacgcgggtagccggggcggtcgccccaccttgccgatacgaggtgtccgctcctatttcattcggtccattccgcctctcggaagagttgagagaggagtaaggaaggcgaggacctcgcgccccgcgatgggcggcgacctgtacgccctcgacttcgacggcgtcttgtgcgacagctgcggggagagctccctctcagccatcaaggctgcgaaggtgaggtggccgtcgctgtttgagcaggttgacgccgccatggaggagtggatagtggagcagatgtacacctccgacggtataggtgggcgcgtcgtgtgtgcgggcggcctgacggacacgccatatgttggcggtcgggttccaacaattggtatcgaagccaggttgacctag

SEQ ID NO: 21308 - DNA, 229 bp, Zea mays
  Peptide Sequence Number=SeqID_63087
gaactggggtgtagttcgcttcgccgtcatgccgttaatggggctcggtgtaactctgccaaggttggttcgcccccttcgggaggagtgcggtggtgacgaggatgatggttttggttatgactatggtactggagatagagtctgtgaggagcttctcccctgcgctcctactggaggcgccccctacaccaccactgagcgccccagccactggagtagctactag

SEQ ID NO: 21309 - DNA, 390 bp, Zea mays
  Peptide Sequence Number=SeqID_63088
atggctaggagagagggcgccatgggtggctgcatcgggttccagcaatggggaaaacctcccagcaccatggacccgagggggatgaaggcgctactgctcaaaagcttggggagggagtttggggaggccaaggcccagctcggagctccctctactcatctccctcgcgcccagctcggcctgcgtgctcctgcaatgccgtcctctagctcggccgccctcctgcagctcgccatggtcgtggcatccctactcacatcaaccagcttggactgcgcgctctggcattcgctcgccgagcagctccctcatgccgcgcccctggtcaagatcgtccccatggcgtccctcggcctccagcttctgcttgcgccagctcactggtga

SEQ ID NO: 21310 - DNA, 240 bp, Zea mays
  Peptide Sequence Number=SeqID_63089
atggggaaaaccacccagcaccgtggaccgagggggatgaatgtgctgctgctcaggagcttggggagggagttgggggaggccaaggggaagggcgcgctggaggtctggcacctggggaggatgccgtggaaagagcaggagaccgagctggggttctgtgatcatgggaacgtggtggagccatggaggaacaaatgtcgtgccgaggcgatgaccggcgaccgcagatgtgcctag

SEQ ID NO: 21311 - DNA, 393 bp, Zea mays
  Peptide Sequence Number=SeqID_63090
atgggtgaggacatggaggacatctgcgttgggaaagccccaagttggcgctggactttggaaagggcgtgctattggaattctagattagccacagagaggcagaggctagttaatatctttagaaacttggacgttgtttgtgatatgttctcaggggttggtcctctagcgatttcagctgcaaaaaaggtcaaatatgtctatgcaaatgacataaaccctaatgcagtgggataccttgagagaaacatggttcttaacaaacttgaaaagaaaatagaggtttttaacatggatgctagaaggtttttaacatggatgctagaaggtgggttcccatttccttctttactggcaaaattccttcattgcaattggaatctatattga

SEQ ID NO: 21312 - DNA, 366 bp, Zea mays
  Peptide Sequence Number=SeqID_63091
atgtttatccaagaacttctccatgatgataccaaaagttgctggagtttggtcgagttcgatgtgagtcagagttggacatggaactcaaagcatagtgcacgcactacgcctgaactaaaaagcacatctattgatggtcgaaacttactggaatcattgaagatggaattggataaaggaaaaatagatgatgttgtgagctatggaacaaaggctcactgtatcctatttacagaatctcaagttgcagcaaaccaatgggaatttaggagtcatttacagattttggttgatcaagaatctcctaacaattcctatcaggaattcaagatgttgacatttcagataagacgactgcgataa

SEQ ID NO: 21313 - DNA, 471 bp, Zea mays
  Peptide Sequence Number=SeqID_63092
atggcagcaaaggttaatgggactgggacgggtaacaatatgtttgattctgataatgacagtgagaattattgtaatgaaagtgagtctgattatgaacatgaaagtgaatacaattctgaacatgagaatgagaactctaaagccatgaaccatgaagttgacaccttaaccagatctaataatgaagaggggagggagaactctgaaggtgcttttgaagaagaaaacacaagagaaaatatggtattcaagaaaaagcatgcattgtttaaaggagatagacagtcgcatcgagtcaggccacgaaagaagcttaaatccatgaaccatgaagttggtaccttaactagagctgataatgaagaggggagagacacttgcagggcacatattcagaacaataatatggacaccttaaccaaagctgataatgaagaggagagggacacttgtagggcacatatttag

SEQ ID NO: 21314 - DNA, 645 bp, Zea mays
  Peptide Sequence Number=SeqID_63093
atgggccgcaaggctcgccgcgaccagatcgtgccgaggttctggggggcaagccaaaacgtcgtagctgctgcggcgcttctggacaagctccccaggtggaaactgcaagcgaatgaaaacccaccaagagatccagtcaccttcggggccccatccaacttcaggaccaagatcctcaccttcgaggaggtcgagtttcaggggacctatcacgccattctttggcgaccatgctatgcaaagttcatgtatatccccaactacacctaccttaatctcaaaatgtcgggcctcgccgccaccatcatcatgggcaccacggtgcaccatgcatacaactgcgaggtcaagtgttgcgatctagccgaggaggccaccgccaagcaagaacccttagggatactacaggttgtcgacgagcaatcgttcgacgcgaagagaggcgactccgctataattcaccggactgtccggtgtacaccggacagtgtccggtgcgccaagggaggtcggcctcaggaactcgccagcttcgggaaactccaacggctagtccgctataattcaccggactgtccggtgtacaccggactgtccgatgtcaggcgcgcccattccggcacaccggacaaggaacagtag

SEQ ID NO: 21315 - DNA, 201 bp, Zea mays
  Peptide Sequence Number=SeqID_63094
gagtgcagcattggggaagcagagacgccgaactatggtagcccagatgaaatgttcagcaaggatcttaatccttgtctgaccccatgcattgccaagagcaaatctgacgtatccgcacaattccagtcttcctcccagttcacaaaggtgtcggtctatgtggattcaggcatccatgatagcacatatgccatgtaa

SEQ ID NO: 21316 - DNA, 2577 bp, Zea mays
  Peptide Sequence Number=SeqID_63095
atgcatctggacggcgtcgacgacgagctcggaggcggcagctgcgccccctcccccgcgcgctttgagctccaagaggatccttccttctggaaggacaacaatgtgcaggttgcgatccgtatccggccgctgagcggcagtgaggtgtcgatgcaggggcagaagcggtgcgtcaggcaggatagtagccagagccttacctggattggacaccccgagtccaggttcactttcgatcttgtcgctgacgaacatgtcacgcaggagggcatgttcaatgttgccggggtgcccatggtggagaactgcatagctggctataacagctgcatgtttgcttacgggcagactggaagcggaaaaacacatacaatgcttggtgacatagaaaatggaacacggaggaacaatgtgaattgtggtataactcctcgagtgtttgagcatctctttgaaaaagaattaaggagagatgaaaagctcatgtttacttgtaaatgctcatttttggagatttataatgagcagattctggatctgctcaacccaaattctgtaaacttgcagataagggaggatgccagaaagggtatacatgttgagaatttgacggaacatgaaatctccaatgctcgagaagcgctgcaacaacttattgagggagcagcaaacagaaaggtagcagccaccaatatgaaccgagcaagtagccgctctcatagtgttttcacctgccttatagaaagtaagtgggagtcacaaggtatcaagcaccaccgcttttctcgactcaaccttgttgaccttgcgggctcagagaggcaaaagagctcaggtgctgaaggggagcgattgaaggaagctaccaacatcaacaaatcactatcaactttgggacttgtcattacgaacctaattgctgtgtcaaacaaaaagtcacagcatgttccatacagagattcaaaattaacattcctcctccaggattcccttggaggaaattcaaaaacgaccataaattgcaaacataagcccatccagctgcttccattccattttgaaagttacacatttgatatttctcgctttctatccagttgtgctgctgagacattaagcacattgaaattcgcgcaacgagctaaatatataaggaataatgctataattaatgaggatgcttctggtgatgttcttagcatgcgtttacagatccagaaccttaagattatcattcatcttaaacttacctgcttttgcagaaaagtaatcagccgtttgcaaggacaattgggttctgataaaacagaaagcattgcctctcatgggtttgtctgcgagtcccctagcacattcaaatgggatcagggtcatggcatgttcactccacttacttttgataaaagggctacacagaggaacgattgtgatgctgcccttgtcgctgcttttaggagggaacaagagaaggaagcacaattgaaggcagtaatagatgcaaagcagactgctgaacagctggtagctcaaaagacagaagaggtaagaagtttcaagatgaggcttaagtttcgtgaagaacggatcaaaagattggagcaggttgcttcagggaagttatctgctgaagcacatcttttgcaagagaaggaaaaccttgtaaaggaattagaggtcctgcggggtcaattagatcgtaatccagaaattacaaaatttgcaatggagaatctacaattaaaggaagagctacgaaggttgcagtcatttgttgatgaaggtgaacgagaaatgatgcatgagcaaatcattgttttacaagataagctgcttgaggcacttgactggaagcttatgaatgagaaggaacctattaacaagggtctctcattatttggggagtcagctggcgatgaggaaaatgagtttcttcgtttgcaggctattcaaaatgagagagaaattgagtcgttgcgtaaaaaaatgacattctgccttgaagcaaaagataatcttgaaaggcatgtcaatgagttgaccacagagttggagcttacaaagaaacacaacaacacatataaagagttcaaggctgcccagctccaggagcaaggagaagcagatttacataacttgtctgacgctcagatggaacttaagactttggttgatgcaatagcttctgcgagtcaacgggaggcagaagctcatgaaactgctatcggtttggccaaagagaatgaagaattgaggctgcagcttaaggttttgattgaggataacaagagattggttgagctctatgaacacactgttgtcaatgttgaggcaaatcaagatggaaaccctgtagatgatctgttgaatgcccaaccagcagccacatcagatttccatgcacataactcatctagtgtggcacaggagtctaagatagtagacgaaaaatgcaccaatgaggacaatttctcaagagttacatctgttgaattgcgtcttcagctggaggagatgcatgaggaaaatgatagacttatggggttgtatgagaaaagctatgcaggaaagagatga

SEQ ID NO: 21317 - DNA, 855 bp, Zea mays
  Peptide Sequence Number=SeqID_63096
atgaagaaggcgtctgcggcgtcgcgctacgcggcctacgactccccgtccccgtctccttcgtcgcgccgtgcggcgccttccgcggccgccgcgaccccgggaggagcgcacggcagcagccgcgcattggtggtcgcggggagatctggccgcgatctactgggcgccaagccgcagccgcaagcccacggcaacctgggttccgtactacggcggctcatctccatggacaagaagccgcccaagaaccagctcccggtccctcctgccgccgccagcgcagcgaagaacaacggcggcgggaagctgccggggctgtcgcggaaactattccagaaagcctcgtccacagcggcggcggcgccaaggaagacgaaggccctgacagaagtcaagaacagcggcaacaacgccaacacgcggacgctcgccatggtgctgcgcaccgagcgggagctcctggcgcagaccaaggcgcaggaggacgagatcgccgcgcttcgcctgcagctcgagaacaaggacagggaggtggagcgtctcaaggacctgtgcctgcggcagcgagaggagatcaggacgctcaaagacgccgtcctgttcccggacgcggagccggagcccgaccgccgcctccgggacgagatttccacgctcaccgatcagatccagtgcctcgcgcaggagctcactcaggttaaggctgagaagcactcgacaagatcgtgctttgacgaggatggatactgctcttcccctcggacgccggggtttaacgaggagaccgctttctctctgatagcaatatgcattctgtttgcgaaatcacacctcgagttaaatctcaaatag

SEQ ID NO: 21318 - DNA, 375 bp, Zea mays
  Peptide Sequence Number=SeqID_63097
atgaagggcatcccgagggaagccactgagcattctttacgaattaaccctaggtccaacccattgaaacaacgtctatgccgctttcacgaagaaaaacgcaaggccatcgaggaagagatcagcaagctccttgctgccgggtttatccgtgaaattaaccaccccgagtggctggccaaccctgtattggtccgaaagaaaaatgggaaatggaggatgtgtgttgattacaccggtctaaacaaagcatgcccaaaggaccctttcccctcccatgcatcgaccagtatgaagaatgcgggggccacgtaccagcgatgcatgaacaaatgtttcagcgatctgattggaaggactgtggaggcctattga

SEQ ID NO: 21319 - DNA, 945 bp, Zea mays
  Peptide Sequence Number=SeqID_63098
atgtccggtggggatggacctcatcccgtgtttgatggtgacgattttccatattggaaaatttgtatatgttgtgaggaagattcatattgtgttgcccatcgagaagtatgccacatcatcaccatgcttcatcaaatgaatctttccatcgtcacgccaactaaaatattgggaaatatcaatgcttatgacttgtacatgcacatcaataacaaagatggctcttcttccaagaagaaggatttagcgctcaaggcaaatcaagagaagggcaaaaccaaaattctagtagaagaagaaacttcaagtaatgatgatcttgatgatgtcaatattgctttaatggtgaagaaaacaacacaaatgttgaagaggctaaatcaagaaggcatcaaatttgattcgagaaagaagaagtttttctctagtagcaagagaaagccattttcggaaatggattgctacaattgtggagaacttggccatcttgctcatcaatgcaccaagcctaagaaaaacaagtttaagggcaagaaaaatgatgagagtgaatatcagaataaggaaaagaaattcttcaagaaaaatgatggcaaatataagagattccacagaagaaaaggtgggaaagcatacatcattggtgattggctcaccgacattgaatccataagcgactcttcctcaagcgaaaaagatgatgaaaaggctattaaccctgttcttaagcttgatgtagcaacctcatgtcataatttgagcatagttgataagtctagccatcatgaagatttgattgaaacttttgaggtcatatcacttgagaatgaaaaattaaagaaatacttgaaagatgcagccactaaaggaaacattgtcatagaaaggaatgatcttgataatgagttggttcatgcaatgaaaggcttagaaaagaaataa

SEQ ID NO: 21320 - DNA, 384 bp, Zea mays
  Peptide Sequence Number=SeqID_63099
atgtccgtggcccgctcggccttccagcctcgtcgcgcgcacgggagcacgagtagcggccatccagttcatgggcccacccgtcagcaggccgccaggttgttcctcttcacgtacgtccacgacttcttcaaccccaagcgcatctgttccctgctctccttggcaaccaacagcagcggcaaccagcagcccggcgcggtggccggcgaccagggcgtggcagccggcgccagcgttgccggcgtgcctgtcaggccccgcgcccctttccctggccggcagaaccgcctcgccgtgagtggctctgctgttgtcgtccgcctcgccccatatgaacccacgaactccttgcatgtggctagaaaagtgctcccatattag

SEQ ID NO: 21321 - DNA, 216 bp, Zea mays
  Peptide Sequence Number=SeqID_63100
atggagcagaggcacagaggtaggccgtacgggattgatgggaggtatggacctatggctgtgccaacttcaagagggcaggctcttgctgatgagtatggcatcaaattttttgaaacgagtgcgaagacgaacctgaatgtggagcaggttttcttctccatagcaagagatatcaagcaaaggcttgctgaatctgattctgtaacaccctga

SEQ ID NO: 21322 - DNA, 699 bp, Zea mays
  Peptide Sequence Number=SeqID_63101
atggcggcgccgccggcgagggcccgggccgactacgactacctcatcaagctgctcctcatcggcgatagcggtgttgggaaaagttgtctccttttgcggttctcagatggctctttcaccactagctttatcaccaccattgggattgacttcaaaataagaacagttgagcttgatggtaagcgcgtaaagttacagatatgggatactgctggtcaagagcggtttcgaactattacaaccgcctactacaggggtgcaatgggaattttgcttgtctatgatgttactgatgagtcatctttcaataatataagaaactggattaggaacatagagcaacatgcttccgacaatgtgaataaaattttggtaggcaacaaagctgacatggatgaaagcaaacgggcacagatggtgtgccatggagcaggggcacaggtgaggggtgctgtgcatgcaaaaagcatagggcaggcgaacggcatggctgtgccaacttcaagagggcaggctcttgctgatgagtatggcatcaaattttttgaaacgagtgcgaagacgaacctgaatgtggagcaggttttcttctccatagcaagagatatcaagcaaaggcttgctgaatctgattcaaagccagaggggaaaaaaactaacaacttgcatacttgctacttcagctatgttgcttaa

SEQ ID NO: 21323 - DNA, 186 bp, Zea mays
  Peptide Sequence Number=SeqID_63102
atggcaacgggtacatacccgtcaggtagtaccattccatacccgtacccatcaaaaaaattctacccgtcgggttacccatatatactcgcgggtataaaatcttacccatacccgtacccgcgcgggtatttttacccgtcgggcctactacaggggtgcaatgggaattttgcttgtctatga

SEQ ID NO: 21324 - DNA, 258 bp, Zea mays
  Peptide Sequence Number=SeqID_63103
atgggaggggagaagggaaagagagaggaaatggaaggggaagtaaggatgcaccataattctatgaaaggtgaagaatggagaagaagaataaataatggagacctcattggagttggagggtatgatcgagcaagtgttgctggtggcgatgttgacacaaacaatggtgctctggcaggcgtagaggggaaggtcgcctatcgatccccctttggctatgtgcagaggcgaaggagcgacgtcatctatgtctag

SEQ ID NO: 21325 - DNA, 321 bp, Zea mays
  Peptide Sequence Number=SeqID_63104
atggccggaatcactcaccggagttactccggcctgcccgagactctctcaccgctgttctcccttctctacccgtggattcatggtcctttccccgccatcgagttcgctgtggcaccctcttcctctctacccaacttcggcgaccccagagccaccctagctcgcgtccaccttaaatccggcgacctcaccgccgcggagaggagcggtgccgcccgcagccgtctgtttccccggtctgataccctccatctgattcagatcgaacgactcggaccccctcggacccctcggacccctccctccgtccgatcttga

SEQ ID NO: 21326 - DNA, 219 bp, Zea mays
  Peptide Sequence Number=SeqID_63105
atggcgaagacggaccacgtgatactgcggctgcccgcggcggaggagtaccacggcgaggaattgctcaccgccggggtaagcctttatcttccaggaccggcgaagtcggagacgtggccaactggcgtcggaaatcagggaagggagctcgccgcggatctcgcgtcgttggttgacgggcagaacgaagggatgacaggtcggattctgagctga

SEQ ID NO: 21327 - DNA, 201 bp, Zea mays
  Peptide Sequence Number=SeqID_63106
atggggaagctgagtggcaacatcctcggagcccaatgcaaaggtggctgggtcatccgagggcagcaaaattccagatgtaatgcaaccagtgaactcaagacattcccacgtaacctcccagctgacactgttgatacagagatgccgttcattccttggcagtccactcaacttggaggacggacaactgctgcttga

SEQ ID NO: 21328 - DNA, 2808 bp, Zea mays
  Peptide Sequence Number=SeqID_63107
atgctttccagccccaagggaagtcatttttctacttgcaaggatgtttctgcatacctcatggcacttcttgggtatccagagctcaaaccagccactaataagtatgaaagcacaggacaaccttactcgagtgctaacgatggtgatgatagtgctttatgttttcaagatcaaattggttcaattatggacaagacgaatgtgcattcaatttcttctcttaccttctccagctattccagtgatccaaatgatgtgaatgaaaggaacttaaacaaagcaaatgtttatcaatgccagaaatgcaatttgactttcggtgaccggacttcatatgcgcaacaccatttggcgtatcatgaaatgagtgttaagaggcgtaggactggcaagtttggtgagccagtagtagggaaagatggaaaatttgaatgccctatttgtcataagacctttgaggaggaaccacagtactttggtcatgtcggatctcatgcaagatatgaaggtttagctcctgaagcattcttggataaggctacttccagaagggcagctaatgattcattggcagaaattccatttagccttcaggaattgactgaatcacatggacagaacaacaaggtttcttatggtgaaaagggttttcagcaccacaatcattcaaataaacatggtgataataaccttacagccattgatctttttggtacaaattattcggataatttcatcaggccaaataaaacttggggtagtcctgaagagggaccttcctgtaatgatgctccaagtgtatctagatatacaaattttacaggccatgctgatgtgatagtttcagaaagggcatcaatctccaataatcaatctgttagcaacattaatggctttatatttagtgatcagccgggaggtaaccatgttgtcagacctactgcctctgtaacagccaatcattatgaggaccagattattgatcgtggcagggctgctccgaatgctgacaataatactgtgaaagcaagagatgtcaaccttaattcatgtgcaagtgcaagtacaatatctttccctattgcttatgcaaataatgaaacatcagctgcccttaatgaagctaatcggtcatcttctactgccaaatgttttagtggcagttttaataacaacgatggtgcatgtagtgcgtcttcctcttgtggaccaaccaataaaatatctagttcatttggcacatcaagcaaaacccaagctgctggctccagaagcattggtgcaagctatgaaccttatggtgaagattgtagtgcccttaaagctaacccttttgccagcaagaacaatacctcagtgtatcagtacaatttggccacacagcctgtctatgcagtggcagctagggcagattgttttgcttctggttcagagcagacaaaaaacagtgataaagaacttgcatccagtgccaagcaacggattgataacgtggagaacagaacaagtaaagaagcaggatttgtcgcggaagcttataatagtggtgcttttaatggtggtattaccgaaaagggttttgcacagatcagtaacagttttactcacataaagtccaatgcttctggctcttgttcactacctgaatcaaaaactccaacaaatggaagtgatagcaactgcatcaagggctctttggttaatagaggtgatgatagcttcacaaaggtctcaattgtcaatagacccatcaacaacaatgaatcaaatgtagctagacttgaggcgatgggaaagttgaatgatgagatgcaaaaccgctataactatcatgctcctggtattgaccctcatgttgcagctagtgctagccggaatgccaatggttttatgcctatgcaggccaattttggttgcatgtcctctacagttcaatctgttgttgatgtttcagtatccagcacatctcaagatcagcagtgtgatttgcaacttggatttggtgcacagaagcagcagatattttctaaccatggagagcttagaacggctacacctggatcccctctgcctgggagcattgccagaaaagattctgtacccactgaaccctcacattttgggagcatgaatggacctaaatcttttcccactggaacatctcagtttgggggctttgcaaagcctacttttgtgcctgctgcgccttctcagtttgggagcatggctcaagctaattatgtacattctgctcaatcctcccaattcacaagctgggttcaaccgaattctattcctcccgctgaatcctctcagtttggaagcaaagcccaatctagttctgtgccccctgctaatacctctcagttcaggggcatggctggacaaaattctgtacctcctgctcagtcttttgggagcacggttcgaccaaattatgtaactccagaatcctcacagtttgggagcatggccagaccaaattctgtccctccacagtatgttaacatgcccagccaaaattttgtgagctcatccgagccaacactggttttggggtatgcaccacagattggaagtggccctccacctcaagtacagttaggatgggatttgtccttgccaaggatggttactggcggcagcatggtcacttgtttatgtatatggtgcaacagtcagttccatcattttggccctgttgatggacagcagcccagttcttttggcttcatttgccccacctgtaaagataggatgtctggtcatcacagtgtgcccaacaatggttcatggcagccttga

SEQ ID NO: 21329 - DNA, 297 bp, Zea mays
  Peptide Sequence Number=SeqID_63108
atggccatgatgggttcaacatcggaaaagatgtacctctgccaggtaagttattgtaactgcttccacactttcgtatctccgatgtattgtaatgtctgtgagacgggtgaaacgctcttgggaaagctggaggagcgcaccaaggtggcgtcccagcggttcgcctttgagcagtccgaactggcgcgggaccgcaaagactacaagaaggacctccagaaggtgtacgacagggagctggaggcgagccggaaggagaagaggatggccaagaaggaggagcacttgaactag

SEQ ID NO: 21330 - DNA, 366 bp, Zea mays
  Peptide Sequence Number=SeqID_63109
atggggctgtccatcgtggctcgagcgtactggcgctccgtcgagcgcgctgggctcggcgggtcggatgactcggaggaggcctcctcagaggaggtggaggactccttcgactctgaggagtggagcggcagcgagggtgatggcggcgaggacgacggcagcagcggcgatgacgatggcaagggtggtggcgacgacgacgacgaagatggcgacgacgaaggcgatggcgacaacgacagcaaaggcgacgacaagggcgatggtggtgacggcaagggcgacggtgatgacggcaaaggcgacgtcggcaagggcgacgacggcgacggcaaggccagtggcataatgctgctggtttaa

SEQ ID NO: 21331 - DNA, 297 bp, Zea mays
  Peptide Sequence Number=SeqID_63110
atggacgacgaagctatagccgaagagcttcgacttgatgtgatgacgaagaccaagctgggggcgcccgacgaacaggccgctctcgggaaaactcagcgcccgcggctaaaattcaccggactgtccgatgttgtgggggacagataccccccagggaacaggatccagcgtagcccgtatcttgggatgaagcttcggaagtgggagaaactcctgacgaacgagtacaccgagaaagacataactcccaccaccgtgatcgccgacaggttcaagatcgggaacgagagctag

SEQ ID NO: 21332 - DNA, 222 bp, Zea mays
  Peptide Sequence Number=SeqID_63111
atggcacccacattgctatgccgttcgaccgtcattgaagcaccaaaggagatcaaggtcgcctactcgccttcacctgagatcgtcatcagtcgcacgaaacaggaaggagataagaggcaagtggatacagtgaagaagtgtgtgaacatccttttagacgccacaaagggtcgctattgccatacgccaactggtgaccagggaaagacaccgatctag

SEQ ID NO: 21333 - DNA, 364 bp, Zea mays
  Peptide Sequence Number=SeqID_63112
caccgacgaggtggaagtcccacctatgatggcgctcccctggggctctctgccagcgtgcgtgctcccccttaggctgagcgcgccgctgtcggggcttccgttggggcggtttcaagcgaagtcagcgtcggaggcagagcctccgtggttcagcgaagtcacgtccttgccttcgcttggtccgggcatcaccgtcggtgaaatgccttgggggaagggggtgactggggccctctgctttaactcccttgtgagaagtcgtgtgaagactgctaggtgtcgaaacctgaaccctacgcccctgcgcggctgcgtgacctgcgtccagccgcagcggctggtgcccatcggcggcaagtag

SEQ ID NO: 21334 - DNA, 369 bp, Zea mays
  Peptide Sequence Number=SeqID_63113
atgaagctgtggaaggagacttccaggagttccaagactacgacgagttctaggcgtgggttagcggcaacccccagtcggctgcctgtgaaggccgcgtttatctacgtttcttttccgcactttgatttattatgtttaaaactatcgcgtacacagggacggggtacccagaatagggcccataacctccttatcgacaaagtccccgccgagcaagtctgcaaggcagagcgaccaaccaagtccccgccacccgccgagcaagtcggcaaggcggagcgtccaccaagtccccgtcgagcaagtcggagaggcagagtggtttaccaagtccccgccgaggaagtttgcgaggccgagatctag

SEQ ID NO: 21335 - DNA, 189 bp, Zea mays
  Peptide Sequence Number=SeqID_63114
atggtcgagccttccctgacatgtgccacagttggcggagtggtcccctacgggattcgcggtggagcaggtgtgcgcattaaatgtgagtgtcccccaccagccttcgggtgtgccttgtcctctctgcctgagactggcttgggcgagatggacggaacgatggtaggacgaggtggctttgggtga

SEQ ID NO: 21336 - DNA, 267 bp, Zea mays
  Peptide Sequence Number=SeqID_63115
atggccgatggcatagactccctgtcaagggacctagccaacatcagcattgcgcccgaagtgccgccagtggcacctgcatcaactttcctggttcggaccgctttgaaaggcataataccctacttcttggggtggctctgtatgcgtggtgtgttacaagtggcgtctcctgaatgcagaggtgctaatgagatcaaaatgatgggtgttggggacttgttctcaaatgctatgaatcaagaacaaggcaacataaaatgttaa

SEQ ID NO: 21337 - DNA, 696 bp, Zea mays
  Peptide Sequence Number=SeqID_63116
atggcgtcgcgctcggcgtccaaggatatcatcacgctgcgaggctctgccgccatcgtcagcgagttcttcgggtacgcggcgaataggtacggtacactttacagtgcccggcagacggcggcggtgccggtccatccgggattagatcgcatcctctacaaccgcgctgtgtacccggaggagagcttcagcaaggtgaagaagtacgggcttaccatgctgctcacgcaggacgagggcgtgaagaacttcatcgccagcctcacctcccagctctcagaatggctggaggccgggaagctgcagcgtatcgtgctggtcataatgagcaaagccaccagcgaggtgctcgagcgctggaacttcaacatcgtcaccgacgccgaggtcgtcgagaagggggccatcaaggagaagagcgacaaggagatcatgagggagatccaggccatcatgcgccagatcgcgtcttgcatcacctacctcccctgcctcgacgagccatgcgtgttcgacgtgctggcctacacggacacggacgtcgacgctccgggcacctgggtcgagagtgacgccaagctcatcgacaacccgcagatggttaagctgcactccttcgacaccaagtggcagattcataaggtggacacgctggtgtcgtacaagaaggacgagtgggacgaggaggagtag

SEQ ID NO: 21338 - DNA, 699 bp, Zea mays
  Peptide Sequence Number=SeqID_63117
atggcattcaaagcctccatcacaaggataaacatcatgggggacaagggatcgccccgacgaagactaatgtattctccaggctcatcattgacaaggatccttgtggaggaggtggatagcagcagactaataagattgcaccaatttcgatcaaatcccaagtgctgcaacatatcaagcaagaatgatcaggaaaccgagttaaaggccttggaaatattcaacttcaataggattttctatttctcctcaaatcagttctctggagaaatttcatttgaattaaaagatccagcctgcatttacgtgatcttaaagaagccagatgacttgaatgcgctttcagcagatatcacaagatggctttctgaagtagaaaactcgaagatcagtaaattggatgcgatgtttgatctagcaaactttgctgtcaagggttgccaaaggactgatggctgttctggctcccagcacactccgtgcattcaaaagaagatcatacagtactttagtaagaactactccacctcagacagtggccaatgtactcagccacaaaggggcagcccattcttgcaagctgacataaaggctggaattttggttggcaggggccgctatttggaggttgatttcccagtggtcatggaagctgccaaggccgagctggtcaaactcgtgggaaaaggagagtag

SEQ ID NO: 21339 - DNA, 2535 bp, Zea mays
  Peptide Sequence Number=SeqID_63118
atgaagaaactgtcctctggcaagaaaagcgggaaaggcgatgggctgggccggccaggagagtcgctcgattcgcaggccaggcagatcgcggtcagatccccactgccttggcgggaagcctatcaatcctcaccccaaatcccccgctactccccgctccggctccgttcacgactacggcgacgagcaccaccctcacccccagccccacaccgcgccacgccgatgtactcccaactcgtcgacggggactccgactccgagggatccctgatctccgacatctccgcctccccgccccgcggccgttcgccctcgcccccgcccccgcccccgccgccgcccgaacaccgtcccaaccccaagcacaccgccaccgtgaaacctaagcctcccaagtccaaggcgaagcccaagcttgcagcatccgcctgcaccgccgctgtttcgccgcctcccctcccctccgccgcgctctccgacccgcacggtctcgtctcgcgcatcgccgctgctcccgcgcttgtcaccgccaccagcaccgtctcttcctcctccttccgccgtctcgtccagtcgcgcaacccctccttcgatcccgccgccgctttcagcgctccgacacccgcacccactctggcgcccaccgagatagcaaccgcagcgacagcgcagtgccctgcgccggacgcgccgccgcagaccaggcccaagcgggtgcatcccaactcggtgtcggaggtggtcccgcccgcggcggaggcagagcaaccgaagcggccgagagggggtgccgaaggaaactttgtgcggctcaacatcaatggctacggtcggaggaggacgttcaggaacgcgcaggccaggcgccctacgaaataccgctcctggcggcggcagcgacatggcggcgcaaagcctcaaggccgtggtgacgaagaaggggattttgtggctgaagctatgatagagcgggagaagaagagggcaggaggagatggtggtgtcctcgaggccgtcgaagcagcgcgagaggacccgtctgagcagaatcttgagaatttgctcagaattatctatgggtacaactctttccgcgaggggcagcttgaggcaattcagaaggttgttgcaggagagtcaactatgcttgtgctccctactggtgcgggcaagtcactatgctatcaggtacctgctatgattttgcctggactaacactggtggtaagcccgctactctccttaatggtggatcaactgatgaagctacctgcatttttgccaggtggctttcttgcaagcaatcagacaagcgatgagtttcatgagacattacaaaggttgcgtggaggggaaataaaggtgctttttgtttcccctgaaagattcttgaatgaagaatttctgctaatatttagggacgggctacaaatatccctagttgctattgatgaagctcactgcatttctgaatggtctcataattttagaccttcatatctaaggctccgtgcatcactacttcgaagaaaacttaatgttcaatctattcttgcaatgactgcaactgcgacaactcaaaccttggaggagatagtgactgtcttagaaataccatctgataacctcattaaaacatctcaaataagggacaatctgcagctgtttatcagcatgagcaataacagactgaaggatctattgctgttgttgaaggcttcaccttttgttgacatgaagagtataattgtctattgcaagtttcagggagaaactgactatgtttcaaagtacttatgtgataacaacattactgctaagagctaccacagtggacttcttatgaagaacaggaatcgtgtacaggagcttttctgctctaacaaaataagagtggttgttgcaacagtggcattcggaatgggtcttgataagagtgacgttgaaggggtgattcactatagcttgccagaaagcttagaagaatacatacaggaaactggccgtgctggaagggatggacgactgtcatattgtcatctatttcttgattcaacaacattctataaaagtcgtagtcttttgcacagtgacggtgttgacgaatatgctatgagcaaatttcttttccaggtattttcatgtgaaaattcagtggggtgcatttgctccttggttaaagagtcgacttcgcgcaagttcgatataaaagaggaggtgctcttcacagtcctaacacagctagaaattggtggtcagcaatatctccgtttacttcctcagttcagtgttacctgcaccctgtactttcacaagacgtcaccacagctgcttgcagacaaggatgtactagttagatcagttctggataagtcagagactaagggtggacattttgtcttcgacatgacaaaggtagctaatgatctgagcatcacagtgaatgaagtatttgaccatttgcaacagctaaagttgaattgctggggtcatgcttggtgcattgcacccatgaggactgaatcttaa

SEQ ID NO: 21340 - DNA, 132 bp, Zea mays
  Peptide Sequence Number=SeqID_63119
atggagacggccgcctcggcagcgcgcctggtgaactacccgctcgtcgcggcgcttctcgcgttcgccgtcgcgcagtcctccaagttcttcaccacctgtttgccagctaggctgcagttcctatggtag

SEQ ID NO: 21341 - DNA, 249 bp, Zea mays
  Peptide Sequence Number=SeqID_63120
atggatcgagccgggaaggtcacaacaacggtgaatccgagcgggaagaccgcggcagtgacggatccaacaaaggcgatgaaggggaagggcgacgggggcaaagatccaagcgagaagaggcagttgcggcagcgggccttgcggtggcggcgacccagcgagaagaatgcaggggtggaggaagggaacgacagacacgcagagcatggaggggcgtcgggtttccctgcgtcgtggggaagatga

SEQ ID NO: 21342 - DNA, 117 bp, Zea mays
  Peptide Sequence Number=SeqID_63121
atgacgctcgacggtgttgggactgatagttcgatcaaagctaaaggggtcacatctattgagttaaccatcgggaccaagactattgcgtaccatcctagagtagttctagtctag

SEQ ID NO: 21343 - DNA, 450 bp, Zea mays
  Peptide Sequence Number=SeqID_63122
atggatgaggacaacatagatgtggacaacttaacagaagaggaccaggttgactatggagcctcgtccgagcacctaggtgccccaattcatcccagaaatacccacaccagaaggcctcaatggccacgactacggtgcacccagggtgaccgatcgcgagaactagaacctaacactaccggaatctgtgcctttaccgagtgccagcctctttgccgagtgctttttttggcactcggcaaagcagcctttgccgagagccgcactcggcaaagtcctactcttggtaacgagctggtttacccagtgcaggacactcggtacagaaaaactctcgacaaagacgcgtttgccgagtggcagacactcggcaaagaagactctcggcaaagggccgtcagtggccgttctaaagctgacggccgtcagcctttgccgagggcctaa

SEQ ID NO: 21344 - DNA, 339 bp, Zea mays
  Peptide Sequence Number=SeqID_63123
atggtcacggtcgtatctctagctgaggaacgatctccggatatggacacctatcgacttcttcggagctttccagatgcacgaagtagtgggaaaagaaatcgcttcgtcgtcgccgcaaggattcgactctgggtatgccccccatcgcctggccagcatccagtagaagatgttgagcgtcccacggtcgaggttgttccagtccgcgaggaggaagcccatggagagtgtgataagaagggccgatgctcatggacttcatccgctctggcgtctcgcgcggaggcggtatccatcactggcgattccgcttggggaggagctgtgaggtactag

SEQ ID NO: 21345 - DNA, 834 bp, Zea mays
  Peptide Sequence Number=SeqID_63124
atggcgcacattctgccaagcccgcatgccgcagctgccccagccgcgcatcccgcagcctcctcgcatacgccgcgtgatccgcccgcttcctcctccccgcgcccgcagcacccgccgccgatggtagccgccacgcccgcgcaagggaagttgcttcccaaatccgcgcacgggtacaagatttcctctgtccaaccactcgcatggcacaagtgctcagatttggatccttcagacaagatttcccaaatcccgcagacaagttcatccgagcgcatcccgcagccccacgcgcgcatcccgcagccgcgccgcagccgctccttccatccgcgaggatcccccagccgctctttccatcctcacgaggatcccccagccgttccttccatcctcgcggatccgagcgcgctcgatcggatacccttaatcgcggctaccataaacgcgctcctaccccacgaaatcgatggcgcgcgtgttgagggcgtggggaggaggtgcgcggccgccatcaacgatgtcctacccatctgctccgcgattcttgccattcttcctggttaccaatcagtttttggttcccccgctgaagctcagatctatctgaatggcttccctatgaagcatcatctggttgctcattggcatcacctttgttctgttgaaactggcatgaaatcgttggatttttcagatttgtctaccacggtttcagaagttgcattttcggtgaatgggatcactggaatttttggatttgtcaagatcaggctcagcttctttctgctgcaggagttcctttatagttgtcgtctgatctgggtttga

SEQ ID NO: 21346 - DNA, 246 bp, Zea mays
  Peptide Sequence Number=SeqID_63125
atgtcgtcgccggccttcaccggcggctacacaatggagaagagagaacggggtacagagaaaagaaagatcagtcggcggcttaactcaggtgcagctcgaccggggtggggctttggtcgacggtggcggtcctcgggtagggacaccggggcggccttgtcgtggggctctattcatgtggagattagttttttggagtgtgggtttgagtcctctgaggttctcttcagggcgacacattga

SEQ ID NO: 21347 - DNA, 630 bp, Zea mays
  Peptide Sequence Number=SeqID_63126
atgggcgcccgcgataccacggctacgccccaggcttcgctcccccgcgatgccacactggggcgcacccacgcccccgactccgctctcccgctacctcacctcggcgccgctccactagcctccacctccacgcgccccatctgcccgcatccatcgacgctcgcacgacaacctcgcccccacgcccgcatcgtcatcccccagcccacaatctcatccatccgcacgagaacaatcgatcgcgtgtctccaatctcctccatccacgccattccatcaaacatagaaatccaaatcgagactgcaatcaccttccatcgtcgattcccaccttccatcgtcgatggacacattccaccgacggcgagtaaatgggaaccatccttggcacccttgatgacatcaactgatattaaagaacacgtccaagtcgaggccgccaccccattcccatcatcttcgacgctcgtgttctgttcgctgctcgtgacgacccctttcctcttcaaccgcttcgtcaccggtctagctttaactgtcaaaatattaggtgaatataatggagaccagtccaacttcacctcttttggaggattagccagcaaaaaatgtttttacatgaactaa

SEQ ID NO: 21348 - DNA, 117 bp, Zea mays
  Peptide Sequence Number=SeqID_63127
atggcaatagtatcatcctcgctcgttgtgccgccttcgtccacacaagcgacggagctaaggttacgagaaccggcccagtggcaccatgttggtctaccaggatctgctatctga

SEQ ID NO: 21349 - DNA, 825 bp, Zea mays
  Peptide Sequence Number=SeqID_63128
atgccgcacttcccgcgccggctcaagcccaagcgcctcgcgctggcgctcaagaagctcatttggaaggttctcagagttgctgatcccaccattggcagttcaagtatcaagaggccattggtgacagaagctgcaacattcatggttatgagattgttgccagagaaaccatcgaaggctgaaatagaaaaggttaagaaaagaagagaagagctattgaaaaggcacgacatgaagaggaaatggtttgtatttgacaatcataatctcttttataataattttgcactcatggtggtatgcgaatgggagttaggcgaggctcggaaaagagatgccctagatcgagctagggtccatggtgaggaaccaccacctgaggttcttgcagaagagagaggtttgcatgcaagtattgagggggatgtaaaaagtctcctggatggtaaaacttccacagagcttgaagatatgcatggtcaaattgagtcccaaatgagctctggcactgcaaaagttgttgagtactgggaggctattctgaaacggcttcatatttacaaagcaaaggctttctgtgactttgattcggtgatctctgttagtacttcagcacttgtatggttccaatacaagaaatttgctgcaaaggttgtttttacagtggcaacatgtattcttcgtatggtcctccgagaatttctgaccatttttttatatcactacattttaatgctaaggaatagggataagaacgtgggtacccacgttcttaaagttaagaacgtgggtaccgtcgaacttaatgtgcagcccacgtag

SEQ ID NO: 21350 - DNA, 309 bp, Zea mays
  Peptide Sequence Number=SeqID_63129
atgaaccgctgctctcgggaatcgctggggatatcgcggataaaattcatcggactatccgatgagccaatagcgtctgcgccaacggtcggcagcacgatcgacgcgcaatcaccgggcgacgtgtggccagaggcaagggtcactaggccgcaccggactgttcggtgtgcaccggacagtgtccggtgtgccaagtggaccaagggttcaacggtcggcttcgccaaagaaggaaagaaatcatgcactgttcatgtccagtggtgcaccggactgtccgatgcgccaacagacagaaggcaataa

SEQ ID NO: 21351 - DNA, 231 bp, Zea mays
  Peptide Sequence Number=SeqID_63130
atggcgcggtcggtccaagcccaaggtcgggcgaggcggagacttctcctgaggccgaggccggggtcgggcgaggatgcgattcctcccgaggccgaggttgaggccgagccctggggtcgggtgaggcggagaccaccttcccagaccgaggttgaggccgagccctgggggctacagttcccgcccgaggctgggctcgggcgaggcgagatcgcgtcccttgggtag

SEQ ID NO: 21352 - DNA, 261 bp, Zea mays
  Peptide Sequence Number=SeqID_63131
atgacggtggtgatgacgcaaatggcgacgggatggctcggcggcggggtgaggggccgctcgggcacagtgcgcggggcgcatgcggcaccggctgtgtatgcatatgatgagatgactatggatgagttaggagagataaaaagggtagagataggtcaaactggtgaatttgggatgtacactatgatgatattaaagagatttcatgtagcatttcaatggtatctaaatattgatcttattcatggtaatctctga

SEQ ID NO: 21353 - DNA, 645 bp, Zea mays
  Peptide Sequence Number=SeqID_63132
atgcccgccaggccgtcactcaaactcaacgtaagctgtcactgctcctgctcgtgttgtttcctgatggctcgccgccgaccgccatgcttctgtgcgagtgcggacgtgcagcggagtggaggtcatagattcacagtcatccgtctcgtgcagacctggagtggaggcgtggagccgcggagcggacgagcggtggaggtccaccaagccggcctagcatcatccaagcagttgcaccttgcacgccaacaggcaacagacaacatccatgtgtccatgtccaggagtgctcgtgctacctccatgccgccgctagagaaacatcttagcctcgacctctggagttatttgccagacccaccgccgacaccatcttcaggcaaaggcaacaatggtgtacctattttagcggtgccagggtcatcagctgcactatcaccagccaataatgataagcaagggggttcaaggcatggagctaatgcagtggttgacagacaaacaaagaacccatctgtagtggctcttgatgctgaggaagaagagggagaggccgtggatattagtggaacaaggaagagggcaaaaaggactaaagcttttgtgtgcgattacttcaccaagaaaatagagaaacaataa

SEQ ID NO: 21354 - DNA, 219 bp, Zea mays
  Peptide Sequence Number=SeqID_63133
atggatcggctccaccggcttcggctcggcctcgcgcagacgcggcacgctcagacagctcacgccgcgagcccggtggccgcctttgccgactttttcttaacttgcccaatcaggaaggcggttaaatgccgcctggccgcctatcttttgaccgcgacagctgtagcctgtaggccttacagcaacaaagtaactcagaataatgctcaaaaataa

SEQ ID NO: 21355 - DNA, 1050 bp, Zea mays
  Peptide Sequence Number=SeqID_63134
atgaaaagacttgaatacgccgtgtcagctatgcaaggataccgtttaaatatggaggatgctcatgcaattgtcctgaatcttgatgctgcaactggcacatcattctttggtgtttatgatggccatggaggacctgctgtttcaaagtattgtgcgagacacctacacgctgagcttcgccgacatgaaagttttcgggataatctccagactgcaattgagagaacgttcttaaggatggatgagatgatgagagacaggagggcagggagggaattatctgggtacggtggtaatgacaattggaaagcatatagaaaggctatcaacatgagtctatttctacccttctgtcagaagccagcttatcaggggccagtaatggatggatgtaccgcgtgtgtggttctcattagagacaaccgaatcattgtgggaaatgctggtgattctcgttgtgtactctcaaggaataatcaggcgattgatctatccaccgattttaaaccaaaccttccagacgaaagacaaagaatagaagctgcaggacatgtggtaacttttagcgagagaggaaatgtgcatcgtattgatgatggaattgcggtttcgagatcacttggtgacctaatgtacaaggataataatgatttaggtcccgtacaacaagcaattactgcctttcctgaagttcgcactgaagagataactcaagatgaccagtttcttattatagcatgtgatggaatctgggattgcctaacaagccagcaagcagttgattttataaggatatactcatttgctgacgtagggctggcgtccatctgcgaggccctccttgctcactgcgtggcacaacctagagggagggacaacatgactgtcatactggttcggttcaagacgccaggcgcttgccaagttagggccagcaacgtaccgccaccgccgatccgccaagatgctgctgcgagccaagctgctgggagccaagctgctgctgcgagccaagccgctgggagccaagctgctgccggccactag

SEQ ID NO: 21356 - DNA, 1446 bp, Zea mays
  Peptide Sequence Number=SeqID_63135
atgagctacgggtgtgacagtggtatcagaggcgacgacgttgggttttggagtgacactggcagtagctcgggccaggctatggcaaggctcttcctctccaagattgagggcgatggatggattggaggaggcatacccaccaagtgtttgatggtttgcctgattcggagtcatgaggagattatggtgagtggtgatggcagttacttgctgcaacaggacctggtggtacctgatgcctctcaggtgttcgtgggaatgccacaggaagtaagtgcagataaggaattagatgaactgccttatgttgatgttgtctgggatgatgaacctctagatatagaaacaattgttggtgaggattgggtccatgcagatcaaaagcaggatgcagatttgcaattagctcaagggactgaggagatgatgtgcaaacaggttccattggaggcatcaattttgttggaggaaatgtatcaaggtggagagaacttgccattatttctagatttcgatgtgtttactgtaggaaaggctattgaggacaacaaggtcgtgtgggataaagagctgctacaagaggttgagtcacatgacagtatactgatgccagtagctcagggagagtgcctgagtgtcatggatgacaaaccagttgttaagttggtctctttcaaggcttcaatagtgataaatgatgatgaaggggagttattcgatgaaaggtctcttacaaatgtgatttgggatgatgaatttgtacacgagctagagcttaatggtggtccagtagtacttgatgagatgcctcacgaggacatcatatgggatgaagaaagacatactggtgggtctcgcaccaatgacttctctatttcatatgcatctgttgctgcattggatgatcatatatgtgcttttggtggtgaagaaaagaaaggaattttatgtagttttgagaaagctcattcaagcacctcgacgtcgtcccccactctccctcctctctccaaaacaaccaccgcgcttgcaccccctgccctcgacgcccgcgcagccagcgctcggagccaccccatccggcatgcactaagcgctgctgcgccgtgcggaggagtccccgccgcgcacgccgtcattcgtcgcatgccatcgaactctcgcgcccagagccccgtcgagccaccttcgttcgagctcgccccaaagtctgcgtctaccccctcttcatcttcgttgtgcgcggcatgtcatggctgggcattggctgagctctactctcccctacgcgccgccttgctgctccgttcccggtcagcgatctctgcccgccccggcaagccgcccgcacagtcccaccgtgctgctctggcgagttccgacaccaccgccctacctcccccgtcggcgaagccccgccctgccatatgtgatgttgcatga

SEQ ID NO: 21357 - DNA, 663 bp, Zea mays
  Peptide Sequence Number=SeqID_63136
ggcgaaggggctgtcgggcggttcgagattgcaaggagtcggtggctcggcccaatgtccggggcaagcgcgagggggcggctgtcgccagcgtccggcggcgccggggactccgaaccgcggtccgcggggggcaggacgcgctcggtgtccgctacccgcggccggaagccctcgccgaggcccgggagggatgccgccgcggcggcaggggcgacagaggagaggaaacccgccgccgtgcccacattgctgccctcgctcagcgcgcccgcggggatgcgtcggcaggagctgctgctgcgctcgggtctgtctctcgacgcgtcctgctcctcggacgcgtccacggactcgttctgcagccgagcatccacaggccggattgggaggccggcgtttggggctaggaagaagaagaccctctctcagactgattacaagcctgtttccatgctggaaagggagggtggattggcttatcagaccgatgctgctggtgtcaagaggaggtgcgcatgggtgacagcaaatactggtgcgtgcttctggttttgcttgcatgttttagcatttgatgtaggggaattagaaagtttgcctaaaaacacccaaaatggaaggcgagaatgttatgcaccaaggatccttgctaacctgtag

SEQ ID NO: 21358 - DNA, 897 bp, Zea mays
  Peptide Sequence Number=SeqID_63137
atggggttgtcgctcttcatgatcttatctctagctcggtcacttcctaccctccttggggtgacgaaaccgtctacaaagccctatcgtcgaaggagcgtcattcaattcgtgaaaagactaaggagacagaagaagacgtacatgccacatgttgtctgcaaaaagacggagatacctttcatcgatcatatagatcttgtgacgaaacagtctacaaagccctatcgtcgaaggagcgtcattcaattcgtgaaaagactaaggagacagaagaagacgtacatgccacatgttgtctgcaaaaagacggagatacctttcatcgatcatatagatcttaccagcgacgtcgccgaggagcaacagcagcaacagcaggcggtggatccgctggcgcggcagtcgtccatcatgtcgctgacgctggaggagctgcagaactcgttgtgcgagccgggccgcaacttcgggtccatgaacatggacgagttcatggccaacatatggaacgccgaggagttccaggccgccacggccggctggaacaaggagggcgtgtatcgggagccggtgcccgtggcgacgacgacgggcacaggtgaaaacggaggaggaggaggaggagggaggggactggttctgcaggggtcgttcgcgctgtcgtcgccgctgtcccggaagacggtggaggaggtctcagccgagatcagccagggcccaacggacttccaggctagcgcggcatcgcagcccgtgggggaggcgaggcgaggtgtgggtggcccattgactcacgcatctgcgaggtggaggcgggtgtcttgtggggccagcatgtcagttagagataggcgggggcgtggccacgccagggcacccatgctccactcttaa

SEQ ID NO: 21359 - DNA, 1029 bp, Zea mays
  Peptide Sequence Number=SeqID_63138
atggcggtcatggtgctgtgcgccgcgtttgtgctggcctcgtcggggttcaccttcggcatccaggttgctatttatgcggagttcagaagggattggccagaagcattgaagttctatgaggaaggtgtttgtgttttgcgtgagttagcggcaacttacatgagggagaagaggtatgccatcgaatgctcgtcatcaatggctaaccttacaacagaagttaatggagtacctgagtcagtaatgccttctgtatatgttggccaatatgtgcgcttgtttgagcaaggagatacagttagtctactacccctttctgatactgaatacaccagctatgctttgtcagaagctgaaaggtttcaagattcttatgagataatagcattgttcagaaaagcttatgaatcatttcagagcctaggtgctacaagaatggcttctgcctgtagcagtggaatggccatagaatattacgcagctggtgattttagcaacgcaaaacagctttttgatagtgttgctggtctataccgtcaagagggttggaccagtttgctctgggagaacctaggatacttgagagagtgctcaatgaaacttaattctcccaaggattttatcagctattccctagagatggctgcattaccattattttctggtagtggagaggaaaatcgagaaaacaaaattaagagtgggcctgcaggttcccctaccatttccaggagagagaatatacagcaggaagttattaatgttttggaaagaaaacagtcatcagaaggaacatatgatgggtttaataatgcgatagaagaagttactcaccttgatattgatcagataagtccgctaagaatggtgcttactgcatctgttgcttttcatgatcaatctgtaaaacctggttcacctctgcttgtcagcgtgtcactcttatctcatcttccttctccagttgtggttgatcagttggagccttggaggttctgttcaatcaatctgactgtaactttgtga

SEQ ID NO: 21360 - DNA, 318 bp, Zea mays
  Peptide Sequence Number=SeqID_63139
atggccccacccttccagcttgagtccgacagcccgggcggctgtcagcagcagaacaacagggtctggaggctgaaccaatggtgtcaggctttggctgctcttaccctgttactggctgctaagtgtcattttgttatcgtgtcatggcacatatttcagtacttggttgaggctggagctattacagtaaagcatgtgcgcaaggaagattgtgccatgttgccaaagcgaccggtctctgtgatacttagagacacagatgactacatgcttgatgagatgaccgatccttgcatgatgttctgtgcgttgtga

SEQ ID NO: 21361 - DNA, 639 bp, Zea mays
  Peptide Sequence Number=SeqID_63140
atgcatcacgaccccaaccccttcgacgagggcagcgccgaggacaaccccttctcaaatggaggagccggaggcggcaagcagcagtacggcttccggccgactgagcccgtcgggttcggcggcgctagcaggggcgacgccgtcgttgacgtcccgctcgagaccatgggggatatcaagaggagggaagaggcgctgaagaatgctggcgtgccaatggaggagaagaactggccaccattcttccccatcatccaccatgatattgccaatgagataccagcaaatgtgcagaagttgcagtatcttgcatttgcaagctggcttggaattgtgctttgtttgtcctggaacttcgttgctgtcatagtctgctggatcaaggagggagattcaaagttgtttttccttgcaacaatctatgctttgcttggaattcctctgtcatatttgatatggtacaggccactctaccgtgcaatgaggactaacagtgctttcagttttggatggtttttcctgtgttacctgatccacattggtttttgcataattgctgccattgctccaccaattgtatttcatgggaaatcattaactcatgtgccagttgaagacctcatttttcctctgtaa

SEQ ID NO: 21362 - DNA, 477 bp, Zea mays
  Peptide Sequence Number=SeqID_63141
atgtacccacccgtaaccgtgggcgctctaatcacaaccgccatcctcgccagttggggctccacccgcggctctcgaaattcaatgccgggtcccgtccttgccgggtccgtgctggccacgacgccatcctcgcctgcccactgttacgcattccgggttgccccacagccttatcgccccccaccctcaccagcccgggttgacaaatccccacctttattgcgcccaccatccttgctgcctggggttccaaccgccgtcctacccgccttatgcaacttcgcccacgatagccacgagctagagctgcagcacttccaacatcctattcttgagaccctatgcctcacaacataccgtcttgagcccctctgcttcacaacatatcgtctgagacttagtgatactccttattatcttgataaaaattcaattatgcaatatttttttatgtacaaagctcctgctggctag

SEQ ID NO: 21363 - DNA, 1851 bp, Zea mays
  Peptide Sequence Number=SeqID_63142
atgtcggagcttgtggtctacaccgacgctgactcggccagctgtcccaacatgtgtcggtccacttctggctatgccgtgttcctgggcgccaacctccgcgcaacccacgtcttctgcgataacgtcagcgtggtgtacctctccaccaacctcatgcagcatcagcacacgaagcacgtggacattgatctgcacttcgtccgcgagcgtgtcgctgtcagtgagcctgtcacccctactgcgccacccccgtcgtcgtcgagccctcctcctgccaccactccgccaccgagcccttctccatcaaatggaaacgtcttcaccactgttcggctctacgttgaccagaggcgtattgggtggtctgccgaccccaagacaatccctggaactctcctcctcgacaggggtcactccggggaggcacgatttaggttattcgcggagaagaagaccctctacgcaccagacagcatgggttcgtcggcggcgcttcagccgaagcagctgtaccagctcgtggtgaacaacttcgtcgccgtgctcgctgcgccgctggccgtggcggccgtcgtcaatgcggcgcgcgtcgggccggacgagctgctcggcaggctgcaggcgctccgggcggtgcacgtatttctcgccgtgtttgtcgcggccgccacggcgatactgtacgtcctgctgcggccccgggccgtgtacctggtggactacgcctgcttccgcacgcggcccaactgccgcgtccccttcgccaccttcctggagcacgcgaagctggtgacgttcgtggagggggcctccatcgacgagcgcagcgtccggcctcgcgcgcggaggtggagctcgtcatctttctcggccatcgacgacctgctcgcgaagacgggcatcagccccagcgccatcgacatcctggtggtgaactgcagcctcttcgcgcccgtcccgtccttcacggacatggtgatcaacaggtacgggatgcggccggacgtccgcaatgtgcacctgtccgggatggggtgcagcgccgggctcatctccgtggggctggcgcgcaacctgctgcaggtggcgggccggggcgcgcacgcgctggtggtgtcgacggagaccatcaccccaaactactacgtgggcaaggagcgcgccatgctcctgcccaactgcctcttccgcatcggcggcgccgccgtgctgctgtccacgtcccggtccagggcccggttccgcctggcccgcgtggtgcgcacgctgacgggcgcccaggacagcgcgtaccggtgcgtgttccaggaggaggacggcgagggccaccgcgggatcaacctgtccaaggacctgatgaccatcgcgggcgacgcgctcaaggccaacatcaccgccatcgggccgctggtgctgccggcctcggagcagctcctgttcgcgctgtccttcatcgcgcggcgcgtgctgaaccggcgcgtgaagccgtacctcccggacttccgcacggcgttcgagcacttctgcatccacgcggggggccgcgcggtgatcgacgagctgcagcgcagcctgggcctgtcggacgaggacgtggaggcgtcgcgcatggcgctgcaccggttcggcaacacgtcgagcagctcggtgtggtacgagctggcgtacatcgaggccaagggccggatgcgccgcggcgaccgcgtgtggatgatcggattcggctccgggttcaagtgcaacagcgcggcctgggagtgcatcgcgccggcgcgcaccgccgaggggccctgggcggagagcgtcagccgctaccccgtggacatccccgaggtgctcaagcactag

SEQ ID NO: 21364 - DNA, 363 bp, Zea mays
  Peptide Sequence Number=SeqID_63143
atggagatgtggacctacacaaatgatgaagtgcccatgctgcagtacaagtcaacttcgctgatcgagccaacgtcccaacgcccatcggccgtcgtcccgcccgaggactccgcaccgatcacaaattgttggcctggcccaggtcaaaatcagagggtgggccagtgcccacactgtacaccctctagatccgtcattgcaggaatatcttcgaatttacaaaggacagtaccgaggtggtactatgctgcttcagagctgaagagatcgggttctctctcgtacccaaaggttgttcgaagctggggtgttgagcgaggtgcaaagtacgtttgctacgtccatgagctccactactag

SEQ ID NO: 21365 - DNA, 654 bp, Zea mays
  Peptide Sequence Number=SeqID_63144
atgtccggtgcacaccggacagtccggtgcccccttctagccgttagctcggccacgtgtcccgcgcagatcgcgcggccgaccgttggcccggccgaccgttggctcaccggacagtccgcacctcgagccctcgttgggaacgccttccgacaaggcttctactggccgaccgcggtggccgacgccactaggattaaggcacccgggggcttctcgcacctgctggtcgccatcgacaaattctccaagtggatcgaggtccgacccctaaccagcatcaggtccgagcaggcggtggcattcttcaccaacatcatccatcgctttagggtcccgaactacatcatcaccgacaatggcacccagttcactaggaagaagttcctggacttctgcgaggaccaccacatccgtgtggactgggccgtcgtggctcaccccatgacgaatgggcaggtggagcgtgccaacgatatgcttctgcagggacttaaaccgaggatctacaacgacctcaacaagttcggcaagcggtggatgaaggaactaccctcgattttgaagcccgggacatacaagctggccaacgatcaaggtgaggtctacagcaacgcttggaacatccaacagctacgtcgcttctacccttaa

SEQ ID NO: 21366 - DNA, 327 bp, Zea mays
  Peptide Sequence Number=SeqID_63145
atgggcagaggcaagagaggcaagggatggccccgccgcgctgacaggaagcacaagcgtcctccgagtccaccctcggaggactttggggactcggaatactcagaggagcgatccatcgagcgcaccgggctcggtgggtcgcacgactcggaggaggcctccttggaggaggtggaggactcttccgactccaaggagtggagcggcgacagtgaaggtggcaacaacaagggcaacgacaaaggtgatggtgaaggcggcaagggcgacggcaagggcgacggcgacgacggcaaggacagtggcataatgctgctggcataa

SEQ ID NO: 21367 - DNA, 324 bp, Zea mays
  Peptide Sequence Number=SeqID_63146
atgtggaactggtccttcaactacttccatgttcagatcgaatctatgcatagcgaggtataccatgcaaaggctgacaggaacatggttgagtgggcccaagcaatgggaggtatgaatgctctggtgctcaacaatacaacaggtaggggcaactatgttgttaagcgtgtcctgccaatgtacagtgtgggacatggtcgagtgggcccaagcaatgtgagtgtgggggtatttataggtaaccaggtgagtggacatgccctccaaagtacgatttatgcccttggttacctacgtcttccccagaatattcccctttaa

SEQ ID NO: 21368 - DNA, 240 bp, Zea mays
  Peptide Sequence Number=SeqID_63147
atgggatacatgacttgtgggtactgggtacaacctctgcatagtgtgaaactgatgaggcaagaacgccaggaacggatggagatacgtcaagagatgaggcaagaacgactggaaagacaacaacagccacaaccacaaccacctccaccaccaccagcagctccacccagagataaacaccgggagtttatgagccacaaaccaccgacattctccaactctatggacccattataa

SEQ ID NO: 21369 - DNA, 810 bp, Zea mays
  Peptide Sequence Number=SeqID_63148
atgccgcaccgaccgtggcatcgcccacggtctccgatcttctgcgcaccatccccgacaccctcgattccacgtggagctcgggggcagggggttgccgaggaggttggtccctcggagcgacccgtggagctggtagaggagtacaacatcctgcctcctatcgccgaggcgggcggcgacctcatatgcgctgggccagatgtggcggaacctcctaaggcaaagcttacccatgatgaggcattttggccagttaaaaggtcctcaatcatcaagcctacatcggtacggtcattaaccgactcaaacggagacaatgcactgagacttccttcaaaggacaatgcaccgactcaaatggagacaatgcatggagacaatgcagagagcaatgctaagcatcataaaaatccttttcataaaagggaatcaaggaaggtttctatttcttcactggataagtccctggcgacggtgcgctcacccaccagccatctccttgctggaaacggccataaacggcaacgactgactaaaccaagcgctggactagcatccctgatcctagacgaccctaatccatcccttaattgcacaaatccggctcatattttgtttgctcatgatggtggtgaaaaccggagacaaaccgaggtgttcccggtgactgggtgcggtctagctcaattgatcgggtcgacaagcatgccaagtgtgcctgggtgctacaacaagcgtgagaagggcaagaacgaacctagagacagtggtccacggcgtggcgtccacggtggcgcggaaacctga

SEQ ID NO: 21370 - DNA, 285 bp, Zea mays
  Peptide Sequence Number=SeqID_63149
atggggaaaagcctgtttatgagatgtgtcagcgcttctatgttggatgatgccgggatgtcctttgctgtagatgtcaaggtcggagccgagctcgggccaggcagaagtcttcccgaggtgatggctgaatccttcctaatgtgtgccatagtcgatggagttgcctcctacgggattcgcagtggagcaggatcgagctcgagcgagttggagacttggttccttgctctcgagcgacatgccttggcagagaatcttcctgagcgtgttttaagggcataa

SEQ ID NO: 21371 - DNA, 1401 bp, Zea mays
  Peptide Sequence Number=SeqID_63150
atggcgctcgtgagttccttcgcctttctctctctcttttttttatcactctttcagaagtgctgtgtagctcatcacttatcggactgtctgtattggtgtagatgtcattgcctgtttgcatgcgtactattgaattaccatgcacaaacagaggtattgcattctggggctggaaacaaaaatgccttcaaggcacttattgctgcagaatacagtggggtcaaggttgagttgaccaaggattttgagatgggtgtctccaacaagacccctgagtttctaaagatgaacccccttgggaaggttcctgttctggagactcctgatggccctgtttttgagagtaatgctattgcgcgctatgttgctcgcttgaaggatgacaaccctcttttcgggtcttcccgtattgaacaagcccacgttgagcagtggatggactttgctgcaacagaagttgatcctggtgttggatggtacttgtatccaaggcttgggtacatcccttatgctcacacgactgaggaaacagctattgcttcattgaagagatcccttggtgctctgaacacacatcttgccttgaacacataccttgttggacattctgttactctagctgacattgtattgacatgcaacctctaccatggaattgcacggatcttgaccaaaagcttcacttctgatttccctcatgttgagaggtatttctggaccatggttaaccaacctaatttcaagaaggtcattggtgaggtcaagcaggcagagtctgtacctcctgttcttaaaaagggtgttcctcctaaggagtcaaaggcaaaggatgtgaagaaagaaactccaaaggaggcccccaagccaaaggtggttgaggtaccagcagaagaggaagcaccaaagccaaagccaaagaatcctcttgacttgctgccaccaagcaagatggtccttgatgactggaagaggctatactcaaacacaaagaccaacttccgggaggttgccatcaaaggtttctgggacatgtatgacccagagggctactctctgtggttctgtgactacaagtacaatgacgagaacaccgtctcctttgtgaccctgaacaaggttggtggattcctgcagcggatggacctgtgccgcaagtacgcctttggcaagatgctcgtggtaggttctgagccacccttcaagctgaagggcctttggctcttccgtggccaggaggttcccaagtttgtaatggatgaggtctatgacatggagctctacgagtggaccaaggtggacatctctgatgaggcccagaaggagcgtgtcaatgccatgatcgaggaccaggaacccttcgagggcgaggccttgcttgacgcgaaatgcttcaagtga

SEQ ID NO: 21372 - DNA, 774 bp, Zea mays
  Peptide Sequence Number=SeqID_63151
atggcttccccacctcagacggagctccaagcggtagcgctcgcgctcctcgtcctcctcctcgccggcgcggcgccggcgcgcgcgcagcaggagtacgaggccaacaagcagaacgcttgctatgccaccaacgccagctccgtcctcggctacacctgcaacgctaccaccgcctccactccagcctgcgactcctacctcatcttccgctcctccccgacctactacaacacgccggtctccatctcctacctcctcaactcctccgtctccgccacggccgccgccaacgccgtcccgtcggtgtccccgctcgcgccctccagcctcgtcctgttccgcggcgagacctacttcatcatcgccaacatcacctaccagggcctcactacctgtcaggcgctcatcgcgcacaacccgctccacgacagccgcggcctggtcgccgggaacaacctcaccgtgccgctccgctgcgcgtgcccctcgcccgcgcaggccgccaaggggttcaagtacctgctctcctacctcatcatgtggggcgacgacgtgacctccatcgccgccaggttccgcgccgatccgcaggccgtgctcgacgccaatagcctcactgccgacgatatcatattccccttcaccacgctgctcatcccgctcaagaccgcgcccacgctggacatgctcgcgtccacggcgccgccgccggccccgaccccgccgcagcccgcgcccgcgccgtcgggtcggtcgggtagcgggaagttg

SEQ ID NO: 21373 - DNA, 573 bp, Zea mays
  Peptide Sequence Number=SeqID_63152
atggctacccggcgatccgagtcctacactaagctctcgtataacacagaatgtacaggggatcaaggccgactaaaagggtccatgcatgccttgaatcgccgcgcgaaatgcagtgaccaccgcagaactctagctcggcggaaattgctacaccgacgagcaattccgcgatcaccgcacttcctctctcctaatcgacactgcgagcacttccaccgcaccctggtgatgcttctcaaccgttgctattggcccgagcggcgtcggagacaagatccgaccaacggcaccgcaatcctctcctccacttcacgccgcggaagtaggtatggcttcagaacgtgggtgcttcgcgccagagggctagaggcactacttatgtgccaaaacgatggcacacgagaggtttggggtccgttgtaccggccagctgagctggtcaaatcgtggtggaggttgcactcgcggagaaaaaggaggaaggaagactttgtgcgcgtggtgaccgaccggtgggtccagcggattcagcgagacgatcccgagtccgcgcgggtaatgaacggctga

SEQ ID NO: 21374 - DNA, 579 bp, Zea mays
  Peptide Sequence Number=SeqID_63153
atgagatgcacccggctttgtcccttaaatccgggtgtgactacaggactgttgattcgcacatctatcgcccgagactcgccttccctgcctcgctcaccaccaaacacccagagggcggtgtcgtgcgatggccatggcggaggacatcaccggagattcgcaacacacgcatccgcgccccaacctcaaatccgagacactctacgcgcgacagagaacgagtcgattgtgagacgaacttataagaaaggaagtaggcgatgggatcagttcacagcgcagggcagatctgggacttggtcgaagtccggtgacggattcccgttggtccaagtcaccgcaacacccaaggctcccaaggttacgctgcagtgctccactggatcgcagctcgcaccccgattccccaaaagtggcaccgactcgaagggcgcacgatggcagggggacccacccgatctctcagctcaccgtcaactggctctcttcatcgataatcaaagtaagcagaggagtggacgatcgcgagccttcctatatactcctgcgagggcgactgtaacgccccgaatttga

SEQ ID NO: 21375 - DNA, 282 bp, Zea mays
  Peptide Sequence Number=SeqID_63154
atggccaaagcagctccagccacctctgacgccgacccgcacaccatcgtgactatcatgacctccccgacgtcaccgaccacctcaccagagctctactgccgtcgcctgcatctatcttattcattgcattcgatagagtgcaacctcgctgatggagagtacatcctcgtgctagagcaaggaattgctcaggaggtagcccaggatccagcaccagagcctgctatcgaggatctgcctgccccagctttggaaggcaagccccggttttatgcataa

SEQ ID NO: 21376 - DNA, 279 bp, Zea mays
  Peptide Sequence Number=SeqID_63155
atgagcccgcccgcctgcgctcatggatcggccgatttcggccatcaccgacggcaagccgtacctcggcgtgaccgtagagacttcccggagccaaccccgtccttcactggacctccctcgccgccggaaaaatattgtaatctcgctgacggggaatacatcctcgtgccagagcaaggagttgctcaggaggtagcccaggatccagcaccagagcctgccatcgaggatcagcctgccccagctttggaaggcaagccccggttttatgcataa

SEQ ID NO: 21377 - DNA, 381 bp, Zea mays
  Peptide Sequence Number=SeqID_63156
atgactggagggcaactccgtcgcagcgcgggaggacgattgccaccaccagaagctggaagaggaggtggttcgccgacccgcatgcgagggaccgggaaagggggataccccgaaagggatccttctccgcgaaggaaccgggctccgagccccccattactgatcaggggttcgaaggctggccccccgagggttcaacagtcgcctcagatcgcgtgggcccgacacccactactggtcaggggttcgaaggccagccccccgaagggcttcatggccgcctcaggctactcgggctccgcgcccattactgatcaggggttcgaaggctggcccccgaagggttcacagtcgcctcagacaccgagcgagggatga

SEQ ID NO: 21378 - DNA, 1374 bp, Zea mays
  Peptide Sequence Number=SeqID_63157
atggcgggacataataaaagaaacattattctcatgcacaagtatgagatggggagattgcttggtcaagggaccttcgctaaggtctaccatgctcgcaacaccaggacctcagtaagtgtcgcgatcaaggtgatcgacaaggggaaggttgtgaaagtcggcctcgtcgaccagatcaagcgagagatttctgcgatgaagctcgtcaggcacccaaacgtcgtgcagcttaacgaggtcatagccaccaagaccaaaatatacttcgtgttggagtatgttaaaggcggggagctcttggctaaagtaaagcgaggaaggcttaaggaagatgtggcgaggaagtacttccaacagttgatctgtgcgctggacttctgccatagcaggggtgtctaccatcgggacttgaagctagaaaaccttttgctcgatgagaatagcgacctcaaggtatcggattttggtctaagcgcgcttgctgaatgccgaaggcaggatggcctgctccacacgacctgcggcacgccggcctatgttgctccggaggtgattaacagaaagggttacgatggtgcaaaagcagacatatggtcatgcggggtcatcctctttgtgctattggctggttatcttcctttctatgataagaacttgattgacttgtataagaagattgacagtgcagatttcagatgcccgacctggttttctactcatgttcggaggcttttgctaaggattcttgatcctactcctggtacaaggatctcaatagaaaaaatcatggagaatccctggtttaggcagggcttagatcatgcaaacctactacttagatataatttaaagactaatgatgcccctcaagtggacacggacaagaatgaagattttgatccaccgagcaccaacataacaacagatagcaagcaagaagacgaaaagaagcctgccaacatgaatgcatttgatataatatctcatctatcaagtggtttggatctctcaggtttattccaagaatctgacaagaaaacagaatctaaattcacttctaccaacacaagctcggcaatcatatcaaagattgaggatattgccaaggatttgcgactgaagttgactaaaaaggatggtggtttgttaaagatggaagcttcaaagcctggaaggaaaggggtgatgcgtatcgatgctgagatatttgaagttagcccaaacttccatctcgtggagatcaaaaagactaatggtgacactctagagtatcaaaaggtcatgcaccaagaaatgaggcctgcacttaaggacatagtatgggcttggcaaggtgagcaattaaagcagcagcaggaacaacaacaatag

SEQ ID NO: 21379 - DNA, 2841 bp, Zea mays
  Peptide Sequence Number=SeqID_63158
atggcggcggcggcgtacttgggcggccgcgggccagggagcagacggcgggtggttcgtgccaggcgccggcgacgggtgggcgcccccgtgggggaggcgcggtgggggaggagcggcggcggcggcagctgcagcagcaggcgagagggagacgctggcggtggtgatggcgaggagggcgcctccgccgtcggcgatccgccgggacgcggtgcgcgttgcggaaggcggccgccggcgaggtgctgctgcgcgtcccccccaccagggaggcgggagcgccgccgccaggacgtcctcgcctacctcacacgactcatcggatcctccctctggctgcgaggagttcgttcgtacgtcgtcaccgtagacagtagttcgtgcacacacgcacaggcacagcacaaccacggatccactaatgtctttgcgtttgggtcagtgccgctgaggacgtatctccccgacggcgacgttgatataactgtactggggaacacatggttaaacagtacactcattgacgatgttcgcagcatgctccagtcggaacaggaaaactgtgacgctgagttgaaactaacaggcctgcacttcatcgacgctgaggttaagctcataaaatgtgtgattgagaatattatcgtggatgtctctttcaaccagattggcggtgtgtccacgttctgcttccttgagctggttgaccgtcaggttgggaaaaaccatttgttcaaaaggagcattatgttaaccaaggcttggtgctaccacgaaagtcgcatattaggagcccatcatggactgatatctacttatgccttggaaacacttgttctttacatattcaatatgttccacaagtctctgcatggacctctggaggtcctttataagtttttggaatattttagcaagtttgactgggatcgatatggcattagcttaaatggtcctgttgatttgtcatcattgccgagcttaactgtggaacccacagaagtacaaggtgagttattgcttggcaaggacttccatcaaggctctctggatagactcgttgtaattccaaatgagtttgacggatgcgacacacaatttcgccagaagtttttaaatatagtcgatccactcaaggcgaataataatctcggcagaagtgtcagcaaagcaaacttttatcgtattcggagtgctttctcattcggagcacaaaagcttggtcaaattctcttgttaccatccgagtacatttgtgatgaaatttacggatttttctcaaatacactgaagagacacggaaagggtgaaagactagacattgacgctagtagtgcattccaacccttgcttggtcccgagagtacacttagtgaagatggatcgatgtttaaatcttcttgcataaatgagggtgaaaacggaagttcatgtcattcatcagaactgcctgacatgggctcgagtgtgacagatgtgcataagaattcaggtaagtatttgcctggtctttttcaggatcttccttggaataaaatctggttcatggaatatgcatctgatttgaaagaaaatccacaaacttcagcaagttcaaggagccactcatccttttctcaagataatggtaatggcaacagtaaagagtgcttcgagaattatgcagcagaggaaggtttacaccagatcagtagattaaatgtgccgcaacagatttatgcagggcatccatcgcatagattggctaactcgactagtgcaaatatcttggatttctccagttcttgttttgttgatgagtcagattggactgctccccttgcaggaaaaaagctactcccacccttgttgctgtcaaatatgctggatctctcaggtgatctggagttgtacttgggatgccttcgcaaagttcagtaccacctggagtcattgtttgatgaactcctacaggctgttgaagaagcatgttttgctgatgtgctagatgaggattccttcaatatgccagacatgatcttgaagttaaaaactagcactagatcctcaagcctgccattagattcatctactgatagcgagagaaggaaattatctcctgtgtattgttctcatagcataggagatgattcacaacaatcacatggcgaggcacaagtggatatgttttggcagcagaacgtgccattgtcccccaatggatcaacatttccttcatctccttcaaccaattcagataattatcctgtttcttggttttgtttctctcctaagacgcatggaaccggcacatacattcccaatgtgagttatcaaacatacagggagcgtatcatgcttgaaagagataccatacgagcaagaaaacaaagacagaggttacctggtcgccggtattactcagccgagcaaggattttccggttcacaaaccgaagaagacaccatagctcaaagtgcaacgaaccaatcgcccaagaagcaaaacagtgtgcagcagagtggctattcaggcaagagcacagttccggatgcagatttcgtttgtttcagggagcatgtggcaacagaaggtggaaccaaacagctggcagtaggaagagagacaatgcctccatcatcgtcatcagggatagcacttgctcaaaacggccaaggaaatcgtatctgcgagccttcctcacccgccacagcagatttgttacatgcggcagaaagtttggagtttggatccttggggcctttctcgttgggacttgtctcaacttcaacacagtttgaggaagcattcccagcgctccccactagaaagagagctgaaggagccgagaaccactaa

SEQ ID NO: 21380 - DNA, 345 bp, Zea mays
  Peptide Sequence Number=SeqID_63159
atgtcaggtttcgccggcctgccaacggcgagccatggccagtcgctcgactgctccactccacctgacacgaaattgaaggacgaaacctactttgtcccattcccatggttcctcaaaggagctgaaagcgagacattccttgcagggcagtcggagatttccgttcccagcgtcggctcggccggcgcccatacgctgcgcagtccctactgcggccttctcgtcgtcgccatcaggtcaggtgaggtcgggtcaccggccgtgatggctgacatctgcgacactcactcgtgcgaggacaatgacggagtgggccgcgttgtcagcgcggtcgaggactga

SEQ ID NO: 21381 - DNA, 279 bp, Zea mays
  Peptide Sequence Number=SeqID_63160
atgggatgttgtactgaatcgacatcaacgtttttccctcatgctggaatggcacttggaaatccacgtagttatgttataagaggtttggaagcacttcccctttctatatttctattgtataaattggctatggatccgttgtgtgtggcgtcgacacggaagcaggacttgtgccccaggttcaaagtcatgctggcaaagatcaaggtcaagatcgagaggggtggtgctatcaggcaagagctcgccaagttgaagaaggcatacatggcttaa

SEQ ID NO: 21382 - DNA, 957 bp, Zea mays
  Peptide Sequence Number=SeqID_63161
atgtcgatgctagcagacttcgcaccaagagatctccatgtaacagcgtccgccctctgcggtcccaattcggtgctgttcttagcacagtcgtatgcttccctcgccggcgccagcggccccagggtcatcatcgtcggcgccggcatgtccgggatctcggcggggaagacgctgtgggaggccggggtccgggatctgctgatcctggaggcgacggggcgcgtgggcgggcggatgcacaagcacaacttcggcggcatcaacgtggagatcggggccaactgggtggagggcctcggcggcgaccagctcaaccccatctggcccctcgtcaactccacgctcaagctcaggaacttctactccgacttcgacagcgtcgtcggcaacgtctacaaggagaacggcggtgggctgtacgacgaggagtacgtgcagaagagaatggaccgtgcctacgaggtggaagagctgggcgccaaccttaccaagaagatgcaccccagtggccgcgacgacatctctgtcttagccatgcaacggctgttcaaccaccagccgaacgggccgacgacgcctgtggacatggcgctggactacttcatatacgactacgagttcgcagagccgccgcgcgtgacgagcctgcagaacacgcagccgacgcccaccaacgccgacttcggcgaggacaactacttcgtggcggaccagcgggggtacgagtccatcatacactccatcggcagctcctacctctccaccgacggcaacggcaagctcaaggaccgcaggatcctgctcaacaaggtggtgcggcagatcgcctacaacaaacaaggggtggtcgtgaagacggaggacgggtcgtcgtaccgtgcggactacgtggtcgtctccaccagcttgggcgtcctgcagaccgatctcatacagttcaagccacagctgccc

SEQ ID NO: 21383 - DNA, 1065 bp, Zea mays
  Peptide Sequence Number=SeqID_63162
atggatgtggtgcggcagatcgcctacaacaaacaaggggtggtcgtgaagacggaggacgggtcgtcgtaccgtgcggactacgtggtcgtctccaccagcttgggcgtcctgcagaccgatctcatacagttcaagccacagctgcccctaacaagcaaaacacatcgtatcgccagttctggaagatcgcggcgatctacagtttcgacatgggggtgtacaccaagatcttcctcaagttccccgagcggttctggcccgtggggcgaggggaagcagttcttcatgtacgcgagcagccggcgcggctactacgcgctgtggcagtcgttcgagcgggagtacccgggcgccaacgtgctcctggccaccgtcaccgacgacgagtcgcggcggatcgagcgccagagcgacgaccagacgaaggcggaggtggcggaggtgctgcgggacatgttccccgccgccgacgtgccgggccccgaccagatcgacgtctacgtgccgcgctggtggtccgaccgcttcttcaagggatcctactccaactggcccgtcggcgtcagccgctacgagtacgaccagctcagggcgccggttgggagggtctacttcactggtgagcacaccagcgagcgctacaacggctatgtccatggagcataccttgcaggtatagactccgcaaacatcctcatcaactacatcttcaagaacgaggagtacaaggtccgtggcaagtacgacgtcgacgacctaatcgcacagtccggtagtcgccaccgcgatcgatcccggcccatcattaatgggctgggcctgggcaccaccaccccgtgcgtcatgggccgaatgggggcacccaaacaagatccggagggtggtgaaaatgaattcctggggcaggcgcacgaggcgtcatcgctaggcgctatggataaaactggacggggaaacccaccctatctgacgtttctgtttctacattcttttttacgagaacgagatcgccttcatctaataatagtccatgtgaagataaaaatggcaacaccagaatga

SEQ ID NO: 21384 - DNA, 2736 bp, Zea mays
  Peptide Sequence Number=SeqID_63163
atgcgagcattcaacggccgccgcctccacgatccgaagcccccctcattcctccccctccccttagccccacgcaccacaacgccgccaccgccgcccccctcctcgccgccgcacgccatcccgccgctcaacttccgctacctcaccccctgtccgcgctggtctgcctgggtcgccaccgcactcagcgaccccgttttcgctcccatcctcgcctcgtccgccatctccggcgccgtcgccgcctccaccgccgtcgtctcccccgaccgtgcggccctctccgctctgctctcgctctgggacccggatacccacgcgttccgtctcccagcgggccccgccaccttcacactcgaggatgcgctcgtcctcgctggtctaccgcccgcaggcgcgccgctggaccggaccctcacgccagaggaggatgacctccgcgttcgcctcgttgtcgagagggagaagatcaaggagctccacccctgtgcccgcgccgcgcgccgcgtgtctgcggaggtgtggctcgagtggttcgacggcggtggcatacgccccggcgaggacgacgaactgcggtggcttgggttcctcgcttactggctcgctttttttgttacgccaaggctccggtcaaggggtggcgagctgccggagcgcgtcttcgcacatgctgcgaggcttagtcttggcgagcgcattgcccttggccaggggatggtggcaaatctatatgcggaaatggataagattgttacttgcactgtggccgatggtgtgtgtggccgtctagatgtctgcgtgccagtctggatgctgcaggtgtggatgtgggagcgctacaagaggctgtgcccgccggagctgaaggcaccgcagttccctgtctccaatgtcagggtattgtattggagccggaggaagaagaagagcacatctgaagaggctctaaagattttgctggacgaagtatgctttgagtggaggccctatcggcacaactccctcaactggatggaacccaagtggttcaacaaggacaccattttggtgacctgtcatggtaaagataagccagagtggttgttggattacattgctgttatcagtcaaacaatgttgaccgggtttcatagtgatgacaccgacaattcagtactgtacaatccacagcttgttgcgagacagtttggttatgatcaggctgctcctgtgtccattgtcagggaaatccactttgagggaatcgagttgtggataccaagtatcggtagatatgggatgcctggtgaagattatgttgcatggtgtagcagcagtgggcagttctacaagcatcaaaatgatgtccaatatggttgctcggtattacgaaatcatgaaaatggggctatttcgtcgcaactgaatgtaaatgagaaatgtgttgtagtgccaacacttgatcaatttatcacccaagtcactaggagagaccacatcaattacattgtagaagggcagccggagaaaatggataatggaagtcatgaggatgaaacagaggtgattgtctgtggccttgaagcttgtgtcaaggatagcagaactacttcagtgaaacagaatgtgcagaaacaaagagataaatttgctgaagatggaggtgatagtaagaagaaaagaaaagtagaaagtaacacgaaaaggagttcgttgcaattggaaggtcagaagtattcttcactccagaaagctctaaattctgattctaagaaatgtgaggagttggctcaagttgacagtgatgatgaatgcattgttctcgaacagcccaagaataaatgtgaagtaataaacctggatgatgatgaggaacagagtgtttctaatcgagaacatcataacatgcaacttgtcctagaactggaagagtttgtccgctctggtcttctctcgcaatgggaggaaagctcagatgaagatgatgtaagtggaagcaagcaagaaacccagaagaaaagcaacaatgacccctatgctgaagcagccatgagggagtaccctctgttctttgagttcattcctcagaaaccacattacagaggcttcgtgaactatgatgaaactttaggagatctaccttacagtggattatggtttttgctaattggcttggctaaggaggtgctcaagacgtcatgtgacacagatgcttctgaaattgcatatctgatgaaaaaagcccagcatttagagcaactgggtttcaacgtgacacatctcattgcccgcttaaaggagccacaaattaggcttaagaagcttcaagattctagagcaaggcttgatcatgcccgtgagaaagaggagggcaacgtagtcgagtctctttcaagccatctgaataaactgaagggcaacataaggatgatggatagtcatctggatggaacgaagcaagcttttatttcaaatatacaagataaattgaatgaaggaattaatcttgccagtttggaaaaggaagtagaaactgctgaaaaatgttgtcaggcaatgaaggatgaagtagctgcaatgagaatgaggtatatttgtccggtgtgttcttgtcacttaaaaacaaacataggtgatgagcaccacacacttgctttctgtgtgctcctggataagcaattgcagtctggaaggataaggaagtgtcctaccgaaaaaggaaaaggcaaaggcaaggactactgtacatag

SEQ ID NO: 21385 - DNA, 108 bp, Zea mays
  Peptide Sequence Number=SeqID_63164
atggcccatggcccatggctgctgtggctgcggctatttaagaagttgctaaatgacttttggagtaaaaaaatgaagtcttttagagaactactggagttgctctaa

SEQ ID NO: 21386 - DNA, 168 bp, Zea mays
  Peptide Sequence Number=SeqID_63165
atggcggtggttaccttcttcgccgggggaattaacggggtgaagggggtgaagcgaggtgacccgctgtggaaggaatttgcgagcaagttgttggctgatgggagacgaattggagtgcaagcacagatgacatactgcctctcagctagtcagctggtgccatga

SEQ ID NO: 21387 - DNA, 900 bp, Zea mays
  Peptide Sequence Number=SeqID_63166
atgggggtgtacaccaagatcttcctcaagtttcccgagcggttctggcccgtgggcgaggggaagcagttcttcatgtacgcgagcagccggcgcggctactacgcgctgtggcagtcgttcgagcgggagtacccgggcgccaacgtgctcctggccaccgtcaccgacgacgagtcgcggcggatcgagcgccagagcgacgaccagacgaaggcggaggtggcggaggtgctgcgggacatgttccccggcgccgacgtgccgggccccgaccagatcgacatctacgtgccgcgctggtggtccgaccgcttcttcaagggatcctactccaactggcccgtcggcgtcagtcgctacgagtacgaccagctcagggcgccggttgggagggtctacttcactggtgagcacaccagcgagcgctacaacggctatgtccatggagcataccttgcagtgtggggttctgctgcccatacactagctaatacatcttcaacaggtatcgactccgcaaacatcctcatcaactacatcttcaagaacgaggagtacaaggtccgtggcaagtacgacgtggaggacgacctaatcgcacagtccggtagtcgccaccgcgatcgatcccggcccatcattaatgggctgggcctgggcaccaccaccccgtgcgtcatgggccgaatgggggcacccaaacaagatccggagggtggtgaaaatgaattcctggggcaggcgcacgaggcgtcatcgctaggcgctatggataaaactggacggggaaacccaccctatctgacgtttctgtttctacattcttttttacgagaacgagatcgccttcatctaataatagtccatgtgaagataaaaatggcaacaccagaatga

SEQ ID NO: 21388 - DNA, 252 bp, Zea mays
  Peptide Sequence Number=SeqID_63167
atgtccaaactggacaaaacattccccctccttgtcctcccggtgctccccagccttcataaccctggggttggacttttggaagcctggttcgaaggaatctcaaagtcaagcatgctcaacttggagaaacctgggatgggtgaccagatgggaagttcctactggaaggaaaatcacagtcaccggagttcgtatgactggaacatgggtctggctggtcttaggtggactggacaacatgatggatga

SEQ ID NO: 21389 - DNA, 504 bp, Zea mays
  Peptide Sequence Number=SeqID_63168
atgggggatcggcgccattgccgtctctaccgaaaatccagacaaagcacgagctacgcacgcccccgctgcctcctttctgccgtcccaacgccgccggagtctgtcgccaccgtcgctgctctcccgccttcaccgcgcccaactctcgtccttgcctcccctgcgcgcttcagccgcttcactccccatcgttttcgcctggccagcccgtgctcggacggtggcggcgagtacgacttcgtctgctttgtgggagggagcaccggtgggaacgatgacgaggtcgtcgagctcatcgtcgccgagagctccgatgactttgacgagctgtcaggaggtgggccgagggatgtcgtctggctgtacgcgctggtgtggcgggagaggctcccgccactggaggcagacgactcctccgtcttcacgacatcgcaagtcacgaaaggcttcaaagcttctgggcaagcgcgggggagaacggagcgacgagtcgtgggatag

SEQ ID NO: 21390 - DNA, 201 bp, Zea mays
  Peptide Sequence Number=SeqID_63169
atgcaaatccactatgttatccctaatgaaaacctaagcctaaagggtaactgtaatcttgctgacggagagtacatcctcgtgccggagcaaggagctgctcaggaggtagacccagatccagcacccgagcctgcaccagtgcctcctccactgctttggaagcaagccccggttttatgcaaaccgacgaatctctag

SEQ ID NO: 21391 - DNA, 126 bp, Zea mays
  Peptide Sequence Number=SeqID_63170
atggccattggccggctgcttggatttaggaagaaaaaggctcgcacccatggaggagctgagattcgtacccgtatcactgcaaaagagttgatccttgagatggactccacaaatcgtccataa

SEQ ID NO: 21392 - DNA, 285 bp, Zea mays
  Peptide Sequence Number=SeqID_63171
atggagcccgcggatcggggccggcttaagcgatctacaacggcctcaaggaatcacggagtccgttgcagcgcgcgatcgaggttaggctggcctccccatgaatcgctgtggagttcgttgaggctacagggttggtggtctctgactgattcaagcagggcgatagaactggcaacgatggcccgcagggacactggtgacccggacccaagcgtcagcgattcagtcgtgatgtgcagcgtggtggggagatgggcttaccggattcaaactggattttaa

SEQ ID NO: 21393 - DNA, 219 bp, Zea mays
  Peptide Sequence Number=SeqID_63172
atggccaccatccgcccggggtccgaaatcctcgccatcgccagctacgcgtcccagctacagggtataaaataccaccatgtcgcgccaccccctctagtctcgcctccgcaagccatacggtggacgacgttcacccaggcattcgcgggacggacagggagcactgcctcaccggcgtgtgtggccgtcgcggtcgatccccatcagggccactag

SEQ ID NO: 21394 - DNA, 636 bp, Zea mays
  Peptide Sequence Number=SeqID_63173
atgaaaatccttaaagctgagcgatggcggaagggcgccagcccccatgagatcatgctcctccagcaacaacaagcggcgcaccaggacaagcgtccattcggtctaaaagcgctcggggtgaaccaacaaggccatggcaactgtggtggcgcagagcaaaacctcgaaggcaaaggggcgcaacaagaggaagagaaacaaggcatgactgttacccgaggggtgaacccctttttaaaggcagattcctctgatcgcgccccgaaaggccacaagaagtcccccccaacgcactccggagcacccctgccttatgatatgggggcccgaccccacaagtcatacggctggcgcaacgacctcctggagtcatacccctcggacgtcggccaatgtgtgaagagaaggcgaaccgccgtagaagacgaaccgccacgcgcaccagtaccgtgcctcctcaggaccaccgcggaagacagagaagggacaggcacgccggttgatatgaccaatggctcgtaccctcccctgaggcgggcccaggggccactgtcggtaccctggatcaagggtaccccctactactgtatcaaggcgcagttcccgtacgactacctcttagccacatggtag

SEQ ID NO: 21395 - DNA, 636 bp, Zea mays
  Peptide Sequence Number=SeqID_63174
atggacaccgctggagccacacccttgtccatattagcgctcagccttaggcgtagccccaccggggcttgtcgcctgcgcgtcactgactcgcgcttccagttcaacccgtcggagggccttgacgcccacgcggactccacctttgacgcctccatcagcatgttctatgagaccttctgtctggacaaaatgggtgtagtacttggagctattaatccggtgcaatctactcgtgccctgatatctgcgatccccgtagtattggcttgcagcagaagtttccctggcaacgtacaagtcatgatgaccatggcgcgcgcgcggtggctccgcccgctggcttacatcacgggcggagggccacgtggcagcatcgggtctccgcctgggcgggaagctgaagtgttcatgatggggtctaggcacgtgtcagcgtcggaccctgcctggtctttgaccagggctttaagcaccttccgtcctagtgcatcgggacctcaccgtgagcggtccggaccctttgcaaaggggtatggttcccaccttgggggcccggagtattccatcacgatggacccgcggcggtcccggaccttctcgggtggtgaggccgagcgatgctgtgggccctga

SEQ ID NO: 21396 - DNA, 1356 bp, Zea mays
  Peptide Sequence Number=SeqID_63175
atgaaggcggtgggatacagcccctacgacagcagcgggactgatgacgatctccctccagcacaaaatagaggactaagagggcgatctttcagtgggaatgtcgtagcatctgctggggcatttccttacatgagggcaaataatgatctggagagtgaaatacatcgggttgagcaagatgcatatactggtattcttagggcatttaaagtgcaatctgatgcaatatcctgggaaaaggagagcttgattactgaactcaggaaagaactgagggtttctgatgaggagcatagggagctattaaataaagtcaatgaagatgggaccatccgtcgaatgagggagttaagacaggcaggtggatccccaagtggtttgcatcatggcaacatggttttatatggtgcagaacctgggtccactaccaagaggcaaagggcatctcattcgattcctttgcaatcagcaggcctccagtcccctatgatgccctcccactcagtttcatctgcaaaatggggtcctttgcaagcaagaggcacgaaagcgaggacgcccattcctttggcgttaccatctgtggatccaagttcactaataaaccataaagtttatacaaggtggccagaagacaacaacttctatgaggccaccataacacgatataaccctgtgacgggtgagcatggacttgtctatgacatgggcacacaagccgagagttgggaatcagttagactttgtgatatggcacctgaagatataagatggggatttgatggacacctttcaaatcgtgatgtctggagcccttctggccctatgttgatgaggcacatgaccaacaatggtgctatggcaggttcaatcaagggaagagggaggttatcaataaatgagactataaaggactatgctccacctgaaaatggcaccaataggaattttgatcatgtcgacataccaaataccggaagtgttgttatggaggtgaagagggtattgttcaacccaaatatgcctgaaatcgagaaggcaaggaaacttttgaaagatcaggagcagtcattacttgatgcaattgccagacttgatgaagcatctgatagcgataatgtcgttgtaatagtaggaatccatcactttctagatcctgagccctatgaacaactttatcttcctccacacggttctcaactacagcaagctcaaaagacagtgtccatgcatggtgcacagaatgagttgctgccacttaaggtcttcatgcagatgctcttctatgagaaagcttgtgtggtgacactatatagtccatcacagcaggctgcagcaagatttggaacctaa

SEQ ID NO: 21397 - DNA, 453 bp, Zea mays
  Peptide Sequence Number=SeqID_63176
atgggcaggccaaggggagggaaggctaaacggccgacgtcgcaagctaaccacagcgaggatgctgacgccggcagcggcggcgaggaggaggccgtgaccgtgacgccagcctacaagaggagggggcggccgcagaagcaccacacggctgacgacaccgacgacgaggaggacgacgctgccaaggccgagcccatggaggacgcgaagccggccgtggtctcgccggagagcggagggaagaagaagaggcggcggcggcggcaacagcagcccaagcgcggctgcgacccggcgaccgaggaggagaaggacgacgaggccgcgaagcggagcggcttccggcatcacgggagccgccggaagagcaccccgcgccgagctgccgaggcaggcgtggagtgcagagttcgaataaaagttattacaataccagagtacaagctctag

SEQ ID NO: 21398 - DNA, 420 bp, Zea mays
  Peptide Sequence Number=SeqID_63177
atgtcgagctattgtgatagactatttgtcgaccaacagtcgatcagccggccgactgggtacccgtacgcaaatccaaatatcttcgtgctagctccagcctaccctagactccgccgccgccaagtgattgaggccgtcgtcctgcgccccggccctgtggcctctgtggcctctgtcgatctgccgccgcgcgccaaggagcaggctaatcatcgcgtgccgtcgttgttcgtcatcgactacagccccgtcttcccccaagcggcaacgttcatccccaactccatccacacggaacacgaggtgtcaccagtctttgtctgtgcgagtacaataaatctgccgtccaaccacttcgatctggtcgtcacactatttcttattgctatttcaatgatggcacacaaaatagcatag

SEQ ID NO: 21399 - DNA, 189 bp, Zea mays
  Peptide Sequence Number=SeqID_63178
atgtcggtgcgaatcaaggcggtagtagaccggttcgtgaaggagctgcaggaggcgctggacacgaacatccaggatcgcatcatgaaggagcgcgagatgcagagttacattgaagagtgcgagcgcgaggtcgccgagcaagaggtcgcatggaaggccgaactctcccgccgcgaggctgagtga

SEQ ID NO: 21400 - DNA, 645 bp, Zea mays
  Peptide Sequence Number=SeqID_63179
atgatgaatgctggtacttttggggaaataacagacagatgggtgatggagctgataatgaagctgaagctacccttcggccggccccgcttcttcgcgccgtccggcgacgctgacggcgcagtgttcggcgccttcgggccgttaggcgagaaaggaccggaagctccaagagccgccggcgccggctccccagccatggatgcgggcaccaatgccagcgacatggagccgtcggggccgtactttcttggccggccacgctttttcttggtccccggctcacccgcgccacccgagtgcacgggcgcgccaccattgcctcctacgccagccaagcttgaagcagacgcggcgctgccgcccacgggctggtatgtcgccgtcgcgggcggcacggagctcaccggggtgaagatggcggtgccgtccgtcgtgtacgccatgcgcaggccctgcgtgcccccggaggacggcggcgttgccggggtcttcggcagcccgaacggctcccttcccgccatcactccttgctccggagacgggctcacctccatcattccacaccgaacaggtgcgccgaagcagaagcggaactacgaatctggcaatctgcggctgtcttcagcgattttccttgactga

SEQ ID NO: 21401 - DNA, 1278 bp, Zea mays
  Peptide Sequence Number=SeqID_63180
atggttagctcccctccttctggtcccttcccctgcctcactgccagccagcgatggagcaaggccaggggattcgccggattcaccgagcgggctctggtggcggccggcgctgccgtcgtgtccgccattcttgtcaacccccttgacgtcgccaagtgcaccgggaagggcaaaggaggccgccgtcgccacaggcgcggcaccagcgagtcgggcggtggggaagacgggagctggtggaccgagaggctgcgggcggcgcacaaccgcctggtcccggtctcgctgttccagaagcccatcgtgaaggtcaagctcgctgacctgatggccgccacccatgacttcagcactagccacatcgtggtcgccgggagctcgcaggcggggatagcttaccgagccgtgctacgggacgggtctgcgctgacggtcaagcgcctgcactcgtgcccactttcggagaaggcgttcagggcagagatgggtcgtatggggcagctgcggcatcctaacatcgtgccactgctgggcttctgtgttgtcgaggacgagaggctgctggtgtataagcatatggagagtggggctctttcatcggtgatgaagaagccaggggaagcgccgctggattgggcaacgcgacttaggatcgccgtgggggcagcaagggggcttgcgtggctgcaccatgggttccaggttccgcagattcaccagaatttgagctcgagtgcagtgcttctcgacgaggattatgatgctcggatcacggatgttggactcacaaggttggtccggatggcgcctggcgagggtggtgataccagtcctttcctgaacggggactttggggagtttggctatgttgctccagagtatgctagcaatccagttggtacgatgaaaggcgatgcgtatgcatttggggtgatattgtttgagcttgttagcgggcaggagtctgctgctgtggttactgacgtgacgggtgaaggattcaaggggacattggtggactgggttaaccagctcaaggcttctggtcgaatcagtgatgctattgataaaccattgcgtggaaagggccatgaggcagagattcaggagttcttgaagatagcttttgcttgcacccagccccgtgtgacggagaggcattcaatgtatcgggttttccacgctctgaagagcatcggagagggctgcgatgtcacggagcagtttgatgagttcccattggcctataacaaggatgattcagacgctatttag

SEQ ID NO: 21402 - DNA, 807 bp, Zea mays
  Peptide Sequence Number=SeqID_63181
atgcagtcatatgcccggcttccatacttgcagaacttgaatgctaagtctctcacccgttcttttgtagccagattgcgggtagacgacgtatcggcaaagatcatgtcgttctcgcagcacgggacacgcgcggtctgcatcctttcagcaaacggcgccatatcaaatgtgacgcttcggcaatctgccacttcgggtggaacggtgacatacgaggttcgtattttgaatgccacaagttatgagtatcgagtacactttgatacagatagtcagctcgagtactttactgccaggtacactggtacagcgattcagaagagtgaccttactgatgtctattgtctataccgcgagtcatcactgtcgctgggtcgtttcgagatactgtctctgtccgggtcgtttcttctgtcagagaacggtggccagcgcagtcgaactggtgggctcagcgtttcgctagcaggccccgacggccgtgtcctgggtggctgtgttgccggactcctgacggctgcttcaccggtacagatcgtagtggggagcttcgacgccggtggaaagaagcagccgaagcagcagcagcagcagcagcttgctccgtcaccggcgccactaaatctcgcgccgacgggcgtggcggcagggccgagcagcccgccgtccagaggcacattgagcctaagcgagtcgtccagtggcgccccgccgagcccgccgcacgcaggggccagcggtggccatgggcagcagcagcagcagccacagccaggtggcttctccggtctgttctggaaatga

SEQ ID NO: 21403 - DNA, 108 bp, Zea mays
  Peptide Sequence Number=SeqID_63182
atgggtcaggtgttcacaggagatttgcccttttctcacttctcagcaagggacactcaaattctgatgttgaagcagttcttagatgagaaggcgaagaacaagtag

SEQ ID NO: 21404 - DNA, 198 bp, Zea mays
  Peptide Sequence Number=SeqID_63183
atggaaaaggagaatttggagaaggaaaagagcgttctcatgggaacagcctccaaccaagacaaccaagatggagcccttgagatcaccatcagtggaaatcatggaatgttgttaaatagaatagcggatacttatgccaagactgtcttgtttataaaaaactggacagctagaacagcttgcagtgggagttag

SEQ ID NO: 21405 - DNA, 228 bp, Zea mays
  Peptide Sequence Number=SeqID_63184
atggcggccggcggcgaggcccttttctttcctggcgctgcacccccttttttgcgtgtcttctcttctggccgatctctctggccggcggcgtcagttgcagctggatctacgatggcctccctctctgcacgcaagcacaacctaacaagcagggcctgctacttcttttttgtagtttgcagtttcggtgacaagctgccctttcttgccaagttgataaattag

SEQ ID NO: 21406 - DNA, 423 bp, Zea mays
  Peptide Sequence Number=SeqID_63185
atgacgcccatgcactatggtcggacatttgtgtgcttcatgagagaacgaagaatgcatgatcatgaaaggtctactgacatgtactctcacttgactattcctatagaggaagtcaatgtgtatggactcacacaaatgacacaagctaatgttgtgataaaaatattgagtatcctttcaactgacaactatgtgcaaattgtcatcatgctccaccaagttgatctctccattaccatgccaactcaaatattggtgaaaatcaatgttcaagatagctcttcttccaacaagaagaaaatttggcattcaaggctatctaagagaagaagggcaaatgacactatcaagatgctcaaaaatctcaacaagaaggtgaaagctccatgtgtggttttggtaattgagacaaataactaa

SEQ ID NO: 21407 - DNA, 150 bp, Zea mays
  Peptide Sequence Number=SeqID_63186
atggcggagctactggaggagtacacggcggcggtggcgcgcgccgtggagcgcctgctctcatccgcggcgccgcggcgcatcctgccgcgccgggtgcagtttacgttttttgtggacgtgcttttaccagtatctggatacgtgtga

SEQ ID NO: 21408 - DNA, 1413 bp, Zea mays
  Peptide Sequence Number=SeqID_63187
atgggtctttacattgccaattatgtcatagagcgttcaacgggatgggttttaactcatcctttgacaatttcggagtatgagaaattgaagaaacagttgaaaccagattttgaggacatggttccctggacatcaactgatttatttaaaactgtctttgacctcatgatatctgtgactctgtttgttggtcgatttgacatgcgtatgatgcaggctgctatgaataaaactcctgatgaagctaacagccatgaccttttgtatgatcatcttgatggaaaagatgagctttggtttgacttcattgcagatactggtgatggtggcaactctacatatgctgtagcacgattacttgctcaacccttgttagttataaactctgatgactcgaggctaacatttcctcgtgggcaactgcttctcgttggtggtgaccttgcgtatcccaatccatcctcattttcgtatgaacgacgttttttctgtccttttgagtacgctctccagcctcctgcttggtataagcctgaacatatagcactggagaagcctgaacttccccttggggtttctgagcttaggcggtacagaggaccacagtgtttcatgatacccggaaaccatggtaatgattgctcatatctggacttccccatggatgggtgggtttttggtcttgaccaagctcttcatggtgacattgatgtttaccagttcaagttttttgctgagttgtgtcaacagaaggttaccataccctttatgaatggtaccgaaaagtggaaagcgaacattttcctgatcccacaggacttcgcgctcgtctcgagcattggacctttggactttaccctgcatgttatggcagtaactagaagtacaatctgcaaaaaaggaatagagtcccttcccaggggaggtgccatcatctattatgtctgtgttttcctgtacttctgggtcttgtcaacacctgtcgtatcgctggtgtttgggagctacttatatttatgcataaactggttccatatccatttcgatgaggccttctcctcgctgcgcatagcaaactataaggcattcacacggctccacatcaagaaaaacggagaccttgaggtcttcaccctggctgtggacaaggtgccaaaggattggatgctggatccagactgggacatggaacccaagcagccattccagatgagctacaccaggaaattcccaagcaaatggagggctgcgtcgggccttgacccaatcaatgctgtgcgcattgttgaccggtttgtcatcccgcgaacgccctcaagtcctacaacaccaggaggctctgtttcaagtcctacaacaccaggaggctccgtttcaagtcctacaacaccaggaggctttatgagatga

SEQ ID NO: 21409 - DNA, 315 bp, Zea mays
  Peptide Sequence Number=SeqID_63188
atggctcttggtgaggatgcggtgtgcgacaacgacaaggatctcggcaacgaatccacttctaatgtatcacatttcgccgatgatctcgccgctaagaggcatccaactaggcctagaggtgctttgtctcatgctgttaggcctcaggcagtgagaccacgcggtggtcgtgcctggcgtggtgttggtcatgtgtcatatggccaaggacctcatggaagtggctttggttcccacttccctaaggaccatgatttccttcttgtggacagaggcctggagaacacgtggttcatggatgtaacaccctaa

SEQ ID NO: 21410 - DNA, 321 bp, Zea mays
  Peptide Sequence Number=SeqID_63189
atggcactggtctctggaggtggttcttcctctcacctctcacctgctatgttttctgtatcttctttgttgaccatcacaaaggagaaactagagagccttagggatgaggagctggcgatggttgctagttcattcaatcggttccacgacaaccgccagaaccgatggtgtggtaggtccaaggatggatgcttcaactcaagcgacctcgaccacttaattgccagttgccccgagatgggaaagtcggaggctggcccgcatgtcggtgttaagtaccgcaacacgatatggggtggccacataacgcttttctga

SEQ ID NO: 21411 - DNA, 342 bp, Zea mays
  Peptide Sequence Number=SeqID_63190
atgatccagctgctgttcgtcgtgctggtggcggaggcgtccctgacggcggcgctgctcttcaagacgccgctgcggaagctcgccgtgctagtgatcgaccggctcaagcgcggccgccacgcgcccgtcgtcgtcaagacggtcgcgggcgtcatccttgccctgctcgcttcaacgctctacagcatgacacagatcgccggcagcacgagcgactccgactctggcggcgggcccacccccaccgaccaggtgctcttctcgcgtcacctcctggaggcgtgcctcatgggtggctgttcaagcggttgtgttgatatcaaggtctttttggtctaa

SEQ ID NO: 21412 - DNA, 204 bp, Zea mays
  Peptide Sequence Number=SeqID_63191
atggacggcagagcagttgctccggcgagcctgtaccggccggataacgcaatgaccagcgctcaggagcgggtgctctggcttcgtgattacctaacggagttagtggatgcgtggcgcacgatcgttaagcagctaacgccggtgaggatcatcccggccagccgcagtccaagtgggtacgacgagctcaccgtcgaccgg

SEQ ID NO: 21413 - DNA, 423 bp, Zea mays
  Peptide Sequence Number=SeqID_63192
atggcgcctcctgttgacgtggtcggtccgcgccctaggttgggcgatgtggaagctcctccgaggttgaggtcgagtctgtcttccgtggccgaggtcgagtccgagcccctgggtcgggcgaggcggagaccgtcggctgaggccagggctgagtccgagccctggggtcgggcgaagcggagttcgttgtcttccggggctgagcccgagtccgagccctgggtcgggtggagcggagttcgccgtcttccggggctgagcccaagtccgagccctgggtcgggcgaagcggagcttcctatggtgtctgaggtcgggcctgactacctgtcggcctcactccgtcgagtggcacagcagtcggagcggcgcagtggcactgtcccttctgtcatgccggtcagtggagcggcgaagtga

SEQ ID NO: 21414 - DNA, 546 bp, Zea mays
  Peptide Sequence Number=SeqID_63193
atgaagaatgcaaggggtagacgtggaccccacctctccgtctccagctcttcttctttggccgtgaggaatcgacgcgtcggcgatggggccgatggtggtgacgttagtcgccccatcaaccacgatctgagactgctgagagaacctaagagccatgctgctgccactatcgaccttggtagtggcagtggtagcagtgttgttgctcctatcgacatcgtcgacgaggactctggtgctagcggagggagtggcacagaagctcctattgtcgttagtcagggttccagcgaccgcaagaggtgtaacacctcaaaggtatgggacgactttgagcctgtgtatacgattaagaacaacaagaggataaagactggtggaatccctcgtctgaccgccatcgcagcaaaatcaacccaaggacctccctacactgaccactcccctactgcccttgcccctttcgggggccccggtgctaaaaatactgagacacaggaaacagtcgccgaggatggcgggttctattctctaaaatcataa

SEQ ID NO: 21415 - DNA, 564 bp, Zea mays
  Peptide Sequence Number=SeqID_63194
atggattggcgtgatttgtgggctcgcatcgcgcaaggaaagggggaaagggggagcggggcaggaaagcatcggtcgagcttcctctcccagccaccttcgtctaatcgtctccctctccgttacgctcctactcccgctgctgctgcccggcatcttcgccacgcagaaggatggcaacaacgccgacacggacgcggccgccgtggcccggcattgcgccgggacgtgtgcccgtcgacgctggtgaccatcccgaacctcgcacagaagatgctccaagatgtgatctcggcgttggtggggcgcacaaccattgtggtcggcgcgtcgtcgtccaaggtccaactgctcgtcttacctccggcggcggccccgcgggggtgggtgcacctgcgcgtgcgtgaccagctggcgctgtccgaatgcctagagctgttcaggcacacactgaagctgctggacacggcggtcgtggggctctcacatcgacgtcggcgacagaggaggagtccgtcgtcgctggcgtgcagaccgtgctctcggcggctgacgaaccagtag

SEQ ID NO: 21416 - DNA, 369 bp, Zea mays
  Peptide Sequence Number=SeqID_63195
atgggcgccggtgagcaattggtcatacccgaggcgatggtagcagcccgcgtactccaattgacttcaacgtcccccgacgatggcaaaacacgcaacaacggatctgcttcgccgaggaaccaaggaaggatcgacgcggcactcactctccctcacggcgacgactttggtttgcgctacgcggctagggcggacgagcgagtacaggggcgagtcaagggaatactagcgacgggtcgtggtacttgtagggcggttcaaatgggtcctagtcaatcccccacgccgcgtagagccgatgcgagcgccggcgttctcggcagggttgttacggggatgaagctgacgtcgtggccccgcatgtag

SEQ ID NO: 21417 - DNA, 417 bp, Zea mays
  Peptide Sequence Number=SeqID_63196
atgagaggaaattatcagggccccggaagccagaccccttccatcgaggagtctcaacgctacgacgagcacctgcaacagtcccgagtcgttctagctcccagagcaatcgcccgcttcgggagcctcaactttgtcatcgataaagacgatgagatgggatacttcccaactatcgacgacttggagttcgtcgggatggtcgaaggcggtggagacctcatttttgacgcccttgactcaggcatggaccctggctccctagtgagcagtgagggcagacctcccaataatggggagagtggaggacgcctgactcttgcaacccttgtcccctcgaaagggcaggcgccattggtagcatcagcaaactggggtgctacacgaggtaagagcccgaggaatcaccaagcatga

SEQ ID NO: 21418 - DNA, 930 bp, Zea mays
  Peptide Sequence Number=SeqID_63197
atggcaagctccactgcgattgcgactgcgcgcgcccatgatgctgctgtttatggcgcggcagggacccactccaatctgaggagttttcttgacagtgttacgccggttgtaaaggcgcacacggtccctatggcatcctaccttccattgtcaaacggatattatgaaaagattgcagatggggttagatgtttctaccttggagatctttggaattcattctatgagtggagcgcctgtggcgttggtacttcacaaattcagttgtacaccaacacgagaaatgctcctgtttcacaaagcatgatttatgatggaagattcgatcggaataaccattatagtgtcgggatgtacactcatggatatcaagcaccattacgcatgcccactattggagttgaagggaagggggagttgttcttcaagtattttgagcctgactccccttacgagaggatacctttcgcagacaaggtatatgagctttgctatagttgtccttccctatcatctttaagcagtgcagagctctcaccatcaagttggatgtccgttttttggtatccaacaagtcatgtccctatgaagaatagaaaagatctgaatacttgctttttgacctaccatagcctttcaacatgcaaagatagcatgcaagccttcaatcatatgtcacttgcgccgttcggccttgcaacatacaagttagatgccaaagtgtgggcaagtccaaactccggtgaccaagagcatatttcctctctcttcgatgcatcacaatcatggctaaaggagcataacatccaccactacgacttcaactactttgcccatagatgctcctccaaaatgaataacatgaacatgaccgatcaacaagttcatagtctttggggactcaagtgtgttgtgtgttgtttttaa

SEQ ID NO: 21419 - DNA, 306 bp, Zea mays
  Peptide Sequence Number=SeqID_63198
atgatcgtgagtgctctatggtctaagggaaaggggctcataggctatgagtgggaggggactagcgcctttgctgtggctcggcgccagacgcagttaatgcggccgatcacttgtgacagatcggtctcggaccaagtagtgaaatttagaaagacctccatcactctgctagctctcggcgctgcatctgtgcatgttcccgtttcttgcgcaccagccgcctgcgcggctgcgcctgctgatgcggcgcagatagcaacatctacagtttccactttttcacacacattgtatgatgagtag

SEQ ID NO: 21420 - DNA, 333 bp, Zea mays
  Peptide Sequence Number=SeqID_63199
atgaggaggaggggagctgcaggggtcgtgcgagctttcttcaaccctctcggggatgagcgcatcctccgagaagccatcaagtttgagtttcaatacccgtttagtcgtgtgtatgactgtatgcttgcaaagtttatccttgaaaaggagccagtagcattcatgggtggtgtgtttgctggcctcttgaggcttgacctgaatgaggatcctctcaaggaatggataagtcggacagtggaggcttctggaatagctgaggaaaacagctctgaagaatcaagtgaggcagatcaaaatgatgcacctcagcaaattgagattgagtga

SEQ ID NO: 21421 - DNA, 537 bp, Zea mays
  Peptide Sequence Number=SeqID_63200
atggcggtgtctagtatgaactgcgagagcaaaggggagaaacgggttgcggctagggcccttttatacggcgagatggtgcgcaggtcccggcaggctccacatgtaagccacacggtaaaaagggagagcgaggcgcccaggctgacgcgcgggtccggcttgtcagcgcggtctggacgcggagatgggctgcgcgatgtatttcctctggtgggccgaattcagatactgcagcccagtcgttttggcccgggtctggctaatttctgcgtccgccactgctccacgtccgtgcaggagctcgtctgcccggcgctcgccggcgcgatgagggactgggcgccgtcgatcatcgccacggcgctgttcgcgctcctgtgcccgggcggcgtgctgcagatgcccgaccggcaccgccccgtcgacctcatgaacatgaagaccagcttcccgtccatgctcgtccacgtcgtcatctactccctgctgctcatgctcttcctcgtcatcctgcagcctcacctctacatctga

SEQ ID NO: 21422 - DNA, 588 bp, Zea mays
  Peptide Sequence Number=SeqID_63201
atgcacagaggccttgagctcccagtccgtgatccagctgcggggaaatcaaatggtgtcgtcgccgctgtgctccgcttccccacggccgcttcgagccccaggccagcctccctgagacgtccgctcgccgcggacggtcgtcgtggccgcaggcacccgttgcctgatctcgagacagttccgttgcgcatactgaagcgtaaggcagagtacgagatcaaagaagtggagtcatacttcgttgctgaaacgacgatgcccgaaagatctgggttcgatttcagtgggtcatctcagtcgttcaacgtgctggcatcatatttattcggtaagcttcagaatactgcctctgagcaaatggaaatgacaacacctgtttttactcggaagggtgagttaaacagccaatcaatggacatgaccccagtgataacaaaaaagtcagctggtacaaataaatggaaaatgtcatttgtgatgccagcgaagtatggttccaatttgcctcgcccaaaagatccttttgtgactatcaaggaggtgccctgcaaaatagttgtcgttgcagccttttcaggttcataa

SEQ ID NO: 21423 - DNA, 1866 bp, Zea mays
  Peptide Sequence Number=SeqID_63202
atgcctggatcttctattgtgaattcgcagttctttcatgggtggattgtcaggatcccaaactggaagcagcctcacaacttcagcgtctactttgggaggcggcttgctgaagagaggttccagaggcaggacgattacttctcgtttgagaggctactgcctactgctggttggattgtaaaggcgtactggctttgggtgcactgctctgctttatatgtcataacaatctcagcctgcattcttcttttccacgaatacaagtatatttcgaggaagagactagcacatgttactggatatcctccaaatcctgggctttttaccgtgcttgtccgttcgattccgaggtttgacaatgagctgcttgatgacacaatcagaaatttctttgttaactatcacggatcaagttatctgtcgcatcaaatgatctttcgcaagggacattttcagaagtttgtggatagagcagagagggcttacaggagatttgtaaggctttaccgcaacaagttcatcgaggccaagaagtcagacctcactaatccggaagtagtggaagctcaaaagactcgctacgcagccgtcgtcgcctcacgggtattccagtcatcaaaccctatgctatgggtgacagatctggctcctgagccacgcgatgtgtattggtcaaacctctggatcccctacagacagatctggctccggaagctagcgacactcgcagctagtatcgttttcatgttcgtgttcatcgtccccgtcgcgtttgtccagagcatgatgcagctggagcagctcaaaaggatgttcccgagcttgacaggtctcctaaataagtccttcttcgccagagtgataacgggataccttcctagcgtcaccttgctgctgtccctgtacaccgttcccccgctgatgatgctcttctcctctatagaagggtccatctctcgcagcgggaggaagaggagcgggtgcttgaaaatcctcttcttcaacatctggaacgtcttctttgtgaacgtcctgtcgggatccgtgctcaaccagctcaacgtcttctccagacccaaggacatgccgacgatgctagctgaactagtgccgaagcaggctgggcgagtctgtgctcggagatactgcaggttttcaacttggtctacaacttcttcagcaggttcgtctgctgctgccatcgccagaataaggaatacgtttactctttcccgtaccacaccgaagtgcccaaaagtcctcctgttcaacctgctcggcttcacgttctcgatcatggcgcccctcatactcccctttctgctcgtgtacttctgcctcggctacttggtgtatcggaaccagattctgaacgtgtactacccaaagtacgaaatggggggcaagctgtggccggtcatgcacaacgccatcgtgttctcgctggtcctgacgcaggtgatcgcgctcggcgtcttcaccatcaagcgctcccccgtgacggcgggcttcaccatcctgctgctcgtcggcacggtcctcttcaacgagtactgccggcaccgcttctcccgcatcttcgaggcctactccgcccaggacgtgatcgagctggacagggacgacgagcagtccgggaggatgcaggagatccaccagcatctgctggacgcctacagccagaccccgccgggggagggatcctccaggggcggcagccaggtgcccatcgagctcatcatggaggaccccgcgcaggaggcgtcggagtccagccaggagctctgcgacaccgtgcaggaggtgtccggggccatccacgaccacgaccacgtcgtcgaggacaaggcgcattccgtgtag

SEQ ID NO: 21424 - DNA, 144 bp, Zea mays
  Peptide Sequence Number=SeqID_63203
atggatgctcggtcgagcgacaggggaaggtcttaccagaggggactggccacggagcgcggaggacttaggcttgccggtgatagaggaaaggggaaaactggtgttgcggcggctctgggtgaaattgagggtggagattga

SEQ ID NO: 21425 - DNA, 144 bp, Zea mays
  Peptide Sequence Number=SeqID_63204
atggatgctcggtcgagcgacaggggaaggtcttaccagagggggctggccacggagcacggaggacttaggcttgccggtgacagaggaaaggggaaaactagtgttgcggcggctctgggtgaaattgggggtggagattga

SEQ ID NO: 21426 - DNA, 1104 bp, Zea mays
  Peptide Sequence Number=SeqID_63205
atggacttggtacaattgtgttctttcaagtacttcatcgtttccctaccattggtgaaatatattaagaaggatgcttatatgttggttacgtcttattccaggaaccttcaagtgttccagtggagcattcttacgagaagaaggcgggcgtacagcgaaggtgaagtgaatgatttgcataaagatgacaagggccagggagaggcagtcagattgggcaggaaggatgtgcctccaaagatggaggctgattcttcaacactggatgagcgggttgaggatgaagagaacgatgaagacgaagagcggaaggagcggtcacaggaggatcaagagaagagcttccatggtgacgatgtgtctagtgctgttactcatgatcctcaatcgtccgagcaagatgagctgttccatcatgcccaagacacggtcctattcgtggatgatgcttcaactgcagtgcccaatgaaaaccatgtggctggaaacgacgaggaggaagtgcagagggctagggaaaggagtttcagaggcgatgatgtgtcaagctccgtggatcatgacgccaaggtggcaaagcctctcccagaggaacaactgaacagcatggataagatatttgaaggcaccacaaacttgtctaacggaatttcgtttcgagctcctggaataaatggatcatatgccggcatggacaatgtggctacagtaccaactaattcaccttcacagaaaaacgcaggcactcctagcaatgacatagaaagcaagacccacccatctccggcaaatttgaccggaccagagcaaagtaattcgactttgaaagatcacccagatcaacaagtgaattcaacagcagtgctgggcaaccaagtacagcctttgactaaccagacgccgtggcccgagttggattctccaaatggcaccttggctctggtaacagatgtccaaaagtccacatctggagctggagatgatggcagcagcactgtggacaagaggacggacggtagagatggtcccaaagaagacgtggatgtgtccacgaaaataatgaacagggcaatcagtgaggatgaagtcgttccagagtga

SEQ ID NO: 21427 - DNA, 1080 bp, Zea mays
  Peptide Sequence Number=SeqID_63206
atgggcatgttgatgaacaacgacgacagcagcagcatgcatccacggccgcaggtccttgcttccctgcccttgctggtctacgaatacaaggatcatcccaatgccacaacaaggatgctcatatatagcctacccgagcggagcattgtctacacgcacaacagcagtaggccccagatgatgatgatggagggtaacttatccttcagcacccctcaaggatggctggtcatccttggacaagcgtcagaggcctcgatctggcatccgctcaccggagagaccatcacgctcccaccaatacacggcgaccaccgtatccccgatagctgcaagtgtctgctcacccgcagctccgtcgcccacccagactgcgccgtcgtgcttctcgacgtcaccgatcctctcatgtggttctgcccggtgaatggcggggccgacaggatgtgggtgcagcacgcctacgacattggcgaccacttcttccccgaggagttccgcactccctccacgcccaccaagaatgttgtcgacgacgtcgccgcgctgggagggaagctgtatttttgcttcaccgaatcagaccaaaacttcatgggcgtctttgacttcgatttccatggccatactcccgccgtggagttttacgagtttgatgtctctcaagagttcaacctcaagtttcccgagggcgtgtgctctgcctgcatccacttgttggagtccatggatgagctctttgctgtctgcatcttctatgtcgattttgatcccaccaacattagcgccgctcatatcttcaagatggaggaaatatgcgacgaggaacccgtggcctggcaccgggtggatgatattggcgacagggctttcctcctgacgggcaccaacatggcaacttggtgctctgcaagcacgaataacctgaaagggaactccctctactttctaggccacttagtagctggccacaggaatctctgcatctatgatattcaggagcagtccatggagattgtccaggttcacgaccaagaagatatggagatcgtgcgcacaccgccatactggattaat

SEQ ID NO: 21428 - DNA, 270 bp, Zea mays
  Peptide Sequence Number=SeqID_63207
atgaggacggatagagctcaagatcgtcacttgctccgtcgaacagtgccaaacctccggccaaggcacagatttacattatggcgccagccgctggttctgagaatatctacagaagctttagcgcttgccgggaaggaacatccggacgacaatgctcaaaggcgccaccttagcgactccggcagcaacgacccaactcaggccttgttcgtttacgtcggattgcacccggaatcgttccagttgatcaaagtttatataaattag

SEQ ID NO: 21429 - DNA, 711 bp, Zea mays
  Peptide Sequence Number=SeqID_63208
atgtcgtcgtcgatgggacacgagagtagcggtggcggcgccgacgaggaggaccccgccggcctccagcgggtcatttggttgcggcagatgctccaccgctggcagtcctccagctccaggattgccgccgagaggaggtccagcgccagcgacgacggcgacagagccaacccagacgacgccaacgccacgacagaccaaagcagcaacggcgaccccacgcctgccgctgcagacaatgccagcagcagcagcagcagcaggaaccagatgctgccggcggcgccgcatggtgcggcggacgaggaggacgaggacgaggaccggcggctcctgtcgcgggtgctgctggtggaggagcgcaggcgggggtgcccccccgacgcggcggcgtgcgactcgccgatgacgccgatgacccccgacgcgccggcggacgtgccccgcgggtgctgccccgtgtacgtgggcgcggagcggcgccggttcgtggtgccgacggcgtacctgggcatgcccgtgttccggcgcctgcttgagaaggcggaggaagagttcgagttcgactaccacggcggcgccgtcaccatcccctgcgacacggaggcgttcaagtacatcctcgtcgtcatggaccgccaccgccacggcctggtcgacgacgatgggaacgagaagcacgaagagcaagacgcatcatcttcgtag

SEQ ID NO: 21430 - DNA, 252 bp, Zea mays
  Peptide Sequence Number=SeqID_63209
atggaaggcggcagaccagtccaggtgggtgatgtagcggaggaggacatcgacgatgacaatgcctacagcagagcgccgcagatcccggtcggtggggagggggagcaggggcgacgggagggggagcgtgtgggggcggcgtttgtgcggcgcctgtcgcggtggagaggcaggtggcacggggaacgagcggcgggtgttgattgccgcgagacaggggacgcgaggcaggggcaggcgggggcatag

SEQ ID NO: 21431 - DNA, 2529 bp, Zea mays
  Peptide Sequence Number=SeqID_63210
atggcggcggcggcggccgaggcggaggtggatagctgcctccagagcttcgagctctacgaggccgagtcgaaattttatattcttggaactaactctaacaagacaatatggagattactcaagattgatagaatggagccatcagagcttaatgtagatgaggattctactgtgcactcacagagtgattaccttgatatgctaaaaaatcttgacgaagaacacaggtcaactggtggagtcaaatttgtcaccaactgttttggaatcatcggtttcattaagttccttgggccctattacatgttaattattactgagcagagaaagattggggatatatttggccatccggtgtaccaagttactaagactgcgatgattgagttgtcaaattccaaatcgaggccaaagttaattaattccaaggatgagaacaggtacaagaagctcttgcagataatcgatcttagaaaagacttcttttttagtcactcatatcatataatgagaagtctccaaaagaactttaatgatccacaagaagggtgggaactatatgacacaatgttcgtgtggaatgaattcctaactcgaggggttcgtgacattctgaaaactacactctggacagttgcattagtctatggtttttttaagcagagtcatattcttacttcatttaaggacaaatttgcgatatgtgggaaggatattatgctgacgctcattgctagacgctccaggcattatgctggcaccaggtatctaaagaggggtgtgaatgaggagggcagagtagcaaatgatgttgagactgagcaaattgtttatgaaaacatgcttggaccatggcaaataagctctgttgtgcagaacaggggttcaattccactattctggtcccaggagacatcaaagctgaatcttaagcctgatatcatattgcatgaaaaggacaaaaattatgaggctaccaggcttcattttgaaaatcttaggaagagatatggaaatcctatcatcatcttaaacttgattaaggggagagacgtccccctgacttcttttctcaagaagttggtgtcgcgactcgaacccgggctggctcagcagaccgcttctttggcgtgtccggctgaccagttgcaccttgagagtgttggatcttttacatacaagtcaaaagtcatacatgagaatcacccgtttgaaatttactttgtgttattcttgaagacacttgagaagagaccacgtgaaatcatactccgttgggaatttgacagagcaataaagattattaatagtggtctaccaggtgaagatcatttaagatttttacattgggatcttcataagaactctcaaagcaaaagtacaaatgcccttcaagtgcttttgaaagtggcatttgaagctttgaacatgacagaattcttttattgtcaagtttccccagatcaaagggcaaagggctcccctaatttaagccctacattgaaaattggttttggtcatcatgcgtgtgatgacaaaaattgtggcaatgcagattatgttgatgatcttgatgacatttcccaagaagatacctgtggtagttctgatcctggcaatggaattgcggaagataaatttgaggtcaatggatctgctcaaataaagcgtccaaaatttcaaaagggtgtcttacgtacaaactgtatagattgtttggatcgcacaaatgttgctcaatatgcctatggcctagctgctttaggacaccagttacatgcacttggttctgtagaatctccagaagttcatctagactctcctttgtctcgacatttgatgcatttttatgaacgcatgggtgacacacttgctttacagtatggtggttcggctgctcacaataagatattctctgcgaaaagagggcacttgaagtttgccattcaatctcaagagttctttaggacactgcaacgatttttaggatacttccagccacaggtgggaaaacctgcactttgggagccagaatctggtgatgagcatgtacttgatgacgagacatgtaaattgatgaagagggcaagatcagatggcagcattcttaataaaagcaaactatcaatatccagtaatggcccaaatggaattttaaagttagcatttactggttcaaaaaatgaagggcagcgtccaaaccggagttctgatacagcctgtgacaatggcatgtcaaagtcaaggtatactccgacactgtctcacattaagcatataagctgtgaactagactattacaatggttctggtgattcaaatttcttggatcttgactggcttacagcttcagacaatgaaaggtcaaaagccataagcactcctgatgtgaatatttcaactgatagtggtgttcgtgatgtaatatctgggacaacggacgatcaagcttctgggatccacgcccaggggttttcaaaggatttcgtgcagtggctcaatcaaggagaggcgttttggtactga

SEQ ID NO: 21432 - DNA, 909 bp, Zea mays
  Peptide Sequence Number=SeqID_63211
atgactgccggtcagtgcggcaacatccaggaccaggaggcagctcctggcgccgacctctacgccgtgctcgggctcaacagggagtgcaccgacgccgagctcagggtcgcgtaccggaggctcgccatgatatggcatccggacaggtgctcggcgtccggcagctcggcgcgcgtggaggaggccaaggagcggttccaggagatccagggcgcctactccgtgctctccgactccaacaagcggctcctctacgacgtcggcgtctacgacagcgaggacgacgacgctgacctgtcggggatgggcgacttcctcggagagatggccgacatgatgagccaggccacgccaacggtaacgcccgcacccgctggccaagatctggagcacccctcacgcgtcgagatccgtgcgctgacccagtccagtccatccgtcaacgtgcaggagagcttcgaggagctgcagcagctgttcgtggacatgttccaggacgacctggacggcgccgggttcttcggcgggcttccgacgagccgcagtgcccagggtcctagcagcacctcgttgccaccgtcgacgtcgccattgcggccgacgcctcctgcaagaagtaagggtgcgcaaacaccgtcgtcgtttaacggcgctgggaggcggggttcgacggcgaagcggccgaggaccggttgggctggcctggaaccggatctgggcctctctggattctgtttcatggtgagcaagtcgaaggagaggccggcggcatgggcgtgcgacggcggtgacgagaggagcggcagcaagcagaggctgtcaacgagccgcgacgtctccggctccggtggtgggatgtcgcgctcgcgcggcagagccaaagcagtagaaacttgtgggcagtga

SEQ ID NO: 21433 - DNA, 231 bp, Zea mays
  Peptide Sequence Number=SeqID_63212
atggggctcggcgcagcccgtcgtgtagtgcatgtcgaaggcgaggttaaatgcggtcaactatttatggcaagtcagtctggggccaagcgcggcatccactcgagtggtttccttccaacacgcccgacctcccctatcaggttctgccatgcccgatcccaggctcggtaccgcagggacagtcagtacaaggacgtcctctcccgcccctacaattttgagagataa

SEQ ID NO: 21434 - DNA, 320 bp, Zea mays
  Peptide Sequence Number=SeqID_63213
ttggactggaggaagtcgacgagcatgtttccctatttgtcggagagtgctaccccaacgcgaacccgcttggtcaagaccgtgaggttgaccgggacctccttcgtgtcctcagcggacttgaaggtgttggtgctaatcttgtgggcaccaggagcatcctgggcatgtccttcttgtcacacccgaatttaaaggcaaactcgggcgcgaataaaatgttcttccccaagttggtctttgggtttctcgtgacctcaagttggtcttcaggtcctttcgcgagaaacccgaagaccaacttggaatctcaaagttaa

SEQ ID NO: 21435 - DNA, 399 bp, Zea mays
  Peptide Sequence Number=SeqID_63214
atgtccggtgcaccagaggactccaacgcgaacttgctgccttcgggaatttccagaggcgactccgctataattcaccggactgtccggtgtacaccggacagtgtccggtgcgccaagggaggtcggcctcaggaactcgccagcttcgggaaaagccaatggctcgtccactataattcaccggactgtccggtgtgcaccggactgtccggaccgccatcacagcaaaatcctcccgagggcctccccaggaatcccttgcaggaccgccatcacagcaaaatcctcccgagggccttcccaggaatcccttgcaggaccgccatcacagcaaaatcctcccgagggcctccctacactgaccactcccctactgcccttgcccctttcgggtaa

SEQ ID NO: 21436 - DNA, 531 bp, Zea mays
  Peptide Sequence Number=SeqID_63215
atggatttaggcgatgcgtatgcagacaaatttatgctaataacatgtttgtggtgtacggattctgaagaattccagccagttgtgcctgttgtgaaagccgagccacttaaaaatcagtgggctgatgaagatgttgaagaagatgatgtaaaagaatcatgggaagaagagaatcttggtctatccttccaggttgtcgatgacatgctggatttcacccagtcagccgaacaacttggcaaaccagcagcaagtgacttggcaaagggaaacctgactgctccagtcatcttcgctttgcaaagtgaaccagagctaagggagatcattgattctgagttcagtgacacggattcgttagctgctgcaatagagctcgttcatagaagtggtgggatacggagggcacatgagcttgcaagagagaagggtgacttggcaatccaaaatctgcagtgccttccaagaagtgacttcagaagtgcccttgagaagatggtggaatacaatcttgaggggattgagtag

SEQ ID NO: 21437 - DNA, 471 bp, Zea mays
  Peptide Sequence Number=SeqID_63216
atgcgcgcttgggcgtggggcggctgtgtgatatctgctcggatccgcgagattgcaaggagcgggtgggggatcgccgctaggatggaaggagccggatgcggcgccgcgcagctgcgggatgcaagcgtggggtggctgcgtggaaggagcggaggagccgggatgcgagaggcggcgaggatggaaggagcggaggagcgggatgctgcatggaaggagcggaggagcggctgcgtggatggaaggagcggggaggctgcggcgcggcgcggcgcggctgggacggctgcgggtgtacgcgggttgcgggcgaggcagaacgtgcgccatcagaagttggacgcctacactccatacataattagtagtagagatttaattttaccgttctgtcatgctagcttacgaggctgtggtttagattttggtttagtacaggatggccctgtgaaaaatgataaacagtga

SEQ ID NO: 21438 - DNA, 339 bp, Zea mays
  Peptide Sequence Number=SeqID_63217
atgggatatctatctcccatgatgactgtatggaagctcgctcttgctataatcaaccaggtcaagaacttgtatcgccggaaggggattatgaatatgagttcggagagccccttttttcaaaacaaaaacatgtttggactcctggatgacttaatatcgtttttagactctttgctcggcgtcataggctatgacgccgaagtaacacggctcagcaccatagcctacgactctgagatacctggtacgttgaattgtcactactatgctggcgtctatgtggccgagctcgacgccatgaatcatgacgccgagctcctatctccagacacttag

SEQ ID NO: 21439 - DNA, 639 bp, Zea mays
  Peptide Sequence Number=SeqID_63218
atgctcaccaagttcgaaaccaagtgcaaccgggtcaaggacctcgccttccactcgcgtcgtccatggatcctgtctagcctctacagcagcgtcacccagatgtgggtctaccgcatgggcaccatcctcaaccgcttcgcagtggcgtccagttccacgccacataatcgctctttgtatccggagtatggttgtactcaagcaattgagataatttgctctgtgttagctcgtcatggtgcaaacatcctacttccaagacttggatttatgttctatgaagcgcgtgctgttttcaatggcatggaggccatgtacttcaaacagcacttcttcccgccaagcaagctgcaacagtactgccttgtcgtcgtcaccgtcaagccctctgccgcctccagtgtccgccctgccagcccagatttaacatacatttggttctatgaggaaggaaatcataagtcgagattaaagttgatcaactcgacactcgaacaactgaatgagcaagtattacaagtgctgaaagttgtgagtgctcaagtccaacttctttatcgcataagttttggtgaagatacttattctggaacctttaaaagcatcaacgttagtgttcaagaactcaaagagtaa

SEQ ID NO: 21440 - DNA, 384 bp, Zea mays
  Peptide Sequence Number=SeqID_63219
atgcacgacgaggtcgtaaagtgggtgaaagtgtttggccatgagggtcagatggggctggccgtagcctggccaagaagggccatatctgactgcagtcggccacagcctagcctagagaggcgatggccagctgggcgaggccacagtgatagaggacgaggcccgatcttccgtgagagtggtcctggaacccgagatggaatcgtgtccgagtcggacttgatctccttcctgttgtggatgcctttgctgatcctcctcaacacctctcccaagcctttgttgatcctctccaagcatggctgggagaggctacgacccgctggaggcgatcggcctgtcaggctgctggctggtcgggccactgattggccactatag

SEQ ID NO: 21441 - DNA, 243 bp, Zea mays
  Peptide Sequence Number=SeqID_63220
atggcttcagacatcaggctgaagagcagtgtgagcagggccgatgagtcacgcttcctgcctgccaaagtggagcggacaacggggcagaggaagagcgacgcttgcagtggtccatggaaaggggtttcacgccattaccggcttaccgcggatggggacggaaaactattccttgacgtgcaattcctcattgtcatccctagtccatccctgctaagggacatcacagtagaggactag

SEQ ID NO: 21442 - DNA, 2193 bp, Zea mays
  Peptide Sequence Number=SeqID_63221
atgaccatcgacttcctccgcgcgcgcctcctctccgagcgctccgtctcccgcgccgccaaggagcgggccgaccaccttgccaagcggtcaatagtcaccgagcccgtcgccgcagtgcaggttgtggagctggaggagcagctccggacggtgacggcgcagcggcgcaaggcggagcgggcggccgcggaggtgcttgccatcctcgactcccagggcttcggccgcctctccgacgccgcggacgattcaggctcagagtacgaggccgacacgggcgatcccaatgccgtcgagagggacggaggcggcgggaatgcagcggaggacgcgctgtcggggtcggagctgggagccccggcggcggcggctgctgcctctgctgctcaggccgggggcttgtcgtggaggggccgcgccgcgagccccgaatgcgagaggcggcggccgcagcaccaacagcacaagggcaggcagctaaggcagaggcacggccacggccacggcccacaggaggggttacttttactgccgcgccgcggattcgtcgcccaagtaccacccagggcagtcttgccggaagatcaagaggaaggagctgaggtccgggcgttgctcattgctcaagttccatcccaattgctggcatgttattgtgcaattatctggcacactcacacacatgctcttctgattgacagatctcagacagaagaagaggagggcaacgacaatgcagtggagagcacggaggacgggcaggagagatcagattgtactgtttgcactgatcaaccggctgatgttgatggcgaggtgaaccaagatgggcatggctcttctagtaatggaagaggggaggatcgtgatgatcttgccatggtatatgagaaggatggggagatggagagggtactcgagaagcaggctgagctaattggacagttcgaggctcaagaaaatgctcagagggagtgggaggagaaattcagcctgagccgggattcagttatggataatgttaacttattaaacaacaagctaaatcaggctgaaaatgcttgtgggaggagggaaactgctcgggttgtagataaagaagtggtttgtgaacaggcaagatcaagtgacaataatttccattgcatcaacgacccctctgaatgtctaccaaatggccctgtttcagaattgccccaaaatgtagccaaagatagtgttactgaacaccggaaatttgatgggtttggtcatgattgtgtagtgactgctgcagcagtaatttcaagccacggagaactgcaggttaggaaggatgtgctgacaactaaaagctatcctgaaggaagtggcaataatcttgggaaatcagctctaccaccacaaggaagctgtggtagcagactaaatgcaggacatagaaatggtcaaggagatgaaagttcagacagtggttcaagctaccatgtgaatgctcgatcttctgagcaatacataaacacatcatcagttgggagccagctaagtgatactcctaaaagcgaagtctcagaatggagctcctcttgctttcataaccataccgataaccagcttgatacacaacttcatcaatcatcaaacaaagatgtaggaggggtgctagaggcccttcgacgtgccaagatgtctctcagagcaaagctgagctggccaagtctagccagcaagaacatattggcacttgaagcaccggatgatttgccagtcaatggcatggaactttcactctgcaggacagcccatgtcagtcaggaaatattcgcactaccaacaccaacagactaccttaacaaggtattaccgcatgatgatgtgaaggtaccaataggtcctgctggtttgtttcgtttgccaatagattcatttcccagagatgagatgaccacaagggatggctatggttcatggttcagtttgacctcggtgagtccaccctacgtgtcgccaagctatcatgctgatcatattatgccagctctatccttgtctcagtatggttctgggttgtcactaaatccatactatgatcctcatagttccatgttgctatccatgcccactgctggtgggcgtagcgtccctgtgtcagatttcagaataggggatggttccttcctccgagaagttccacggcctgacaattattag

SEQ ID NO: 21443 - DNA, 1230 bp, Zea mays
  Peptide Sequence Number=SeqID_63222
atgtcgggcctggagaaggtgaggtattggagcgtgccggttaggctccgggattacctactaagtatacggggactggggcttaaaagtgttgaatgtgttcgtcttctcacactgcatcatcttgctttccctgttgacaccaatgttggtcgtatatgtgtaagactgggatgggtgcccattcaacctcttcctgaatctctacagctacatctcttggagctatatcctatcttggaaactatacaaaagtatctttggcctcgcctttgtaaactcgatcagcagacactgtatgagctgcattatcagatgattacatttggaaaggtcttttgtaccaaaagacagccaaattgcaatgcatgcccaatgaggagtgagtgcaagcattttgcaagtgcatttgcaagtgcaaggcttgcacttcctgctccccaggaggaaagcttagtgaagttgagcaatccatttgctttccagaatagcagcatgcatgctatgaattcgactcacctacctcgccttgaggggagtatccattcaagggagtttcttcctaagaattcagagccaataatcgaggagcctgcaagtccaagagaggaaagacctccagaaaccatggaaaatgatattgaagatttttatgaagatggtgaaatcccaacaataaagcttaacatggaagcttttgcacaaaacttggagaattgcattaaagaaagcaataacgaactccagtctgatgatattgcaaaagcattggttgctattagcactgaagcagcttcgattcctgtaccgaaactaaagaatgtgcttaggcttcgaacagaacactatgtgtatgagcttccagatgcacatccacttttacaacaggttccttgtcgaacagctatgaggggtagtttcccacttaatggcacttactttcaagtcaatgaggtatttgctgaccacagatctagccacaacccaatccatgtggaaagggagatgctatggaacttgcaaaggcgcatggtctttttcgggacttcagtacccaccatattcaaaggtctaagaacagaagaaatacaacaatgcttctggaggggatttgtctgtgtgcgaggattcgacatggagactagagcaccaaggcctctgtgcccccatttgcacattatagcaaggccgaaggcccgcaagacagcagcaactgagcaagtactctaa

SEQ ID NO: 21444 - DNA, 204 bp, Zea mays
  Peptide Sequence Number=SeqID_63223
atggcgagacgagcacgctgcaagtgcacaagttggagccggaacagggagcacgagggcaggcctagggccttcaccagtgaggcaacgaggcgacggtgcggcttcaaggtgcggggaggcgcggcgaccaaacggtggcgtacctggcgggtgtcgcagccgacgtcggaggtatttgtttgggattataatctgctttaa

SEQ ID NO: 21445 - DNA, 249 bp, Zea mays
  Peptide Sequence Number=SeqID_63224
atggccgacacagtcacacagccataccaaggataccagcaagccattgagaagtggattcactcacacacaaggaggaaagtggtcttttggacatggagcgttgtcaaggatatgatggcggaggtcatgttggacccctctgtgtttgatgagctgacgaaggacattagcaacaatgatggacagatagggagagattggatccccttgactaagaccattttgcatggaatccaaggacaatga

SEQ ID NO: 21446 - DNA, 204 bp, Zea mays
  Peptide Sequence Number=SeqID_63225
atgcggggaatgctgtggccggcgagggcctctgccgtgctcgtgagtggcgccgccgctctattgaccagggagaggagagtttgggggaaaggacgtgggccgttgaaacggagatgtcattatgttaatgggaacatggagcgaccacccgggaaaacagtgctaccacaagggtataatgggacgcccttggctgattaa

SEQ ID NO: 21447 - DNA, 201 bp, Zea mays
  Peptide Sequence Number=SeqID_63226
atgcggggaatgctgtggccggcgagggcctccgccgtgctcgtgagtggcgtcgcctctctgttgaccagggagaggagagtttgggggaaaggacgtgggccgttgaaacggagatacgagcatgccactgtggattctgaggttcagcaagtagaagtagctgagcaggagctcattgaaggcaagttgtgcccttga

SEQ ID NO: 21448 - DNA, 255 bp, Zea mays
  Peptide Sequence Number=SeqID_63227
atggcggacgaagcaataaagaaaaatgaaaaagaatcctatgatgcccgagtaaaagcaaaggaagctgaagaagctgccgaacgtgcattaattatagccggcctttcgccacctccggagccattcaatcatgaggctgaccccgttataaaaacggctttggatgtgatgaaggttgccaataaaatcgtagacgaagttgttgacaagctactaaatgaagctgccgagagaatactcaaagaagactag

SEQ ID NO: 21449 - DNA, 147 bp, Zea mays
  Peptide Sequence Number=SeqID_63228
atgggcgagggagcaaaatgggccgcggggagaggggttgagtgggctgagacgaagagtttaggcccagatgaaggtccttacggagaggtactcaggaaacagcctgagccccctaaagtaatcacaagaacctcatcgggatag

SEQ ID NO: 21450 - DNA, 597 bp, Zea mays
  Peptide Sequence Number=SeqID_63229
atggtggccgagctccctccctctccaatggtggtgctcgccccctccttcctttctccctattgcagcagcaagtgctcactgctcccctccattgtcttcaacctccagctcggcccctctcctgctcttgccatggccgagctcgccctagctgcagcgatgccgggtcttctctccctaatccctgcaccatcagcccttctccccacctctgctcggccaggccgcccctcagcttggcgtccgagtagggagcaggcgctcaccctccctacagctccccttcatggtggttgtccctccccctgcagcagcccatcctttgccctccacggacatgcccctgctcgcatcaaggtctcagcaagcagcagctcgcccgcacctcctgttgtttcctcgtcggctgagctcgctgcgagcagaccctatgccgagcttgcttcctcgctgccatcactgcgcgagtgccaacacgcgctcggcaaacttcgctatgcatgcaccatcaagctccatctccttgtccaatccatagccgaccctcgtagccaaattattccagttgtcccgcgcagcgacgcgctccgctag

SEQ ID NO: 21451 - DNA, 249 bp, Zea mays
  Peptide Sequence Number=SeqID_63230
atgaagtcagccccagccgcgttgcagaacgcgtggttgagctacgtgagactacagatctctggcaggttaagcctgagcaacacctggacgacgcagagttccagaaggatcaattcgttttttgcttatgatggtgcactgtggtctgcagagaagaagtgcctcaagtcggagctatggcatgcgtgcgttggcccgctcatctgcctccccaccgtcggcacgtgcatcgtgtacttcccgtag

SEQ ID NO: 21452 - DNA, 129 bp, Zea mays
  Peptide Sequence Number=SeqID_63231
atggtggtgccgagctccatgactttcctctctctgcgcggagttaggtccagggccgagcgaatcccagccaaggcggagaagtacgcggcgagcactgctccagttcgttgcgagccgaagagatag

SEQ ID NO: 21453 - DNA, 690 bp, Zea mays
  Peptide Sequence Number=SeqID_63232
atgactggcctccttgttgtgtgcaagagccctgccgccacggtaaagaccggcctgaagagaaagcgcatcgccgtcgggagttcggagcagtacgagttcgaggagacctgtcgcctcggcgcgggtgccttcggcgccgtcttcaaggcgcgccaccgtgccacgggccagatcgtcgccgtgaagtgccacagcgcagccgacggcgacctcactatggtgttccgcgaggcgcgcttccatgaggaggcgtgctgcggcggtgccaacccattcgccgtcagcttccacggcgttgtccgcgacccgggcacctggaagaggtacctcgtcatggagtgcatggagaccagcctccacgatcttctccatcagcgcccccgcgggagcccgccgctgcccgaagccaccgtgcgtgccgccatgtggcaactacttacgggcaccaagaagatgcacgaagcctgcatcatccaccgcgacataaagctacagaacatccttgtcggcgaggggcagagcgtcgtcaagatttgtgactttgggctcgtcatgttcaccgacgagcggctcccgtacgagccggtcggcacgctctggtaccaagcgcccgagatgctgctggggaagacccgactacgacaccaagcacgtgcaaggttctcgtcgacccatccctaccagtga

SEQ ID NO: 21454 - DNA, 1221 bp, Zea mays
  Peptide Sequence Number=SeqID_63233
atggacaaagaaaagatgatgaattcaaagaaggaagcaaaatatctcaccttgccgtcaccaaataaaaggcgcaagcctcgcatagttctctgtcttgacgacccgccgccgcttctgcctcccgaatgcgtgattgagctacgcgagactgcaaatctatggcaggttgagcctgagcagcacctggacgactcagagttccggaaggtcggtcagtcccacagcagcagtatgagttcgaggagacatgtcgcctggaaggtgggtgccttcggcgccgtcttcaaggcgcgccaccgcgccacgggccagatcgtcgccgtgaagtgccacagcgcagccgacggcgacctcactatggtgttccgcgaggcgcgcttccatgaggaggcgtgctgcggcggtgccaaccccattcgccgtcagctttccacgggcgttgtccgcgacccgggcacctggaagaggtacctcgtcatggagtgcatggagaccagcctccacgatcttctccatcagcgcccccgcgggagccccgccgctgccccgaggtcaccgtgcgcgccgccatgtggcaactacttacgggcaccaaagaagatgcacgaagcctgcatcatccaccgcgacataaagctacagaacatccttgtcggcgagggtcagagcgtcgtcaagatttgtgactttgggctcgccatgtccaccgacgagcggctcccgtacgagccggccggcacgctctggtaccaggcacccgagatgctgctgggaaagcccgactacgacaccaaggtcgacgtctggtcgctcggctgtgtcatggcggagctcgtcaacaacggcaggcctctcttccagggatccgacgacgacgggcagctctgcgcgatcttcgatgtgctcggcgtgcctgacgacagcacgtggccgtggttctcgtcgacgccattcgccaccgaggtgatgccggagctggacatgcagcggaacaaccacctgcgcgatctgttccccgagacgaagctgtccacggaaggattccaagtgctcagtggcctgcttacatgcaacccaaacaggaggctgacggcagccgccgcgctcaaccacccatggttcgccaaggtcgacgatctggagctaccaaagaagaaagagaagcttgagtccatgttgcccaagcgacacatacaacggaggttgcgtgctgtgtaa

SEQ ID NO: 21455 - DNA, 466 bp, Zea mays
  Peptide Sequence Number=SeqID_63234
ccctaaatttgttttcccctcgtggctttgtgcctttgtcgtcctctacacgacttttctccccatctcccacagccaagtccccaacccacctccacctccgcgccgaggaatccacacttgcaattgcaactacgagcccaccaaatcgagccgagccccgacggcaccaaatcgtgcggcctcggagatccagcagggtctagaagaaccaggagagacaccgtcagaagaggagggtcagcagcagccagaagaggagggccaacagcaggcaggcggtggcggcgaaatcgtcagcggctgccggggtatctgcgatgataacccggtcgaagctggtggagcagctgcgcgactaccagatccgatcccagcacaatgcgctcagatctcgcgggcctggacgcttgttgtgctagttttggtcccgtggtctgtggttacgttttgtgaacttcagtag

SEQ ID NO: 21456 - DNA, 120 bp, Zea mays
  Peptide Sequence Number=SeqID_63235
atggagttcgtcggtagcggcgacacggtgaggcagaagcggcggcgggtcgtcaagacagagaactatgtgaggcttgcgccttttattttggtgacggcaaggggtgactcaaattag

SEQ ID NO: 21457 - DNA, 227 bp, Zea mays
  Peptide Sequence Number=SeqID_63236
gcacgaggcaacaggttgataggtcggagaggtccggtacctcaagcggtccgggactcctcgcgcgacgggacgcgacagagactctggtcgacggtgtcggctgcatcgcgaacgccggttctctggaggagatggttgctggagtgacttggccgtccaccttgccaccaggttggactgttgagtgggaccctgcctcggctgaggaggagcgtgaggagtga

SEQ ID NO: 21458 - DNA, 246 bp, Zea mays
  Peptide Sequence Number=SeqID_63237
atggagaagttaaacatggaaatagtgccacaagcatcaatagccaatctccaattggggtcaattttggttgatcaaattatcgaagcccagaagattaatgtagggatagctcatatgaaggaacggatggacgagtgccctagtggccagggtgtcacgctccacaagatcgtgacagtcataggaggtggtgtatcggttgctaaggcgcagcgtctttggaaggctgtagtcaggccgtga

SEQ ID NO: 21459 - DNA, 1260 bp, Zea mays
  Peptide Sequence Number=SeqID_63238
atggcggcggacggccactggcggcgggcgacgcagagaagatccgcgcacaggaagaagacggcggatccgcgcgcaggaagaagacggcggactccaggcggggcccctggctgcgggcgacgcagacaagatccgcgcaggactcctggcgggcagacggcacagtggcagctcgatccgcgatggcagatcgaggaagaagctgcagacggggcgcagaccgagatccacccctggcggcggacgttgcaggcaaggggaaggccacgcgacggagagagacagcgcgacggccagagggctgaccggagagctggccgcgatggcagcacagtgacggcgcgacggcgccaaaaatttggaacagggtcgggggcagatgatgatgatgagacacccatggatgttgatattaaaattaatcttgatgttgatttggaaagacagataactgcagcaattgatccaaagctacttcaacatttggtgaatgctctcttcagaggtacattaagcataaatgattctgatctgtctgaaccatcagatgctgaagtggatgctgtaggatgtatttgtgcttttcttcatgtcacattcaatacattccctctagagcgaattatgactgtactggcctaccggactgaaattgttcctgcactgtggaacttcataaagcggtgccatgcaaaccgaagatggccatttttttcgaagtttgcatcttcattacctgctgatgctcctggttggctccttcccatgtctgtattctgtcccatatacaagcacatgttgaagatcattgataatggggagttttatgagcaagagaaacccctttcccttaaagatttgaagtccttggttcttattttaaagcaggcattatggcaacttttgtggattattccatcctcttctactcagaaagtgtcatccaacccttcaggccttaagaagttgtcagtggagaatgtcaagatcagagctagggttgggttgtctgaattgctcacacagttgcaagactggaacaaccgacttccattcacttctgcaagtgatttctattcccaagaagcaacaagcgaaaattttgtgtctcaggcaatacttggtaatactcgagcatcagagatcataaagcttgctccttttttggctccatttaccagtcgagtcaaaatattcactctagcagctgaagtaaagtggagaaaagaatgcacagatagtaaaattcaggagtaa

SEQ ID NO: 21460 - DNA, 1755 bp, Zea mays
  Peptide Sequence Number=SeqID_63239
atggtgggactgcagatgcatctcttcgtctctgaggcttttgtaaattctgggcctgctgtttatataaactccacaggaccaaacccaatcatggttcagttctgggtggaatttctggtgcttttgggtattgttgatccttctcgacatatgaatatcccaagtaacggtgcatctgcaacaagtggttcagctgctggtactaccaccggttctgaaggagctatccacgggaaccgccaagatgcggcaagaactcaaggaggtaacccaccaggtttcctggctgcaacacgtggattgccaaccagaacagttgttgctgctgttccagcacggtcctcaggcgaggctccaaaccatatctttagtgttatcctacctgttcaagtgaggggtcaagttgtagtgcctaatcagtcctctcaaggttctcaaacagcagtgggcaatggagctcaaggaaattcaacatctgctattccacaagcttctgttggtggtgtttctggtgttcctcttatagcggcacaggtagccaatgcattggcaaatgcaccaagccaggtttctttatctacacaaagtgcagcagatcagggatttcacctgactacagacaacagagctgatgttctgagttcatcaacaccagccactacaccacagaatggtccctcagtcttgatagtatacaacagcatccacaattgggagatacttgtgcagatacagctgacttatcaggagacgccacagcccatcagtactcatgatgctccttcgaacccatcagttgacagttctgtgctgaagaacaaatcctcggatgaagtaggttcacagaccactgagccttctgcaagtggcagtgctgaaccattaggtcttggtggaggtctgattccaattccaaagaggcggagcaaagcagtaaagccatctgggagcacaactgatcctagtagggatttgtcctcagtcagccaaaaccaagatcctatttcagtagcccagcagtttctggaaggttttgcttcccgaaatactaatggtagcagaagcaacaccctctcctctggtcctccatcttctgtgccacaggctactgaagttcctccgagaagacagggtggtggacaacctgatattggcagcatgatatctggtatgctcaacaacccagttttcagcaacatgttgtcgaatgtggcaacacaggcagggggctctagtgctgatttgaagagcgtgatggaaggattacaaagccctgctattgtagatacgataagcaatatcgtgcagaatgtggatgagcaagacctgggggccatgtttggttcaggcagaggacaaggtggcatggatttgtcaaggatgttgcagcaaatgatgcccgttgtatcccaggctcttggtggtgcaggggggcgttctgctggtgcaaatggtggacagcataggtcgcggcctcagcgcattgacggtgaaggaaatgcaccagccagcagttctcagattgatctccatgaagctcgtcaaagcattgaacagcatgaatccccagagaatatcttccgcgctgtccttgaaactgctgctcaggcccatggtgaagataacagcattcagggcatggtcgaagaacttgccactgatcaagagcttgccgatgactacatgaaacttttgatggaacaagttcggcagaggatacagtcagagtcgcagtcggggagccagccttga

SEQ ID NO: 21461 - DNA, 321 bp, Zea mays
  Peptide Sequence Number=SeqID_63240
atggccctggtcattggaggtggttcctcctcttacccctcacctgctatgtttgcattgtcttctttgctgtctatcatagaggagcaggaggcgctcaagaagaagtacctacagaaggccaagatcaaggagcattccttcctcacctccctcggcgacctcgaccacgactccgacgatgcaacatcttcctcgagtgacgaggagacccacagacgagttgaggacaagctgaacgaactctgcttcctcgtgaacaccataggtggcctttgcaccatagcccttggtgatgatgcagtgggcagctacaactag

SEQ ID NO: 21462 - DNA, 288 bp, Zea mays
  Peptide Sequence Number=SeqID_63241
atggcgaccgccgcggcccacgtctcaccgtgggcagcgcctatgtgccacagccttggtatggccctctcacctttcatggcggctccaccctccggttgttatgcgcccttcaaattggtttttgggtcaccagggtcgtggtttggcgaccgccggcaagaactccatcgcgatgacctgcggcaccaccgtggtcgggatcattatgttaattggaacatggagcgaccacccagaaaaacagtgctaccacaagggtggtatgggacgcccttggttgactaa

SEQ ID NO: 21463 - DNA, 1959 bp, Zea mays
  Peptide Sequence Number=SeqID_63242
atgccggagccatcaaccaccgagggacggcgaatccagggagagctcaagaatctcctggaggacgccacggtccgacgggccgagagctccgcctcccgaaggcaggggtacccctcggaacatcatgtcgcgacttcccgattcatgcgggaagcctcggtccacaccgggcgcacgcgcaacacagcgcctgcggcctcgggtcgcctcggcaacgagcaccatcaccgcgaccatcgggcccacctcgacgagagggtgcgccgagcctaccaccccaggcgtgggggacgctacgacagcggggaggatcagagtccctcgcccaaaccacccggtccgcaggctttcagccgggccatacgacgggcgccgttcccgacccggttccgacccccgactaccatcacaaagtactcgggggagacgagaccggagctgtggctcgcggactaccggctggcctgccaactgggtggaacggacgatgacaacctcatcatccgcaacctccccctgttcctctccgacaccgctcgcgcctggttggagcacctgcctccggggaaaatctccaactgggacgacctggtccaagccttcgccggcaatttccagggcacgtaccgcaccgagctgcccaacatcaccgactcggatgtcatcggcgcgttcctcgctggcaccacctgccgcgacctggtgagcaagctgggtcgcaagacccccaccagggtgagcgagctgatggacatcgccaccaagttcgcctctggccaggaggcggtcgaggctatcttccggaaggacaagcagccccagggccgcccaccggaagatgcccccgaggcgtcaactcagcgcggcgccaagaagaagggcaagaagaagtcgcaagcgaaacgtgacgtcgccgacgcggaccttgtcgccgccgccgagtacaagaaccctcgaaaaccccctggaggtgccaacctcttcgacaagatgctcaaggagccgtgcccctatcacgaggggcccgtcaagcacacccttgaggagtgcgtcatgcttcgacgccacttccacagggccgggccacccgcgaagggtggcagggcccgcgacgaagacaagaaggaagatcaccaggcaggagagttccccgaggtccgcgactgcttcatgatctacggtgggcaagcggcgaacgtctcggctcggcaccgcaagcaagagcgccgggaggtctgttcggtgaaggtggcggcgccagtctacctagactggtccgacaagcccatcaccttcgaccaagccgaccaccccgaccatgtgtcgagcctggggaaatacccgctcgtcgtcgaccccgtcatcggcgacgtcaagctcaccaaggtcctcatggacggaggcagcagcctcaacatcatctacgccgaggccctcgggcttctgcgtgtcgatctgtcctcggtctgggtgggcgttgcgcctttccatgggatcatccccgggaagcgcgtccagcccctcggacaactcgaccttcccgtctgcttcggaacaccctccaacttccgaagggagaccctgacgttcgaggtggtcgggttccgaggaacctaccacacggtactaggaaggccatgctacgcgaagttcatggccgtccccaactacacctacctcaagctcaagatgtcgggccccaacggggtcatcaccgtcggccccacgtacaaacacgcgttcgaatgcgacgtggagtgcgtggagtacgccgaggccctcgccgagtccgaggccctcatcaccgacctggagagcctctccaaggaggtgccagacgtgaagcgtcatgccggcaacttcgagctagcggagacggttaagtctgtccccctcgaccccagcagcgacgcctccaagcagatccgaatcggctctgagctcgatcccaaatag

SEQ ID NO: 21464 - DNA, 603 bp, Zea mays
  Peptide Sequence Number=SeqID_63243
atggcggcgcatctgcgctcggcggcggtgcgtctcggcgctgcgcatctgcgctcggcggcgagggctgttcttgagccagcaatgcaaggaaaagacataattggccgtgctcgaacagggactgggaagaccctggcttttggtattcctatcatggacaagatcctcagctacaacgagaagaatgggaatcctttagccataatcttggcaccaacaagagaacttgctcggcaggttgagaaggaatttagagaatctgctcccttggacaccctctgtgtatatggaggtgttcctatcaatcagcaaatgagagctcttaaatatggtgatgacatagtggtcggaactccaggtcgagttattgaccttctgagaaggggtgttttaaacctttcacagatccagtttgtggtcctagatgaagctgatcaaatgctggctgtgggtttcgatgaagatgttgaggtgatcatggagcaattgccacagaaccgtcaaagcatgctgttctcagcaacaatgcctagttggataagaaaaaattcgaacaagtacttaaaggatccagttataattgaccttcttgtcttgtga

SEQ ID NO: 21465 - DNA, 450 bp, Zea mays
  Peptide Sequence Number=SeqID_63244
atgaatactgtatccttagacctgagattgtcgcatgttctcaagatgttgggcgatgtggaagctcctccgaagccgaggtcgagtccgagcccccgggtcggacgaggcggagattgccggctggtgccggggcggagtccgagccctggggtcgggcgaagcggagttcgtcgtcttctggagtcgagcccaagtccgagccctgggccgggcgaggcggagatcgtcgtcttctggggccgagccaaagtccgagccctgggcgaggaggagatcgtcatcttctggggccgagcccaaatccgagccctgtgtcgggcggagttcgacgtcttccgcgacttagcccgagtccgacccctgcgtcggccagagttcgccgtctccgggacttaccccgagtccgagacctgggtcgggcggagttcgccgtcttccgggacttag

SEQ ID NO: 21466 - DNA, 273 bp, Zea mays
  Peptide Sequence Number=SeqID_63245
atggcaatgccagagcacgccctggtgctcggccccgcgcgcccgcgccacgagacgcccaaccccgcacccatgcccacgcctataaaaccgaccgaggccttgaccgtatgccctcgctcgctctcagcaccgcccaagcgcaagatcgctggagttcgctctgcgcacggcgtgcctacggttgcccgagcctcgaccaccatggaccggccactccagcccacctccaccttgtcaaatccctcgaccagcctcctcgaagctcagtga

SEQ ID NO: 21467 - DNA, 366 bp, Zea mays
  Peptide Sequence Number=SeqID_63246
atgggatcaaccattggcagatcgtttgctgatcctgacaaggaaattgagaatcggtcgtgcaatgcgcactcgaccttaacgaagcacagacagattgtctacagttggggtaggaagctgatgctggaatattacctgggagagctcgcggtatatggggtcgaaggtggagtcctccacgccctgtatcagggcgcgcacctccgcggcgaccgcagggttgaacgggatcatcccgccggcagggcggacccagccctatggccgcctgggccacggcccggggcgcaggtccaaatttttttagaagagctttgccctctggcctctgctggtctggtctctggcttcactgagtcatag

SEQ ID NO: 21468 - DNA, 540 bp, Zea mays
  Peptide Sequence Number=SeqID_63247
atgcctgacagcgatgggctccttgaaacattgtccaatgaacttgagttatctacaactgagagggttgtagttggacttgctctctcagactctgagaatccagacttgaacctggaagcctgcaaggatccattcccacttcatgccatctgtgggttactatggaataatataaaaggacagttgtcattcttgaaacatgcagtggctttgccaaatgatacattcacattcgcacattgtacaaggaagatggtttttccagacttgggaaattgtaaccagggcaatcaggcttggtactgccttgtccttcttgaggtgttatgtcagcttgctgaacttggctattcaaagccagtgcgagcaattcagccaattcttggttatcctctgatcaattatcctgaagtgttacttcttggtgttagccatatcaatactgcatataatctcatccagcatgaagtactgtcctgtgtttttcctgctgtggtgaagaacaccatgcacagcagtcttatgaactatctatga

SEQ ID NO: 21469 - DNA, 432 bp, Zea mays
  Peptide Sequence Number=SeqID_63248
atgccccagccgacctgcccaccgatgcccccacgctcggcgacccactgcgaccgccgcgcccgcccccgcctcccccaagctattctacttctgaaggacaaaggagagaagaagattgatgcttcgttaatacaacctagtgatgcgttaaaagtgcttcctggttcaaaggttcctgccgatggtatcatcatttggggtacaagtcatgtgaatgagagtttggtaactggtgaatctgtaccaatctccaaggaagtatccagtctagtcattggaggcacaatgaacttgcatggtattcttcatatacaagcgacgaaaataggatttggaacagttttgagccagataatttctctcgtggaaaccgcccagatgtctaagggcctgtttgggttcagctttttttctgaccagcttttctga

SEQ ID NO: 21470 - DNA, 162 bp, Zea mays
  Peptide Sequence Number=SeqID_63249
atgaaaaaggggcatattgaggtgatgaagaagttggagcatagtgatgttgatttgatcaggctgtacgaagcgaaggtgtggaaccaaatgtataatgcttctatcaaatccaggagctcaactatcagacaaaggcaacagggaaggagtgactactga

SEQ ID NO: 21471 - DNA, 195 bp, Zea mays
  Peptide Sequence Number=SeqID_63250
atgacgaagctacaaaaagccgttcctaagggagcgcaacaaggcaaaggtccaaacgtggcgcgcgagcaaatacaagatagcgtgaacagtacaaaggtgtttcttcttatgggaccttcggcgatgaagcagacccccaacagtagccccttcacggtgctagatcgttttcataacgagctcgacacgtga

SEQ ID NO: 21472 - DNA, 297 bp, Zea mays
  Peptide Sequence Number=SeqID_63251
atgactggcgagttggaggccatcaggatggactgctcgaagtcctctatggcaatgagaaagaatatgggtggtggaggcggagacgagaaaagagattttgacaactcgctttcgttggatctggctagcgacgaagtcaggagtagagaatgtcgagagcggaggacaagaccgtgggcagcgatggtcggagaaaaagattgtgtcatatgcgtcggacctgttggactcgctgctcaggaaagcaggaaaaagagagttggatctggctacctggctgcgcgaaaaagataa

SEQ ID NO: 21473 - DNA, 162 bp, Zea mays
  Peptide Sequence Number=SeqID_63252
atgaggacgatggaaggtgctgcccagcctgccaggcaaatgatcgaatggttccttcttaatgtcgatctggtagagaagacgacaccgatgttcagcatcgtctcgtacgttagggcatgtacagtggtgtttaatgtgggggctcttaaggtgttttag

SEQ ID NO: 21474 - DNA, 297 bp, Zea mays
  Peptide Sequence Number=SeqID_63253
atgtccctcggacctcggtttgttgtgcggctgaactgttgtgctgcatgtacggtgcgtggagtccgcaagctgacgggtggtgctggcctggactgcgactgcggctgcggggctgggggtccaaatggtgtcctcggtgggcaaggaggtttactgattcaggcagaacgtccatacatccagttttcggtggcttgtgctatcgacacctttgttgctcaatgctatgttaggggttataatcggacgagagaggggaaggcttccaagtctcttatgcgcaatgagacctaa

SEQ ID NO: 21475 - DNA, 1359 bp, Zea mays
  Peptide Sequence Number=SeqID_63254
atggttacgccggcggtgtcccgctaccggcttcgcccgcggttggtgcgtgtggcggtgtcagagatcccgctcgccacgaggcggacgaggcagcagcccgtggccgcgacggagccggcgattccgagcaacttcctgtgcccgatctcgctggagatgatgaaggaccccgtgacggcgctgacgggaatcacgtacgaccgggacagcgtggaggggtggctgcagcgcggccactccacgtgccccgtcaccgcgcgcccgctgcgcgcggaggacctgatcccaaaccacgccacgcggcggatgatccaggactggtgcgtcgccaaccgcgccctcggggtggagcgcgtgccgacgccccgcgtcccgctctccgccgccgacgcggccgagctcctggcggcggtgtccgccgccgcgcggcgaggggacgcgatggtgtgccgccagctggcggccaaggccagggcgctagggaaggagagcgaccgcaaccgccggtgcctcgcggcggggggagccgcccgcgcgctctcctcggcgttccttcggctcgttgaccagccggcgtcgttcggcggcgcgctgggcgagatcctggccacgctggtcgtgttcttcccgctcgacgaggagtgcaggagccacattgcctccccggcgtcgctggacgccatcgtctcgatcctgtcccacgacggcgaggcgacctcgaagtccagcgccgccgtcgtgctccgcgagatcgcgtcgtcgtccgactccgaccccgagtgcctcgacgccctgtccgagaccaacggagtacacgacgcgctcatcaagctcctgcagaagcccgtgtcggcgcaggccaccaaggccgcgctggtcaccgcctactacctcgtcaggggcagcgacctagcggccaggcgcctggtcgacctcggcatggtcgagctcctggtcgagatgctagtcgacgccgacaagggcacgacggagaaggcgctcgcggtgctcgacagcctgttgctcacggaggaagggcgcgggaaggcgtgcgcgcacgcgttggccgtgccggtgctggtcaagaagatgcagcacgtgtccgagatggcaaccgagttcgccgtgtcggcgctgtggcggctgtgcaagagcttctcgggcgagggtccgtgcaaggccgaggcgctgcagctgggcgcgttccaaaagctcctcctcctgctgcaggtcggctgcatgggcgtgaccaaggagagggccagcgagctgctcaggctcctgaatgggtcgagagacggcgttgagtgcattgagacggtagatttcaaggggctcaagagacccttctcatga

SEQ ID NO: 21476 - DNA, 2793 bp, Zea mays
  Peptide Sequence Number=SeqID_63255
atggggggcaagtaccgcgcggcgaggacgaagaggtggtggagggggctggcagcggccgggtgggtgctaaccgcggtggtctgctccgcggtgatgcactggaccctgcgccgggacagcatggaccgcgccgaggagcgcctcgtcagcatgtgcgaggagagggccaggatgctgcaggagcagttcggggtcaccgtcaaccacgtccacgccatcgccattctcatctccaccttcaacttcgagaagtcccctccagccatcgaccaggatacggtttcctaccttgcacgcattgacatgatgtctggggaggaggaccgagaaaacattttccgggccaggactactggcaaagctgtgttaacaaacccattccggttgcttggatcaaaccacttgggagtagttctcacgtttgctgtgtaccgccctgatctccctgctgatgcatcagttgagcaaccctttgatgtggagtcacttgtggagaatttgttgagcaaacttgctggcaatcaggatattgtggtaaatgtctatgatgtcacaaatgcttcagatgctatggttttgtatggaccttcaagtttggacgagcaagtgcctttcttgcatgttagcatgttggattttggagatccatttaggaagcatgaaatgagatgcaggttggtagtccttaccgggtatagcattgctgctgcatattctcgatatgacaaagttactgaagattgcagaaagatggaagagctaaaaacacaggcagaagctgctgatgttgcaaaatctcagttgattgtctggttgttttatgtgcctgatctcctggatcacctccctgatcttgtttctataaatcagttcctggcaactgtgtcacatgagatcagaacacctatgaatggcgtccttggtacttatgcatttattttgattctacttaatcttcagttccatgggcctggcaatctaaaatttctgccttctggtgtaggaatgctggatatgcttttaggaacagatctaactatgacacagaaggattatgctcaaactgctcaaatgtgtggcagagcattgattacactgataaatgatgtccttgatcgagcaaagatcgaggctggaaagttagagcttgaagcggtgccttttgacctgcgttctctcatggatgatgttgtttccttgttttcttcaaagtcacgggagaagtgcattgagcttgcagtatttgtatgtgacaatgttccaaaggttgttattggagatccttggaggtttcgacagatattgacaaatttggtcgggaatgcagtcaaattcacagaacgaggtcatgtatttgtgcgggtctgtttggctgaaaactcaaatgtggaagccaatcaggtcctacatggagccatgaatggcaaaggtggtagagttgagtcaacaactaatggtgccttcaatactttgagtgggtttgaagcagcagacagacgaaatagttggcaatattttaaactgctcctctccgataaggagtcacttttggatgatcttgagggcgaaaattctaatcaaagtgattcaaatcatgtcacactagcaataagtattgaggacacaggtgtcgggataccactgcaagcacaagatcgtgtttttacaccgtttatgcaggctgacagttcaacttcaaggaattatggcggtactggcatcggtttaagcatcagcaagtgtctagctgaacttatgggtgggcagataagtttcactagccatccttctgttggaagcacgttcactttctcagccacactgaagcactcatacaaagatatttcggtcgattcaagtaggagcttgacagaggcactaccaactgcttttaagggaatgaaggccatcttggtagatgggagacctgtacgtagtgctgttacaagatatcacctcaagaggttgggaatacttcttcaagttgtgaacaatatgaatgcagtagtaaaagctttcccaggacaaaatggagcaaccggttctagggaaaaagcatcaattctttttattgagagtgacttctggaggcctgagacagatgttcagttattgaaccatctacgcgagcagaagaacggtcagttgtcggatgggcacaaggtagttcttttggtcacctctgaagccgacaaggacaaatatggatccatatttgatattgtgatgtgtaagcctataagggcaagcacaatcgcttcatctattcaacaactgctcaaagtagagatagccgaaagaaaagataatcaaaaccggccgtcgtttcttcgaagcttgctggttgggaagaatatattggtcgtagacgataataaagtcaacctcagagttgctgcggctgcactcaagaaatatggtgctaatgttagctgtgttgaaagcggcaaggatgctatcagtctacttcaacccccgcatcgcttcgatgcatgttttatggatgttcagatgccagagatggacgggtttgaggcaaccggacaaataaggcaaatggagttgaaagcgaacgaggaaaggaagaacaagttggcttcgattgaaggctcgacaactgccgagtaccatctgcctgttctggcaatgacagccgatgttatccaggcaacttacgaagagtgcataaaatcgggaatggatggatacgtatctaaacccttcgacgaggagcagctataccaagcagtctccagattggtagtgggaacgacggattcggctgtttga

SEQ ID NO: 21477 - DNA, 411 bp, Zea mays
  Peptide Sequence Number=SeqID_63256
atgcaaagatcgaagagctactccaagaggaccacaatgctaaacgtaggcgggaaaaataccaaaaacaatcatccctcttgtcaaagctcactcgccaactcagcattcatgacaatagagcagcttcatatgggaacgatagttctggagctgagggtagcccccggtctcctggccactctggtgaggattggaagtctgccttcgactcagcaacaaatggctctgttgaccggtccagttcacagcatgagacaaggttctcatcctctactgatactggttattggtggaagaaaacatatgggaccggagaacggaaagcttactggaagatttggatggacgtgggattttgttgccacggatcagttaattttggttttgtacgcttcttctctggtctag

SEQ ID NO: 21478 - DNA, 387 bp, Zea mays
  Peptide Sequence Number=SeqID_63257
atggctcctagagagctacgaaggcaactatttggggctattcaatcactggacgtatctgatatagcacttgagaaagcgcgccacgtctgtacggcgtcggcgccccagcagccagagctgaagccagcgctcagaaacgaggcccagagccgagcgccggagcccggagcctctgcccactgctttgctggctgctgccatctggacaggccatcagaaggcttccatacgtcgcatcgcttcgctgctgaaggcttcccagtcccagtggaccgaggaggcattccagggtacctcacctgggctgctcagtcagaccaggcccagtcgggcgacaggtacggctggtaccggacgaggcgaagcccgaaggaggtcgcctga

SEQ ID NO: 21479 - DNA, 147 bp, Zea mays
  Peptide Sequence Number=SeqID_63258
atgggccagacgcccacgggccacaactctggcacaggcacatcataccggcctgctgactatgcagggctagcccgatgtggtgttcgaacccatggcctaatggaagaagtgcgggaacactgggtaaagttgtccaaccaatag

SEQ ID NO: 21480 - DNA, 333 bp, Zea mays
  Peptide Sequence Number=SeqID_63259
atgagggagtggagagctcaggttgaatgccccctccttctcgctgcttggttgtttcccttttacagttcaaaggagaggcccttacagggggcttgttatgacaagtcatacgcccggtattggtggatcactccctctacccggtatgcgggtcactatagcgactccggtgttgaggctctctgtagcgacatttggtgggacccatcgagcaaagtaggggagactccggtgttagataccttccttcatcccttcggcatgctgtcatggcgtcatccgagatggtgtgctgtggcgtcgtgccttaccgtgaccgacgtggggtaa

SEQ ID NO: 21481 - DNA, 156 bp, Zea mays
  Peptide Sequence Number=SeqID_63260
atggctatggccagcaagttcgttttgcagctgctgctgttggcgacgctgacgctgttggttgtgtcagtgtcaggaaacacaatccaggaactcgtcattacttacggtgatgatcgttccaacccggttgaagatgagatccggtgtcattaa

SEQ ID NO: 21482 - DNA, 543 bp, Zea mays
  Peptide Sequence Number=SeqID_63261
atggtctgcgaatctggtaaggtcgaggtcgtggccgtgagggaccaggtgccgacgatggagcataggtatgatcctacctccattaatcatgatttggtgttgatgggtcaaaccccagatgatgtggacgacgtgcacgatggtctggaggatctctttggtttcactgcccctacccctaaccctaccataaaccttggcgacgacaatgtcgctgccgagggcgaggctctctcagatgctactgcctccactacggcaagcactggtagaaagaggaaatgcacatccgatgtctgggaggacatggataagattttcgccactgaaaatggtgttcaggttagagtaggagcaaggtgtcatttttgcaagaaagaacttgctgcccgttctaccattggcactggtcatttgtctcggcatagggacaaatgtaaacgactccatggccgaactgggaaccaatctatgcttagatataatgctgatggtactgttttttgttgggaatatagtgctgaagttgcacgtgtttag

SEQ ID NO: 21483 - DNA, 528 bp, Zea mays
  Peptide Sequence Number=SeqID_63262
atggcgctttcccccctcctccttgcggaaaggcgacgcaggggcgggctactgtcggggaccataattaggggtaccctcaaggctcctaattctcagctggtaacccccatcagcataaagctgcaaaggcctgatggggctcggactcgggctaagccccggaagacggcgaactccgctccgcccgacccagggctcggactcgggctaagccccggaagacggcgaactccgctctgcccgacccagggctcggactcgacctcggccacagaagacagactcgacctcagcttcggaggagcttacacatcacccaacctagggcgcagaccagccacgtcaacaggaggcgccatcatcaccctacctcgagctgactcggggcacgggaacaagaccggcgtcccatctggctcgctccgcgagataggcaatgatggctccggcactcctccgacggccacgacatcacaccagttgggtgccaaaatctctccggctgccacaacggcatgtacttag

SEQ ID NO: 21484 - DNA, 1002 bp, Zea mays
  Peptide Sequence Number=SeqID_63263
atgtcgtcgtcggcagccatggaagcaatcgacgagctcgtccagctctccgagtccatgcggcaggccgcctcgctccttgcggacgatgacccgtccgacgagaccgcctcgcgccgcccctccacctttctcaacgccgtcgcgctcggcaacgtcggagctggcaagtcggctgtgctgaacagcctcatcggccaccctgtgctgcccacgggggaaaacggcgcgacgcgggcgccgatagtcgtcgacctggcgagggatccagggctcagcagcaagtccatcgtcctacagatcgacagcaagtcccagcaggtgtcggcaagtgcactccggcattcactgcaggataggcttagcaaaggggcatccagtggatctgggagaagccgaagcgatgagatttaccttaagttgcggacaagtacagctcctccgttgaaattgattgatttacctggcatagaccaacgagttatggatgattcaacaatcagtgaatatgctgggcacaatgatgcactattgattgttgtgataccagcaatgcaagcggctgatgttgcatcttctcgagctcttagactagcaaaggacattgatccagatggaactagaacaataggtgtcttaagcaaaatcgatcaggcagctgcagatgcaaaaaccgtttcttgtgttcagtccattttgtccaataagggtgccccacgagcagcagctgatattgagtgggttgctctaattgggcagtctgtctcaattgcatctgctcaatcaggatcagttgggtctgataattcactggaaacagcttggcgagctgaggctgagacccttaaatctatcctaactggtgcacctcagagtaagctgggaagaattgctctcgtggataccatcgctaagcagatacgtaaacggatgaaagttcgtctgccaaatttgttgaccgggtatgcatacaatgctgatcatcctgtgctttacttttaa

SEQ ID NO: 21485 - DNA, 385 bp, Zea mays
  Peptide Sequence Number=SeqID_63264
ccccacctcgcgcgcgtccctgcgcgcctccctggcgcggtggcgcggcccaccccggctcccccatgtggccccgccctgcctccctagcgtggtgcgcgcccccccggccccggtggcgtggctccccggcgcccctgcgcacggccccctcgcccccctgcgcggccggctccccggcgccccctgcgcgcggccgtcccggcccccggcacctgccctcggcagcgcgtcaacatgctgcgtcgcgcgcttcgtcgcgcgacgaattagtttaatttcaggtggtgatgaggatgatggttttggttgtgactatggtaatggtgaagatgaagtcgtggaggaggacttccaggagttccaagagtacgatgagttctag

SEQ ID NO: 21486 - DNA, 963 bp, Zea mays
  Peptide Sequence Number=SeqID_63265
atggtggcccagacccacacgtcatgtaaccggtgcgacggttgctacgtgcaagaaactgcaccgccactcgcgccactaccgtgcctcctcgactgcggaaccagtaccgcgactcgaggcaaccccgcgcacgacccaacagtgccaactaggcacatcagccacgggaaatgggccccgagcccccctactgatcagaggttcgaaggctggcccctcggagggttcaacagtcgcctcagagcgctcgggctccgcgcccacaactggtcagaggttcgaaggccggcccctcggaagggttcaacggccgcctcaggccactcgggctccgcgcccactactgatcaggggttcgtaggctggccctcgaaagggttcgacagccgcctcagacacaaagcgagggatgaccctgggtacgttcgatacataaccaaggctcgggctacgctcccgagtcacttcgccgctccactgaccggcctgacaagaggacagcgccgcctgcgccgctccgactgctgtgccactcgacagagtgaggctgacagcggccaaggctcggactcgggctcagccccggaagacgacgaactccgcctcgcccgatcccagggctcggactcgggctcggccccggaagacgacgaactccgcctcgcccgatcccagggctcggactcgggctcggccccggaagacgacgaactccgcctcgcccgaccccagggctcggactcgggctcagccccggaagacgacgaactccgcctcgcccgatcccagggctcggactcgggctcggccccggaagacgacgaactccgcctcgcccgatcccagggctcggactcgggctcggccccggaagacgacgaactccgcctcgcccgaccccagggctcggactcgggctcggccccggaagacgacgaactccgcctcgcccgatcctag

SEQ ID NO: 21487 - DNA, 612 bp, Zea mays
  Peptide Sequence Number=SeqID_63266
atgaccgcgaccgcgtgggtaacacacgctcacaggagacccccaggtgattctcaccaccacgcaagcacgtcggacctccaaaagaacttctttgaggcccatgatgctatgaaggcagacgaggaggcaaagaaggcggcggaggatgaagtgtgcaacctttcgattgcctttgacgatgccattacgatgcaagttcaggcgcaaacttcgttgaaggagcacagcgccgaactgcagaagctccacctagccacaagcgaggtgtgtgaccacctctctcctacaccaccaacccatgcgcctttgatagaccgactgttggcgctgctcgagcacgtggagcatgtggtcttggaaggggcattcaacatgggtagtctagctttagggcagatggtttccaacttcgacgagatcgatgttggtgtgatcgcggtgggctttgctgcatgccgaagcaacgaggaactagatagtatcgaagagcagggtcttgcgaccgaccccctaaccgtaccacagtcgcgaccgtttaggatggagatacgccttggggtagaccagaaccaggtcatcaatgctaatgacctgttgatagtcacctag

SEQ ID NO: 21488 - DNA, 510 bp, Zea mays
  Peptide Sequence Number=SeqID_63267
atgccgcggcttctgtgcaactcccaaccagattccaatttcttggagcatataagccatctttccccttacctcccatccacatcctctccgcgcagccaccgtcggtcacctgggcgtttcttccatgggctcgctggaatcacgggtgccatcatggaccagggaaccatggtgaggtcgaaggtgggcatcggcgatgaaccacgtctgcgaccttggcatgcaacgaagaagcttcaccatcgggctaggacaccgcgggaaccatactcaagcaacgactcggtcggcaccggtcgggcttcctcatcaaggaatcttcaagctattggcgtcatgacccggctcgtacagggtgccagcaccgcggtgaggacacgtgtcatcttaagagcaagttggtacctggaatctcaagtcccagatcattatgttaattggaacatggagaaccacccgggaaaacagtgctaccacaagggtttatggacgcccttggctgattaa

SEQ ID NO: 21489 - DNA, 165 bp, Zea mays
  Peptide Sequence Number=SeqID_63268
atggcggcgcggcctcggcgcggcgtgcccgcgcggcctcgcgtggtcggcctcggcgtggccccgttgccgctcgcggcacgcaacgcggtgcgtgcgcggctcggccccaacatgtgcgcggctcggccccaacgtgtcagcgcggtcctgcgcatcacgtaa

SEQ ID NO: 21490 - DNA, 495 bp, Zea mays
  Peptide Sequence Number=SeqID_63269
atgtactgttcaatgtccggtgcaccagtatgggcgcgcctgccgtctgcgcgcgcagcgcgcgcatttaatgcgttgcaggtagctcttgacgctgatatagccgttgctccgctgttacaccggacagtccggtgtacaccggacagtccggtgaattatagcagagcagctcaagtgaattcccgaggctggcgagttcctgaggccatccttccttggagcaccggacatgtccggtgtacaccggacagtccggtgaattatagtcgagtgcctctggaaattcccgaaggtggcgagtttgagttcgagtcctctggtgcaccggacactgtccggtggtgcaccggacagtccggtgcccccagaccagaggaggcaccagacagtctgacatcgcacaacgactacctccaaaccagaacggccatggtgagacttggtgaccccgagatagtgaagcaagctcaaccggtctccatgactgtttga

SEQ ID NO: 21491 - DNA, 3502 bp, Zea mays
  Peptide Sequence Number=SeqID_63270
atggaggctcagatccccaactatcctagtctacctccgcagcttatatgccaactgcataatgtgactatgcatgctgatgctgagacagatgaggtgtatgcacagatgacactccagccactcagtccacaagagctcaaggacccatttttgcctgctgagttaggcactgccagcaaccagccaacaaattatttttgtaaaacactaactgcaagtgatacgagtacacatggtgggttctctgttccacgccgagcagctgagaaggtgtttcctccactggatttcaatcagcaacctcccgcacaggagttgattgcaaaagatcttcatggcaacgactggaaatttcgccatatttttcgaggtcagccaaagcggcatcttctgacaacaggttggagtgtctttgttagtgcaaagagactggttgctggcgactctgtcctttttatctggaatgacaacaaccagctgcttctgggaattcgccgggcaaacagaccacaaaccgtcatgccatcatcagtactttctagtgatagcatgcatattggcctgctcgctgctgcagctcatgctgcatcaacaaatagccggtttactatcttctataatccaagagcaagcccttgtgaatttgtcatacccatggctaagtatgtgaaagctgtgtaccatacccgtatatctgtgggcatgcgtttccggatgctttttgagacggaggaatctagtgtaaggcgttatatggggacaattacaggaataagtgatcttgatcctgttcgctggccaaactcgcactggcgctcagtaaaggttggatgggacgagtcaactgctggagagaagcagccaagggtatctctttgggagattgaaccgttgacaacttttccaatgtatccatctccttttgctcttggattaaagcgcccatggcctgcaggcctgccttctttatacggtggaaggggtgatggcttgacctcttctcttatgtggcttcgagacagggcaaacccgggtttccagtcactgaatttcagcgggcttggtatgagtccctggatgcagcctaggctggataattccttacttggtctccaatctgacatgtaccagaccatagcagcagcagcagcattacaaagcactacgaagcaagttccaccttcagcaatgcagttccaacagcctcagaacattgctgatagatctgctcttctatcaagtcagattctgcagcaagtacaacctcggtttcagcaaatttaccctcaaaatctcaacgaaaacaaaattcaaggtcatacacaacctgagtacctccaagtccaacagcagcttcaacgctgccaatcatttaatgagcagaagcctccgatgcatccacagcaacaacagcaggaaccacagcagcagcaatgcgtccaaacaccacaggatcaacaaatgcaagaacagaagcatctgcacaacttccactccttgccagatgcattatcggccttttctcagctttccccagccactcactccccaccttccgcattgcagacagttccagcattctcgcatcaacaaaacttcccagatacaaacattagctctctctcaccatctactggcccttcaatgcatggcatgttggggagattaccttccgaagcagcttcgagcctcccatgtgtggcaatgaacgcccctgtatcggtatctgacccatggtcatccaagagagttgcagtggagtctgttaacccttgtcgacctcatgtttcaccacatatagaacatttggatatggcgacgtgtaacatgccgcagagctctgcactagcaccattacctggacgggaatgcctagtggatgaagatgggtgctctgatcctcaaaatcacctcttgtttggtgttcacatagactcgcattcacttctgatgcaagggggcattccagcccttcagaatgataacagttcaggcactattccatactcaacctccaatttcctgagcccttctgagaacgatttccccttgaatcaaccgctacgcagcgcgggctgcttagatgagtcggattatcttccatgtgcagagaatgccgaacaggcaaatcaacagtttgcaacctttgtgaaggtttacaaatccgggaccgtcggaaggttgctcgacatcactagattcagcagctacgacgagctccgtagcgaggtggggcgtctgtttggcctcgagggccagctggaagaccctctgagatcaggctggcagcttgtatttgttgacagggaggacgatgtccttctggttggcgatgacccatggcaggaattcgtgaacagtgtgtcctgtataaagatactttcaccggaggaggtccagcggatgggaaagccgggcatccagctcctgagctcggctccttcaagaaggctgggcaatggctgcgacagctacgcgagcatgcaggagccgagaggcctggacgctgggatggcgccgcacttgctagctctgcgacttggaacaaagcacgtagatcaaatggagctctgtgctgctccccgtctgatgatgtcttatgtaaaaccttttttttgtcataataacctgtatattgaaactgttcttggctcccacggtatacggctgacgacgagtgacgagggaaactggaatttgggggcatttcacagaattgaaactactgataattccaacttaccgatgcaattccaattccaacttggtcagaccaacattgccgttgctgtcaatgtcacgataattgctaaagctaccttcagtaaaagcaaaaggcagtttgttatgatcctggaaaagttgagagatagatatatagatatgatctctgagggaattcattcaggtgcacctttatgcttgcataatttggcactacttggtgcagacaacgacgccatggaccggtcctcttcctctcatagtctcatgtgctccctgggtccctatctgactgaaacccctgagtgcggccctcccctggcgaagaagaaaaggatggcctcccgttccctgagggcgtccgtaggagcgaaccccggtagcttctctggtgatctctccatcgctttcatcatatcttcggctgggcccccggtccggcaccacttggagcacacgctggccgtccggcaccgggcacgcagccgagcacgaaaccggcacgagcatccccaacgcgtacctgacccaccggccggtcagccgacggcggcgcacgcgcacggaaccgagggcgggcacggcgcgggcgttgggcgtctgcgcgtgatgggccttggagtccgttccgttacgttcacgtgggacgggaaggacgggcggtccaaagctggagggggctacgggcccaagtatttcctgtggaagcaagaaggccgagttcccgctcccgcatgtaaatcagcccagttagcactgcagatgctggctcgtg

SEQ ID NO: 21492 - DNA, 261 bp, Zea mays
  Peptide Sequence Number=SeqID_63271
atgcgcgggcttgccccgtgtcgtctgctcgtgttcctcgtcgctctagcaggagtagtgagaggacagccctgtccaagtctcgtcggcgggtcacctctcggagatgggggcacggggacggttggttggcttggcccccaacagtcagcagccacgcagcaagcaggtggctgccacgatacgtgccgacccaaaacagtgcctaccgacacgggtacgggccacacggcgacgcggaagtgtgatcctgatccgtga

SEQ ID NO: 21493 - DNA, 840 bp, Zea mays
  Peptide Sequence Number=SeqID_63272
atggcgcaggatgatccggttgtttctgctcagtggctgcacgagcacctagggatgcctgatgttaaggtggcacacatccccggtgcgctattcttcgacttagatggcatagttgatcggacaactgatttgaagtatagatacagcgacgattttcctaggattgtggtggttcatacatctttctgcaaatctcatttaccgcacatgctgccatcagaagaggcttttgcagcagcaatttctgagctggatataaaaaaccaggataaagttattgtctatgatggaaagggattcttcagtgcacctcgtgtttggtggatgtttagagtgtttgggcacaagaaagtctgggtactagacggcggtttgcctcagtggcaagcttctgggttcaacgtggaaaaggccagccctgacgatgacgcagttctgaaatcaatcgctgcaaacagggctgtcaaaagggtttataatggtgaacaggtcgcacaaaacgtcactgctaagacgtaccaacagatagatgccagagcaaagggcagattcgacggcgtggcgccagagccacgggaaggggtaaggagtgggcatataccaggaagcgtctgcgttccgttccccgaggttggtatggtccaaggattattcggaatctccctggaccgacccatcgtcgtgacctgcggatccggcgtgactgcctgcatactcgctctggggctgtacaggatcggaaagcgtgatgtgccagtctacgatgggtcctggacggagtgggagggtcagtcggactccgattaccccaaagtcaccgctcctggtacagcttga

SEQ ID NO: 21494 - DNA, 384 bp, Zea mays
  Peptide Sequence Number=SeqID_63273
atgtcgcaggggccctacacccgtagtgctaggcccaagcgtcttggctgtagtcatgcccagtccaacacatacatggcggcgtcctacacaaggcatgagacggggacgagtgtggaacccgagagaagccaagacatcgcatcggagctggcgaacaagttacacgataacgcgcagcacatacatgccatactgaaggaagaggctgcccaggatggtggccagaaccatgatctcggtagttcgatgctgcctgacgcaatggaggccgcccgccgaaaagcagatgagctgatccaatcgctcggtgggctcgtcagctacctgaaccaattcaccgagctggtcaaggaaactgggtttgagaacatcgcgacctga

SEQ ID NO: 21495 - DNA, 1977 bp, Zea mays
  Peptide Sequence Number=SeqID_63274
atggcgcggccgcggccgcacggctgcatcgtccacgttgccttcgtattcgcgttcgcgtctgccgtcctcctgccgccggccgcggagggtgtccaggaaggcgacgtgctggtcgcgttccgggacacgctgcgcggtctggacggcgcgccgccgggcccgctgcggaactggggcacgccgggtccgtgccggggcaactcctcctcctggtacggcgtgtcgtgccacggcaacggctccgtgcagggcctgcagctggagcggctcggcctgtcgggtggcgcgcccgacctgtccgtcctcgccgtgctcccgggcctgcgcgcgctcagcctctccgacaacgcgctcaccggcgccttccccaacgtgtccgcgctcgccgtgctcaagatgctctacctgtcgcggaaccgcctgtccggcgccatccccgaaggcacgttcaggcccatgcgtggcctccgcaagctgcacctctcctccaacgagttctccggccccgtcccggagtccatcacctcgccgcgcctgctggagctgtcgctcgccaacaaccacttcgagggcccgctgccggacttctcccagccggagctcaggttcgtcgacgtctccaacaacaacctctccgggcccataccggtagggctcagccgcttcaatgcaagcatgttcgcaggcaacaagctcctctgcggcaaaccactagaagtggaatgcgacagctcggggtcgccgcgcaccggcatgtcgaccatgatgaagatcgccatcgcgctcatcatccttggcgtgctgctctgcgtcgcgggcatcaccacgggcgccctcggcagccggaaaaggaagccgaggcgcgcggccgccgagaggctgggaggcggcgaccagacgccctccaacccgaagctcaacaccgcgccggccgtcaacatcgagaacgcagccagcaccagccagccgcgcaccgccgccgcggccgggggcgccgcctccgccgccgcggccgcggggaagcgcccgcgccgcgacgagcacgggcggctggtgttcatccaggagggccgcacccggttcgagatcgaggacctgctccgggcgtcggccgaggtgctgggcagcggcaacttcgggtcgtcgtacaaggcgacgctctgcgagggccccgccgtggtggtgaagcggttcaaggacatgaacggcgtcgggcgggaggatttctcggagcacatgcgtcgcctcggccgcctcgcccatcccaacctcctcccactcgtcgcctacctgtacaagaaggaggagaagctccttgtcaccgattacatcgtcaatggcagcctcgcgcagctcctacatggtaaccgagggtcgctcttggactgggggaagcgtttgcggatcatcaagggcgcggcgcgggggctggcgcacctgtacgacgagctgccgatgctgacggtgccgcacgggcacctcaagtcatcgaacgtgctgctcgacggcgcgttcgaggcggtgctgtcggactacgcgctggtgcccgtcgtgacgccgcagatcgcggcgcaggtgatggtggcgtacaaggcgcccgagtgcatcgcgccgcaagggaagccgtccaagaagagcgacgtgtggagccttgggatcctcatcctggagatactcaccggcaagttcccggcgaactacctccggcaggggcggcagggcaacgcggacctggccgggtgggtgcagtcggtcgtcacggaggagcgcaccggcgaggtgttcgacaaggacatcacgggggccaggggctgcgagtccgacatggtgaagctgctccaggtcggcctggcctgctgcgacgccgacgtcgaccggaggtgggacctcaagacggtcatcgcgcgcatcgacgagatccgggagcccgagcccgccgccgccgccgccgcctccgagtcgtcatcgtcctag

SEQ ID NO: 21496 - DNA, 802 bp, Zea mays
  Peptide Sequence Number=SeqID_63275
atggatcccgccgctgcggaccggccgtgtgtcatccagtcgctcccggcgaactgcaacaccctaccgccgcccctggtccaggcactcccggcgaactgcaacaccctaccgccgcccctggtccaggcgctcccggccaagaccaaccccagccagccttcctcccccaccgccaaacgccgccacgcgcctcctgcgccgggctcgggcccggcgcccccgagcccgcgccgcacccgctcgggtggcgcgccggagtggacgcccgccgagacgcttgcgctcgtcgccgaggtggcggccgtggacgacggctggtcccgctccgtatccgcgttccagaagtgggccatggtcgccgaaaacctcgccgcctccgaggccctcttgtcggggcccgggagccgccggagagggcgcgggagcaagaggactgccggggagtgccggcgccgctgggaggcgctggcggccgagtacggggccgtgcgccgctgggaggtgcgcaccggggcgacgtactgggagatgggcgcggcggcgcggaaggaaggctggccttccctgccgagttcgacgacgaggtgtatggggctatggacgcgctcatacgggtcgaggaggcgctgcttgcggatgctgctggcggtggatggcggcgactccgttgaggctgaggttggcgaagagcaggtgcagcaggatgcatctgctggagaggaggaggaacaagacgtcgatgaggatgtggaagaaatgcaggaggatgggggcaatgctggtgcttcaaatgaccttg

SEQ ID NO: 21497 - DNA, 99 bp, Zea mays
  Peptide Sequence Number=SeqID_63276
atgaccatctgcgtgttgcccatggtgatgcgctacctcataccgtgggcggccctgctccgatccccactatccgtaagtgcctatgttttgacatga

SEQ ID NO: 21498 - DNA, 99 bp, Zea mays
  Peptide Sequence Number=SeqID_63277
atgaccatctgcgtgttgcccatggtgatgcgctacctcatactgtgggcggccctgctccgatccccactatccgtaagtgcctctgttttgacatga

SEQ ID NO: 21499 - DNA, 441 bp, Zea mays
  Peptide Sequence Number=SeqID_63278
atgaccatttgcaaaaaccccacgggttttggtctattcgcgcgcgacatccgtcgtcttcctcgggacagagagagagaagagaggaagcgcggctttgctgacggcttattggcggtggagatggccaagcgaggtggtggaaaggcgcgggatacgaaggcgaatgcgatggtgctcttcgctcagtgggtcgcggacggtggcactcggtccacgcgcgtcggcgagaacagaggaacgacggtgtcgacggtggtgctcggggcttcttcgtgctcgagcaagggtgtcgagacgagcgcacaagacggcgaagcggttgtgggctcagtttttggacaatggcggtcagtgggcgcggacacgagcttagctcgcgtcggccatgacgggtcggcgtcgggtggaggaagaagagaggtgagggtgagcgggtga

SEQ ID NO: 21500 - DNA, 510 bp, Zea mays
  Peptide Sequence Number=SeqID_63279
atgctggaagaagatccaaagctatggttggttgctgcagctaggattttagctgcctcgtccttccaccccctcaacgcttccttccatcaacatccgctaacacctacagcttctcatattaccaaagatgtttatgaaaacatacaagacgtgaatggtcagtttgaggaaatctgcgatagtgctgagcgcaatttaaatgactatgagcctatgatagaaagacggttttgtgatgtaacacttgactcaacatcctctaatatgtatatctattttgacattatatttttgcacatgactaacctttgggcatctctgttgtcatattaccaatacaccaatgatgttgggcaaattcctccagctcaagtacttggagattacatagtcttctccattgtttctctggactttgaggttctaagcatgagcaagctgggttatgatggtgttgtggcactattggttgctgatataccactttcagttaagttacgcatgtga

SEQ ID NO: 21501 - DNA, 166 bp, Zea mays
  Peptide Sequence Number=SeqID_63280
atggacgcagagaggatgaataccctggaacagatgttcaagcgactgaccctcgccgacgacacgagcctgaagccgatgctcgcccacatccctcccctgcatcctcacttcgcttccatgttctggtcaatttatacagcctgcaacttctatccaaaaacag

SEQ ID NO: 21502 - DNA, 306 bp, Zea mays
  Peptide Sequence Number=SeqID_63281
atgctctacctctatgtatggacgctcgaagggatgcagcctgatctagtcagccttgatggccaccgagacatgggccgtccttctgaaaccgtggtccttcgcgcttcattcttcgagcggatgctcgggttcgaccagtcggacccgatgatttccgtcgattttatcgtccatcatccttctttcgtggcccataaccttcaactcgtgggctgtcggcctgaccagctcagatgtccacgtcttgcggttctgtccagggcaaccaaaaactggatcatttcactgtcggtgggcctctga

SEQ ID NO: 21503 - DNA, 519 bp, Zea mays
  Peptide Sequence Number=SeqID_63282
atggcgccccgtacagtccggcactgttcactgtccggtgcgccttctgacgctgatctgactctgcgcgaactatccgtgcactattcacgcgcactgttcacctttgcagacgaccgttcgtgcagtagccgttgctccgcttggctcaccggacagtccggtgctacaccggacagtctgatgaattatagtggattggctttccagaaacccgaagctgagaagttcagactgtatggtccctggtgcaccagacactgtacggtggtgcaccggacactgtccggtggcacaccggacagtccgggcaaaaagatcaaggtcttgacccaccggccaagatacattgaaacggccacagtgccgaagcttggtgaagggacatcttccactgccgaggcagaacaagctattcgcgtcggtcgaagcaccaaagaatcggttggagtgccaaaggtttctgcacccgaatcggtcaaagtgccaaaacatactgtggagctaaaggaaaggtag

SEQ ID NO: 21504 - DNA, 588 bp, Zea mays
  Peptide Sequence Number=SeqID_63283
atggtaggagaagctcaaagaatacgaaggttgacacagcgccgaagctgtgagcaggaaagcttcgtgtttaagaacaagtccccaacagcagctacctgtttacaaggcattcaaccttctgtttccaaaggagcggtagtggagctgttgttgctcttggctgcaagtgctgctatggtcggaatgaagattgtttcttttggaactgatagtggtgctaacaaggtgcagcttgcggacaatctcaagatattcaagaccgaccactttgactccgacacctacttgcagtccaagtgctgcgccatggatgagaaggaagtaaggcacctatgttcctacctgcaagatctaaagaaggcttttgttgaagagatgtgcagaagtgttcatgcaaattatgttgtattcatcaaaacatcaaaggatatattagaccttgaaggggagctactatcagttagaaatttgccaagtacacagtcagcattaatccatggtctattcgaaggggttcagatagattcattggccacagggcctgaaggttctactgaacaagacatatccggtgctaaagattag

SEQ ID NO: 21505 - DNA, 420 bp, Zea mays
  Peptide Sequence Number=SeqID_63284
atgggcaagagtaagaaaggtggtagttcttcacatcattctagcgacaagtgcaagcgcgagccgactcctccctcggaggacttcggcgactcggggtactcgaaggagaagttctcctccgagtccgagggctctctagctcctgcctctcccccggcgtcatctgatgattcggacgactcccagggactcgccgcggagggctcggatgagtcagagtactcctcggacgaggagaactcctcagactcgtccgaggagggcggcggcgacggcgatggcgacggaggcgacggcgacggcagcggtgacggcggcgaaggcgacggtgacggcggcggcaagggtggcagtggcgacggcggcgacggcagcaagggcggcagcagcaagggtagcaacaaggccagtggctag

SEQ ID NO: 21506 - DNA, 303 bp, Zea mays
  Peptide Sequence Number=SeqID_63285
atgtcgcgtacccagccgctcgcttcggacccgttcagccgccagtacccgacctcgcctacaagtagcgggcccgcgacctcgccgctctctctgcgctcttctcgccaccaaatctccgagccattcaccgttgtgccttggcctgtccaccgtcgcggggaaactctcggcggtcgcgtcgcgtcccggagcctagttctctgcgcatcatccgtcgacgagcaagccactgtggaaactgaggttcaacaagtagaagtagctgagcaggagctcgaggaaggcaagttgtgcccttga

SEQ ID NO: 21507 - DNA, 255 bp, Zea mays
  Peptide Sequence Number=SeqID_63286
atgacgccaccagatgtgaagcataaggcgataacaaaggatctatgtgttgaatatggtgatcccagatacaggagagaatgtgtacctgtgaccggaggcggaatcagggtggtcatcaccccaaatccatcattccgagaactagaaacaaagaactctcgtggatccctcacacgcccaggtctgatcgcagccggccaacaacttacttcccaaattaagttgagtgctgttactattgctgtaacatag

SEQ ID NO: 21508 - DNA, 210 bp, Zea mays
  Peptide Sequence Number=SeqID_63287
atggcgattatcgcgcacaaacaggcgtggctgtgcggctgggagacttgcgagcggggtccatccaccagggctagaggaagctttcgcgctagctcgtgtgagcagctgacggagcggccccatgtgtcggtgggcgcagcggttggctgggccgcgcaggcttacgtcaaggtgggccgagcgaagagcagaattggcccaatatga

SEQ ID NO: 21509 - DNA, 840 bp, Zea mays
  Peptide Sequence Number=SeqID_63288
atggccagcttctccttgaaaccacagcacaatggcagcagcagcaggatctaccatactatctgtagtgctactgcctccgaatggaggtcgctcctgcggtcccgaagcagtgtttcatggagctggaagaagcacacaaggttgcgattgcgatgctgtcagggttccaatgggggtgatgacagccgtctgagccaaaacaccggcattttccacccatcgatatggggggatttcttccttggttgctctagcagccctgaagaagctgctgcttcgtcccaacaaaaggcttggatggaacgatgcgatgaactgaaggaagaagtgggtcgtctgatggtagtagaagcaaactcaccattgcatgagaggctgcatttcatagacgcgctggagagcctgtgcttggaccacctgctgaaagaagagatcggtgctgcgctgacgcagatcgagaccgccggtgtcagtgacgactgcgacattgggaccgtctctctctggttttacttgctccggaaacaccgccgcagggcgtcgccagatgtgttcgtgaggttcagagacgcggagggaggtttccaggcgaacgatcctggggacctactgaggctctacaacgctgcgcatttcaggacccatggggagacaatactcgatgaagccatcgcgttcgcgagaagccgtctggagatgatgctgccctacgtgaaagggccattgttggcgcatgaagtcagatcctcgctggagatcccgctgcctagaagggtcaggatctacgagtcaaagtattacatccatgcgtatgagacaagtggaaacgctgcatga

SEQ ID NO: 21510 - DNA, 729 bp, Zea mays
  Peptide Sequence Number=SeqID_63289
atggttatcgccatcgtgacactcttggacgatattttcgattctttcgcgaccccacaagaatgtgaaatactcactaattgcatcgaaagctgggatcccaaaggggctcaagacctcccaggttgcatgaaatttgctctagagaagatattggatagctaccagaccattacaaatatgctccaccgagaggacaagtatcgaatgacgtatctaagacactttacagaagatctagtgagaagcttcaacatggaggtaaaaatgcttcaaaaaggttacatcccagattctgttgaagagcatcttaaggtttcactcagaactggtgggtgtcccatcttatcatgtgcttgctttgtcgggatggatgatatagcaacaaaggatttctttgattggatttctagcgtacccaaaatgcgggagcagctaatccctcatgtagcttccacaatcgacacctacatgaaaaagcacaatgtctcaattgaagtggcgcaggaaaacatacacaaactaaaagaagagtcatggaaagatttaaatagcgagtggctaaatccatgcaatgatgtgtatccaaagcaactattggagaggatattcaacttggcaaggacgatggagttcatgtacaaccaagaggacaatttcaccaactgccacaaccttaaggataccattcgctgcttgttggtagagccatataggatccacatttag

SEQ ID NO: 21511 - DNA, 216 bp, Zea mays
  Peptide Sequence Number=SeqID_63290
atgtcgtgtgttgatgatgttgttcgacgccgttcgcgcctgcgccacgacctccttgcgctcgtggtctctgcccgctcatcgagcatccagagcatccattgtcgcgacacgaagttcttctcgccctacgccgccctgctgctgttccgagagattgatccaatagttgagaatcaagatctattccgtggaagaatctcaagttttctataa

SEQ ID NO: 21512 - DNA, 216 bp, Zea mays
  Peptide Sequence Number=SeqID_63291
atggcggcgctgccatgctgtaatgtcctccggcccgatgaaggcagtgatggcgacaacccaaactccagctcagcttggcacaccggactgtccagtgccctaggctggccgacggtgaaccagctgctctcgggaatcgacggagttgtacggatcacctattcaccccctaggtgctctcaattggtatcgaagctaatactcttcatctaa

SEQ ID NO: 21513 - DNA, 225 bp, Zea mays
  Peptide Sequence Number=SeqID_63292
atggcggcggccgggcaacacacctcgccgaggtggcctgtggcgtttggcgacggcagtatggcggcagccgacgaggacgcaggcggtggccggcgagcaagcaccaggcgcccaaactttgtcgcggcgcccaaaacctgtacaactgctgtcgtgcgtctgggcctttgggttggagaagaaggggagaggagggtttgcaaaacaaaaactcgcacataa

SEQ ID NO: 21514 - DNA, 342 bp, Zea mays
  Peptide Sequence Number=SeqID_63293
atgtatatagaggacgttgctggagacagtcttagcgtgacggcacgctgggcgcagccacccaagccgcacgcgggtgtgcgaccactgggcagcagcaccacagcgcgcaggcgcagtcgccgcctcgacgctgcccagcagtggcgtgcgggtgttgatccctcgcgcacagttgatgatcttatacctgttaaaatttacaacttagcatttgatttacatcagcataatatgacacctaagaaatatgacgtgcatctcccgcgacaagacgtttggcgctcacaaaaacacttcaaccactttgaaggagatatctccgtggctgacctgatgtaa

SEQ ID NO: 21515 - DNA, 722 bp, Zea mays
  Peptide Sequence Number=SeqID_63294
caatcaccaataatttctcagaggatcagacaattggccgtggtgggtttgctgtggtttacaagggactgctgcgaaatggactatccgttgcggtaaagaagttctatgataccattgaactatctgatgaaatgtaccaagcacgccaacgattgctttgctttgaatttgtgcctaatggaagtcttgataaatatatatctgatatgtttcatggcctcgaatggagaaagcgctatcagataatcaggggaatttgtgagggcttgcgttatcttcatgatgagaatgttcttcacttagatcttaagccttcaaatatactgcttgatcataatcttgttcctaaaattactgattttggtctctcaagatgctttgatgataataaaactcgaaccgttacagcaaatctgattggatcggtgggatacctggcaccagaattttttagtggattgatctctttcaagtcagatgtatatagccttggtgttataatcatggaggtggtgacaggaataaaaggatactgcgaaattgaagatgaacctaaatctcacctcccggcagggacccatcagggaggagagatccaagggttgtcttggggtcggcaggccacccaagacgtctctagacgacgccgggctgaagagagcatggtttttaaagcggtaaggcggtccaaggcgttggaccaccgcctggacgcctag

SEQ ID NO: 21516 - DNA, 276 bp, Zea mays
  Peptide Sequence Number=SeqID_63295
atggctcgacaacaacacatgaaggcaaggccgcaaaaatacaatcccactttgaaaatggttgtggcaggaggccaaactgttaaatactcagaggatgacgaaagatataccttgcaatacgttggacaggagactgtttgcagcagcaacctcagtcagggtgggggatggttcagtgcaccaatggtggtcgaatcttgcaacatccacagtcagaagcgtgaagggattgcgaaccctcatcatcctcgtgtcttggacaatttggtgtga

SEQ ID NO: 21517 - DNA, 597 bp, Zea mays
  Peptide Sequence Number=SeqID_63296
atggcgccctacgattccgagccccttgatcactccctggagctccatgagcttcactaccagctgatcctgatacagcactggtgtggcactagcaaagcaaaccaagtagaagtcgcatctcccggaggctttaacaagctgggaaacatggtcgctaacgattgggatctagaagatccctgccaaaacgggaaaatagttgcgcacgctaagggtctgcatgtccaagctagcagagaagaagcaagctggcatgcttcgtttgacatcgtcttcgagcaaggcagcgggtacatgtttgctataagaagaaagtgggagaggacaaataagtgcactaacaagtttggtagttcaatttggtacaggttggaagggtccacactccaagtaatggggcctaatgtattcaagggagagtggtcaatcgttggaggcaccggaaaacttactatggctcgaggcgtcatatacaagaaatacctaacgacggtcgatagcacatccaaaattgaccttcagatccatgccttctacatccccatggaacgaaaagatgccggaacttctggaaaaaatgtttggcgctggtaa

SEQ ID NO: 21518 - DNA, 885 bp, Zea mays
  Peptide Sequence Number=SeqID_63297
atggggcgggcggtggtcggcggcgaacgcgccggtgaaggcatgggcgggacgagggatctgacgagcgggcccgaccagtcagcgggagagcggcgcgagagggagaggggaggagcagctgacaggatgcggcgcttcgggaaacacgcagtccaacagtgccacgtccatcaatggtcacctcaaaaacccccgcgggaccacttcgagcaagggcagcatctccaccatctagcgacgtcttcggcaccagatgacttagtcgaactggtccctcggagggcaaatgttggggcgaagaaacaaatattccacagttcaatggtttcttcagccattcaaggtttacttcaacgtatagcaggaacaaatattcatctattcaaggtttacatcaatcattgcagtcgatgggggtggcataggtcggtacgacagttggtcggtcagcattaccgggacatgatgagcggaggaatcggtggcggaggtgaacaaggaatgacgtggtcgagcgagtgggcgagtggaaggtgtgggccaagtaggtgcgcgatctggggtcataccggtgggctagttcggggagctgagacgtcgtggatgacagtccacatcctcgtcttcgcagtcatcccgttctcgatcatccgcccaagagatagagattgcagtgttgtgtcatctggcagattatcatcaattagttttgaggcaacaaatggaatatcagaggcagcaagccaagtacaagaagaaggacgagtattattcgaacctcctggcccggaatcaactctactctcaggctttgagacacctcccgcttcagttgtcgcacctagagatgtgtctggtcaagacgacgcctcgatgtcttag

SEQ ID NO: 21519 - DNA, 243 bp, Zea mays
  Peptide Sequence Number=SeqID_63298
atggcgccgccgctctgggcacctccgccgccactatccgtcgtgggagatcaggaaacaattggggatgtagatctcctaatggacgtggataccggttcgggtgcggatcaatctaatccgggcgctcagtttctaatccaacggcttggcttcaccgataccgcttcgttcggcttatttgctaaagagaccctagggtttcacctattcaacccgccatccattctaagtgaaaaataa

SEQ ID NO: 21520 - DNA, 255 bp, Zea mays
  Peptide Sequence Number=SeqID_63299
atgcctggagggggcgcgctggagagaaaagtctgggcgttgggaggtggaggcgccatggctgctggcttgctccccgcgtgctggcgagaaggaagggaggaagctccctgcgcaaaggaagaagaagacagggaagtcggctggagaagagagaagataatagggcagaatcataggggatcccgagattcggatgataaagccaacatgattcacaagaatgaggattaccagatccaagcaaaaggagag

SEQ ID NO: 21521 - DNA, 150 bp, Zea mays
  Peptide Sequence Number=SeqID_63300
atggccgagctccctgtttcccctgctccctgctccaaaaatccaacgaggagcccctactcgctagatgttgccgcggcgtctcgcgcgatgcatgattcggtgaagcacctaaaccatggacgcatgcgcgactcgaatccgagatga

SEQ ID NO: 21522 - DNA, 438 bp, Zea mays
  Peptide Sequence Number=SeqID_63301
atggcgcccagcatcttttctctctctcttgcgctcggcttctgtttctcctcctcgcgctgctctttcttcccccagccgttcaccactaccgtgatgctgcctctgctcgcgcccaagttttcctcgctcctgcgctccatggtcgcctcccatctcgcgctggccccgctgtctgcgcgcagccacgtcctcgagctcggcttcgagctccatctccctgcgccgctactctgctggtcggctaccgctccctggtcggcacactgctttgagtttgccgagctccctcgccatcgcaggagatccctcctgctccagctcgtcggccgtatccctctgctcggtcaccgtcgttcctccctggacggtctcaagcgccctcgcctcccggtggtttcagcttgccgtcgactatccttgccacgcgtgctttag

SEQ ID NO: 21523 - DNA, 204 bp, Zea mays
  Peptide Sequence Number=SeqID_63302
atggcgccgccgtggatttcgaactccgccgtggttcatgttccagtaggggggaaaacgctgggatcgctcgtgctgagcgtttgggccgttgatccactcaacaacggccgtgatgtcgacgagcaaaccactgtggatcctgaggttcagctggtagaagttgctgagcaggagctcattgaaggcaagttgtacccttga

SEQ ID NO: 21524 - DNA, 351 bp, Zea mays
  Peptide Sequence Number=SeqID_63303
atggccgctgcgccgcacgcgtctctctctgcgcgcactgtttctcgcgcggagcttctcctcagctccttcagtgccgcgccggagctccctcctattctgctccttggccacgcgagctcaccgcgtgccccatcaccctatgcccggaccgtgcctctctgctcgctggcgacttgtgccttctccagccaagccgcacctagcactgttcgtgtcgccgtcgctcaccgtggaaaccagcttgcccatgccgagctcatgagcgacccgaccgtcgtttctagtgttcgacctcccctgcaagctgctcgcgcctctattcctggccgtggtggtgttgtggcgtag

SEQ ID NO: 21525 - DNA, 273 bp, Zea mays
  Peptide Sequence Number=SeqID_63304
atggagctcgaagccgagctcgaggacgaggctgcacgcagacagcgtggccagcgcgagatgggaggcgaccatggcacgcaggagcgaggaaaacttgggcgtgagcagaggcagcatcacggtagtggtgaacggctggggaaagaaagagcagcgggcgcaggagaaacagaagccaagcgcaagagagagagaaaagcagttgggcaccatgggattaaaggactccacatcggtggatacggagaggaagccaacacctgtgattga

SEQ ID NO: 21526 - DNA, 363 bp, Zea mays
  Peptide Sequence Number=SeqID_63305
atgaccggggataagcaaaagcaaaagctcaagcaaaagccaacaaacaaaatctccaacacctacatcaacaaggtggacaaaaaggctgctacaccatatttgatcaagaagaaaaagaatggaaaggtgatagcaatcaaggccaacaagcaagccaacaaagaaaagggggccaaacacatctgggtgccaaaggaaataatttcaaacatgaaaagcaccaagaaggtttggatcccgaaagggaaatatgcgtatctatctaccttgtatctagtttaccttttatgcctagtatttacttttgttttaaaattatgcatactaggtaaatcacatggtaggactgcttgtctttaa

SEQ ID NO: 21527 - DNA, 1992 bp, Zea mays
  Peptide Sequence Number=SeqID_63306
atgtcgtcgtcgaagcggtggacgtccgcctccggcacggcggagctgcctgggcggtcgcccctacccgcctccgcgctctcgccagtccgccagagcgcccggcgctcagtctcccgaccggaacccggcgccacaacatcccccgtggccgtctcgatcgctcgcacgctctggccttcctcgtccaccggcaacaagagcggcaagagcaaggccccgcgcccgccgtctcccttgtcctccgcgccacctccgccgccgtcgccgtccgtggccaccctcgcggaccacctcgtcaaagacgactcgccacgttctctctcccggcagcgcagctgcaccgaggtcccgcgcttcgccgacgcggacgcggaggccaggaagatcgggaagcaggcatcagggaagggcgccgggcacgcgttcggccgctccatgcgcttcctcccgtccaccaggcccgcgggcgtgacgctcaccccgggccgcgtcgcgccgtcggacctccgcaggctcggcaacatggccgtttccctggacgccgccgccgacgtcgccagctccgggtcggagtgcagcgacgcctccaggggctccaccaccacgccgaggacggcgtccaagccgcggtctccgttgctcccccgcacgggttccgtccgcttgctcgggtcgagcaacacgcagtgggcgctctcgccgggtcggcgcagcgggtcgccgctcaagcaggcggcgacgacgacgacgctggccacggtgccggagagcaaagggaagaagagcctgatcagcctggggtggggccatatcttccaccggcggaagcacgcggccgaggacgcgtccatcgccgccgctgccacggccaccctgctgtcctcgccggtgccatcgtcatcgcgcagcagcggcggggaggccggccaccacgtgaggatggcgcactgccgcctcctgcagtggcgcttcgcgaacgctaacgcggacgccgtccgcaagaggaagacgggcagcgccgagctggagttgatgggcacgtgggcaagcgtgtcggagatgagagggaaggtggcgcggaagcgagtgcagcttgagaaggagaagcagaagattaaactagacaccgtgctctatttccagataaaagatttggagagctgggggcagcagctgcagaccgcacatgactccgccctggcctcaacagtgggttgcgcccgagcagccgtttgcaggcttcccgtcaccaatggtgccaagcaagctcttgagctcacgttgacggccaagacagtgacaagatcatccagtccgatggctgaggacacggcgtcactgatctcaaagctggtgcttgtggcaagggaagagcaagctacgttgcaagagtgcgtcgagctgcttaggttggtctctgcactgcaggtggaggagcacagcttgcgcagccatctggtgcagtcggcatcgcgtagtgctgtggccgtgaaatacgccgcctgcgccgctctgactgctgtgccactcgacagagtgaggctgacagcagccaagtccagcctcaggcgccataggaaactccgcttcgcccgaccccagggctcggacacgggctcagccccggaagacgacgaactccgcttcgcccgaccccagggctcggactcgggctcagccccggaagacgacgaactccgctttgcccgaccccaggccccggaagatgacgaactccgcttcgcccaaccccagggctcggactcagccctggcctcagccgacggtctccgcctcacccgacccaggggctcggactcgacctcggccttggaagacagactcgacctcgacctcggaggagcctccacctcacccaacccagggctcggaccgaccacgtcacaggaggcgccatcattaccctaccccaagctgactcaggcttcgaggaacaagaccggcgtcccatctggctcgctccgctaa

SEQ ID NO: 21528 - DNA, 1215 bp, Zea mays
  Peptide Sequence Number=SeqID_63307
atgattaccacccacctctccccagccctcaagcaccgctccccgtccccgctccactccacctaccactcccaccaccacctccccgtgcacctcccgctccccctcccccgccgccactgccacctcgctaagcccgccgccgccgcctcgccagaccttctcgcgagcatcgagtccgtggcctccgcggcctccgtgctggccgccatcgtgctggtccacgagtcgggccacttcctcgccgcggcgtcccggggcatccacgtctcccagttctccatcggcttcggcccggcgctggcccgcttccgcctcggcgccgtcgagtgcacgctccgcgccatcccgctcggcggctacgtgggcttccccgacgacgacccggagtccggcttcgcgcccgacgaccccgacctcctccgcaaccgccccgtcccggaccgcctgctcgtcgtctccgctggcgtcgccgccaacctcgccttcgccttcctcgtcgtgtacgcgcaggcgctcaccgtcggcgtgcccgtccaggcgcggctccccggggtgctggtgcccgaggtcctcccgggctccgccgccgcgcgcgcgggcctcctccccggggacgtcatcctcgccgcccccggcgccgcgccggacccgtccgtgcccccgcgccccgggaagctggagccggacccgcggcccgtcgagctcaccgtcgtgccggacaccagtgccgacggcacgggccgcatcggcgtgcagctctcccccaacgtccgggtcacgcgcgtgcgccccgagaacctggccgacgccaccgtcctagccgcgcgcgagttcgcgctcctgaccgtcaccgtgttcgacgggctcaggcagacactgctcaacttctctcagtcggccgacaaggtgtccggccctgtcgccatcatcgcggtgggagcggaggttgccaggtccagcgctgacggcctgtttcagtttgcggcggtgatcaacctcaaccttgcggccataaacttgttacccttaccagcgttggacggtggcacgctggcattgatccttctcgaggcagctcgtggtggccgcaagattccgcgagaagttgaacaggggatcatgtcatcagggatattggtggtgctcatggttggcatgttcctcatcgtgcgtgacacactcaaccttgatttcatcaaggagatgttgtga

SEQ ID NO: 21529 - DNA, 324 bp, Zea mays
  Peptide Sequence Number=SeqID_63308
atggtgcggcggtctgggcagtggctggccggcttcctcctcggccgagcttcccccactacagtttcttgtgtatgcgcttgcatccatttccaaggaggaagaagagatgatgatgatggtgatattaatgatgattctgactgtagattctggtatttccactatgaggagcctaaccccacacaaaagctggtccacctcagccaagcgggacatttgttgagatgcctttggggcaacctatgctcaggtaaagaagaagaagaatgtgtcgaggcggatctccaggagttcctggacttcgacgaattcgaggattag

SEQ ID NO: 21530 - DNA, 114 bp, Zea mays
  Peptide Sequence Number=SeqID_63309
atggtgcggcggtctgggcagtggctggccggcttcctcctcggccgagcttcccccactacagtttcttgtgtatgcgcttgcatccatttccaaggaggaagaagagtctga

SEQ ID NO: 21531 - DNA, 168 bp, Zea mays
  Peptide Sequence Number=SeqID_63310
atgaggaagcaccggacccctgtacgcacagcccagacccccgaatatggtccaggactcccaaggaatgtgcttgttagagacatgtattctcgtttgaatcttattactaatgagctcaattctattggaatcaataagccaggtgatgtagacatgacctattaa

SEQ ID NO: 21532 - DNA, 2049 bp, Zea mays
  Peptide Sequence Number=SeqID_63311
atgccggaaccatcgaccatcgaagggcggcgtatccaaggagagctcaagaatctcctggaggatgccgtggtccgacgggccgaaagctctgcctcccgaaggcaagggtacccctcgaagcatcgcgccgtgacttcccgattcatgcgggaagcctcggtccacaccgggcgcacgcgcaacatagtgcctgcggccccgggtcgcctcggcaacgagcaccaccaccgcaaccgtcgagcccacctcgacgagaaggtgcgccgaggctaccaccccaggcgtgggggacgctacgacagcagggaagatcggagtccctcggccgaaccgcccggtccgcaggctttcagccgagccatacgacgggcgccgttcccgacccggttccgaaccccgactactatcacaaagtactcgggggagacgaggccggaactgtggctcacagactatcagctggcctgccaactgggtggaacggacgatgacaacctcatcatccgcaacctccccctgttcctttccgacaccgctcgagcctggctggagcatctgcctccggggcagatctccaactgggacgatctggtccaagccttcgccggcaacttccagggcacgtacgtgcgccctgggaacttctgggatctccaaagctgccgccagcagccaggagagtctcttcgggaatacatccggcgattctcgaagcagcgcaccgagctgcccaacgtcaccgattcggatgtcatcggcgcattcctcgctggcaccacctgccgcgacttggtgagcaagctgggtcgcaagacccccaccagggcgagcgagctgatggacatcaccaccaagttcgcctctggccaggaggcggttgaggccatcttccggaaggacaagcagacccagggccgccagccagaagatgtcctcgaggcgtcctctcagcgcggcaccaagaagaaaggcaagaagaagtcgcaagcgaaacacgacgccgccgacgcggaccttgtcgccgccgctgagtacaagaaccctcagaaacctcctggaggtgccaatctcttcgacaagatgctcaaggagccgtgcccctatcatcaggggcctgtcaagcacacccttgaggagtgcgccatgcttcggcgccactttcataaggccgggccacctgcggaaggtggtagggcccacaacaacgacaagaaggaggatcacaaggcagaggagttccccgaggtccacgactgcttcatgatctacggtgggcaagtggcgaacgcctcggctcggcaccgcaagcaagagcgtcgggaggtctgctcggtaaaggtggtggcgccagtctaccaagactggtccgacaagcccatcaccttcgaccagggcgaccaccccgaccgcgtgccgagcccggggaaatatctgctcgttgtcgaccccgtcatcggcaacgtcaggctcaccaaggtcctcatggacggaggcagcaacctcaacatcgtctacgccgaaaccctcgggctcctgcggatcgatctgtcctcggtccgggcaggcgcggcgccttttcacgggatcattcccgggaaacgcgtccagccccttggacaactcgatctgcccgtctgcttcgagactccctccaacttccgaagggaaaccctcatgttcgaggtggtcgggttccgaggaacctaccacgcagtgctggggaggccatgctacgccaagttcatggccgtccccaactacacctaccttaagctcaagatgtcgggccccaatggggtcatcaccgtcggccccacgtaccgacatgcgtacgaatgcgacgtggagtgcgtggagtacgccgaggccctcgccgaatccgaggccctcatcgccgacctggagagcctcttcaaggaggcgctagacgtgaagcgccataccggcaacttcgagccagcagagacggttaagtccgtccctctcgaccccagcaacaacgccttcaagcagatccggatcggctccgagctcgaccccaaatag

SEQ ID NO: 21533 - DNA, 342 bp, Zea mays
  Peptide Sequence Number=SeqID_63312
atgactgacaagaagcgacgggagatggaagaccggaagagcaagattggtggacctcatgccgggagcagcagccgtcctcgtttctcaagcaatccaccaagcagttcaagcagagtcaccctcaaggacaccagcaccaacaccaaaaccaacgtcagcaccaatagcagtatcagaggcagttctcttagtagcagcagcagcagtaccgccagaacaaccaaaagggaggaaactggttgtgatgaggatgatggttttggttatgactatggtaatggtgaagatgaagtcatggaggaggacttacaggagttccaagagtacgacgagttctag

SEQ ID NO: 21534 - DNA, 225 bp, Zea mays
  Peptide Sequence Number=SeqID_63313
atggcggcacaagagctcgccgctggcttctatggcctagaggcgagtccgggtaggtgccaggagtccgaccaaagcgggttgttgcggatttggcagcgaagtcagattcgccctagatcgcaacggcccagcagcatagcccgagtttgttacggtagcaacgtggagaagaagaccctggaatgcgggcccctccggtcagatggcaccgagatggcatga

SEQ ID NO: 21535 - DNA, 513 bp, Zea mays
  Peptide Sequence Number=SeqID_63314
atgggcaaaggcaggagaggtcgaggctcgaaccgtcgtgctggaaacaagcggaaacgcaccccaagtcctccctcggaggacttcggcgattcggagtactcagaggaagtttcctccgagtctgatggatcgccggctcccgcttctcccccggcgtcgtccgatgactcggacgactcccaggggttgtctgctgcagtatggacgtacatctgtgtcgtcgagcgttctgggctcgaaggatcagatgagtcggaggtctcctcagatgaggagaactcctccgactcgtctgaggagcagagcggcaacgacagtcatggtgagggcgatggcagcggcgacgacagcgatggaggcgacagtgacgaaggaggcgacgacgacggcaagggcggcagtggaggagacggcggcgatgatggcagcaagggcgacggcggcagcaaggacggtggcaagagcgacggcgacagtggcaaggccagtggcatagcgccactggtctaa

SEQ ID NO: 21536 - DNA, 690 bp, Zea mays
  Peptide Sequence Number=SeqID_63315
atggccgactcgccaacgatcgatgccgtctttcacaacgcggtcatcgtcaccatggatgatgcgttccgcgtcctccaggacggcgcggtcgccgtcgccggcgaccgcatcgccgctgtgggcccctccgctgatgtcctcgccgccttcccctgcgccgtgcagaccctcgacctgggtggccgcattgtccttccagggctcgtaaacacacacgtgcacacatcgcagcagctggcgcgagggatcgccgacgacgttgatctgatgacgtggctgcacgggaggatctggccctatgagtcacacatgacggaggaagactcctatgcctccaccctcctctgcggcattgaactcatccggtctgggtggtggtcgctcattgtcctttctgaatttatggttccactgctcgaatgcaaatgtgttgctgattctagggcccgaggaaaacttggacaagaatcctgctatgtgttggtctggtggatttggcacctaaccattacacctcggggttttcagcgtggtggagcagggctgaatgcttgtgtgttcgatggttgggatcccagtgtctccacaacctgtcaggaggtagaagctgagagtaggctttgggttatggctggagacaaggtgctccaggagctgctcggcagggcttcttggctacatgcctaa

SEQ ID NO: 21537 - DNA, 399 bp, Zea mays
  Peptide Sequence Number=SeqID_63316
atgataaggcagaaggagagccgaaagaaccaaaccttacacacagaaccaaaagaaccaaaccttacactcagaacagatgcaactgatcccactcaaactacatgtgaagatatagatgagctcagtttctttgtgagacatcttggcgagggtgagctgagtgagaaggaagctttggagctggatcacaagggcgagtccatggtgtacggacctggagctatgctcttcggcggtggagataaaatgcttatgtgcgtgcctaatcctgatgagtcaagaattaagatcttctcctcaaatggtgtgactttgagggcaatctcatacacccccggagacatcgagggagcacctggttggatggagaaggaattggctgaagttgaatactaa

SEQ ID NO: 21538 - DNA, 222 bp, Zea mays
  Peptide Sequence Number=SeqID_63317
atgtctgtctcacctaagctagccgcacactcgtcctacccatgggacccaccatccagcctccgcgtggagtactccacgctgaaggtgtcggtgaaggttttgagcggggatcaatgggcgccgggagaccagggcctccgcgattattcaccggagttcactggtgccactgtgccgccattcaccttgtccggcccatcatggcatcctctgtcatag

SEQ ID NO: 21539 - DNA, 624 bp, Zea mays
  Peptide Sequence Number=SeqID_63318
atggacgacatcgtagccttccagcggaatggcatagcagttggcagtgaaggtctctgtgccgatgaggagagagagtcccggagatacgacaagagggttagatgtgtcctcccgcgcggcctcctcgtcctcgtgctccggttaatcctccacctccatgtagaagagacattggcaatgatggccatgttgtggcacgcgacttcttggcacggcgtcaagcacgacagcggcgatacggctgcaggcagcgacacatggcttcttagcgtggcgtcaagcacaacaagcggcagcgcgttggcaggctgtgcagggttggccgatcctccactccagttcaccgtcctgatccatagccatgtggacagtaagaacccgtctggttgggtgaccctgtctccactagaactcgcaacagctcaggccgtagaactgctcgaggacgagctgtcttcgaagggtggggaaatgtcatggggcggcagcccagagcatggaggccatagagataggctcagggcgcttgcgttggttgcattgatcctgctggcgctggtgcaggggtggccacttgaaggcgtggtggtgcacactggtgtcgtggtaacgtcgctgcag

SEQ ID NO: 21540 - DNA, 552 bp, Zea mays
  Peptide Sequence Number=SeqID_63319
atggagccttccatggatttagtgaggctgccgccattacagcccaagcataaaaggaggcgttctaagcgcgggaaaggggctgcggtgttggggcgcagtcagtctccccctgctgacttggttcctctcacgtcgaacttgccctcttgcgttctggaactttcgacggacatggcaagagaagaagttgcactccgtcgagcattatttgtcactgttactggtaccagacccgctgttctcggctcggatgtgctggaggaagtgtcccgtcgttattgcatcaatattgatgatatgtctatccaccagtccatgccggaagacttccttatgtttttgccggatgaggaagtggcgacaagagtgcttaatgaaggaaagcctttcagaggccctatgttctcgctcgtgttcaagcaatggacaagatttgcacatgcctcggctacgtccttctctcacttgatggatattgagatccgtgggatcccagcgcacgcgtggggtctgaacacagccaagaagcttcttccctcggccatttaa

SEQ ID NO: 21541 - DNA, 519 bp, Zea mays
  Peptide Sequence Number=SeqID_63320
atggaacctccagctgaagagtcgccgcgccagcgctgggccttggaccgcccatcctgggagctcagccgccgggacggccaggacgcagacgccgaggaggtggaaatcaagggggtggtcgctggtaccggagtgatggccggcgaggggctggtgggaaggggagctgggagggaagccgaacaggcgggttggggttccgaggaggagggcgccgcgccagggcagggagccgaggcgacagccatcaacctcttccaaagaataagaattttgcatatcagctacaatggatcaatccagggttccacagtggagcagcaactccaatttggaggcaaaccgtcaccacaatccattgttgactttgtcaaacacgctctaaagcctaataactccactgcacgtgccatttctgaaacaaactgcccacctgcttctgcaaagcatgtcacctgtcattcaatgaccaaagagcgaaaggtcatgcacagtgaaaaatcttatggttattga

SEQ ID NO: 21542 - DNA, 159 bp, Zea mays
  Peptide Sequence Number=SeqID_63321
atggccatgatgggttcaacatcgaacaagatgtacctctgccaagtaccaaattttgggattttaaatgataaagctgagactgggcgggtgaggaaacatcagacttttgttgtttttgttcaaaaggtgatacccaaggaagagccccagcagtga

SEQ ID NO: 21543 - DNA, 513 bp, Zea mays
  Peptide Sequence Number=SeqID_63322
atgatgaatcccaatgaagataatgtggatgaagtcaacgacaagattccaaccccgacattggtgaaaaggaaggatgagtcacatagatatctactgaatggaatgaagaacaacaagaggaccagaaaaatgtttgggtacaagattaaaccgcctcaaccgcaagtggaagaaccaaagctcgtgaatacccaaacaggagaatcaaatcaagctaagttgttcagcatgcaggcaaccgatcaaccatcatctgctggcaatcaagaaaagttgactcgcagagaggtcaaagtaagaggtgcttgtttctactgcaaagaagaagggcacttcatttgccaatgccccaagaagcgtctagaccggctcgcgaagaaggccttcaagcaaaactcaaccagtgataatctagaagaaattgtcttcacaagctcaaagtacaaattaattcaaacaagcgatgagagtggcaggttgctagacataagagttgagccgagagagtga

SEQ ID NO: 21544 - DNA, 198 bp, Zea mays
  Peptide Sequence Number=SeqID_63323
atgagtcggaaggcgtcccttcacacaaatgttagggcggtgcacgtacaacttcaagatgtgatgtgggagccgcacaatgatggagaacgcgcgctccaagacgtggagcaggaggaaacaaggtctgttaccgatataggggccaatgctgacgactccaactgtgacagggtaacccgaattattttagcttaa

SEQ ID NO: 21545 - DNA, 246 bp, Zea mays
  Peptide Sequence Number=SeqID_63324
atggggtggcggcacggccatctagctgctggcagcgggtggcgcggacggctgctgggagatggcagcgctcgcagctggaagcaggcggcgtcgcgggcatatggtggtagccggctgcgcgaccacctggtagcgaggccccctggtggcacacggcggcgcgagttatgttttctggtggcaggaagaacactcgaagtccggctaccacccgagcgcaagaacaccctaggggtagattag

SEQ ID NO: 21546 - DNA, 615 bp, Zea mays
  Peptide Sequence Number=SeqID_63325
atggttaggaagggggacgctgatgaggtcgccctaaagcgagccgcagggctgagtagcgaccgggatttggtcgaggaattcttggcttgcggagtgtggccattgagtcatggatggggagttggagctatgaagttatggctaatgtcgtttaaggagaatgttctagttaggagcctgaccttcgttgtagacttgtgtggccatgacgccggcgtgtttgtcggcgagttggaggccgtagctatgaaaataatcgagaagtacccgatgaagacagaagtggccaagagttgggatattcgaggatccaacattcagttgaatcaggatgcctccaaggaggccaaagaacaaaccgagggcaataaaaaatgtgacagcaagggtgcggtggtcactcagggtgagtggcttagaggtgtgcctattccatggaccgttggcgaagactttcttacgtctaggctagtacaatcatttaaagtgttcctttatgggcgtaacattgatggtgttgtgtcagcttcgatggaaagttcccagaaggagtcaaagaagatggggcctgcatggttggggaccctcaaagagttgtgcgagacttgctag

SEQ ID NO: 21547 - DNA, 156 bp, Zea mays
  Peptide Sequence Number=SeqID_63326
atggcgacaccttccccttcgattgcagcaccgggagatggatctgtccaagacgacgacacgacttcatggcaaaacaacctctttgccagccatagtccaaccagaggaagtggtcacaactcaaaccaaccaggtgatggttggttggcttag

SEQ ID NO: 21548 - DNA, 357 bp, Zea mays
  Peptide Sequence Number=SeqID_63327
atggctatggggcagcaggggccacgtcgcgcagggcgcgcgtgcccgcgggcaggggccacgcctggggaggcccaccggccgtgccggagctcacgcggggcaagggcgccctgccatggccactccgctggtcgccgggtctggccgtgccaggccgccgaggcccaaggggctacgagaaccgccatggctaaggggaagcaggggccgcgcgcgcctacgggcaggggccacgcctggggaggcccgtcggctgtgccggggctcacgcgggggcaagggcgccctgccctggccactccactggcagtcggatctggccatgataggctgccggggcgtagggggctgtag

SEQ ID NO: 21549 - DNA, 285 bp, Zea mays
  Peptide Sequence Number=SeqID_63328
atggggaaagaagcagcgcgcggcgagggaaacagactccggcaaatcccagggcgtggccatgggagactcgttaggggcacggccgagcagaaatggagctcggcaaactccatgggcgagcagagcgcagggaaatccgagctcagcagagagatgaagatgcgagggagagctgagggagaaagaagacgtctgggcgcaagagcacgcgcggtcgagcaggggccggacagactttggtttacgcagaagtcagacaaaaatatatctggtagggaatag

SEQ ID NO: 21550 - DNA, 336 bp, Zea mays
  Peptide Sequence Number=SeqID_63329
atggcgcgcggccttaagctcgggcagcacgcggcccacgtgttggtcctggtgtggccccgctgcctgctcgcggcgcacagcgcgtgcgcgtgcgcgtggctcgttcgcggcgcgttagcgtggacttgcgcgcgtggcaatgagaatgatggttgggcattgtctatggtaatgccaaataggacacttgctgagtatgttgatgtgtactcacccttgctctacacaccaaaccccccatccccaggttgtctgcattgcaaccactgctcaggagaagatgaagccgtggaaggagacttccaggagttccaagattacgatgagttctag

SEQ ID NO: 21551 - DNA, 315 bp, Zea mays
  Peptide Sequence Number=SeqID_63330
atgcacgggcgggttcgttgcgaagggatagagctggcttccctggtccacatgccagatagagacggctcgggcaggctcaccaccgagtcgatggcaggcgagcccgaggtcgcagcgacgcaagggacgcagcacagtcggcttgcaaagctgacatgtggtcccgcgcgcaagcgagcgtcgataggcgtaagcgactgccccgtggggtcaggatgtcagcgcctgcccgttagctgggccgcgcgcgccagcgagggaaatagaaggtgggccgaattgggatctacggcccagggtgtacacatgtga

SEQ ID NO: 21552 - DNA, 2610 bp, Zea mays
  Peptide Sequence Number=SeqID_63331
atggccgccacgcccctccctatcacctccccacctccaccacccacgccacccctaccgcagccacccaccgccgccactatccgctctctcactgccgcaggcaaccatgccgctgctctccacgcgctatcatccttgtcggcggcgtcctcctcccatgccccgctcgaccacttcgcgctcccgcccgccgccaagtccgccgccgcgcttcgctccctcatagccgtccggtccattcacggcgctgcgctgcgccgcgatctcctccatgggttcaccccggccgtcgccaacgcgctcctcaccgcctacgcgcgatgcggcgacctcaccgccgcgctcgcgctcttcaatgccatgcccagccgcgacgccgtcacctttaactccctcatcgccgcgctctgcctcttccgccgctggctcccggcactggacgcgctccgcgacatgctcctggagggccacccgctcagctcattcacgcttgtgagcgtcctgctcgcgtgctcccacctcgctgaggacctgcgcctcggccgtgaggcgcacgcgttcgctctcaagaacgggttcctggacggcgacgaacggttcgcgtttaacgcgctgctctccatgtacgcgcgcctcggccttgtcgacgacgcgcagatgctcttcggctccgtcgacaccaccgactcgccgggcggtggcgtcgttacgtggaacaccatggtcagcctgctggtgcagagcgggcgctgtggcgaggccatcgaggtgatttacgacatggtcgcgcgcggggtgcgcccggacggtatcacgttcgcgagcgcgctcccggcgtgttcccagctggagatgctctccctcggccgggagatgcacgcctacgtcctcaaggactccgacctcgccgccaactcgttcgtagcaagcgcgctcgtggacatgtacgcgagccatgagcgggtgggcgtggcgaggcgggtgttcgacatggtcccgggcggacaccgtcagctcgggctgtggaacgccatggtctgcggatatgcgcaggctggcatggacgaggaggcattggagctcttcgcccggatggaggccgaggccggcgtcgtacccagcgagaccaccattgcgggcgtgctgcccgcgtgcgctcgttcagagacctttgccggcaaggaagctgtgcacggttacgtcctgaagcgcggcatggcggataacccattcgtgcagaacgcgctcatggacttgtacgcgcgcctcggcgacatggaagctgcgcggtggatcttcgccgcgatcgagccccgcgacgtggtctcttggaacactctcatcactggctgcgtcgtgcagggccacatccacgacgcgttccagttggtccgggagatgcagcagcaagggagattcactgatgccacaacagaagacggcatcgctgggacagatgaagagccggtggtgccgaacaacgtcacactcatgaccctgctccctggctgcgcgatgctggcggcgccagcgaaggggaaggagatccatggctatgcgatgcgccacgccttggactcggacatcgccgtcgggagcgcgctggtggacatgtacgccaagtgcggctgcctggcgctgtcgagggccgtgttcgaccggctgccgaagaggaacgtcatcacctggaacgttctcatcatggcctacggcatgcatgggctcggtgatgaggccatcgctctgttcgaccgaatggtgatgagcaacgaggctaagccgaacgaggtcaccttcatcgccgcactagcagcctgcagccactccggcatggtcgaccgcggcatggagctattccatagcatgaagaggaaccatggggtccagccaacaccagatcttcacgcctgcgctgttgacattctcggtcgggctggcaggctggatgaggcctacagtatcatcacctcaatggagccaggagagcagcaggtgtccgcgtggagcagcttccttggagcatgccggctgcaccggaacgtccctcttggcgagattgctgccgagcggctgttccagctggagcccgacgaggcgagccattacgtgctcctgtgcaacatttactccgctgccggcctatgggagaaatcatcagaggtgcggaacaggatgcggcagaggggcgtcagcaaggaacccggctgcagctggatcgaactcgacggcgtcatccacaggttcatggctggcgagtctgcgcacccagagagcacgctggtgcacgcgcacatggacgcactctgggagcggatgaggaaccaggggtacacgccagacacgtcgtctgtgcttcacgacattgaggagagcgagaaggcggcgatcctccggtaccacagcgagaagctcgccattgccttcgggctgctgcggacgccacctggcgcaaccatcagggtggccaagaacctgagggtgtgcaacgactgccatgaggctgctaaattcatctccaggatggtggggagggaaattgtgctgagggacgtgagaaggtttcaccatttcgtggacggggcctgctcctgtggggattactggtag

SEQ ID NO: 21553 - DNA, 795 bp, Zea mays
  Peptide Sequence Number=SeqID_63332
atgaaccgagtcggctcttccgaagagccgattgttgcctcgctgggttgctcggctggcaggttgttcgatagccttacctcgctgggttccttggcagtatttagccctcttgcttacattcaagttattatacttgctcttacacaaagtagctgtccgtcaaatttgatttgtgaagttaccctagaacttggaaggacaaaagggtttttactgctgcgagacgcagaagggtggaatgtccctgtccgtggtctctttttagctttagtcaggcgcgagttaatatccccttgtcctgacgaagcaactcattacattcgtggaggcaaatggcaactgcctgcctggctgcgcctgcgcaagggtgcgtggtcgtcgcgtcagcgcgccctcgccttggcagcggcgcggtggcgctggcgcctggagacgacggtcttctcgacaacgaagagcctcctgaagatccgcatgagcagagcccacgtcccggcgcggcggcggcagtgccggacggcgccggcccgggatgagggccgcagcaccggcgcgcacccgcgggccgccgcgggctccgactcggagtccgatggcgaccacggcccggcggctgcggctcggcagcagcagcaggcgccccgtgccagctcctcgttgaagtcctcccaaaggaggtacttcctgtcatccaccgtggcgtctcctcccgtccccgccggctccgccacggaggagagagtgggtgctcaactgcttgtgaactatttgggctcggcggcatttttttag

SEQ ID NO: 21554 - DNA, 465 bp, Zea mays
  Peptide Sequence Number=SeqID_63333
atggccttgtgcccccctccgcctcttccacgggtcgctggagcccagcccgcccacggcctggtgtccccccccgcctccaccaggcaccaccatggcaggaagacaaagaccccaacgtcgccgcctgcctgtttgcaaaggggcaaaacccatatgacttcgattcgatttgcctgcggtgctcgcgacgaagggaatggcaaactcctccttcccactgatgaagccggcagaaatcgtggaggcactgcacagctacggcatcggccccagctccagcctcaccgagggaaggtgcgatattgcctcaatataagtgaagatgagtacaggaagaccattaaagtaaatgtgataagaccttggttcctaatgaagattattggtgctgagagaggattatatccaggtgctacaacatatggtaacagcttgggagccaccaaacctgtatacacttag

SEQ ID NO: 21555 - DNA, 567 bp, Zea mays
  Peptide Sequence Number=SeqID_63334
atgagggagttcctgtcgacgctggccaagcgcgtgcgccccaacaccaccgcctacggcaactaccggaggatcttcgtccccggcgggcagccgcccgagtgcgaggccggcgagcccctccgcgtcaacgtcctcttcaagcacatccagaggatgctcagcgacggcggcgccatcatcgcggagacgggagactcgtggacggcgaaactgctagagatggtcgaaaccctagtcgccgctcccttcaacgacaggcaggggtcacgggacagaggactggcgccgtggagggttgcaggaggggctcgttatgtttttgtccaatggcaattgcgggcgatgcctttcttgaattcagcgacaaaacagattgagggcttcaagagtcagattcaagaagctgccaagaaattcattgctactaacataagttttctaattggtgatgttgaatctgctgaccgcgccttccattactctgggcttaaagagaacgatgtgccccttctttttgtgattgcacagggtgggaaaatatctaaaccaaactatcgaccctga

SEQ ID NO: 21556 - DNA, 441 bp, Zea mays
  Peptide Sequence Number=SeqID_63335
ctgttgagctcgaatgcgggtgccgtcgaaggcagcgccggaatggacgctgacccgctcgcgttcttgagcgcgggaacgggggacatcttcgacgcgggccttctcgacgcggcgctcgcgtccaccaaggagctcggcgtcggcgacggcggggccgcgtcgaacgacgccttgctctctagctacgacagcggcaccaccggcgaaaacatatcctcaggggaatcaaacaactacagcggcggcggccacgacgccgaggtggcgcttgggtccttcagcccggtcgtgagtggcatgactgatgactcgcgtgacgagatactcgacaaggttggggacacggagggagcagagactacggagagcgaggccgcggatagtggggtcctgatcttggcagtccctcgggaggaagttagtggtgaggagggctag

SEQ ID NO: 21557 - DNA, 129 bp, Zea mays
  Peptide Sequence Number=SeqID_63336
atggcgcgtccgattgcgatcgggcgatcccagatgcgctcactagaagagcccgtgaccgagaatcctggtgagcagcaggttgaattagctgagcaggtgctcattgaaggcaagttgtgcccttga

SEQ ID NO: 21558 - DNA, 768 bp, Zea mays
  Peptide Sequence Number=SeqID_63337
ggacaacgacggcgctgcggagtggagggccgagcgggcgagggctgctgcgaggatgctggtcatgggggaaaacagcagcgaagctcgacgacgacgcaaggtgaagaacggtgctgctgcaaggaatcaacaacgcctggcttgttgcgcatttcgtcgagcacatagcaagcgtcaacaacgcactgcgcagcagcacgcaagcagggggaatggagctcgagtgccgagcgtccaccatggcagggacgacgagctcggctcggtgaagaggagcaggggctggcggccatggacagggagggggctgcgcagtagagagaagaggagcagggggcgtgcagagttgctgctcgaccacacaccattggagccgaggaggaagggcgccatggtgatatgttgctgctgctgtgagggggtcgagctgctgggagatgggagcggctgctccctgcccttggggaagaagggcgccgccgagggaggtgaagccaagggggagagcaggacgccaccgagcaggtccatggggaagacaaccgactgtggggaagaaggcaggaggcaccatggccagccggcggtgtggccgagcagggaggctccccacgccctacagggggagatgtcccaagggaggccgccatgggagagagggcagcggcgatctgctgttgtggggaggcgtgccgagcaccatggcgaggaggaggagccgagctccctgcttgctgtcgtgtggaagaagggaacagcgaaaat

SEQ ID NO: 21559 - DNA, 324 bp, Zea mays
  Peptide Sequence Number=SeqID_63338
atgaccagcatcctcgcagcagccctcgcccgctcggccctccactccgcagcgccgtcgttgtccctgcttaagcgccgtctaaaattcctgcagcaagcctcgccgagcattgccccgcagcagcatgctccttcgcctcgtgcgtgggtgctcgacgaatcgcagcagcgagccacgccctccggcttcgcttcggtctcccatgcgcgacgacgcgttcgtcttcgcgccccatgtgcagcaaccccgaccgagattgcgatgataagaggcaagccgacgtgtaggatgtatagcgggctatgccgttgctctagttag

SEQ ID NO: 21560 - DNA, 918 bp, Zea mays
  Peptide Sequence Number=SeqID_63339
atgatgctgccatgcatcgtttgggctcggttgcccggtcgtttctactcgtcaatccaccagccaaatttggagagcggccaggcggtttcgccgccgccgaccccggcgagcccccgtcgcagccccctgttattatgtataactcagctggcccgtctcctccaccccacgccttccttccgcggcatccgatccatcttggggcgggcgccgcgcgtcgagggccagccaaagcttgccatggcagccgtccggtccgacagggtccaccaccaccaccgccgctccgaggcgtcgtgcccggcaacctccgcggccgtggcggcggcgagggccgatgacgccctgcgccagcgcccgcgggggctcgtgcaggtccgggagcgggatcagggcccgctgtcgacggggcaccagcacctgcaccaccatcaccaccagctgcggcggtcggcggcgttcccaccccgccgcccggggccggggcgccgccctcctcagcgctgcgaaagcgacctcaacatcagggagcaccgctcctgcagcgaggtggccggcggcaccgcggcgggctgcgccgctgtgtgctgctgcttcccctgcgtcatggtggaggtcgcggtgctcgccacggtgcgcgcgcccgcggcgctgtgccgcaaggccgcccgcgtgcgcaagggccgcaggcgctctgcctccgcgggccaggccacggagatatacgagctcctcgtggacgacaccggcgtcgtcgaggtggatgccggcgccgccaatgcggtggcgctgcccgtgaagcccgccttgcagctggaggaaaagggggagctggagaaggaggtgtgggcgaggttctacggcaccggcttttggaggagcccgtcgcagctggacgacaacgacgacaggtga

SEQ ID NO: 21561 - DNA, 279 bp, Zea mays
  Peptide Sequence Number=SeqID_63340
atgcagcccaaccggcccagcgcgcccgcgccgcctgacaggcggaccccgcctgtcagcggcagccctctctcctgcgcgctctcccctctctcgctcgctgcccagtggggccgacctgtcggtaccagtttcttcacccgcgtgcccctcctctctctgcctcgtgggcccgctccgccctccccgcccacgtcatggaccggcgagtgcgcactcgcgcacgtcgtcgggtttctcggccacgacgcccacccacgcgcccaactcccttcttag

SEQ ID NO: 21562 - DNA, 231 bp, Zea mays
  Peptide Sequence Number=SeqID_63341
atggcgccatggctgaggccctcccccgacgagctccctaggctggcacgcgagcccggcctcatcctcggcgcagccagccggcggctcgcccagcgcagcggccagcgcgcgcggcagcaggcgcggctagcccgcgcggtcggcggccagcagcccagcccggcgagcggcgcgcagccggcgtggctagcctgcggccagccggtgcgtgacccccggcggggctag

SEQ ID NO: 21563 - DNA, 1491 bp, Zea mays
  Peptide Sequence Number=SeqID_63342
atgtcctaccccgaacctacacaacctctatttataagatcctgtgtgaagaagaagaagaagaagaagaagaagaagaagaagaagaagaagaagaagaagaagaagaagaagaagaagaagaagaagaagaagaagaagaagaagaagaaaaagaaagaaagaaagaaagaaagaaagaaagaaagaaagaaagaagaccaatggctttggaggtgcagaggctacacgccgacggtatacttctaccaccgctccaccgacgccgcagccgctggcaacgtttctgatgcgacgagcaggctcaaggactccatggccaatgctttggtgctcttctacccccttgccggccgcctcggcgtcgacaaagatggccggatcgagatcgactgcaacagcgagggcgcgctcttcgtcatcgcccgctcggaactgaccatggatgacttgaagaacttggagccgtctcccgagctcacaaggctgtttgttcccagaatccccagcactgatgaacagccttcgtccatcatattagccgtacaggtgactctgttgaaatgcggagggatgtcgctagggacggcgctccaccacgtcgctgtggacgggacaagcgccttccacttcttccagacatggtccaccatctccagggacggcgacggcgccgccgtggagccgccctgccacgaccgcaccctcctccgcgcacggcgcccgccctccgtccaccccgacgcgctctcggtgttctgccccaagatgagcttcgccgagccatccggacccaccgcaagcaaggtcttcgtcgtctccgcggaccagctcgcctccctcaagcgcgccagcggcagcgagaccacgttctgcgcgctgaccgccctcgtgtggcagtgcacgtgcgtggcgcggcggctcccgccggcagccgaggcgcgcgtctccttctcggcgaacatccgccgcagcacgcggccgcccctccccacccgctacttcgggaacgcgctcgtgcccgtgttcgccgccggcgcggcgggggacgtcgcgtccgacgcgctggagtccgtcgccggccggatcaggcgcgccatcagccgggttgacgacgagctggtgcggtccgcggtcgactaccacgagctgttcgggatcgactaccggctgcagaggggcatcctgccggcgacggagctgcggatggtcagctggcttggaatgccgctgtacgacgcggattttgggtggggcaggccgtggagggcacgtgcacctcatgaacaacggcccggcgctggacagtggcgtccgcgtcctcgcgtgcttggaggctgcacatatggaggagttcgagcgactgctctatgcaaagctcgtcgtctagccttttctttcctctgtgtttcgtgccaccaaagcaaatccaaattcggagttggcatatttaattgtattcatgtattgttcttagagcaactccaatag

SEQ ID NO: 21564 - DNA, 369 bp, Zea mays
  Peptide Sequence Number=SeqID_63343
atggcgtcgtcggtcggtgggaaaccctattctgccgtcattaaaaccgtcggcggatgggtggaggactcgggtggtggaggcatcaggcctgagcagtcacgcctcgcgacttcatcattcgcgggagcagacaggtctacagcctgtgagttgaccacaacatcgcggggcatgcgtgtgagggagtgggaggagctacgagaagagggacacgacatggaggcggaggtgggcaggagtaggaggggtggtcatggacataaatatcatggttgcatcgtcttcttcaacttcaaagaaaatatactgctcaatgaaagtaactacacaatcatccaaaaggccatctctcatcttatttcttaa

SEQ ID NO: 21565 - DNA, 435 bp, Zea mays
  Peptide Sequence Number=SeqID_63344
atggaggacaaggatggtccagttatggtccggtgtcgccgctgccccaaatgcgaaaggtcagagtcgctcgtgagactaagatcgaaaaggtgggagaacgacaactttggtcgagagttcgtgaagtgtgaaagcaagtcatatcgagataataaggttgttaaaatatacaattttttcatgtggatggacgattatgtcaagatgcttgaaggggcaggggtggtgggtggctctggggagatgatgacgtctaatatgtgggatgaacgagcacatgtgactacgaactgggacaaatttgctgccgaactggagaagatgaatgacaacatggtcgagttgaagaatataaaggacaacatggttgagttgaagaagatgtttggagccttttatgcttctatgatttttattctattccttttctaa

SEQ ID NO: 21566 - DNA, 646 bp, Zea mays
  Peptide Sequence Number=SeqID_63345
atgccgcctatccagcaaggatcaggcttcgggggctgtggcgaggtggacgaggatttcattgccgttggcaattggaaggatgcacggagacggggcgtggagcagggcggcgcaggcgtagaggaggcccacggcgaagaagccctccaggcctgctgcggcgctcctccacgggatgcagcctacaggagcgtccttctcggcgattcggggaggaagatggggctggcagatttggatcgggagaatggcgatttggatcgggagaagatgagtctggccgatttggatcgggagacgcgccgagcaatatcgacgtggggaggaggcgcgccgagccccgagcagacgacggtggggaggaggcgagcttggcgggggcgtcgggagcgcgtcggtggggaagaagatggtggggaggggggcgccaagccaagtgccgccggcggtggggagatgaagggcgtcgggagcgcgttggtgggaaggggggggcgccaagcccagtgccgccggcggtggggagatgaagggcgtcgggtgccgccgacggtggggagcttggaggggcgtcgggcaggcgagtacaggatttgggtttggggaattttggatggagaggggtcgcggggcccacatgcag

SEQ ID NO: 21567 - DNA, 306 bp, Zea mays
  Peptide Sequence Number=SeqID_63346
atggcgccttggagccccagctcggccgacggccgggaggacgcgctgggtctccctctgctcggtcgtctccctcctcccgctccagctcccctgtgtgccgtggatctcgcgcccctgcccaagtccggctgcctgcgcgctccttcttccttttcccctgtcagccgcatctccttcgggcgttccgcgaagctcccagccgagcgttccttctcttcgccgcgcgcccagccgtcgaagctccctgccatcgtcgttttcggccctgccgttggtacaacatcgtttgctgttgctagttga

SEQ ID NO: 21568 - DNA, 907 bp, Zea mays
  Peptide Sequence Number=SeqID_63347
atgggaagtattatctttccttgccacgtggtgcccctagacctgcccatgtggtggggtcgggtgctgctctctatgtggcctgaagcatacgaccgtgccttcgccgagtcccagcagcgcgccaacaagcgggcgcgtcaggacgaggccagcgccaagtcgtcgtcctcctcctcatcatcgttgctggaggaggcgacggcgtcagcaggtgcgatagttccgtacgttggggccgttcatgacgtcgcacccatcaatagcgtcgtcgtcccgccctcgctacagccgccaccgccggctgccggcagccgagaagcgccgccatgcctgcgcaggcatttcctccaggcgttggggctccgcgccgacctgccggtgcacttcatacacgacaagcgcgtgtcgaagaccgatctggacgggcaccagagccggttccgcatcccgctggacggtgtcgagcgccaccttcgcccgatcctgagcccccaagagctcgaggccgccaacctcctggaggggccgaggaggcggccgagggggcagcagcctgaaccgcgggatggcaacaacaggaggacgacagccaagaagaaggggaaggcacacggcgggctgcccgtgatgctcgtggacctccaagccggcgccaaggagctgcggttatcgcggtgggatagcagccagggcacgatcgtcaagggagaggggtacctccaattcacccgccagtgcacatttaaggagggcgacgacgtcgcgatatgggccttcgtgcagcggcggttccgcctcttcggcgtggacgtgtgggacgacagcctactccacatactcgtcgtcaagaaacaagcgcccgaagctcggtgctgtgtctgccatgcccatgcgcagcctgaga

SEQ ID NO: 21569 - DNA, 564 bp, Zea mays
  Peptide Sequence Number=SeqID_63348
atgcctaattggggctcactgctagacacacaactcaagactaaccaaagtggtggaatcatcaccaatgtccttgacatcgccacccattgttccctcatcaagtgcaatggtgcatttgcctcctataacaatgatgaagaaacagagtccattgagcttattctcgacctatctctcaagctcgtcttcgctagaagaagaagaagtgtcgtcggagtcatcgtcaaggtcaataagggaggcgaggaagatgtgttccttgattttggccttgtggaggtacttctacttgagcacctcttgtctaacctctacttgattattggacgtgtactcacgctttcccttgcactcaccaatgtggtggtcgcgcttgtcgacgtccaacttgctcttcatattggattagttggcaataagttggttggggtctccatagttgaagcagccatccttgaccgtgccatgccaccgattcatgtagttgttgtggaactgcatgaagcgactggaaacaagtggcagctcctcatccccaaggcactcaacttgctcctctaa

SEQ ID NO: 21570 - DNA, 396 bp, Zea mays
  Peptide Sequence Number=SeqID_63349
atggcgcctcctgttgacgtggtcggtccgtggtgctctaggttgagcgatgtggaggctcctccgaggtcgaggtcgagtctgtcttccatggccgaggtcgagtccgaacccctgggtcgggcgaggcggagaccgtcggctgaggccagggctgagtccgagcccctgggtcgggcgaggcggagaccgtcggcagaggccagggctgagtctgagccctggggtcagacgaagcggagttcgtcatcttccggggctgagcccgagtccgagccctggggtcgggcgaagcggagttcgtcgtcttccggggctgagcccgagtctgagccctggggtcgggcgaagcggagttcatcgtcttctggggctgagcccaagtccgagccctag

SEQ ID NO: 21571 - DNA, 189 bp, Zea mays
  Peptide Sequence Number=SeqID_63350
atgggttccagagacctgctttcccgatcgcagatgcacgtcggcgctcgggatgaagaggactacgatgacgacgcagaggtgttgatgaagggatctagttttattctaccgtttttccatggcagtgttatacacatgacccggctgatcgatcgctacaatgaacgatatttatctgctaattaa

SEQ ID NO: 21572 - DNA, 444 bp, Zea mays
  Peptide Sequence Number=SeqID_63351
atggaacatgagctcgtcgagcttcatcgtggtgtgaaccggttgcaaagtgaggtggcactccttggttcagattttgacaatgctcgggagggtaacactcgtctagaggaggcggacctggagctctcacagacacgcaaaaagattggaggtagccccttcttcccgttctcttgcacccgagtcatttgctcctttgaggagatcggcgtgggaggtggcgatggcgatggagaccaagatgaaagagctttcttgtactttcaaactgcattgctgaggttcaagtccttcggacggtcgttgatgggcattgctttggggcggatggtctcgcactttgacgaggttgacatcgcattgatcgtggaaggctttgctaccggtcgaatcgatgaggagctacacgtcattgaagaccagttccggccccacgcgtag

SEQ ID NO: 21573 - DNA, 166 bp, Zea mays
  Peptide Sequence Number=SeqID_63352
atgggaatggatatgggacaaaatcttcacccattgggtaaacggacgtgcaagagcttcaacccgtacgccttcgccttccagagcacgctgagcggacgaccgatcatgggtccccgcagcggcgccttgccagtcctcggccccgactacgacagtggcgcag

SEQ ID NO: 21574 - DNA, 417 bp, Zea mays
  Peptide Sequence Number=SeqID_63353
atggatcctgctgccctcaagtttcttctctacgagatcaacagaaggtttgacgaggcagatgcccgtgtcgaccggctcttcggcaagctgcagcagcccgcccaccttatggggccatcgccctccgtgtcccttgatctcccgaccaccccgctcaatgtcgaccacttccctaatgcatccgctagcgtgccgcccaccccgactacggtcgttggggccgtcgtcatcgtcgacaactggggcgggtgcttcgatgatggcgagcagtactacgcggcaccatccgtcgtcgctgacaactggggcagattcttcgatggcgagtatggggctgccaacactgagttcgctgaccactgggaccaccccttcaaccctgaggcgaatggcgacctcaatcgcatcagtgat

SEQ ID NO: 21575 - DNA, 519 bp, Zea mays
  Peptide Sequence Number=SeqID_63354
atggctgcgcaggctctgttcatcccgcgacgggaggctccttgccggggctgcgctgctgctgtccctgttccccatggcgagctccctacaatggccaagctcccccgtcgcgaccctgcgctcgctctcaactcccgaccgtggagctcacccttgcttctgcgcgttctctacttcttgcatccgctgtggcctcctgtgtacgcggcggcgaacggactccctgcgggcggcgaaatctgcacgctcgaccgattggatgacggctgggggagcaccttctccagggttcaggcgcgtcgtttgctggcgattgggagcaccaggggggtcgtggtagtgacggtcggatcaaagttcttgcgctgggtcgccggatctctgcgtaccggtgatctgcgctgccttgggctctttgctctgagccgcatgggtgtttgggggaaggaggtggaagaacatacgtgcgccgttggattggagctgggcagaggagattggatcgcgctagtttag

SEQ ID NO: 21576 - DNA, 399 bp, Zea mays
  Peptide Sequence Number=SeqID_63355
atggcttcacgggcgcgcacgcttcttccttctcgtgtcatctccgcttgcgccgcccctagccccaccatcgtcctccccatgaagccgccggttgagccgccccctcttgtgtcgcctccatgtccgcgcagatatgcctcgctcgccaccccgccgtgttcctccccgagacaccgtggccagcctctagcccgcgctcttcctcgtcacggcgatgtcggcttcccggaccccttccggcttgcttccatgccttcgcttcggtttgttcgggcgcaggagaggctacacttcctctatgagtcgaggttggccgtcggcaagagctccgaagggttccaggcgctgcagcaatctacaccagggccagcttcgcgtctacttctgcacagatga

SEQ ID NO: 21577 - DNA, 306 bp, Zea mays
  Peptide Sequence Number=SeqID_63356
atgacgaagctgcaaaagtcgttcctaagggagcgcatcgtaaattccgaagccgcaaaagtcgttcctaagggagcgcaacataagttccgaagctcaaaagtcattcctaagggaatgcagagccaaataccaccgaaatataaggcattttatgcaaggaaatgcttcgatgtgtacaaaaagaagggaaggtgtttttcgccttcggctcaaaaagatacgaatttcgtccacagcaaagcaattcatacatggataaaaaagataatgcaaatattcctaagctctattgatgcgtcatga

SEQ ID NO: 21578 - DNA, 357 bp, Zea mays
  Peptide Sequence Number=SeqID_63357
atggcgaataagatgggcactgaactaagcggctcgcagcggcgccacatcatcgatgaggaattcccagatgatgagatcgatttcttgctcacggtacttcttggggggcttcctcatgctgtggtgaatgcccatgacctcccagcaggcgccgataggcatcaagggaagacgatgtccgacacgctgggcccacgtggcagggtcaagggaatgaggcgcggcgcggttgagaggctagagcgcgcgcgaccgattaggctgatgaccaggtcccaggcgtcagcagtggaagacgtttgggcaaggaaagccggagctaacgaggtggggcccacgcgccatacacgctag

SEQ ID NO: 21579 - DNA, 321 bp, Zea mays
  Peptide Sequence Number=SeqID_63358
atgcagcaggcagggtgcgagctgaggcgtgtaggaaaagaacggagaaagcagcaggacgtcgtgggttctagaggtgaagcacagagaggacagaaaggatcaggctgtggaacagagaagggagcaggggacaacaatagcacatgggagaatggcgaggagtgcgagcatttgagagcaagtccccaacattggcgcccacctccggtgaattcatttgaccaccttcggcaaactgtgaccttcgtcatgccgtcgaagaaggcttcagggctaggggctgcaaccactggacgtcaatcaggagacactacgtga

SEQ ID NO: 21580 - DNA, 222 bp, Zea mays
  Peptide Sequence Number=SeqID_63359
atgcctgcaaaaaggaaaccgtcgctccccttctacatatataaatacatatgtcctcgctcctgcttctccatcaccagaccagaccatccatcttcctcacgcacaggcgcacagcccttccccgtgcagtgccacaactccgtcgacgccgtcaagccaagtcgagatccatggtcacgacgtcctacaccaccatcgccggagctctattgcacgcag

SEQ ID NO: 21581 - DNA, 279 bp, Zea mays
  Peptide Sequence Number=SeqID_63360
gggctagagcagggctgcgctaggggctcgaccgggaggaaatcgagcggagatgggtgccgcacctgggcaggggatgagacacacagcaggggcgggctcagggagagaggagatgggtggggcttcacaatgggaggcagcgtcggcaatggctactcggagcacgacgatgcgaggatctgcaggggccattcgacaagggaagggctgggcagggggcgtcgtggctacttaagagtggagcacgccagggcgctggccgccggggctggctag

SEQ ID NO: 21582 - DNA, 1113 bp, Zea mays
  Peptide Sequence Number=SeqID_63361
atggagctggtttgggatggggtgatcttcatcggtcggtgcatgtgcatctcgtgtaacgtggccccgttcgatcggtttgtcggcgcagcgacggtgttcgggagctgccacaagttggagccgctgccggcggggaagaaggcgatgtggacaagagagatggactgcctcctctccgtctgcgactacatcgtccagttctacccgtccacgcagaccctgcccgatgggaccaaagttgaggtcatggcgaccagaccaaggtcggacatctacatcaaccttcccgcgctcgagaagctcgacgccatgctcatcgacattctggacagcttccagaaggcggagttctggtacgcggacgccgggacgaggtcgttcggctcggtcacctcgtcctcgtcgtcgaggatgtcgtgttcgtcgtcattcaggaggtcggctcaccggaacgacgataagtggtggctgccggtgccctgcgtcccggacgccggcctcaccgacaaggcgcgcaaggacctgcagcagaggcgcgactgcgccaaccagatccacaaggccgctgtctccatcaacagcggcgtcctcggagacatggaggtgccggagtcgttcatggccgtgctccccaagagcggtcgggcaagcgtgggggactcggtgtaccgcgtcatgcttggcgccgacaagttctcgccggagttcctgctcgacacgcttgacatctcgtcggagcacgacgcgctggcgatggccgaccgggtggaggccgccatgtacgtgtggcggcgcaaggctagcggcagccacggcaagctgccgtggagcaaggtcaaggagctcgcggccgacgacgacgacaagaacgtgacgctggccaacagggccgagagcctcctgctctgcatcaagcaccgcttccctggcctgtcgcagaccaccctggacaccagcaagatccagttcaacaaggatgttgggcaagcgatcctggagagctactcgagggtgttggagagcttggctttcaacattgtttcgtggatcgatgatgtccttttcgtcgacaggtcgataaggaaactgagtgataacctcaagtcctga

SEQ ID NO: 21583 - DNA, 363 bp, Zea mays
  Peptide Sequence Number=SeqID_63362
atggatgagtttggcgtctactggatcaatggctccaataccatgttgaatggcgcaaggcacatctacccccatggggctgtgcataaagagtttaaacggcgcaacaacattaaccaagctacaccgcgccaggtaatgcgtgattccacagcaacctcacattggaatttcacgcgacggaaaattggcccgtacgaggccacatccatggggtcaaaatgctgctcggctttggagatcgcaagagcaaggactgtgcaagcggagcgtgactgtgtgagcgggctgagaacggagcgactccgtccggttgattttttggagtgggatggtttcgaatttgaggagaatattctctaa

SEQ ID NO: 21584 - DNA, 2703 bp, Zea mays
  Peptide Sequence Number=SeqID_63363
atgggaaaacgaggccacaggcggtctgcatcacaagacgacgacaatgtgggctgtgtgtggggcctcatgcgcatgctttacttccgccgagaccccaaacttttgctggatgcgaagcagttgagtgggaggcatgcgttccgggaggtcagcgggagggggcattcagcaaagaggccaaatgattttgacgggatagaagaagatggtaacatagaagatcgcactttgcagaaaccgacagtaaaaaaccttatggaggatgaattggaaaaattaatgctgctgaagaaatttccaaatgatgaggttcagagaagaaaagccgacctgggaattgatgtctctcttgatacgatttcagagcatacaaataaatcaacagataactcatatcaccaggcaggaatctctacgccttcaactccatcaatggattatggggttttgaattatactgaagaatataatcttgaatctgtgctggtgaattttctaggtgaaatatatagttgtcacaatgaatgcccacacagtgattgcaagaacaagaatgaattgtgtccttcactgaagtccctaatccataaaaaggtcaatgaattgaataatcttccccacaatattggccgtgggcaatctcaagagggcagtgatgctaagccatctgaccaaaataatctttataacaccatggcagcccaatccaaacaattcaaggatgcattggaaatactgggttcgaacagtgaactttttgtgaagctgcttcagaagccaaatcaacatatagctgatagtatccaacagcatgaaaacagtaaggtgtctgctggattagagcctgacaaaattcatggacagaccaattttgttggaggaagaggaagctcaaaacagcatcctttggctacaaaagagcaggctaaagagagaaaatatatgttcttctggaggaagagtaaatcaaatagaaggcagatgcttgacgcaacagatggagctcagactgttagcaaaattgttattctgaagccaaatccagaaagagggattaatcagaaagcagctactgcaagaactttacatcaacagccatgtacatcgaatgctcctggatgcagtggaagggaaaactcaaagttttcaattaaggaagtcaagaaaagattcagatttgtgactggtgagagaagtgaaagaaatttgtcacctgcagaggaccttcaaggagacccacgtaagatcaaagattctgttgttgcaattaataaatattttagacatctccctgaagggagcttggcaaacaagtctgcatcagacattgagaatggcatcaaaccttttatcagcagtaagcaaaagaatcaaaatgggagcataactgaaatcagtggccatatagtagcaccaaaaggtgcatctgtattttatgaagaggccaggaggcatttatcagagatgctaaaaggtaatgactgttccataaactatccagaagttcaaatatcaaaatccttggaaggcatactttctcttcctcatggcaatgtgtcaaccactgggagtagcctgaggggaaaggattaccttgacccctcacctggagaaacagatgtttacgatgcatgtgaggttgagagagaagaatgcacacaagagagaagccaatcacaagaggattttggaagcattgctcactgtacttgcacaacagttgatgatcaggtgacagttcgagaaggatattacacgaatgaagcacaagaaggaccaagacatgctcatgatgagccagacactctgtatattgaaggacttgataaattcatttgccgcgaaaacattcgcaacgaagagtccagtccagcagaacaaagcagagacgatatacgtcaagagatactagaagaaataaatcagggaaaagagcatgttaaaatgtccctagcttctgttgagggcatagatgaaaagttggggcagcaagagccagaaacaccggaaccaagagcatcagccaaattaatctcagacggttctcctaatcaaagcgatgaaaagcaagagaggcccagtccagtatctgttcttgagtcatccttcgaagatattggcagtccagactgcataaacaagaaagagtgtgagctgcatggtctccaaaggaccctgtattttccagataatgaaccagacgttaatgtcctttgggaggacaagaatgtcaggttggactacataaagctggtgctagaactctcagaactgtgcgcagaacaaaatctagaggtatggtacctagaagacgagttgatcagcccctgcttgtttgaagaactacagagccagggtgatcagacggatgatcgaatgcttctgtttgactgtatctgtgaagctctaacagagatccaagagagatattttagactctcctcttggctaacttttctaaaacacgacatacggacacctccgacaggagagaacctaatcacagaagttgataggtacgttaacgggtatattatccagtacagtcttccaagtactctagagcagacaattaaaagggatctggaagttcagacgtggatgaacattagatcgaaaaccgaagggattattatggagatgtgggagtttgtattggatgagttgatagatgagactgtctccgatttgtggatttga

SEQ ID NO: 21585 - DNA, 1533 bp, Zea mays
  Peptide Sequence Number=SeqID_63364
atggcggcagcggtggtggataaggtgttcgtcgcgctgccggcggaggtgaaggcggggcagtccacgctggcgtgggctctcgaccgtttcggcggcggcggcggcggcagaaccacggttgtgatcgcacatgtgcatgtcccgccacagatgattccagtgatgggggtcaagttccactctagtaaactgagccccgagcaagtgaaactgttcagaaggattgagcatgagagggtggacaaacagctagacggttatgttcgccagtgctcaaaaatgaaggtcaaatgtgagaaactagtttttgagaaggacgacgttgtggccggtctggttgaactcgtcgtcttgcataaagtcactaggctagttattgcagctgctgcagacaggcaatattcaagaaagatggatagacccaagtgtaggacagcaacagaaatcatgcagagagctgatccatcgtgcaagatctggtttgtttgcaagggacaactgatctgtaccaggggtgtggaagaggaggttgcgccatcagctacaccttttgtccctgatgatcttgatcaccaggctctgcagttagtagtgtctcaccagaaagaggacgaagctaagtcggagctggggttatacgatgagctgaaagaggcatgcatagcagctgagaacctgatgaagagagccctaaacgaatcttccaggcgccaaaaggcagatggagaagtggcctccgcgcttcagaaagcaaaggaataccaggagttgtactttgaggagacgaggaagcgtgaagagctcgaaggagctcttgcaagagcgcaccgagagatcgcgcggttaatgcaggcgaagcaggtgttcgtggtcgagcgaaacacggcagcggacgaactccaggaggccatgtcagagaggtcgtccctggaaggccacgacgtcgacgaggatgccgttttgcgaacagccggcggtcaagcgactgagcaacaggaggaggaggaggagcatgtccagacacaacacgatctgggcaccggtgaaagggacctggaactggaagcgcggctcaaccagagcaagctggccgcgttctcgccgtcgtccgtcatccagtcgccgtacgacgaagaccgcgtcccggcctgcttcctctgcccgatccttcaggtgtgggtgcttgcattgcatcctccgcaggcgctgagtacagtgcatgcttggcgctcttgtttgaatgtcgttgaattcacgtatatgcaggagcccatgagggatccccacgtcgcggcagacgggttcacgtacgagggcgacgccatcagaggctggctggacggagggaacggcgcctcccccgtgaccggccagccgctcgcgcaccgggagctggcaccgaatctcgcgcttggcgccgtgatccaagattacacggtgatgaggcggcggcagtgccggttctgcgattcgcacgacggcgttgctgcgcttcaattttttccatcgcctgtgggctgccagcggtga

SEQ ID NO: 21586 - DNA, 636 bp, Zea mays
  Peptide Sequence Number=SeqID_63365
atgagtcaagaagagactacttcatcaagatcatatgcttttgcatgtgatgagcacaaaaagatgaaagacaacaagaaggctcaaaactcaagttcctcaagtgaagaagaggaatatgaagaagaagataatgaagaagaaggtgatgatgataaacccactacatcatcctccgaggacaaagaaatagttcaatgcgttagaaaggtaatgaggatgattcacaagattaatctaatgggtgtgcccctacatgtagaagatattctctttaacattgacgagaaagaacaaagaaagagaggatgcttcacttgtagggagaatggtcacttctgggataattgcctaaataaggtcgtaccaaagaagagaaggatcaaaggcaaagctctcaccactattagagcttgggatgattcttcaagtgaaaatgaacctccaaggagccgtgaccattactcttcattgtgctcttcacggtcatttcacagattccttatggcaagaggtaacactaacaacctatcctctagtgatgatgataacgatagtgatagctacgatgataaaccctttgtagatgagcttgtgcatttcgttaattttgttgaggatgtttgcactaaataa

SEQ ID NO: 21587 - DNA, 189 bp, Zea mays
  Peptide Sequence Number=SeqID_63366
atggcttcacccatccatcgccgagtggcatcgggtgactacaaggtcacatgggaggtgtctgtggtactgccatgcaaggaggggtctcgagccatgggtaattgctcaccggagcgagagcaccgccacaaatccgccccgccccatggccagtactatcgctaccgcgattcaaggttaacttga

SEQ ID NO: 21588 - DNA, 564 bp, Zea mays
  Peptide Sequence Number=SeqID_63367
atgtcgcgcgacccacgtgatcgacacgcgagacatgcgcgagcaacgcgcggcgagacgcgcgacacacgtgaaaggcgcgtgacaacgcgtgaatggcacacgcgatgcacgcacatgaccaagaagagggatctatggcagagaaggaaggggctggctgggcggtttcaccgctgcgcaggggcgtggggggctcggcgttgccggctggccagcctgccgcggcgagacacagacaacgcgaccacgcaggggaatgcaggtggggaatcaccattgcaggggctagagcagggctgtgataggggctcgaccgggaggaaatcgagcggagctgggtgccgcacctgggcaggggatgagacgcacagcaggggcgggctcagggagagaggagatgggtggggcttcacgatgggaggcagcgtcgccaatggctactcggagcatggcgatgcgaggatctgcaggggccactcgacaagggaagggctgggcagggggcgtcgtggctacttgatagtggagctccccagggcgctggccgccggggctggctag

SEQ ID NO: 21589 - DNA, 474 bp, Zea mays
  Peptide Sequence Number=SeqID_63368
atggcccgatgctcgcccgcgaggaaccacgccttctggtgcacgacgacgtacgtgtacacctgggacagcgtgttcgcgacgcctcagaacaccagacaagtacatgggtgtcggcataaggatggcggcgccagtgaacgtgcagtcgcgcacttcgtcggcctccccagccaaagtcgtcagatcgagtgccacgcacgcgacgcggggtgggtgcgaggaggtgcgtggggagggggcatgggcgagcatcgcgacgatgatgctgctgcgtcacgggggcagaggcagggcaggcgaggctggttgtcgcggctgggagagagggtggggcatgtcgtggacgccgactatggaagtggggtgtcgaagatggaaactccacctatggatcgtcgacgatgtgcgaggatcgaaggtgggcgtggttggaagggggcggggatcacagtgtggcatgcagtgcgatga

SEQ ID NO: 21590 - DNA, 435 bp, Zea mays
  Peptide Sequence Number=SeqID_63369
atggcgaacaacaataagtcatgctgcttctccgggagctctttgagttttgagcttacattcagatcggatacctttgtcctcagaagtagaatagcttggggcggcgggggcgggcgcaacggtcgcagtgggtcgccgggcttgggggcgccgccggggcggggcggaggcgccgacgggcgggccggctggggcgtcggcgggggcaccggcggtgcgggcacggcgggcggggccgggacgaaagctccagcgggcgtggctgggggcgggagctccggcggacgggcctcgagcacgctctatggtaggtggaagaaacgggagagaaaggaaagtgagagaagatctcaagcacgctctacgataggtggaagaaacgggagagaaaggaaagtgagagaagataaggttgattcgctggttaaataa

SEQ ID NO: 21591 - DNA, 2994 bp, Zea mays
  Peptide Sequence Number=SeqID_63370
atggagaacggcggtggcgtcggtgaagggcgctcggagaatcgggcgggcgagaacggcggagtcgccgaggcagccactgcggcggatgagggagattgtgatgtggtggtggagggcggagatgaaggggacatgccgcccggtgcggtggcggcgggcgatcaccagccaatggtgacgccgaacaccagagcggtgctggaaacaggacagcttgcggcagacaagtgggacgaggacgatactccccgtttcattgacgtggaggaaagctttgccgatgatgtgaatcaagatcacgtggaggagaatgccatggggcaatcgatcagggaatacgtgaccgcagctgttttggctgatcgtaaaaaggagaggttagacaaggaccataacttttttgcaactcgtgataacaaggctgaggtcgctgcacaatctgggagcgagtatgaagatgtaaaagatggtactttggtgtatcaaagcaaagagcagccagggacgagcacggaagatattgcttcctcacatagcaggccagggacagtcacacattctgcagctgagcctgctgttgccattgaggaattggatgactcaagctcctcagctgatgagaataccgccacctctgctcctcctgcacaattctcaagcggtagttctacacctgcgcaatccagcagtgctgcttctgctcgttctactaatggtccctctttgccatctcgtcctgctggccttggatcatcgtcttccctgtcacagcctcctgctcgttctgttcaacaggtccatgccaacaggccagccattgtggaaaggggaacccagggggctactgaggatgatggagacgagaatgatgaaatccatgaaaagcttcaaatgatccgggttaagtttcttcgccttgctaacaggtttgggcaaacatatcataatatggtcgtttcacaggttctgtaccggcttgggctggcagaacaacttagaagaactacttctaatgggtcatttagcattgaccgtgcaagagacatggcagaacgccttgaagctgctggaaatgcgccccttgatttttcatgcaccatcttggttcttggtaaaactggggtcggtaagagtgctaccattaattcagtttttgatgataccaggttggatacaaacgcttttgattctagtactaggaaggttcaagaagtagttggtatggttgagggaatcaaagtgaaagtgattgatacacctggactttcctgctcatctttagaacaacaccgcaaccagaaggttctcaactctgtcaagagacttattagcaaaaaccctccagatattgttctttattttgataggttggatatgcagagcagggacaattgtgacgtccctctgctgcaaaccatcacaaaagtgtttggagcatcggtttggtttaatgccattgtcgtgttaactcatgctgcatctgcgccaccagatgggcagaatggaattcctctgagctatgagatgtttgtcacccagagatctcatgtagtgcaacaagctataaggcaagctgctggtgatgtacgccttatgaatccagtatccctcgtggaaaaccactcagcatgcaggacaaatagggctggccagagggtattgccaaatggacaagtctggaagccacagttactgctgctttgttttgcttcaaaggtgttagcagaagccaatgtgctccttaagttgcaggatagtcccattggtaaactttctcgtacaaggattcctccactgcctttcctcctctcttcccttcttcagtctcgtgccccactgaagttaccagaggagcaatttggtggtgatgatgatgatcttgaagatgatttggcagatgattctgattcagatgatggttcagattatgatgatttacctccatttaagcgtctcacaaaagctcagcttgccaagctgaacagggagcagaggaaggcctatcttgaggagctagattacagagagaagttgttctatcaaaaacagctgaaagaggaaagaaaacgtcgtaaattgatgaagaaaatggcagcagaagccagtgctcgtgcaaatgatttcagcaacagcaacctagaagatgatgctactactccaactaatgtttcagtgcctatgcctgacatggtactgccctcatcttttgattctgactaccctagccatcgctatcgtttcctggatacaccaagtgaatggcttgtcagacctgtattggaaacacagggctgggaccatgatgttggttacgagggacttaatgttgaaagattgtttgccgtaaaaggtaaagttcctctatcagtgtctggccagcttacaaaagacaagaaggattgctccctgcaaatggaggttgcaagttcaattaagcatgctgaaggtaagactacttcacttgggcttgatttgcagtctgtcggcagggatatggcatacacaatccgtggcgaatcgagatttaagaacttcaggcgcaacaatacatctgctgggatatctgctacgcttcttggggattcagtatcagctggtatgaagattgaggacaaactgatagtgaacaagcagcttagggtcctggttagcagcggggccatgagtgggaggggagacatggcctatggaggccgccttgaagcaacgatgagagacaaagattacccgattgggcggatgctttccactgttgcattatctgttgtggattggcacggggatctggcaattggctgcaacatccagtctcagatccccgctggaagagctagcaacttggttggccacgctaatctaagcaacaaggggactggccaagtcgggattcgcctcaacagctcggagcatcttgagatcgcactcgtggccctcgtgccgatattccagaacatcatgaagctgttacagaattactcggaatctggctag

SEQ ID NO: 21592 - DNA, 501 bp, Zea mays
  Peptide Sequence Number=SeqID_63371
atggggaagctccgcctcgcccgacctagggctcggactcagcctcgaccccggaagacgaactccgcctcgcccgaccccagggttcggactcagcctcggcctcggaagacgaactccgcctcgcccgaccctagggctcggactcagcctcgacatcggaagacgaactccgcctcgcccgaccccagggcccagactcggcctcgacctcggaggagcctccgcctcgcccgacctcgggctcggacctgccacgtcatcgggaaggccatcattaccctacccctagctagctcaagctacgggaaacaagaccggcgtcccatctggctcgccccgggcaacacgaaggccacgggtttccccttttgcctttctcttccccccttcgtgctccgtctcgcgccgacccatctgggatgggacacgcggcagcaatttactcgtcggtccagggaccccccagggtccccttccgacagttggcgcgccaggtag

SEQ ID NO: 21593 - DNA, 867 bp, Zea mays
  Peptide Sequence Number=SeqID_63372
atggggacgctcatccggccggggcccgccgcgtcgcctctccccatcgcttccccctcctcctcatccgcccacggtatcgccgactcgcctctctgccggcctgtctctccggggggaagccacgccacggcgctgatcttatcttatgatttattttggttggtccgtagtggctgtcgttggcggtggcgcgaggagcttgcggcatcgggtgtcggtgtcggtggcggtgttccggtccccgagtacgcaggttctggcgacgagatggcgccgccggagaggcgcgtagaagaatcaatagatgcaggtcagcaattggcttcaagagtcagaggggtttgcttctatttggtgactgcagttgcagcaatctttttgtttgtagctatggttgtggttcatccacttgtgttgctatttgaccggtaccgtaggagagcacagcactacatcgcaaagatttgggctacggtgacaatctccatgttctacaatcttgaggtcgaaggaatggagaatctgcctccaaatagctgtcctggtgtctatgttgctaaccatcagagcttcttggatatttatacccttctaactctagggagggtgggcaatgtatctcttgggtgtgattcctctgcggcgtatggacagcaggagccagttgacactatatttcaatttgcattccatgttctgcataacattggttttggaaatgcaggattgtctcaaacgcgtggcgcattcagtgtcgccgcaaagacaggagctcctgtgatagctattactcttatcggaactgggaaattgatgccttctggaatggaaggaattctcaattcaggttcggtaaagatgtaa

SEQ ID NO: 21594 - DNA, 1125 bp, Zea mays
  Peptide Sequence Number=SeqID_63373
atggcaaaaaagcgacgtctatcagaaaatgcacaaactgctttgagtaatggtggtgatgatccatttgcatttgatgataccgatcaagaaccttcaaattgggatccatttggtccaaaaaggaaatcaccacagaagcgagcgaaacgatctaatggtgaactagtgctggatgattgtgacactgcagtaacgggaagtcctgaattatgtcaacctgaaggtattaatcagtcaggtgcaacttctgattctaaggctgcagatgagtccaaccttttagaagattgccttttggcatcagttaaggttcttatgaacttggcaaatgacaacccttctggttgcgaacaaattgcgtcatgtggtggaattaatacaatggcctccttgatcattaaacattttccctcatttgatttctccatggacagtaacaatcaaatgaaagaaagagtatcctctggtgatctgtcgtcttcccagaacagcaagtcactccaaatcaaaactaagcaattgcgagcctatgaacttgattttctggtcgccatattgggattgcttgtcaaccttgtggagaaggataaccttaatagggtacgacttgcgaatgcccgtgtttctgtcaatctatctcaaagtccagatactgaagaggtacagagggatgtcataccccttctctgttcaatattcttagcgagtcaaagtactggggaaactgctgaagctatatcaccgggaaaaatatgtagcctaaaccacatcttcggtggaaacatggaaatatactcaaaactcatacttagaacttggctcatccataatgcaagcatgaaccatagatgtactttgtcgtacaggtctcatttaaaaaacaatcatgtgaaaacagaaattcaggttgaggcccactgcgggttagcttctgagctgtatgtttgctgccacagtatgaaggttcgaggagccatttccagctgccttccggacaacaacttaaaagttcttgtaccagtgctagagaagtttgtgtcatttcacctgcagctcaacatgatgacaagggaaacacattcagctgtcaccgaagtcattgaaagatgcaggcagtcatag

SEQ ID NO: 21595 - DNA, 600 bp, Zea mays
  Peptide Sequence Number=SeqID_63374
atgttcaaagtggcttgctttgttgacaatggaaaaagggcgtgcttgtctgctgttgcattagaggatacatctgagatggtgttgaaacttggaggaaattttaaagaaacattaaggcagtcgggtggccttgataatatttttaatgtcatggtgaattgccattcagagctggagaaacttgtaaaggatgcctccactacggatgtggagggaaaggaaagagctcctctgcaaagcgctgcactcctcttgaaatgtttgaaaattttggagaatgccacatttctaagtgacaacaacaagccctctctcttcttcagaaaccttccactgtttcaagaaaagcagacccaaaaaatactaaagtttgcaatggggcttgctctggatctatgtaccatctggtgttatgtcaaggacctctggtccgagggtaactggaccgcgactacggagatcgtagttgcgttccgtggtcgccggcggggttattcccccacgccgtcgccctttgctgtctgggttatgcccccaagacgccgagttgagagagttggggaaggggagattagattggtgatatattctgcataa

SEQ ID NO: 21596 - DNA, 1332 bp, Zea mays
  Peptide Sequence Number=SeqID_63375
atgggtcgacacccagttgccgacggctccgatccaaccggagctctggaccatgtttttcgacgggtcgctgatgaagacaggagccggcgcgggcctgctcttcatctcgccccttggaaagcacctgcgctacgtgctgcgcctccattcccggcgtccaacaatgtggccgagtacgaagctctggtcaacgggttgcggatcgccatcgagctaggggtcagacgcctcgacgcccgcggtgattcgcagctcgtcatcgaccaagtcatgaagaactctcactgccgcgacccgaagatggaggcctactgcgacgaggttcggcgcctggaagacaagttcttcgggctcgagctcaaccacatcgctcggcgctacaacgaaaccgcagacgagctggctaaaatagcctcggggcgaacgacggtccccccggacgtcttctcccgggatctgcatcgaccctctgtcaagatcgacgacgcgcccgagcccgaggcgccctcggctcggcccgaggcaccctcggctcagcccgagaaggcgcccgggggctacacgcacctgctggtcgccatcgacaaattctccaagtggatcgaggtccgacccctgaacagcatcaggtccgagcaggcggtggcgttcttcaccaacatcatccatcgcttcggggtcccaaactccatcatcaccgacaacggtacccagttcaccggcaaaaaattcttggatttttgcgaggatcaccatatccgggtggactgggccgccgtggctcatcccatgtcgaatgggcaaggctcaagcctcagatctacaacgacctcaaacaagttcggcaagcgatggatgaaggaactcccctcggtggtctggagcctaaggacgacgccgagtcgtgccacgggtttcacgccgtttttcctggtctacggggccgaagccatcttgcccactgacctggaatacggctccccgaggacgagggcctacaccgaccaaagcaaccaagctagccgagaagactcgctggaccagctggaggaggctcgggacagggccttactacactcggcgcggtaccagcagtccctgcgacgctaccacgaccgaggggtccggtccagagacctccaggtgggcgatctggtgcttcggccacggcaagacgcccggggaaggcacaaactcacgcccccctgggaggggccattcgtcatcgccaaagttctgaagcccggaacatacaagctggccaacaatcaaggcgagatctacgacaacgcctggaacatcaaacagctacgtcgcttctacccttaa

SEQ ID NO: 21597 - DNA, 702 bp, Zea mays
  Peptide Sequence Number=SeqID_63376
atggcgcctcctgtgacgtggtcggtccgagccctggggttgggcgaggtggaggctcctcccgaggtcaaggtcgagtctgtcttccgaggccgaggtcgagtccgagcccctgggtcggggcgaggcgaagaccgtcgggctgaggccagggctgagtccgagccctggggtcgggcgaagcggagttcgtcgtccttcggggctgagctcgagtctgagccctggggtcgggcgaagcggagttcgtcgtcttccggggctgagcccgagtccgagccctggggtcgggcgaagtggagttcgtcgtcttccggggctgagcccgagtctgagccctggggtcaggcgaagcggagttcgtcgtcttccggggctgagcccgagtccgagccctggggtcaggcgaagcggagttcatcgtcttctggggctgagcccgagtccgagccctggggtcgggcgaagcggagtttgtcgtcttccggggctgagcccgagtccgagccctggggtcgggcgaagcggactttccgatggcgcctgaggccagacttggctgctgtcagcctcactctgtcgagtggcacaacagtcagagcggcgcaggcgacgctgtcctcttgtcaggccggtcagtggagcggcgaagtgactacggtcacttcggctctgtcaactggagggcgcgcgtcaggataa

SEQ ID NO: 21598 - DNA, 522 bp, Zea mays
  Peptide Sequence Number=SeqID_63377
atggcgccccgcacgctctatgacgacagcggctctcagccccttacggaagcaagaggacgtcagcaaggacacgacagccccgacagctatccttccgccaggctctggcgctcctccgacggccacgacatcacacgaaccgggtgccaaaacctctctggctgccacgatggcatgtacttagggcgctggctctcctccgcgtcttccccccaggactcacacagaggcggcgcctccccacgcccacggtggccacatcgccggcgcaacccaaatacacgcactggctcgcccacgctacgcggcgacgtcgcaagcccagaaggtatctggcttcgacctggcccaatcccaggtgcccgaggaaggcggcagtttccagtcgccgttctgttcggagagcttggtttcaccgaacagctccaaattccgcgcgacgcgcgcggcatgatcgggcatggatcggcgaacgagaccgagctgacaatatgggtccacgcgtctgagaaaagggag

SEQ ID NO: 21599 - DNA, 261 bp, Zea mays
  Peptide Sequence Number=SeqID_63378
atgacaaagttttatacaaaattaaaagaaaagcgcaaggctttggaagaggagaaactccaagcagaggccaaaaagtggaatttattcaaccaagctatcgagttatctgctgaaattctagcaaatgtgaagttcattcaagtgaagaagttaattggcaagaattttgaagagatcagccaggatactgggaaatatgtctttggtgttgatgacactctgaaggctcttgaaatgggtgctgttgagacctggtag

SEQ ID NO: 21600 - DNA, 219 bp, Zea mays
  Peptide Sequence Number=SeqID_63379
atggcgaacacaacatgtgggtccttacccgtgttggtgttgcgacgaactccgctaccgcagcgctgcgacatcgaggcggaaggcatgaaccagagggggcgtttaaatgggcccagcgggcataatggagaagtgggccgcaagaggaattcagccgaggcacaggtcaagttgtatggccgagttgatctaagtcaccaatttaggcttaagtga

SEQ ID NO: 21601 - DNA, 324 bp, Zea mays
  Peptide Sequence Number=SeqID_63380
atgggtgtgggcaagggatggcttgacgactcccaggggcttgccgcggaggtctggacttacatccggaccgtcgagcgctccgggctcgagggctcggatgagtcggagtactcctcgggcgaggaggactcttcggactcgtccgaggagggcggtggcggcgatggcggagatgacgacgacggaggcgacggtgacgatggcgacgatggcggtgacggcggcagcgggggcggcaacggcggcagcaagggcggcaacggcagcagcagaggcggcaacggcggcagcagcaagggcagcaacagggccagtggctag

SEQ ID NO: 21602 - DNA, 177 bp, Zea mays
  Peptide Sequence Number=SeqID_63381
atggcgcacaagtatgaagacagatatcaccgtgcagttgtattgggatgcaacaaggagattggaaatgatgagcagactggcattcttagaaaccagataagtattgaatctgttatggacaacatgttttgtttcacgtatgaactaggtattggactgctgaaactgatatga

SEQ ID NO: 21603 - DNA, 624 bp, Zea mays
  Peptide Sequence Number=SeqID_63382
atggaagagaggagcacatatgctacatgcaggaaattcagcaccagctgtactaacttgctggagtcaatttcacagtgggcaggcctggttagctgtgacatggcaagcaggctgcagggtttgcctttattctggcacggtgaactctcgtggttcttcaatttgatggtctggagttcttccaggagcttcttcggcgtggaggacttcgtggacgaggacaacagtaggccatacacgtacaagaaggagaagaggtccaagaacccccacaagcacatctcgttcaagcagcgcaccatcgcccacatggagccgttcacgctggacgtgttcatctccaagcgcttcgtctcggcgtccctcacgcaccggtcgacctgcaggcaggtcgcggtcgccgggaccaactccaaggacatcaaggcggcgctcaggtcgaggtccgacgtgccggcctgcctggccgtcgggcggttcctggccgagagggcgaaggaggccgacgtgtacacctgcacgtacacgccgagggaacgggacaagttcgaggggaagatcagggcggttgttcagtcgctgatcgataacgggatcaatgtgaaactttaccttgactga

SEQ ID NO: 21604 - DNA, 1191 bp, Zea mays
  Peptide Sequence Number=SeqID_63383
atgcagaagcgctggaagccgagagacgccgctgccggtgctttcagcatggcgctggagctggtggacgacgaggacgacgcggcgccgccggcgataccgccgccgcagacgccgctggagcccatggagtacctctctcggtcgtggagcgtgtcggcgtcggagatctccaagatcctcgtcgccggaggcaacaagcccagcagcgttgccgccgcggcgtgccgccttccggaggcggctatgtctataccggagcaggcgcctgtgctcgccacgtcctccaccgtccatctcccgtctcctcagcagcatagagatgcgaggaggtactccacgagcggcggccaccaccaatcgatcggcaggtggttccagcaggctcaccacagggaaacgtgccgggcgaagcagagcggcaaggagaagcagcgcgccgagaaggcccacgtgcacgccatggtgtccgtggcccgggtggcggccgcggtcgccgccgtcgcgggctccggcgacacccagacccaggccaccaagatggccagggccatggcgtcggccaccgagctgctagcctcccactgcgtcgaggcggcccagcacgcgggcgcgcgccacgatcaggtggctgccgcggtgcaggccgcggtcggcgtcggaagccccggcgatctggtcacgctcacggcggccgccgcgaccgctctgcgaggagcggcgacgctgaagcagagggtgcagcgagagacggcgaggagcaacgcgagcgtcctcccgtacgagagagggagttcgtggagcccggacatctggtgcaaggagggggacctgctgaaacgcacgaggaaagggggtttgcacaggataagagtatctatctacatcaacaagaggtcacaggtgatactgaagctgaaaagcaaacaccttggaggcgcgctgtcaaagaacaacaagagcgtggtttacggcgtgtacagcgagcttccgacgtgggctgggaagggctccgtagaggagacatgctgcttcggccttagcaccgcgcaaggtctcgtggagttggagtgcgagggcagcgcgagcaagcggaagtgggttgacgacgtgcagagcctgcttcgtgaggcggctctgcatggccatggtcaagtagggaatggaatgggactagtaaaactcagctag

SEQ ID NO: 21605 - DNA, 993 bp, Zea mays
  Peptide Sequence Number=SeqID_63384
atgtattgcctgttggcaaacgatccacgctatggcctatggagcgacgacaaaggtggctccggatcctccacctcgcgggaggagcaggagctaggaagaagcaaacaagcaggccgggggccggggggagagacagagttcacaaaccacacagggaagagtggtggaaggaggaggaagaggggggagtgcgcgtgccgccacggccacgggatcggcggcgcgcggtgcggcggggtcgtcgctgtcgccgacctcaaccgcgggtttcctgcgttgtggcaccagccggaggaggaacccagtggcgctggcgcggcgccggggctgcacgagttccagttcttcggccacgacgaggaccacgacagcgtcacgtggctgttcaccgacccgtctccccacctgcaccgcgggccggcggccgccgaggtcgggaacggggtggccgaggctgagcagcggaggccgccgccggtgttcgacggcgggtacgcgcacgcacagtacggggagctgccgggtcacggcctcacgttcgacgtgccgctgagcggccgacgcggcggcgaggtggcctccgtggcgccggttctggaggcagggctggggctaggcggtggcggtggcggcgatctggccacgtcctccagcgccacaatcatgtccttctgcgggaccacgttcacagacgcggcgagcgccgtcccgggcgacgcggccgcagcggcgcccaacggcagcgcaagcggtgccgccgacccggcagtggaccgggaggcgaaggtgatgcggtacaaggagaagcggaagaggaggcgctacgagaagcagattcggtacgcctcccgcaaggcctatgcagagatgcggccgcgcgtcaagggccgcttcgccaaggtgcccgacggtgaggctccgtcgccaccggcgccggccgcagcatgctacgaaccaggccggctcgacctcggatggttccgttcatag

SEQ ID NO: 21606 - DNA, 2568 bp, Zea mays
  Peptide Sequence Number=SeqID_63385
atggcggcggaagcggacgacccgtcgctggcggcgaccctggagaagttccgcctctacgagacgcgcgcgaggttctacgtgatcgggagctcgcgggagaagcgctggttccgggtgctcaagatcgaccgctccgagccctccgagctcaacgtaagcgaggaccccgtctggtactcgctgcaggaggtcaagagcctcctccagcggatcgacgagggcaaccgatccaccgggggcctcgccttcgtcaccaaggcatacggcatcgcaggttgcatcaagttcctggagtcatactacctgattttagtcaccaaacgccgtcaaatcggttgcatttgcgggcatgctatatattgtatagatgagagccagatgatcaccatcccacactcatcagtgcaaacagatgttgcgacctctaagaatgagctgagagccctgcaacagagtgttacttctgcagggatgaaagaaatgccttatgaaaatttgtttgtctggaacacttttctgacagagccagtacgttcaaggtgccacaatactctctggacagtagctcttgtccatgggcacttcaagcaggtcaagctatcaatttttggcagagagataaatgttgttctcagctctagaagatcccgacacttcgccgggacacggtatttgaaaagaggtgtgaatgaccatggaaaagttgctaatgatgttgaaacagagcagatagtctttgaagaagaggctggttcctggaagggaagaatgagtgccgtagtacagatgcgaggatcaatccctctcttttggtcacaagaggcatctcgacttagtcctaagcctgatatttttgtgcagagatatgatcccacatatgaagcaacaaaattacattttgatgatctcgcccggcgatatggacatcctatcataatacttaatttgataaagactgttgaaaaaaggccacgtgaaatgatgctcaggcgtgaatattgtagagctgttgaatatcttaatcaaaatgtcccagaggagaagaagttgagattcatccactgggattttcataaatttgctaaaagcaaatctgcaaatgtactgggtgttttaggaaaagttgcgggtgaagcactggacctcactgggttttactacagcggaaagccaaaagtccagaaaaaaaggttaattcagcttagtcgaactagcactgcaagggatggctcccttgatataagggccagttctggagatctttcaaggctcagggatggctcccttgatataagggccagttctggagatctttcaaggctctctagtaatgctgaggcacttagttctacaggctttcaagatatgagaaatcaggctaacaaacagagtttcttggtgatactccctgttaccaaactggagtgctccgtacaaaattgcatagattgcctggatcgcacaaatgttgctcagtatgcatatggccttgctgctttggggaggcaacttcatgcaatgggactgacagatgttttaaaaatccaccctgatagcagcattgcttctgctttgatggaaatgtaccagagcatgggtgatgcacttgctcatcagtatggaggatctgcggcacataacacggttttccctgagaggcaagggaaatggaaggctactactcagtctcgggagttcctgaaatcaattaaacggtattacagtaatgcctacactgatggtgagaagcaggatgctataaatctttctgcacctggaaataatgtgttcgtggggtctggagctgcattgaaccctgggaccatattgagccctgtcccagcatgcaaagaggatttctcacggaagaagcttacttcgttcgacaaacttatagaaagaacatgtagttctataaggaatgtaaggcttcattgtgacgctgatctaaagccaagtggaggtgttggaacttctggaatggcaccagatgcagcgatccatttatggttcagtgagatacagcttaaaagccccaactggttgtttggtcaaaggaagcatacggagacaatttcaaccgcaagagttgccccggttgaaaacgtgaacgaggggaacagagacgagtcaaatgtgtctctttgtggggaactaatttggctatcctcctcagttgaatcatgcgaggaggacattttcagaaggtaccttgcattcacgacagcggatgtagagaatggctggtatggcggaacactgctatatgaccgagatgaaaacagcggggcttacaggcactattctgagctctgccagggagctgtcatggatccctttgagcatgaccctgagaaagagcggcactacgcggaggcccttagcgtggatctcggcgatgcacgggtggaggccgaaatgcaggccgcgctggatgactaccaggtcatagggtcggacctgagcatcatcccttcgtgcggagcactcgcagaggacccgagccagctgacgaggtggatcattggagatgagaggctgcttgtgggtgctgctgcgcagtag

SEQ ID NO: 21607 - DNA, 411 bp, Zea mays
  Peptide Sequence Number=SeqID_63386
atgcaggaatcccttgcaggaccgccatcgcagcaaaatcctcccgagggcctccctacactgaccactcccctactgcccttgcccctttcgggtaagatgacacgtgtcctcgcgctagtcgtagcaatacaagcaaacatgggctatggcagctaccggataggagatgcctctgttcctatttataacccaaagaaggtgggctggcgtctggctggcaagcccgacggttacggaggctacaaggatctgggtgtgggccgccgtatgagaaacatggaaatgagtgggccgacaccaccatacgtgtggtgttctggcattttgggtaacatgggcagtcaacagatcactcttttcatccacttttccgctattgtcacattcagtttggcccctgtcaactga

SEQ ID NO: 21608 - DNA, 534 bp, Zea mays
  Peptide Sequence Number=SeqID_63387
atggccggaggtacgactgctaggggcaatggtggtaagggcagcaagggcaagggcgctaagaggaagtgccctctgacccctctgtcgaagtctttcgatgactcagagtaccccgaggagtattccgggttcaacagtgagagcgctctgcctcgttctcctacctcatcgatgatcgactccgatgactccctagggcttaccccagtggagtggtcctttattcgggtggtggagcactccggcctttcctgcatggatgagtcagatgagagcgaggaggaggatttcgaggtagaggagggggaacaggaggacgaggattgtgatgccgatggaagcattgacgtctctgatgaaggcaccaagggcggcaaaggcaagggtagcaaaggtgagggtggtggcaatgacgaagatgacaatggcgctggtggcagcaacggcataggctttagcggcagcgacagtggtagaggtgacaacagcatgggtggctgcgctggtggcgaggcgcccccagcttatata

SEQ ID NO: 21609 - DNA, 312 bp, Zea mays
  Peptide Sequence Number=SeqID_63388
atggagcatgtggcaaggctggcatcgcagcgtgcagtggtgatcttcagcacgagctcctgctgcatgtgtcacactgtgacgcagctgttccgcgagctaggggtgaacacgatggtggtggagttggacaaggacccgcgggggaacgagatggagaaagggctggccaggctactgggccgcagtgccggcgtaccagcagtgttcatcggcggcaggctcgtcggctccacggacaaggtcatgtcgctccatctcagcggcaacctcgtccctctgctgcgcaatgccggggcactctgggtctaa

SEQ ID NO: 21610 - DNA, 405 bp, Zea mays
  Peptide Sequence Number=SeqID_63389
atgactatggtaatggacatcacttgtcaagataaaggatggacattgattatggtgttggagctcatagatagctataatggtcaagtcgtggagacttggagttttggagtccaaccccaaccacaaataggccaaaaagggcaaaacaaggttaagtatgcaagggatcttcgaacaaaggcccacggtgtgaagaagcacggaaacaacacggaggatggagcagagccgaagttaaattatgttactttctgtactttgtttgaatgttctccatcttttatcatgatcatgaaggtgcaagagactccaacttgtggagatccttgtgaggagattgatcttgatataaggaagaccgtggcactcaagtttgatttttcatcacttgagaggggttga

SEQ ID NO: 21611 - DNA, 345 bp, Zea mays
  Peptide Sequence Number=SeqID_63390
atggcgcagttattggcgaagattgaggaagggaatctaaaagcatctaggcccctgggcaccctcgaggtctcacgcctccagtttggatcatatcgtccagcccctgaggacccagccccagtgccagatctagtgccagacattcaggctgaggatgaggcgttccgccagttcaagacccagggtacaactactgatgatgctgctgttgatgatgatgactttgggatcccgccaccgcctcctatgcctcatcgctcacatgatcatgaggccgggagttccagtgctgcccctgctacccctcctgctattgatcctgctttggctgcgatactctag

SEQ ID NO: 21612 - DNA, 549 bp, Zea mays
  Peptide Sequence Number=SeqID_63391
atggagataccagcagctcctgagattatggcagccatggatgttgcaaagaccacaatcaaggattctttgaaagacgaaccaagtttacttaaggagttctttggtggggtgggtgcatatggtgccctgacatatgagctccaacgtttagcaaaaagaattgttagcctttgttgtgctgcatctaaatacaagtgtaattggagtgaattttctcatggaagtgttgggacagaagcatctaaggaagacagtggctcaaagatattgatgaggaatataatgatgaagaccaagatcagcatggagaatctgattcagcaacagcaatggaagagaatgaagaatctattcatactgcccatggatcttgtaatacccaacttttataaagaagtggagttaataccctatatgaatgcgcttgcatttgtgatcacatgtaaaataataggaaaaaaattgccaaggcctaaggaggcccacgaaggggctgcgacagcagcagccatgggccctccaaggggattagataaagatagttag

SEQ ID NO: 21613 - DNA, 159 bp, Zea mays
  Peptide Sequence Number=SeqID_63392
atgggtgcggacaccttgctatggagcggcggcgagcctggctccgtcgagcggcggtgccgcggggatggggagtatgtgagggagccgccctctggattaaagattgatcttcccttcttgggtcttggtgttgtcatccgagttagggacatgtag

SEQ ID NO: 21614 - DNA, 201 bp, Zea mays
  Peptide Sequence Number=SeqID_63393
atgggcgtcagtgcggagcccaaggagcaggcggcgtccgccgcagctctggcggtggaggacgaggcgggcgggaaggaggacaaggcggccgcggtgtcctgttcgatctgcctcgacgcggtgctcgccgcgttcggggagcggtccaccgccaggctgcactgtggccacgagttccatctaggccaaggaccctag

SEQ ID NO: 21615 - DNA, 1713 bp, Zea mays
  Peptide Sequence Number=SeqID_63394
atgggctctttcctgaggaaacagcccagctacctcttcattttaataattctgcaccttgttgctcatgaggcaagaacactgagttcagatggcgaagcacttcttgctttcaaaaaggcagttacaaattcagatggagtcttcctaaattggcgcgagcaagatgcagacccctgcaattggaagggtgttagatgtgatagtcatagcaagagagtgattaatctgattcttgcataccacagattagttgggcccataccaccagaaattggaaggttaaatcagttgcaaaccttgtcattgcaggggaacagtttgtatggttcactccctcctgaactggggaattgtaccaagttgcaacaactgtatctacaaggaaattacttaagtggatacatcccttcagaattcggcgaactggtggaactcgtggcattggacttatccagtaatacattgagtggatctgttccgcattctcttgataagttgtccaaacttacatcattcaatgtttccatgaacttcctgacaggagcaataccatcttctggttcacctttgtcatttctcaagaagaactctcggggagggaccccaccccgggacgacatgattaacaaaaggaacgggaagaattctaccagacttgttataagtgcagtggcaacagtgggagctctcctattggtggctttaatgtgtttctggggttgctttctttacaaaaattttggaaagaaagatatgcgtggtttcagagttgagctctgtggaggctcttctgttgtgatgttccatggagacctcccttactcctcaaaagacatactcaagaagctagagactatggatgaagaaaatatcattggagcaggaggcttcggaactgtttataaacttgcaatggatgatggcaatgtctttgctttgaaaagaatagtgaaaacaaatgaagggctagatcggttctttgatagagaacttgagatattgggaagtgttaaacatcgttacttggtcaatcttcgtggttattgcaactctccttcatcaaaacttttgatatatgattatcttcaaggtggaagcctggatgaagtgctgcatgaaaagtctgaacagttggattgggatgcacgtattaacatcatacttggagctgcaaaaggcttgtcttacttgcatcacgattgttcgcctcgaataatacatcgtgatatcaagtcgagcaacatcttgcttgacggcagttttgaggcccgcgtatcagactttggacttgcaaagcttttagaggacgaagaatcccatatcactacaatagttgcaggaacatttggttatcttgcgccagagtatatgcagtttggcagagccaccgagaagaccgatgtctacagttttggggttctggtacttgaaatactcagcggaaagcggcctacggatgcatccttcattgagaagggattaaacattgttggatggttaaattttctggctggcgagaaccgggagagggaaatcgtcgatctgaattgtgaaggagtgcacaccgagaccttggacgctctgctctctctcgccaagcagtgtgtcagctctttgccggaggagcggccgacgatgcacagggtggtacagatgctggagtcggatgtagttacgccgtgccctagcgacttctacgattcagagtag

SEQ ID NO: 21616 - DNA, 561 bp, Zea mays
  Peptide Sequence Number=SeqID_63395
atgtcgctgattcgccgtggaagcgcattcgaccccttctccctcgacctctgggaccccttccagggcttatttcccttcggctctggaagcagcagcagcagcagcctgttcccctcgttcggaggcaccaccaccagctcggagacggccgccttcgccggcgctcgcgtcgactggaaggagacgccggaggcgcacgtgttcaagaccgacgtgccggggctgaagaaggaggaggtgaaggtggagctggaggacggcaacgtgctccagatcagcggcgagcgctgcaaggagcaggaggagaagacggacacctggcaccgcgtggagcgcagcagcggcaagttcctgcgcaggttccgcctgacggagaacgccaggacggagcagatcagtgcgtccatggagaacggcgtgctcaccgtcaccgtgcctaaggaggaggccaagaaggccgacgtcaagtctatccagatctccggctacgtgtgttgtggctactgtgttccgaacgatattgaagtctcatccgtcgtgtatcagtgccgtctgtaa

SEQ ID NO: 21617 - DNA, 1368 bp, Zea mays
  Peptide Sequence Number=SeqID_63396
atgaggaaggtctgcccgaacctcgagcgcgacgacgcgctggacacggtgctggaggtgcccatccccgaggagatgttctccggcggcggcggcggcggcggcggctcctgcgggttcaggttcggctgcaccagcgtcaaggcgtggatgcggtcgcacgccgctgaccggtgcggcgcgggcgagccgtgctccatgagccgcggggagctgcagctcatgctaggcgtcatcggcgcgccgctcgtcccgctgcccgtcgccgtctgctgccgcgccgagcagtcgccctgctccgtcctctgcgagcagctcaagaccggtccaatcgagtcgtcgtccgccaagtacatcgtgcagcagtacgtcgcggcgtcgggcggggagcgggcgctggacagggtcaagagcatgtacgcgatgggcaaggtgcggatgacggccgcggagcagctcaacggcagcgacgccgccggcggccactgcggaggagccaccggaaaggggaaccgcggcgggaggaggaagggccgcggcggcgaggtcggcgggttcgtgctgtggcagaagaggccggagctgtggtgcctagagctcgtcgtgtccggctgcaagatcagcgccggcagcgacggaaaggtcgcgtggcgccagacgccgtggcaccagtcccacgcttcccgcggccccccgcgcccgctccgccgctcgctccagggcctcgacccgcagctgacggcgagcctgttcgcggactcggtgtgcatcggcgagcggagcgtcgacggcgaggactgcttcgtgctcaaggtggaggcggaggcgtccagcctgcgcgcgcgcaacagcggcagcgtcgagatcgtccggcacacgctgtggggctacttcagccagcgcacgggcctgctggtgcagctcgaggactcgcacctgctgcagatcaggtccggcggcggcggcggcggcgggagcatcttctgggagaccaccgtggagtcccgcctcggcgactaccgcgccgtcgacggcgtgaacatcgcccacgccgggcgcaccgccgtctcgctcgtcaggttcggcgactgccagcaggacggcagcagcgccaggacgcgcatggaggagacgtgggacatcgaggaggtggacttcaacatctggggcctgtccatggactgcttcttgccgcccagcgacctccgggaggggggcaaggagagccaggacgtcgccgtcgctgtcgccaaggccgatgcgcgacccccgccgataaggatacctgcggtggccgtgcgcgtcgggccctcgcaggtggctgccgtcagcatggacgactcggactcgctcatcgcgaggccatga

SEQ ID NO: 21618 - DNA, 2778 bp, Zea mays
  Peptide Sequence Number=SeqID_63397
atggcacacattgcatgggctgaagtactgaactatgggcggctgcgtggtcccttggcagttgcatattcttttctttatttcggaagtgactcaagtttttgggaagtgcggtttcctcaatgtctatttgaatcacagcatactgaactgaatcaagtgataattgtgttctggtcatacactaagatatacctgaaacttctgcttcatatgttcacacatcataaatattccaacaaaggtcagatgaacagcgaaaggaatgtgaagatcatatcaggtcgtgatgggcaaaagaagggaaattcacagtatggccaaattgtacacatgccaaaggacatggtcacaacagtcaatggaaacgtagatgcaaaatttgaagatgaagttagagttgtgaagaatgataggttccaaaggcaacgagagtcttggggtggggaatgcaagaagggctcaaaaccatggcctggtcgaaaggcagctactgttgatgaacttgttaaacatatgtcaaatgttccttcatatttacagcgtaaagaaacttctgaccatcttcaagacaaggcactgaatgttggagttcttgagtgggggcttcttgctaactggtctcagcaagaaaagcataagctcactagaagctatggaccatctccacccaatactagcaggtctgtactattcccatctccatcacattcttctccaagccccagcagcagatctcttgagagtaatcaatctaccccaatgagtggccatcatcattcatccatcagagcacagcagaataggctcacagataaacaccatgagagggccagatgtccacctagcccaaattctgcagtactgagcttattgtcaggtcatggcacacatccctgtccagagaacggtcataattatgttgggttgggtctcagcaatgtttctttagcctcagactctctaggttcttcctctagaagttgtggaagacatgaaatggttggagatgaagagactagacggaagactgaagacgttgtccatcattgttctcgtaggctttttgcagacagcgataacattgggaaacatttcttcgcatcaaataccaatgactccatgtgtaatgatcctgaacagagtattggcttgaatggggaaaattttgagtcactaacgtctgatgctgtaatggacacagctagaaatgacagtaagtcgtctgactatttactggaggatattgagccatcccttgaatttcctcgaatcccatattcatgtccacttcccatcatagattcagcagccaaagagattggcatcactagcactgaggctggagatgcaaaagtgagtaaaaattctaaccggaaccaatctgccatgaatgtcactgagaatcctccccaatactcagcaaagtttagtgataagatgccttattgtcatctaggttctgggatgaatcgagggagctgcagctctagcctcaaggagtcaccacatattcgacaacccaatatagttcctcctgtcgataagacaggagacaggtcatcacccaacagcaaaggtaggcgaagcccattgaggaggatgttagatccaatattaaagccaagacattctagtccagtacgtccttcatttgttcctaagtgtcaacttccagtcaataccaccaagcagtctctggacttggggaaatcagtgccacataatgttcagcgaagtgcaagatacatacaaaaaggaaatgattcagcaacaacaaggcaagcacttctgcagctagcatggaagaacggcttgcctttattcatactctcttatggtgattctgacatcctggcagccactgttagaaggaagggcatccctgaaaaggatggtctggaaagcacatatgctgtattcactgttgaagaaccgaagaaaaaaagtggagcttggatcaagacagggggcaagaacaaaaaacatcaccttttatctagcatagttggggaaataaaggttgcgcgtcgaaaatcaagatgccaccatacaaccgatgttcatgtacacagggaatttgtgttggttggttccaaatttctaccatcgtctgaagaatcaggtgattcaaatgttagtggagagcttgcagcttttatcagcacacttcctcagcaagaagcagaaacctcgaagcaatcatcttcacagaataccaggcaaagaaattcaatgccaattggctgtggttgccccccactgggaaatttccatcctagcacgagaagtgctaattctgcttcagccaatgttgttgcagtacttcctgatggcttccatggcacaataacatctggacagccattgcctttgattgagaggtggaggtcaggaggagcttgtgactgtggcggatgggatgaaggttgtatgctaagcgtcctcactgatgcgtccgaagaaaatgatgccattcaggctaaccaggcaaaggatggcagccagagatttgagcttctagatcagggtcgatcacgagaagagaggcatgccttcagtatgacttccttcaaaagaggggctttatacagtggaattcagatcatccattgcattacttcaggcttttgcaatgtgtatagtgatgctccatggaagctgcgtagtgccggtgggattgatataccatggtccaatggtccatatgtaatacgcatgtccaaagtgacaatctctgcgcaagtctttagagatagctccctgtacatgctgtga

SEQ ID NO: 21619 - DNA, 378 bp, Zea mays
  Peptide Sequence Number=SeqID_63398
atggggatgccgcctgggcatcgtgccattgcagccgctgctgacctcaccaccctggcgcacgcaaccctcgcgcacgtcaaactgctgcgacctgcgacaaaggagccacctccgggctccggcccctccccagcggcccagctacccgcctgctcgtccgcccccggcgccccgcgcttttctttccccgttcccaccacttcaagatccaatccatcgtccgtgaacgaaatagcccagtttcgtgcccctcgtgatcccgacgccgacaacgaaactgcccagtttcgtgcttttctccagtaccccgcgcacgcgcgcacacacacacatccgaatcacaaggattgcaccgtggcagtacaggagtggtag

SEQ ID NO: 21620 - DNA, 342 bp, Zea mays
  Peptide Sequence Number=SeqID_63399
atgactcgcttgaggtcatccgtgggcgggacagacagtcacgactcgcccaacgccaaccccctgggtgggatacacagttacagctcgcctgaggccaaccccggtgggatacaaagttataactcgcctgaggccaaggcaagacagaacaggcagtccgccagaggcaaccctcgggtgggagagacagtcacgactcgtctgaggccaagcctaggcaggacagggcagccacgactagcccgaggccatcctctagcgagacaggcagtcacgactcgccagaaaccaaccctcgacaggagacatagtcacgactcacccgagaccaagccctag

SEQ ID NO: 21621 - DNA, 1290 bp, Zea mays
  Peptide Sequence Number=SeqID_63400
atggaggctgggatcttggcggatgggattctggagagcgtctgggatctagtgctgctgtggttctgcctcttcatagtaagagttcacttgacgctgagctggtggctggggatgaacatagttagttaccttgagaagatgcgtgtgctgcagtctgaaatcattcctggtgtcaaagcaatgttcctcctgaaggtggttgcagatgaagggcacctccacctcgatgtagcaaaaggggcaagggaagagaagcatgaatgggccaacaagagatcagctagaagacgagctcaaagtaaacagaaactaaaccacatgtacctgcagcgcgaggaagggtggcatgtggtggaggtggtggttggtgcctgcctctgtctgcagggaggaagccgtagttgtagcaagcctctacctccattaattgcttatcgctggcctggtgattctggagagcggatgggatggcggcgatccgggcgggagagagcagggattgcggcgagagaggagagtggggcgaggacagccggatctgcgcgtcgaggagatctgcgccacgacatgggaggggatcgcgcagacgggtgggggagcacaacgaggagagccgaggtcgggagcacagtgagccttccatcaacggagcgcgagcgtgggcaccgggcgccgccgtcgccggggcttgatgtcgtgccgccgccagggatggggcttggggtcggtgcgcgccacctccatccgccaccttccatccgggggaagaggagttgcgccagccgtcggggttgcgggcgcaggggtgtggcggcggctttggcgcggtggatggcggcggctttggcgcggtggatggcggccgcggtgttttggagatccgcgggcgttcgcggggatggaaaggtgcgcgccacctccatccgccaccttccatccgcgggaagaggagttgcgccagccgtcggggttgcgggcgcgggggtgtggcggcggctttggcgcggtggatggcggcagctttggcgcggtggatggcggccgcggatggaaaggaatcgcggcgtgctcgcgcgcggatggaaacgaaacgcgggggctgagggtggagaaatcgcggcggtcaggcgttgcgggcgcaggggtcatgcggcggatttggcgcggcggatggcggccgcggatggaaagaatagcggcgtgctcgtgcgcggagagaaacgaatcgcggcgggcagaacagggatctatagagaaccaaatttaaaggatgttgctgcaggctaa

SEQ ID NO: 21622 - DNA, 3168 bp, Zea mays
  Peptide Sequence Number=SeqID_63401
atgtacgtccatgcagttggacggcgaggcagcgtcgctctgcggtgggacggcggcggcgagctatgcggggctcagggacggcaaccacagcttcacggcgtgcgcgagcacgacgtcagcttcgaactcgtcgtccagccccagccccacccccacctgcgccacctacgcttgggatacactgtccccccgacggcgtccgtgtcggcggggccggcgttcacgagcgcgtcctccaccgtgtcggcgctcgtctccttctccgagccctgccccggccgcggtggattcgtctgcaacgccacctactgcaatctcatcgtgtacggctccggcagtgtggatccgtcgacgctccaggtgctgagccccggcctgcgctactccgtggccgtcgccatctcgccggacgccgagtacggccgcctcgtcctcgtcatgggcaggggcttctgcacggacgccgccggacacccgttcaccaggacgcccaactccactttcaccctgcgcttcgatcgaaggagcgactccatgaacatcaccgccaccgttgccgagaagatggtgcagatacagggcgtcaccaggctggttcaggccagcaacgaggaagagggcctgaggatatacctggccttcgcccagccggtgctcaactcgtcggagcagatcctgcgcgcgcttacagcgactgacgccgtcgccgtgcacctcacacccaccaacagaagcaccctcggcaaccgccgcttcggctacgttaagatgtctgacgccgccgccattgtgagcgttgcctgcgacacaagctctattatcagcaggcaagggactccggtggttccagcagagccattcacgtttctttatgatacacagagaccttgggttaagctcggcacatcgactcggcggaccagctcacgcgacatcctcgtcctcatcaagtttgcaaagcctgtgttcaacttcagctcctcggcagtgcaggtagctgagaacgcggccatggacgtcgccgggaaccccaacctagcatcagaccgtcttcaagtcaggcactattctgtgcccgcgtcatcttcttggatcgcggcgatcaccaccgtcgtatttctgacaactgctgccgttgccgcgctcctcaccgtctccacgtcgtctctcgtcgctgccggagctgtctcgaggccctcttcctacatgatctcggagccatcaagaaatgtgctgaggatggcgtgccacatccaaatctttgctctgtcaagatggctgtcggccaacctgccgatcgagtactacgagttcgcaaagggggtagagtggagcataccctacatgcgtcttccatgggaaggcccagccgcagatccgtacctggggtactccacgatgcctgccatcgcgtactcggagtcggagctgctcgacaggagcgccgtcggcggcgctgcaaacatctcctcctatcgtcctcgagcacagcaaggtcagccggtgacgccagcgcagatcatcccgtcggatccggtattcccgacggagatccctgaagatgggaaacccacaccgccggtgcaaactccgggaggagacgccacgccgccggtgatgccagtgcagaccccgttgccgttggacgggatgccgctgacggcaatggagtaccgttccttcttcgagaacccggacatgaagcctgaggcacaaatcatcatgaagctacaagatttggatgggtggaagtacttcggcaggaacatgttctggctgggtgtcatcggcggcggcctcatcctcctgcacctcctcaccctcctctacttcaagctgaggtacagagacagggagcggcggcggcatggctacgccgcactgcttctccccaggctggagatcatggtcgtcgtcctggcgatgccgtgcgtcgcccaagcggcggcggcgctcatcaggggcgggaccacgtgcggcctggtggtcgggatcgtgctcaccgccgtcctgacgtcggtcctggtggccctgctgctgttcctgtctctgggcatcaccatgggcaagctgctgcagtacagggaggtgcaccatgaggaggggcaggaggagtaccactggcttggcccgctcttcgaggacctgcgcggcccgcccaagtacacgcgtggcggtggaggcggcaagcgccgcgccgaaggcggcggaccagagcggcgggtcatcgcgtcggaggacgagaacgaggggtcgagggcgcccttggtgcagcagctcctcggcgtgctccgcatctacttgacgctgctggagtcggtgaagcgcgtggcggtgggcatcgtggccggcgcgcacgcgtcgtcggggcggtcgtcccgcgcgcacgccgtggcgctggtggagaccctgtcggtggccagcgaggtggccgtgttcgcggcgtgcctggcgctcatcgacaggacggcatcgagtggcgggtggctgcccgacggcgaggcgcgcggcgtggggctggcgatgctgggcgccttcgtgctggggttcgcggcgcaggtgtgcaacgagtggaacgcgctgtaccggcaggcgcggctgctgagcgccgaccggagctccttcctggacggcgccaagacagcgggcctgggcctgctcgtgctggtgctgccgtcgtctgcgctcggcgaccaccgggatccgccacctcccgacggcggtggaggagccggggagagcgtgtcagcgtcgacggcggccgacgggggcaggggcgggagctccaacaacgagcggtggtggcttgggcagctgtgggagatggcgaaggctagcttcagcaaggagagtaatgcgagcagtcgcgcctccgccctgcgtagacggctagacgcagctctgagctccgcgcctccgccctgctgtgagcgagtaagcttcgccctgcccctgcacagctgcgctgagcgccttcagatctcaaacagagctagtgctactactccaacaagtgcaggtgttgcgactgatactccgacaccgtcctcaagtgctgctgctgctggtactccaacacctatagatggaggtacagataatgtggttgtagctggggaagatggtaatgtaactgttggaagcaaaagaaagctcaaatctgat

SEQ ID NO: 21623 - DNA, 816 bp, Zea mays
  Peptide Sequence Number=SeqID_63402
atgaacgtatgtgagatcaccctcgctgtactcacatccccccaggttacaatgtataagcaacagccagaagaggatcacattgtgtgctcaaggcctgacataacaagttcaggtcccatcaaagtgcaagacatacagggccttccaaagcaaccaaatcaagcttcaaatctgcaggttgttgctggtgtaccagatttacttattggtcagccaaaaccacagactattaaaactgagcctagttctcaggaaaacaaggcagctcactgtgtcgatttagtgagtgatgaccatgaaagcaataagcaaggcctaggggatgctgcagttctttcaatcgtccaaaaagattcatccaatttaaaatatggttcagtatcccatgaacatctgaaatcggaagcacaaaatccgaggcacacagttgctgagaatcctaactcaactttgggttctgcaaaagtttgtacatcgttttctggttctgtctctacaccacctgagttatcacactctctggcatctaaagaaccatcatcagggaatagtgattgttcaaagaaagaggagttgctctcaccaactgtcagcaaacatgatcccgtgaaattttctgaagatagttcccaggaagtgacaagatactctgagaaagttcaactaaaagactcacaaccttctgcaccaaaatcatctcaagctagtagaatacatctgtctacagtcaaacatagattaccggtgtcaaaggagcaatcacagaagatagccctcactggaggcacctcagcagatcattccatggagaag

SEQ ID NO: 21624 - DNA, 720 bp, Zea mays
  Peptide Sequence Number=SeqID_63403
atgagcagctcccccagagtaccgagggtgccacgttgccatcaagcagctggtgcacagatgcttcattcaactggatcatctgttttttctaagcggtattcatcacatggaggaagggatcatgcagcggttataaaaaagagaaacagagaagattcattaaaagatagcgaggacactaagaggacagaaaaaaggcatagagtttctagcacggagcatgctcctgtgaaaaactcgtgcagatcagctgaaaatatagcatcagaacagaaaattcgtggcatatgtccaactggagccaatgctggtttatcaaaggatgatttgatggatactattgtttcacacaatttacctggattgattgatgaaattgtcagtaaagacaggaatataacatatgtggaactctgtgatgctatccatcagcattttagggactcaaggaaatcgaatgggggagattctttgtatcgcagttatgcggatgccatcaaaggttgccttaggaagaggagggagtgggctcacctttttgaccaagcttcaaaatcttttttttcccgaaaagcacaggagactacgccccattatattaaggaagtaaaaggtctaaagaagaccaggtacaacaagacagacttccttacggaggtcttaaaaccagaaaaccaaaagaatccatcagagaatagcacccaactactggcctaa

SEQ ID NO: 21625 - DNA, 512 bp, Zea mays
  Peptide Sequence Number=SeqID_63404
tgtatacccagaagaattcaaaaagaactgttcaggaggctcttctaaatagaagatggatctctgatatcaaaggtgccctctttgtgggagttttagtggattatcttcagctttggaaccttctttctgagatagtgttgcagcctactattgaagacaaacatgttttcagtattgcctcagatggtaactatttagctaaagtggcttatgaagggctcttcatgggatcagtctatttcagccactatcccaaggtgtggaaaacctgggccctgcctaaatgcagattttttctttggctcgctgcgcataacaggtgctggaccgttgacaggttggccaaaagagggcttgatcaccctccaaaatgccccttgtgtgatcaagaggatgaaaccttagatcatctcctggcctcctgtgtttactcaagggatttctggcagctgctgaggactttcgaccttcaagtgctagccccttccttcatgagctggtgggaataa

SEQ ID NO: 21626 - DNA, 240 bp, Zea mays
  Peptide Sequence Number=SeqID_63405
atggagggtcatgatctccgggcagaaagggaatcacggcttgtgggtggcgatgagaatggtggttttggtattgactatggtaatggtaagtggtactctttccgtttggaaagggttgtccacattgcaaccactgctcaggagaagatgaagccgtggaaggagacttccaagagttccaagattatgacaagttctaggcgtgggttagcggcaaccccagtcggctacctgtga

SEQ ID NO: 21627 - DNA, 429 bp, Zea mays
  Peptide Sequence Number=SeqID_63406
atgcagcagtttgttaaggcctctgacttccgaagcaaagctgagagtggtgtggtggtgtgttcttctgtaggtttgggctgggccgctcagcaacaacaggaaggccgtggttctctggaaccggcagggataccaggcaaccatcaccgcgcagtggtcgagcatcgggctcgcttcttccactgctgtcactgctcgcgatctatgggcgcactcgtcgttctcggctcaaggccagctatcagcttcggtgccacctcacgactgcaagatgtatgtcttgacgccgaactagctcagaagacaagagcggattgttccatggcgcgtgggatgcaaccattcggtcaggattcagggaagaagagtatgcaggcaaggatttcgagagaaggaaattcgatatcatttggttatacaggatag

SEQ ID NO: 21628 - DNA, 1023 bp, Zea mays
  Peptide Sequence Number=SeqID_63407
atgattgagctatcactatcaggaaaaagagctttggaatttgacggagatcaagttttagatgtgggtcagcaacatcatgttattgcaatatttgtaggaaccttagtcaaactttacaaaggtgaatatacattcttgagtggaacatcagcatgccggtggtacatcaacgaaaatgacattgctgaaatcaaggctttccagaaaagtttgccaagtgaacctgtacctatcaaaaagacctatctccaaaatgatgatgcaactcacaaatttgaggagaaaagtctggaacagctcaagcatgtagaccctttccttgacatgggacaaagatatcagtgcacagctactataattggtatcacagaaaaccaaacatggtgttacaaagcatgcaagatctgtaactcagcaatcattcaaaaggaaaatggttataaatgcacaaaggaaggatgtccatctacacaatttgaatggaagtacaagataccattcattgcaagtgaccacacctataatctagagtttatgttctttgaaaaaaagggaatggagcttataggaaagagtgcatcgactcttcgaaaacaatatgaaccaaaggagataccaccggatataacatcttggataggttataaattcacttttgttgttagagtcctatcaaagaaaagtgtcaagactattgatccatcctttgaagtgcttatgataaaagaaaaataccagaaggaacctattatatcatttatcagctcaagtggagttgtaccagcagaatcatcttcctctacaatggcagaatacaaggaattaccattgctagtgccaattacctccaaagacatagaaaaaaaggagcgatccacttcacaaccagaacacaccgaagaaactcaagatatggacattgaaccatctgggaaacaactgatgacaaagatgaccttccacaattcaagaaaatcaggagtacccactctcaaggaaaaagcaaaaaatgatgcatga

SEQ ID NO: 21629 - DNA, 1239 bp, Zea mays
  Peptide Sequence Number=SeqID_63408
atggcggccgccgcgcgccccgcgtccgcccacctcctcctcctcgccccgctcccttctcctccccgcctttcgcatctcatccacacccgcagactctacgcactcgcccccgcccgccgccctgcggccgcgcgcgcgcgccgcgaatcctctcctccctccgcgccctcccctcctgccccggctgactcgctcgattgcgtcggaactggctcggatgtcgagtgcttcgtcgacgccggcgccgaagacgccgctcccctccttcccgcgctctccgcaggcgcgtcaaaggacgatgggaagagcgagggcgacgcggcggtttcggcttcccctacggggagggagctcttggagtgggcatctctggtgtcgcccttcttcttctggggcacggctatggtggccatgaagggggtcataccccgcacgggtcccttcttcgtcgccgcgatacgcctgctccccgcgggcgcactgctagttgccttcgccgccgcgcgcggcaggaagcagccctccggctgggaggcctggctcgccatcgctgcgttcggactcatcgacgcggcctgcttccagggctttctcgcggagggactgcagaagacatcggctgggctcgggagcgcaaggcaagtatttgccttgccatcttggcctggtgaactggtagcacttacggagctcgattctccattccaggtcatcattgactcgcagccattgacggttgctatccttgcatcactgctctttggagagtcgattggcgcgataggagttggaggactcgtgttgggcgtcgtggggctcttgcttctggagcacatgattattggtgggcttcctttgctagtgatatctgttcttaatcatgatcctgctctgagtggccatattcaagatcttacatggagcgacatattagcacttggttatacatctatatttggcagtgctgtcagctacggtgtatacttttacaatgctactaggggtagcttaaccacacttagttctctcactttcttgacccccatgtttgcatccgttttcgggtacctgtacctgggtgagaccttctcaacagtacagattggtggtgcgcttctcacactggttgccatctacatggttaactacaaaagcattataggtagactggagaatttcttaaaaagcggtatcacacaatattcaagtgatactagcgagtggcatgactactga

SEQ ID NO: 21630 - DNA, 373 bp, Zea mays
  Peptide Sequence Number=SeqID_63409
atggcgaagccgaccattggcgctttggagccgttggcgcaccggacactgtccggtgcacaccggacagtccggtgcccccttctgactgttgactcggccacgtgtctcgcgcggatcgcccggccgaccgttggcccggccgaccgttggctcaccggacagtccgaagctctgatgaggcaatgccatggtaccgtgatcgggttaactgaaggaaatctactcgtttctcgtctgccggtagctgccggccagtcgatcggccgcttcgccaatgattcttgcttcgccgatcacccgattaaggcttacgcggtcatagtgctccgtacccgggtgaacttgaagatcactcctggcttcgacacag

SEQ ID NO: 21631 - DNA, 114 bp, Zea mays
  Peptide Sequence Number=SeqID_63410
atggggcgcgcagcgagggtcaacgtctcttgcatcaaaggtgtgagctatggctcgctggttgtttgcagggactgctccagtcatgcggtctttggcctctttggttactag

SEQ ID NO: 21632 - DNA, 318 bp, Zea mays
  Peptide Sequence Number=SeqID_63411
atgaacaacagtggcgactctgaatttgttctagttgccgtcgaggaagacggctggggcagtggcgccgatgcggatggttgttgcagaggagccgaggcagacgactggggcggtggcgacgaggcgaacgactggggcggtggcgacgaggcgaacggctggggcggtggcgacgaggcgaacgactggggcaacgacgaggaggacatctggtccggcggcgtcgacgtggatggcaggggtggtgagccggacagggacgtcgcggcccccgtgggcggcggtgaccggaaggcggctaagctcgggagctag

SEQ ID NO: 21633 - DNA, 342 bp, Zea mays
  Peptide Sequence Number=SeqID_63412
atgctcccgagcttagccgccttccggtcaccgccgcccacgggggccgcgacgtccctgtccggctctggcaccaccgttgccacgatcgccctcctcgttaccaccacccctgccatccacgtcgacgccgccggaccagatgtcctcctcgtcgttgccccagtcgttcgcctcgtcgccaccgccccagccgttcgcctcgtcgccaccgccccagtcgttcgcctcgtcgccaccgccccagtcgtctgcctcggctcctctgcaacaaccatccgcatcggcgccactgccccagccgtcttcctcgacggcctgttcctcactgccttgtcgtga

SEQ ID NO: 21634 - DNA, 564 bp, Zea mays
  Peptide Sequence Number=SeqID_63413
atgagccatagccatagcactaagacatcgtggccggaggtggaggggatgcctgctgaggtggcgaagcgcaagatccaggaggaccgcccggacatccaggtgatccttgtgcctgtcgactccgccgtgaccgatgacttcaacaccaagcgcgtccgcgtcttcttcgacaaggccggcaacgtggcacaagatgcaggagccatagagggctcgagcctcggcaatggcggcggtgaagaggagcaggagatcgacggcaaggagcggttcgagttcatggtcgagccgatggcggcgagctccaaggactgtgtgggcacgtacgagtacctcgcgtcggagctcgtgagcgggagcggctacgacaacggcgtggaccggtgggccttcgacgtcttcctctacgagctcgtctacggccgcacgcccttcaagagccacaccaaggtggccaccctcaagaacatcctctccaacgccaccgagatcaagcggcacccgttcttcgctggcgtggactggacgctcatccactacaacacttgtgaccttctgtga

SEQ ID NO: 21635 - DNA, 276 bp, Zea mays
  Peptide Sequence Number=SeqID_63414
atggactccgaaggcgacggggtccgcgcccttcggctcaggcgacgaagacaaccagatggactcacctacgagggggtggtccgcttaccagtttactatccttctgagcaagaaaaggatgatcctaagctctatgcaaacaatgtacggaaactgatggcagtggagggaaacttgattctttcagaccttgggctggcggagaagcgagtgtaccatgccgcactgaatggtaatagtctagctcgtgctttacatcagaaagatgattga

SEQ ID NO: 21636 - DNA, 231 bp, Zea mays
  Peptide Sequence Number=SeqID_63415
atgacgagccctaatctcatttctctttctcccttgtctcctctcttcctggggggggcagggggggcggtactattgagtgggggtgggattggggggaacgccccgaccccgggcccaacgcgcggtcgtccacgcgcagaaggcgcaccggggtccagcgggcagcgatgggcagcagggcttccggcaacggggtcgtcgcgggctctggcaccagaagcagcccgg

SEQ ID NO: 21637 - DNA, 183 bp, Zea mays
  Peptide Sequence Number=SeqID_63416
atgccaggcaaaggattcctcaagagcaagaaggtacccttgggagagaagaacaaggagaagggcgaggagttcgtctacttgggttccaagtcctccaagtcctacaagtggagtgatgacaagaataaaaaaatcaagaaggtaggagtaccacaagttgaatgggttggagactgctaa

SEQ ID NO: 21638 - DNA, 702 bp, Zea mays
  Peptide Sequence Number=SeqID_63417
atgccgggggacgtcgcgacctcgccggcgccggcgccgccgtccgtgtcctcgtcgtcgcagaaccaccaccatcacggccccacgaccgcccgcggcctcctctgccacgctgtcgccggcgcctccgctggcgtggtggcggcgaccttcgtgtgcccgctcgatgtcatcaagaccaggttccagactcaaggaataagagccgggccaatgccatataaaggtacacttgctgccttgcgaagaatagcacatgaagaaggcatccgaggactatacagtggtctggtccctgccttggctggtatcagtcatgttgctattcagttccctgcatacgagaagataaaagcttatctggctgagcgagaagcattgagttttggtgatgttgctgttgcgtcgtctctggctaaagtagctgcatcaacattgacatatcctcatgaggttgttcggtcaaggctgcaagaccagcgagcgcactctgatgctagatacaagggtgtagtagactgcatcagaaaggtttatcataaagagggtgtggctggcttctacagtggatgcgccacaaatctattgcggacgacccctgccgcagtgataacattcactagcttcgagatgatccacaggttccttcttgatctattccctgctgaatctgaaccgcacatccaacctctcaagcattga

SEQ ID NO: 21639 - DNA, 663 bp, Zea mays
  Peptide Sequence Number=SeqID_63418
atgtctattattaggcaaacagccccaaactccggccacccaatccgacccgtggatgcccggctgcagaacgagcccgtggacgcgtcggaggagcaggacgcgtcaagagacagccccgagcacagcagcagcagctcctgccgacgcatccccgcgggcgctctgagcgagggctgcaatgtgagcacggctgcgggtttcttctcccccgttgcccctgccgccacggccacatccctcccgggcctcggtgagggcttccagccgcgggtagcggacaccgagcgcgtcctgccccccgtggaccgtggttcggaagggagactgcgatggcgtgaaggcaggcctgcaggggcggcgcctgcgggatgcgcgcggttcttcctcgctctgctccaaggccggcgcagcgcaggagatcgaaggggaaggatgatggcggcgatgggcggcgcggtgcgggtgctgtgcggcgcggagaaggagcgggtggtgggcacgcgcaaggcgcccggggcgtgcccgcgctgcggcggggccgtggtggccgtcgacgtggagagcgagcgccgcttcctcggcctgccgctgtgcctccagagcaagcgcaagtactcctgcacccgctgcctccgccggctcgtcaccctctacagctga

SEQ ID NO: 21640 - DNA, 1545 bp, Zea mays
  Peptide Sequence Number=SeqID_63419
atgtggttcgtgggtttccgttgtgtcggtggggcactggggcgacagctcgtgttgccctgcaatactgctgctctggagctcatgcaaggtagtatgggttcaaggtttgcatcgcatcagctgagcaatggcctgtatgtttctggtcgacctgaacaacctaaggagaaggccccaaccatttgttccactgcgatgccatatactgggggtgacatcaagaaatcaggagagctggggaagatgtttgatctccatgttgagaagtcaagaaaatctggtcctctaggaaatgctccttcaaggaatacttcatttggaggtgctgcttccaactctggacccgtatccaatgctggcggtcggtccaattactctggttctctttcatcttcagttcctggtgctggcggatcagccagagcaaaatcaaactctggaccgctcaataagcatggagagccaacaaagaggtcatctggtccccagtctggaggagtgaccccaatggcacgccagaattctggcccccttcctcctgtgcttccgacaactgggcttatcacatctgggcctatctcttcagggccacttaattcgtctggtgttccaaggaaagtatctgggccacttgattctgctgcgtcgatgaaaatgcgggctacttcctttgctcacaatcaagctgttactaatctcaacactgaagatggttactcaattcagggaagctttccgaagccaatactctgggctgtgattctgctctttgtgatgggtttcatagcaggtggtttcattctgggtgctgttcacaatgcaattttgctgatagttgttgtggtgatatttggttttgttgctgcacttcttatctggaatgcttgctggggtagtagaggtgcagttgggtttgttaatcgctatcctgatgctgatctcagaactgctaaagatggacaatatgtaaaggttacaggggttgttacctgtggaaatttcccccttgaatcctcgttccaaagggtcccgagatgtgtatacacttctactagcttgtatgagtacagaggttgggattccaaagctgccaatacagagcatcggcgttttacctggggcttacgctcaatggagcgccatgcggttgatttctatatctcagattttcagtccgggcttcgagcattggtgaaaacaggatatggtgcacgtgtgaccccgtatgtcgatgaatctgttataattgacatcaatccagacaacaaggatatgtcccctgattttttgagatggctacgggagagaaacctttcaagcgatgatcgtacaatgcgcctaaaagaaggatacatcaaggaaggtagcactgtgagtgtgatgggggttgtccaaaggaatgacaatgttctgatgattgttcctccatcagagcccatctcaactggttgtcagtgggccaagtgcgttctcccaaccaaccttgatgggcttgttttaagatgcgaagatacttcaaatattgatgtgataccagtttaa

SEQ ID NO: 21641 - DNA, 228 bp, Zea mays
  Peptide Sequence Number=SeqID_63420
atgtcgtgccccagcgtgaaggaggttgctccggctgtagtgatggcccctcctgcggtgccagtggcacccgcgaaggcgtcttcgccaccgcgcgttgctgaagcggcggtgtcagagatgagagggactggccaggagttgtctgttgacggctacctggtgggagacatcaccacgtttgacgcccaggcggggcttccgcctactggggctgagactgggtag

SEQ ID NO: 21642 - DNA, 1695 bp, Zea mays
  Peptide Sequence Number=SeqID_63421
atgaagctcccggccgcactcccctggatctccccgctgcagtaccgaagacccggccgcggcgcgtcgccctccccaccgcctccaccccctcccacccggcggccgcggtacctccaccacccggaactcgcgcgcctcatcgagtcctccccctccgcgcagcgcgcgctcgacctcttcaacgcggcctcctcccagcacgccttctcccacacgccggccactttctcggcgctcctcgtccgcctcgcgcgcgcgcggctcccgcgcgccgccgccgccgtgctccgccgcaccgcctccgagccctgccggttccaggagccgcagttcctgcccctcgtccgcctcctcccgcccgaccacgcgctcgtgctcctccgcttcctgcccgcgctgctccgcacgagccgcgtctcacacaaggcgctggccgtctgcctcgaccgccttgtctcctcccgcggctgccacggcgtcctcaacgagctcctagccgatctgcgcgaccctcggaacaagtaccttccaaggcctaacacatgcgtctacaacatcctcgtcaagcactacgtcaaaaacggcgaattggagaccgccttcaaagtgctcgacgaaatgcgcgagtacacctgcgcggacgtgaagccgaacctggtcacctattcaacattgatcggtggactctgccgtgggggtaagatgaaggaagcgtttgagctattcgaggagatgatcgagaaggaccgcattgtcccagatcagctgctgtacaatgtgatcatcgatgggttctgtagacaggggcaggtggataaggctcgtgcaatctttggatttatgaggaagaacgagtgtgagcccaacaccttcaattatgccacgctgattaatgggcactgtaagaaagcggacattgaggcagcgagatcggtgttcgaggagatgaggaattctggtgtggagccagatgctgtgagctacactgcactgatcggctgcctttgcagacatggaagtgtggatgagggcatcggtcttgttttggagatgaaggagaaggggtgtagggccgatgtcgtcacatacaatctggtgattgaggggttgtgcaaagatggccggactgtggaagcaatgggcctgctggagagcgtgccgctggaaggagtaaagttgaacgtcgcgagctaccggatcttgatgaactgcttgtgctcccgtggggagatggacagggcagttggcttgctgggattgatgcttggacgagggtttctacctcactatgcggcgtcaaacaacctgttgatcggtctatgcgatgctgggcgcatagcagatgctacgatggcattgtatgggttagctgatgcaggctttatgccagagcctagatgctgggagaggcttgtggagagtgttgaggtcttgaggaaaggaactggagatcgcggcagtgtatctttctgcccccatttgcactacagggctgaattgatgtttagcaacaacgaagagaaggctgctgggccctactggtactggagacagcaaccaacaggtcctgacacaaacttttcttccagaacaagctgctatatccagaaggtatcaaaccatgaaggcacaatggccgcattattcaccattctcgtcattggagacgtagtccaggatgagtcagcttag

SEQ ID NO: 21643 - DNA, 1506 bp, Zea mays
  Peptide Sequence Number=SeqID_63422
atggagggccgcggcgcggaacaagcacccgaggcggcggcggaggtgaaaaatccgaggtgcttcatggacgtcaccatcggcggcgagatggaggggaggatcgttgtagagctctacgcttccgtggtaccgcggacggcggagaacttccgcgcgctctgcacaggggagaaaggcatcggcgccgccagcggcaagccgcttcactttaagggctcatgcttccaccgtgttattaaagggtttatgattcaagggggagacacaactgctggagacggaactgggggagagtcaatttatgggtccaaatttgaggacgagaattttgttttaaagcatgagaggaaaggaatgctttcaatggctaattctggtcccaacacaaatggttctcagtttttcatcactactacacggacacctcatttagacgggaaacatgttgtttttggtagagtgatgaaaggaatgggggtagttcgctctattgagcatgtttctgtcggagaagctgactgccccactcttgaagttaaaattgttgattgtggggagcttcctgaaggtgctgatgatggagttgtaaactttttcaaagatggtgatacgtacccagattggcccaatgatcttgaagagaagcctgctgaggtttcatggtggatggatgctgtggagtctgctaaagcttatgggaatgacaatttcaagaaacaggactacaaggcagctctcagaaagtacaggaaagctctgcgctacttggatctttgctgggagaaagaagagatagatgaagataagagcacagcactgcggaagaccaagtcaataatactcactaatagctccgcatgcaaattaaagttaggagattcaagtggggctttattagacgcagattttgcactgcgtgaaagggagggaaatgctaaagcttttttccgacaaggacaggcacacattgcacttaatgacattgatgcagccgtggagagctttaaacaggcattggagttggagccaaatgatggtttgttctctttagtcccattgaaattcatagatttaactgacgatctgatgggtttttctttgaccccattagctggaatcaaaagagagctggctgctgcaaagaagaagctgccgcagattgctgacagaagagatcaggagcggaaggcatttgctaggattttccaatcttctggaaagtctgacaagagcaacgaaactctaaggccatgtgtgccacacttcatctcacagctttacatattcaagcagtttctgcagcagctttttagtccagctgcttatctcaatgaactaaaagcagctgtgtttagacccgaatcatacacggtatttctgtcctgtccacattctggttctgtggattgtcacttgtcaggctgctgggctggcagctcagctgtggctgttcgttgcaaatccgtagagataaagataaaagtactgataaaaatattgtag

SEQ ID NO: 21644 - DNA, 933 bp, Zea mays
  Peptide Sequence Number=SeqID_63423
atggaccccgccgtcgacgcctccgcctccaccgcgcaggccgactccaacgtcagcgccgccgtccccgcacccgatccctccccgcccctgccggcgccggaggctgagacggtcgatccgccgcccccgccgcccgcaccagcgcccaagacggtcacctggagcgagaagctcacgtccgagtcgccgacgcacgtgcacgccgccgctgcggcggagtccagccagtacgtgtcccgcgggcccgcgtcctcctcgtctaaaggcgccgtggaggcgatgagggagacgctgtcgaggtgggggaagtcgtggggggagaccaccaagatggtcgagagcctcagccgcgacacgtggcaacactggaaaaaagcaaacattggacagatcttacaacaatcaaacttcaaatcactgaaaactgactatagttgtagatcatgggcgaaggtcctcagtgtcaagactggacctagttttactgaagctgctatgggacgcctagcacaagggactaaagttttagcagaagggggctatgaaaaaatatttaagcagaccttcgaagttcttccagatgagcagctgaaaatatgctttgcgtgctatctctcaacatcggcgggtcctgtcatgggagtcttgtatatttctacagcaaagattgctttctgcagtgacaatcctctgtcatacaaagctggaaataaaactgaatggagttactacaaggcaagggtggtcattcctcttcaccagctaagagcagctaatccttcagtaagcaaattaagtcccgcggagaagtacattcaggtcgtatccattgaaggccacgagttctggttcatgggttttctaatgtacgacaaggctgcaaccagtcttcaagaagccttggctagcgcacgtgagttgcaaccgtga

SEQ ID NO: 21645 - DNA, 231 bp, Zea mays
  Peptide Sequence Number=SeqID_63424
atgaagatgaacagtaaccccatattgttcacgctgaactgtaatcgctcttgcgtcaccctcgtattttcatcttttggcaagctgaagcatttgagaacaaggaccaacattcgtcacctaccagtccgcaagatctcctcaggcatgccccagggagtcctcaacctgtcgtataagctcggcgaggtcacacagacgatgggcaccaacgactacgcccccacctag

SEQ ID NO: 21646 - DNA, 207 bp, Zea mays
  Peptide Sequence Number=SeqID_63425
atgacctaccttgccgccggtcctagcacagtgacgccctacaccatccctccgtcgcagtacggtggatttgcgcctgctttcgaagtttctgaatgccacaatttatctgggattgtgcttctattagttcagttagaacttagaacccacaacctcgtggggtattcttcaaagggatgtatatggaccttccaaatacactag

SEQ ID NO: 21647 - DNA, 225 bp, Zea mays
  Peptide Sequence Number=SeqID_63426
atggggggaggagctcgagcttcctgcgcgctgaacagagagcagggggaaaggggcgttgcgcagaagaggccggttagaggtagaagaaaagggggcacctacaccagggaagctcggcctcggccatgggagaggaggagccgagctgtagaggggcgctggcttcctgctggccgtggagctagagacgcgcccaggagaaggacagggagcgtcgactga

SEQ ID NO: 21648 - DNA, 942 bp, Zea mays
  Peptide Sequence Number=SeqID_63427
atgacgaagctctttatggtaatcgtgagttcatcaggggtggacgctaatgttggtcacttgtttctgactcctttgggatatcaaaaacaagggtttcgtgataaatgggcatttgcacacaatgtgtatgaacaccaccaggcacaaggatttttcaataccgaatatcagtcaaatattgtcgatccccttctgagagtattgaggcttcttgatgaagagaggaggcgtctacttgtgacccgacccataaacaagtttggggctggcccaaccctcagcatacaggcacgaaacctcgcgccgccaccaaatctccagcgagcgaagaggcggctccggcgagtgcgcggcaacgacgaaggcgtcggggccagtggcgagaggaagagcatgctgaagttcctgtccaaggtggtggtggagtactgccctctggacccgcggaaggcggcggcagtggagctcctcgcgcagtgcaacggccgcaaggccaaggactccaacccggcttgctcggtcgagctccgccgcctcccctccccagctccgtccacggacctcaagtcgcagccgactctcccgcctccgagggtcctcgtgacctacttcaccggagctgaagaggccatcgtctttgctgagggagctacggcgcagggcatccgggaccagatcgtcgcacggggccggctcatcgatacggagaagatgttccgcgacggcggggagaagtggcccgtcgtcatccccgaggaggagcttggcatgtcgttccctggcatcaaggacagccgcgcgctggagggtggactctggtggaggcatggagtagaggcgggcgccacacactggagggtggaggctcgagtagaggcctctgcagcagccacgcgatggagcagagggccaccggagcagagggccgcgatggagtag

SEQ ID NO: 21649 - DNA, 237 bp, Zea mays
  Peptide Sequence Number=SeqID_63428
atgcagaaaggggatagcgtggcagtgagtgcgcgacagcagagtgaggcggcggtggagcttctaggtcagttcttggctccacagcgggtttatacggcccataggggagagattctcggcaaggtagttggccacaaccaccctgcggaggacccggcggcgctcgcagagtttgttgaggaagaacgaagcactactggcgcaaggggcccacgcggcggtgatacgcactga

SEQ ID NO: 21650 - DNA, 270 bp, Zea mays
  Peptide Sequence Number=SeqID_63429
atggccggtacagacctcgtcggtgatgaacggggagcgcgccgtgaccaggggtactcgtggagaagaattagaaacccgagggcatttctgcaatctctttgctttagaaaaacaaaaggttttgtttttacaaaagatgttgtggcaaaagtgggtgggatgttttcaaaaatcaaacttgatggtggatccatcacggccgtgatgggttcaacatcggaaaagatgtacctctgccaggtaccaagttttgggttaaatgattaa

SEQ ID NO: 21651 - DNA, 540 bp, Zea mays
  Peptide Sequence Number=SeqID_63430
atggtggccgtcgggttcttcaagacgtcgttcattgcgctggccatcgtgctgatcgaccgcgtcggccggaagccgctgctgtacgtcagcatggtcggcaggaccggctgcctggcggcgctgtccgccgctctcttcctgcaggcgcgcgggtcggtgtcccgtggcgccggcgttggcgtcgccatcctgacggtgtgcaacgacgtggccttcttctcggtggggatcggtccggttccagctgccaggttccatgctgtcaaaaccacgactgctgctaaggatgggaagaaacacttctcttcttttctatggcatcgtccaaggactggagcagggcatcatgccgaggccttgcgccttgccttccaccacctcctcctcccgtcgctgccctccttgtcggacgcggagttctcgccgatggaggagctgtcggacgacgccgcgccgatcgacgaggcctccgacagcgcctcctcctccctccccgtcgtcgccgcctcaccgccacgctcttcctcttttttatag

SEQ ID NO: 21652 - DNA, 297 bp, Zea mays
  Peptide Sequence Number=SeqID_63431
atgcaggcggcatgcaaccgcgccaagtgggcgcgcccctccggcttccaacgcacccagcatgggggcccacgcccacgcgtcatgcaactggcgcaccggtcgctacgtgcaagcaactgcaccgccactcgcaccactgccacgcctcctcgactgcggaaccagtaccgcgactcgaggcaaccctgcgtacgacccagcagtgccagccaggggcgacgggaccgggaaagggggataccccgaaaaggatccttcttcatgaaggaagcaggctccgagcctccctactga

SEQ ID NO: 21653 - DNA, 477 bp, Zea mays
  Peptide Sequence Number=SeqID_63432
atgcgggcatcttcagttggcatcgacaccatcggtgtacatgtaccagaaaaagcttttcatggtttaagcaatatgacatttattgcattcgaggatatgtgtttaatgatgaaccttcaaagactcgacgtccaactcgtaaaggtttttgcatttgtgctatatagattttcaatatttgatatgcatgtgtgccttgcagaatgcaacatgattagtaggagatcctttacgataccaatcctgatgctagagccagtaaagggtcagggaccactggatacgcttcctatttatcccaaggttggaaaggtgttggtgcttgactccttggattacgacccttcgacatatgcacaattcctcaacatcttagagttattctatgagatgagagatggaaagtacaacttgtcgaaacaacgcgtgtcactagacatccactataaatgggcgaaaaagcgtgaaaactaa

SEQ ID NO: 21654 - DNA, 837 bp, Zea mays
  Peptide Sequence Number=SeqID_63433
atgccagtcatcaaaggacgtctctccaggctgcggtggaaggacctgcaggctgaatcagaactgttatgcaaagacactggtgatgagcagatgatggatcgtctcttcagcctgatcacagtctgggcatcgagcatgacagtggatacttactatcgccggtgcagtagtgctagttacgtcggaaatgtgtcagttcccttgctttgtatcaatgctttggatgatcctctttgcacaagggaggctattccttgggatgaatgcagggccaataagaacattgttttagcaactactccaaatggtggtcatcttgcattctttcaaggactaactgcgcggagactatggtgggttggagctacttctgagttcctttctgctcttcatgacagctcctacatgcataggcagaaggcaaatgatcatgttttgctctcgtctttggaatcctccattgataagagtccgtatgttaatctcatggaagatggaatggtagctgcggtaacaaaagatggccctagcaatgacgggtcacctttgaaccatgcagctgatgaacaattaagtaacgaggcgggcggtggacaacagaatgtggtatctgcattgaaccataatgaaaactccattggagtgggaaacgacagccctgcagagccagtaaaacagcaaggtgatgacatccacagcaataagcttcatgagataattgctcctgtcaagagatctatgagccaactgactcgataccaagggagggttcgcttctcgggcactatcgggcctgctgtccagggggaccaccggacagtccggtgcccctaa

SEQ ID NO: 21655 - DNA, 2004 bp, Zea mays
  Peptide Sequence Number=SeqID_63434
atgccgtgtcagtcgagtcccaggcttgcaccatgggacccgccatgcatcaccacgaggacgtcagccacgaaccactgcagggataagaacaacaagtggcatggagcgctacttcacgcaaccagaagaagggggtccgggcaacagatgaaagacttcttctctctctctgaagaaggaacaatgactgggtgggctgccgctgccgacgcaacctacgccgcagccctagccagagccgaggccttcatcggtatcttctccggcgacgagcacccacagatttcagaaggaattgactgccatttgcttgatgtaaggagaggaacgaacaccgtaggaccctctattggctcgagaacaaggaccttatttgatcacttagaacttgatggagggaaactcactcgctcaaggtggatgtctcctacaaagagaagaggacttggtcgccgtggtcatggtcgtggaaggggtgccacggcagaaaaggatatggatcatctcgatatctctgtaccttcttcaccaagtactacctctgacagagaagatcagcctctgttgattccaagacaatccccagcttgctatgtaggaccgtcagaagtatccaccatgttactgaaccctaagatcaaccatcgttccgatgcgatttttggtgatcaggctgtggagcagctgaagttacgtcatcacaagcctctgaaatttcatgagagatatcgtccttacctgagagatgcaggtttgcttgggctctcacaaatttgccagaagatgcctcagttggacaaagcattgataactgcccttgttgagcgttggaggccagagacccatagcttccatttggcatctggggagataactgttacacttcaagatgttgcaatgttgtttgctcttcctattgatggtcgtccggtttgttctaccactgatcatgattatgcgcaagtggtccttgattgtttaggcctggatgcaaggggtccagcaatgcctggaaagtctttcctgcattacaaatggcttaagaaacacttttatgaattaccagaggaggtggatgatatgacagttgaaaggcatgttcgggcatatatactgagccttttatgtggggtgctctttccagatgggacaggaaggatgagtctgatatatcttcctctgatcgctgatctttcacgtgttagcacatacagctgggcttctgcagttctggcattcctgtaccgatctctttgctcggttgcctcctcccacaatatcaagaatattggtggttcattgcttctcttgcagctttggagttgggagcgctttcatgttggcagaccattggttcggtcacctttatgcacagagatgggcattgaacatgacttacctccaatcggcttccgttgggtggggtcacgcacacaaagtgagagtgctaatcgctgccttaagcagtacagagatgaactgaacgttcagcgagttgatcaggtgaagtgggaaccctacctgcaggtagagtcctcaaccttacccccactttgtacaagagacgcagacctgtggcttacacaagctccattaataaacttccctatagttgaaatgtatttgcccgagcgagtgatgcggcaatttgggcttcggcagtgcattccaccacctttccggcctacactacagtcgttacatcgtatcagtagacgtggcaaagaacgagagaactgggaagaaacacaccatgagtatatccaggaatgggaagcacgacgacagcgcatatttcgagatacagagcaatatgatccatcttcttatgaggagtatctgcgctggtactcaggagcaacacggcggtaccttgtcccagcaaccagtgacgacggtgaagcgggaccttcagctccaactgacgatttctcagatcttcagtaccaagccaaatctccaataatccgcaaagcagtaaaacacgaatcacttatttag

SEQ ID NO: 21656 - DNA, 1332 bp, Zea mays
  Peptide Sequence Number=SeqID_63435
atgaagcggctcgtggcgttgctggtactgatcgcgctcccggtgcgcgcggtgcctgtctccggtgccggcgtcgtggcgctgctcacgcacgccgacgccggccgcggcctcgcgagcgccgagctcgtgcggcgaatggcgcaccggaccagggcgcgccgccggctcctgtcctcgcacaggcgcccggcgcgcgcgcgggtgcgcgcagggctcggcgccggcggcgggattgcgacgaacgagtacctggtgcgcctggcggtcggcacgccgcggcggcccgtggcgctcacgctcgacaccggtagcgacctcgtctggacgcagtgcgcgccctgccgcgactgcttcgaccaggacctcccggtcctggaccccgctgcgtcctccacgtacgccgcgctcccctgcggcgcggcgcggtgccgcgcgctcccgttcacgtcgtgcggggtccgaaccttgggtaaccaccggagctgcatctacgcctaccactacggcgacaagtcgctcaccgtcggcgagatcgccaccgaccgcttcaccttcggggacagcggcggcagtggcgagagcctccacacgaggcgcctgaccttcggctgcggccacctcaacaagggcgtgttccagtcgaacgagaccggcattgccggcttcggcagggggaggtggtcgctcccctcccagctcaacgtcacaagcttctcctactgcttcacctccatgttcgagtccaagagcagcctcgtcactctcggcggctcgccagccgcgctctacagccacgcgcacagcggcgaggtccggaccaccccgatcctcaagaacccgtcgcagccgtcgctctacttcctctcgctgaagggcatctccgtgggcaagacacggctgccggtcccggagaccaagttccggtcgacgatcatcgactcaggcgcgtcgatcacgacgcttcccgaggaagtgtacgaggccgtgaaggcggagttcgcggcgcaggtcgggctgccgcccagcggtgtcgaggggtctgcgctcgacctctgcttcgcgctccccgtgacggcgctctggcgccgccccgccgtgccgtcgctgacgctgcacctggagggcgccgactgggagctgccccgcagcaactacgtgttcgaggacctcggcgcgcgcgtgatgtgcatcgtgctggatgcggcgcccggggagcagaccgtaatcggcaatttccagcagcagaacacgcacgtcgtgtatgacctcgagaacgaccggttgtccttcgccccggcaaggtgcgacaggctcgtagcttcactgtag

SEQ ID NO: 21657 - DNA, 585 bp, Zea mays
  Peptide Sequence Number=SeqID_63436
atggggagcgccatcagcgaccgccacatccgcgacctagcccaccctgcctcccacgatggggagccacagtcggcgctcgaccggcggtcgcagatccaccaccggctcacgacgcgcgccgcgtggagcgggggcgtccaccggcggtactacaagacgagcgggtacggccggtgctacggcaacagcacgggcccgccgtgcgcggggtgggtggagatgatggtgcccgtgttctcgcgcgcggcgtggcggtgcgtgtggcacatgatccagaacgacctcatctacgcatggtgcatggactacatgctcggctactgcgcgcagggcgaccggagccgcaacgtcggggtcgtcgacagccagtacgtgctccaccggggcatccctacgctcgacgacgacggcaaggcgacgacgacggctgccacgtcggcattggggacggcagaccggttagcggtcaggcagcagtcctacaccgagctgcagctattcaacaggaggtggaagaaggccgtggcggaggactggtgctggaccgacccttacccgaacccggggacgaccactggctga

SEQ ID NO: 21658 - DNA, 204 bp, Zea mays
  Peptide Sequence Number=SeqID_63437
atggaggatcaactagaatcgtttgtaccagagaagctcgttcgtggtgtcaactgggcgcctgattcaagcgacgaagaagacaatgatcaacaggagaatactgctgccgaagaggatgatgttgatgttgctcatgctctaatgcaacttgcatcaacagagtttgcattcgagctaatgaacctgatatacacatgctaa

SEQ ID NO: 21659 - DNA, 369 bp, Zea mays
  Peptide Sequence Number=SeqID_63438
atggcgatcctactgggcgatttatatacgccatgggagagaagtggcgggcaatggaaatttgatgttttggcggctaaattttgtttcttcaggaagatcaaacgaaaaatcaaagctgcgctgggtgtgtccgatgcaagtaaaactcagcctgccaagagagctgcttcaaaaatgaaagatgaaccaagtgatgactcaataacggttgatgatgaagaacctcctcaaaagaagcagaaggaagcactttcagctgcaaaaaagaaagcagcagtgaggatgaagatgacagtagtgaggaaagttcgaatgatgagccaacaaaagttgaagaaaagaaggttgatgtccactgcgaaatga

SEQ ID NO: 21660 - DNA, 537 bp, Zea mays
  Peptide Sequence Number=SeqID_63439
atggccaccgggcggcccgtacgactcgtgctggatgcctccctcctcctcgacccctcctccaccagggaggcggcgacggtggctctgcggcccggggtagaggagctgttgcggatagaggttcctggtgttttaaatgttcaaaggcttcagcaattgcttctcaccttggctactctaataaaaagggcacataatgtttcggcgattttgaattttagtgagaattgtacaccagaatttttgacgccttacctggatggaatcgtgaataaattacttgttcttcttcagcaacctactgcgctcttgggagagcaacccgtctaccacgtcgtacaacattccattggctgtggggctgccaagcccccagtggcactgaccgacaaggaggctgggtattttggggattatcggcaaagcattatggctcacgacgaagcaggggttgcgaccagcgcgctggacgttgctggtgtgccgcctgatgctggcggcggctgctgcctggggcagcggcagagctcatga

SEQ ID NO: 21661 - DNA, 333 bp, Zea mays
  Peptide Sequence Number=SeqID_63440
atggagatagaatcggtcaagtgtgagtgctgtggcctgaaggaggactgcacccctcactacattgccaacgtgagatcaggcttccatggccaatggttgtgtgggctgtgttgtgaggcggtcagagatgaagcatgcaggaggaaggctcacccagtggctgggaacgtcttcacttgtggcggcgtccttcctcggtggcgcgtagggcgtggtggcggcctccagcagcgcgcgagcgtgctcctccctcggcggcggcgcggcccgctcgcggtggcacggcgacggcgcgggtggcgcgcagggtgtggtggcggcctccagtag

SEQ ID NO: 21662 - DNA, 294 bp, Zea mays
  Peptide Sequence Number=SeqID_63441
atggcggctcgatctgttaccgagatccacggaggaggtgctgacactggggcccacgagcttcggcagcgttgcgcgacgcgagcgagggacccggtcccatgcgaagtccgcggcggccagtgcgtgcccgcccaatctggcgaagaagacgagccgggcacggcgactgcaccgtggggccgcggggcagcgataggaaggaatcccaggcacgcgctatggcaccctgagacatttcatcagctgagatacatgaaagacatcatgaacatccgcgagatgatccggtaa

SEQ ID NO: 21663 - DNA, 255 bp, Zea mays
  Peptide Sequence Number=SeqID_63442
atggacatgggcgggaagtgggaacccaagttttcggcggtggggccgcgactgtcagtggggacgatcacctgggccatgggccgcagcagcagccagcaggccagttccgattgggcctttcgagtgggaactgaagaaagacaatatcttcgtctcgaggaccttcggtggggaaggatatcctcatcacgaaacttttcttatgacgaagctcctgtaatattcaatattatgctagtaacaaatgattag

SEQ ID NO: 21664 - DNA, 507 bp, Zea mays
  Peptide Sequence Number=SeqID_63443
atggccgttggggaggctatctgtcgatgggtgcaccggacagtccggtgcgtcacccaaccgttagggttcgaccgttggagctctgacaggtgggaccaccggacagtccggtggtgcaccggacagggcgccgagtctttgaaccttgccaagacttgtactcagattggtggcaaggttgcgcagtttgaaacttacacattcacgccgaggattggaaagactttgggtgaagtagttgagattgtgtcgtgcaccaagaataagtggggtaactggtgggatttttggttctacgtggcgctggaggataccgaaggggttcttgagctgccttcgtctattctgtactcgcactattatatcgcgttcccgcggtttaggctgaagaagggagataagagtgaagacacccttcggcgcacggctaggacaagaagcgaccacgatttggtggaagagatcgtgctgagccccgcctttgccattgagatgtggggttga

SEQ ID NO: 21665 - DNA, 108 bp, Zea mays
  Peptide Sequence Number=SeqID_63444
atgagcgtctgctgggagatggaacaccaactcgacagacatgtgtcttcttcagatacttcaggtgtaacaggatggaaagcccccggtggagaactaagtggctaa

SEQ ID NO: 21666 - DNA, 1023 bp, Zea mays
  Peptide Sequence Number=SeqID_63445
atgggggcgaagcgcgcggtgctggtgggcatcaattaccagggcaccaaagcggagctcaagggctgccacaacgacgtcgctcgcatgcgccggtgcctcgtcgaccgcttcggattcgacgagtccggcatccgcgtcctcatagatgacggctccgcgccgcagcccacgggggccaacatccggcgggaactcgcgcgcctcgtcggggacgcgcggcccggggacctcctcttcttccactacagcgggcacggcatacggctgcccgccgagaccgggaaggacgacgacaccggctacgacgagtgcatcgtgccctgcgacatgaaccttatcacagaccaagatttcacggagcttgcgcaaaaagtccccagtggctgtctctttaccatagtttctgattcgtgccacagtggagggctacttgacaagaccaaggagcagattgggcacagcaccaagcagaagcagaagcagacccagacccagacccagagccgggaacttgaggaacggtctccttctggcaccagcttccgggaattcctcaaagacgatgccagcccgaagataaagaagttcatgaaggtcatgctgaacaagttacagcaggggcagcacggaggcattgtgggcttcatgggcgctctggcacaggaggtcctgaaagccaagctcgatggcaaggaagaagaagagttcgacccggcaatgaaacagcacgtgcacagcgatcaagaggtgtacgccgggacgacggcaagggtgccgagcaacggtgtcctgatcagtgggtgccagaccgaccagacgtctgccgacgcgaccacgccgaagggggtgtcctacggtgcgctcagcaatgccatccaggccatcctcgcggagcgtgggacggtaacgaacaaggagctcgtgctgaaagcgcgcaagatgctgtcgaaacagggctacacccaacagcctgggctctactgcagcgatgagaatgccagtgcggcttttatatgctga

SEQ ID NO: 21667 - DNA, 1323 bp, Zea mays
  Peptide Sequence Number=SeqID_63446
atgaggagagttcatggaaggaccccaaaagcttacaactaccgatgctcacgacgaagctcgggttcaaagccccacccgcgcgccgacgggtccaagtccaagccgcgggcggcagcctcctcgccggcggccggatacgtgacgttccgcccggcgtccctgggcccgcgcgaggcccgcgcgctccgggaccgcctcgcgggggagctcacccaggtgcgcgccctcctctcccgcatcgacacctggcagcagcagggcccgccgcccgcggggctccgcggcgaggtgcggaagcggtgcgggcagatcctcaccaggctgcgcaaggacaagcggagcgtgtggttcaacgcgcccgtcgaggtggagcgcctcggcctccacgactaccacgccgtcatcaagcgccccatggacctcggcaccgtcaaggagggcctcgccgccgggaggtacgcctcgcacgacgacttcgcggccgacgtccgcctcaccttcaccaacgcgctgcggtacaacccggtcggccacgaggtccacaccttcgctggcgccctcctcgcctacttcgagaggatgtacaaggaggcgctcgcctgcttcgaggaagactgcaaacgccctgagccgccaaggccagtgccgcctgaattgacacctccacccgcagctgagcctgttgaggccaaggttaagccgagggcagggaatgtgaggatgcggaagcccaaggccagggagcctaacaagagggagatgagcctggaggagaagaacatgctcagggtggggctggagagtttgcccgaagagaagatgcataatgtgctacagattgtgcgcaagaggaacaacaatccggagatgctgggggatgagatcgagcttgatattgatgagatggatgttgagacacagtgggagcttgatcgtttcgtagctaacttcaacaaagcgctcaagaaatctcagcgtgctgtggtgatgaatggtggcgccgctgatgtaaccagtgctgctgtggctgagaatgacactgcacctgtcagcaatgtgcttacgttggttgacaatgatgatgtggagagagagaaacctgtgaggagcgctacaatggctgagcaggtggatgagtatgttgatattggggatgagatgccaacagccacttaccaatccatggaaatcgagaaggacgctgaaggtgcgactggctctcgtggttctggcagtggctcttcgtcgtccagtggttctgagtcgaggagctcaggggacagtgcctcaggagctggcaatgctcattctttggcttaa

SEQ ID NO: 21668 - DNA, 762 bp, Zea mays
  Peptide Sequence Number=SeqID_63447
atggacaggtcttatctttttcttgctcaggaattgcaagtttgttatgtttcatttacactatgttcagatttctcagaactgatgcatgtgtttctatgtaagctgcatggtgaataccatggccgagtgaagctatgtctaacctatgacgagccactgtcacatttgatatatgctggcgcagacttcattctcgttccttccatcttcgaaccttgtggtctaacacagcttattgctatgcgctatggatccatcccagttgttcggaaaactggaggcctgtacgacaccgtttttgatgtcgacaatgataaggatcgggctcaagcacaaggtctcgagccaaatggattcagtttcgaaggagctgatagcagtggtgtggattatgctctcgacaggcaaacctgccctagactacatggagttgtaccattctgctcgcaaaagctgatagcttttaccactagggaaatcaggctcgttttgcccagggttggcatgctatgtggtattttgaggaagaaaatcagggggtttaatttgattgggccacttgtaatgaccaagtttaacaataatgtctttgttatgaacaattatgtgaggactattgaattgactgagttttcactatttgaggaaacaaccatggttggtaaactcaccataggcaaccaaatagaaataatagctgaccaccttctgttatgcaaggaaagcagggactcgttctatgcaggaaagtttgcgtag

SEQ ID NO: 21669 - DNA, 909 bp, Zea mays
  Peptide Sequence Number=SeqID_63448
atggcgttgatcacgaatgtctctgactatgaggagcttgcaaagcagaagctgcctaagatggtttatgacttctatgccgggggtgcagaagaccagtggacactcaaggagaataaggaggcattctccaagattctcattgaggaagttagctcaattgcaccaggactccgtttcttccaactttcagtattcaaggatagggatatcgtgcaacagcttgtcagaagggctgaaaatgctggctataaggcaatcgccgtcactgtcgacgctccacgccttggtcgcagggaagccgatgtcaggaacagattcaggctgcctgaaaatgtggtgttgaagtgctttgaaggactggatctcagcaagatggacaagactaagggttcaggccttgctgcttacgccactagccagattgacagctctctttcttggaaggatatcaagtggctacagacgattaccgggctgcctatcttagtgaaaggagtcataacagcagaagatgctcgaattgctatcgaatgcggtgtcgccggcattatcgtgtccaaccacgggggccgccagctagactatcttcctgcaaccatcagctgcctggaagaggttgtgagagaagcgaagggccgccgtgtgcctgtgttcctcgacggcggcatccgccgtggcactgacgtgttcaaggccttggcgctgggagcctcaggagtgtttattggaaggcccgtactgttcgccctcgccgtggacggcagggcaggggtgaggaatgcgctgcggatgctgagggatgagctcgagatcaccatggcgctgagcggctgcgcgtcgctgaaagatatcacccgcgatcgcgttatcactgagcgcgacatgatccgtcgctctcggatatag

SEQ ID NO: 21670 - DNA, 1299 bp, Zea mays
  Peptide Sequence Number=SeqID_63449
atgagaggcctcctcgcgtgcgccaccctcgcccgccgcgccgccgcctcctccgcgcccgcgcgcgtccgccacctggcgggcgccgcggaggcggcggaggccgagctcaagaggacggcgctctacgacttccacgtcgcccacggcggcaagatggtgccgttcgccggctggagcatgcccatccagtacagggactccatcatggactccaccgtcaactgccgcgccaacggcagcctcttcgacgtcgcccacatgtgcggcctcagcctcaagggccgcggggccatccccttcctcgagtccctcgtcgtcgccgacgtcgccgcgctcagggacggcaccggcaccctcaccgtcttcaccaacgagcagggcggcgccatcgacgactccgtcatcgccaaggtcaccgaccaccacatctacctcgtcgtcaacgccggatgcagggacaaggacctcgcccacatcgaggcgcacatggaggccttcaacaagaagggcggggacgtcaagtggcacatccacgacgaccgatcgctgctcgcattgcagggtcctcttgctgcacctactctgcagttgctgacgaaagaagatttgagcaaaatgtacttcagtgacttcaagatgattgacatcaatggatatgcatgctttctgacgagaactgggtatcacttcgattctttatcgccattatttgagcagtattgtaaggattgtcttatttcttatttcagctacaccggcgaagatggttttgagatctctgttccgtcagagaatgcagtggatcttgcagaggccatcctagagagatcggaaggcaaggtgcggctgaccggcttgggcgcccgtgacagtctccgactggaggcaggcctgtgcctgtacggcaacgacatggagcagcacatcacgccggtggaagccggcctctcatgggcgatcggcaagaggaggagggcagagggcggtttcctgggcgcagacgtgatcctgaagcagctccaggaagggccaaagatcaggcgcgtgggcatggtcacgcaggggccgcccgcgcggagccacagcgagctggtgagcggctcgggggagaggatcggcgaggtgaccagcggagggttcagcccgtgcctgaagaagaacatcgctatgggctacgtgaagtcgggaatgcacaaggctgggacggagttgaaggtggtcgttcgcgggaagtcctacgacgccgtggtcaccaagatgccgttcgtgcccaccaagtactacaagccctcgtag

SEQ ID NO: 21671 - DNA, 267 bp, Zea mays
  Peptide Sequence Number=SeqID_63450
atgccagacgcagcgctcgtattctacggcttcccgagccgccatgccaacgccatgtccccgcctcgccgtcctctccgcctcgccatccagccgcgcagtcgcgtatcatcaggaagtattaacttgaatggtaaactcattgtcgaagttagaagacttggtggtgagactgtcatgtctaacatatttcacttagttgaagaagcccagacaagggtggtccctgttcaacgattggcggacaaggcgaatatttttgagtga

SEQ ID NO: 21672 - DNA, 228 bp, Zea mays
  Peptide Sequence Number=SeqID_63451
atgtccaaactacttaagtttgaccaggtttacaaagaatattgtcagtaccttatgacaccaaataggatgcttagtgggccaactgtagggatctttccttctacatacaacatgtgggactcgctttttgaaaaatggtccctaatagcttatggtttacttgaaaagttcatgaatactccggtaacagaattcaaggtgatattacagaacaatcatatctaa

SEQ ID NO: 21673 - DNA, 996 bp, Zea mays
  Peptide Sequence Number=SeqID_63452
atgtgggcgcaactggccgtcgcgctgttcgtggcgttagccgtggctcccccggcccgtggctccgacgtgccttcgttcccgctgtcgcaggcgcagtccccatccaactcctcgtccccgtccaacgccgcctcgcggccgtgccacctggacctctcggccgagctcttcggtggggtagccgcggcgtgcggcgccggcggggggccgggctcgctggaccgcggccgctgctgcccggtcctggcggcctggctcttcgcggcgcacgcgcgcaccgcgctgtccgtgcccccggcgcctccgccctcggcgctagtgggggacgagggaatggggcccgacggcgacgacgacgggcccatggtgccgtacgacaaccagaggtgtgtcgacacgctgggcgcagcgctggagcggcgcggggtggcgctgccccggcccaacgcgacgtgcgacacggtgctctgcttctgcggcatccggctccaccagatcggctcgctccgctgccccgccgcgttcgccgtcaaaactggcgccgcggccaggaacgccacgcccaccgccgcggtgaaggccctggagaagagctgccgcaacgcctcctacgccggctgctcgcgatgcgtgcagtccctgcaaaagcaaccatgggaaagggcaatcccgccaggtaaccaccggataggaccattccttgaaagcttgaacacgcatttgtggggacaaacctccttctttcgagcaagggcaaaggcggggtattcgccttcgtattcgccttcggcattgccccccgcctttggctccgggaagctgatcatggagggctccctgggcttcttcgaaaaaagagaagctgacagtgtccagatgcagaacgtgctgtccatcaggaatcctaaacctcctgatagagaagcctgcagcagcgtcagtcccggtgctgcgacagctacttgtggctcaaggagaagacgatctttttaa

SEQ ID NO: 21674 - DNA, 462 bp, Zea mays
  Peptide Sequence Number=SeqID_63453
atgtctctactactctataagaaggtaacgtgggcatccaccaggcttcaccatgcctccacccctcacgccacgccatccattccaggaccatccccgcatccacccccgccaccgggcgccgacgccgatccgcacggcacgcgcaccacggccgctgacgagcgggtcctcgctgagttcctcgaggcctccctccgcgtgccggacctctccctgcccccgcgaaagcgcttcagcttcccgccgccggtgctggaaccggacgagatcccttctcacaccctcgtttcgggtgacgcggacgtggagcagcgggcgattgcggcggcagcggagtccggcacggtcgacgctcgcgaggcgcgcgacgccgtggaggcggcgtcggggctcgtgttcgcagcgccagaggaggtgaagtgcgagacctggggagatggttctgaaaggagagattga

SEQ ID NO: 21675 - DNA, 507 bp, Zea mays
  Peptide Sequence Number=SeqID_63454
atgacagagcagtttgctgcattagcagcattatcccaaaatccaggccaagttcgtgatgatgccctcttggatttctataacaagtggcagcatgaatacttggttgtaagcaagttgtttgctcttcaagctacttcagagattcctggaaatgttgcaaatgttcagaagctgctgtctcaccctgctttcgacctgaggaatcccaacaaggtgtactcactaatcgggggattctgtggctcacctgtgaacttccacgcgaaagatggttctgggtacaagttcttgggtgagatcgttttgcagcttgacaagataaaccctcagaagcccagggagccctccatgatcagcttcccggagccaaaggcggggggcaatgccgaaggcgaatacgaaggcgaataccccgcctttgcccttgctcgaaagaaggagggaatgcgagatcaagccaaaagagacaagaacggaaaagatgagcaaaagcaatggcattag

SEQ ID NO: 21676 - DNA, 165 bp, Zea mays
  Peptide Sequence Number=SeqID_63455
atgtcgatcgttcagcccgccagaagtcgcgccaagccgtcccgagcaccattccgagacgacgagcagcctgtggttcctgagtgtgttgccaaagatcttcttgagcaacaacctggtgaaggcaagtgtcctatgacctattatgtcctacttactttataa

SEQ ID NO: 21677 - DNA, 663 bp, Zea mays
  Peptide Sequence Number=SeqID_63456
atggctcgcgcacgcgcaacggccgccccgcaagccactcgtcccgtcgcattaactccgcggcagggcaggcggcacctttggcaggcgaagcaggcgacgcttcacctccgccataatgaccgcgtcaaaaaagaggttagaaggctggcccctcggaagggttcaacagccgcctcagagcactcgggctccgcgcccactactggtcagaggctggccctcgaagggttcgacagccgcctcagacgcagagcgagggatgaccctaggtacgttcgatacataaccaaggctcgggctacgctcccgagggctcggactcggcctcggccccagaagacgacgaactccgcctcgcccgaccctagggctcgggctcggactcggccccggaagacgacgaactccgcctcgcccgacaccagggctcggactcggcctcggccccggaagacgacgaactccgcctcgcccgaccccagggctcggactcggcatcggcctcagccgatggtctccgcctcgcccgacccggggctcgcactcgacctcgaccacggaagacagactcgacctcgacctcggaggagcctccgcctcacccgacccagggctcggaccgaccacgacacaggggggccatcattaccctacccctag

SEQ ID NO: 21678 - DNA, 285 bp, Zea mays
  Peptide Sequence Number=SeqID_63457
atggcaggaaggggcagcctcaggagccgcctggccgaggtggtgggttgtgggccgtgggcgcaaaggtcgacagagaggtggtgcacggggctcgggctcggcgtggagaatgggaaggacagggacaccgcccaatgcttcttcgcgggcccaagagagctttggggagtggcgagtggggacttcaggaagcgaagcgtacgagtggagaataggtcctcatgtgtcgcgatggcaggatgtcgccgtacgcgcgaagcgcgatggatctggtggacttga

SEQ ID NO: 21679 - DNA, 345 bp, Zea mays
  Peptide Sequence Number=SeqID_63458
atggaggtaggaggccgaacgcaggggcacaacagagcggaggagagctcgggcgtcggaacaggaatgggcgagtgggggtcaagggctacgcgaaggtcgaaaccgcgcgagctccacggcaacgccgtggaggcgagagcgccatgggagagggagctcggctgggcgagctgtagagatgcgggagagaggagcagagatggggctggcgccgacgttcaggagcagcggctgatggagctcagcgccgtggaggagcaagagaggagctcagccccatggaggccgactgccatggctgaagaggagaggaggctatgcgttcctggtgctgggcaatga

SEQ ID NO: 21680 - DNA, 741 bp, Zea mays
  Peptide Sequence Number=SeqID_63459
atgggggtgtttccacggggctttgcccgcagctacccgccatggagtttctcggccacaggtgtggcgaattcacggcggaattcaacggcgtcgagctaccccagagtctatgctagtaaaatttgggcacgaggcgattctccaccgatcaaggaacatgacgaagctgagggatggaaattaccagcggacacgacccgccgcgagagtagttcgacgcccgaatgtcttcactggcacctgagcctagccggcggcaagcaatcgcggtcgcagctggcaaggcgggcgcgattttcgccgagcaatacgcaggtcgggcggctagttcggttcacgccgcgcgattcttgcggaagggatgattctggcaacccggacccacgcgccagtgaaaggaagacgcagagagcaagcggccgcgcggcgcaagggaggctgacccgcgggccccagttgtcggcgcgagtgtgcggaagcaggtcccagaaatgggccgagcgcggacactctccccccctggtgggccgaattaccatctggcggcccagcgatccacccctccggctccggctcctccgagcgctccgtgtcgtggctcgaactgccaccggcgtcgtcgtcgtctccgtctccgtcaaggggaaggcgacctctcagactccacctcctgctgaggcgaggggaagagtcctgctgctcctgctcctgtcgttggagctcctgctccttgtgtag

SEQ ID NO: 21681 - DNA, 1188 bp, Zea mays
  Peptide Sequence Number=SeqID_63460
atgaaggttctcgtcctcagcctcgtggccggcgccgtcgccgccgtgcggccgagcaagctgctgccggcggcggtgcctgcggtgtacgtgttcggggactcgacgctggacgtcggcaacaacaactatttgcccgggaaggatgtgcccagggctgacaagccctactacggcatcgacttgccgggctccggcaagcccaccggaaggttcagcaatggctacaacaccgccgacttcgtcgcccaagctctgggattcaagaaagagcccccttgcttatctggagctgaaagcgcggaagatgctaatcccgagcgctgtcacgagaggagtaagctatgcatcggcaggagctgggattctggattccactctcatcttcttgtacgatatgatccatgtatgtatattgtatactacgtcgtatgtctacgtgcgcgcgtgcagaacgccggaaacaacatcccgctgtcgcagcaggtgcggctgttcgagtcgaccaaggccgagatggaggccgcagtgggccagcgcgcggtgcgcaagctgctctccgcttccttcttcctcgtcagcgccggcagcaacgacttcttcgcgttcgcgacggcaatggcggagcagaacaggacagcgacgcaggccgacgtcacggccttctacggcagcctcctctccaactactctgccaccatcaccgagctgtacaagctgggcgccaggaaggtgggcatcgtcaacgtgggcccggtcggctgcgtgcctcgcgtgcgcgtgctgaacgccaccggcgcgtgcgccgacggcctgaaccagctggccggcggcttcgacggcgcgctcaggtccgccgtggccgcgctcgccgcggaccagctgccggggctggcctactccgtggccgacagcttcgggttcacgcaggcgtcgctggccgacccgctggggctggggttcgcgagcgccgacagcgcgtgctgcgggagcgggcggctgggcgcgcagggcgactgcacgcccgcggccacgctctgcgccgaccgtgaccgctacgtcttctgggactccgtgcacccgtcgcagcgggccgccatgctgggcgcgcaggcctactatgatggcccggcccagtacacctcgcccgtcagcttcaagcagctggcccgcatgaggataggctga

SEQ ID NO: 21682 - DNA, 568 bp, Zea mays
  Peptide Sequence Number=SeqID_63461
cccgagtccgagccctggggtcgggcggagcgaagttcgccgtcttccgggtcttagcccgagtccgagccctggggtcgggcggagcggagttcgccgtcttcctggtcttagcccgagtccgagccctgggtcgggcggagcggagttcgtcgtcttccgggtcttagcccgagtccgagccctggggtcgggcggagcggagttcgccgtcttccgggtcttagcccgagtccgagccctggggtcgggcggagcggagttcgccgtcttccgggtcttagcccgagtccgagccctgggtcgggcggagcggagtttcctatggcgcctttggcagggcctgactgcctgtcagtctcactctgtcaagtggcactacagtcggagtggcgcaggcggcgctgtccttctgtcagaccggcctctgcagctttatgctgatgggggttaccagctgagaattaggcgtcttgaggatccccagctgggtattaatcgattcggatcgccggacttctcggatatgaagactggatcttcgaccctcatcgtagataacaagtga

SEQ ID NO: 21683 - DNA, 231 bp, Zea mays
  Peptide Sequence Number=SeqID_63462
aaatctacttggtgttggggtccacttagcgtgaaggagctagagcaacttgagaaccaaattgagatatccctcaagcatatccgatcatcaaagaaccaccagatgcttgaacatctcttcgatctcaagcgcaagactcgcggaaatactaaccaacatagtgaggttttgcaggaacaacaactgcaagatgctaacaaagacttaagaatgaagatatatacatga

SEQ ID NO: 21684 - DNA, 144 bp, Zea mays
  Peptide Sequence Number=SeqID_63463
atggcggtgggtgcgctgcaaaagggggcgtggatggcggtagtgcgctgcaaagggggcgtggagcggtgcttgttccaggcttcaagggtaagcttcccggtatcttcttgggtgagaacacctagaggggggggtgaatag

SEQ ID NO: 21685 - DNA, 2664 bp, Zea mays
  Peptide Sequence Number=SeqID_63464
atggcggagatagtcaccggggcgatgggcactctcctgcccaagctggccaacctcatcaaggaggagtataacctacagaagaaagtgaggggtgagatcatgttcctggagactgagctcaagagcatggaggctgctctcatcaaggtctccgaggcacccatcgaccacccacctgacgtccaagtcaagctctggacaagggagccacatagtttcaagggattcattgatagaagcctccacctgctgacaaggggcaggattcaacacagcatcggcatagacatcaaggagatcaggagccgcataaaggatgtgagtgaacggcgtgacaggtacaaggttgatctggttccttccaagcctgttggcagaagcattgacaacctgcggctgtcggctctttacagaaaggcgacagaacttgttggcgccgaagagaagagcagtgaccttgtgaaaaggctcatggagggcgacaaggaggcatccaagcagccagttgtactgtctattgttggctttggagggttaggcaagactactcttgctaatcttgtgtatgagaagattaaagggcaatttgtctgtggggcatttgtttatgtgtctcataatcctgatgtcgtcaaggttttcaaaaacatgctctaccagcttgatggagacaaatacagggacatcaatcaaggaacatggagtgaagaacaactaatctgggaactgaggaagttccttctacacaagaggtactttattgtcattgatgacatatggaatacttctgtgtgggaaacaatccaatgttctttgatgcacaatgaatgtggaagtataataatcatcacaactcgtaatattgatgttgcaaaacaagctggaagtgtttatcaaatggaacctctttctctcagcgactcaacaaagttattctgccaaataatttttggcagtgaagacaaatgtcctccagctaatttagctgaagtggctggtaaaatcttacagaaatgtggtggtgtaccattagctatcattaccatggcaagtatgctagccaataaaactggaaaggaaataaacacacatagctattggtcacatgtgtaccaatccatgggttatggtctagatggcagtactaatgtgaagaatatgagaaggatactatcagttagttactatgacctaccttcacatctaaagacttgcttgttatacctaagtttgtatccagaggactacaggattagaacaagaggtctgatatggaaatggattggtgaaggttttgtccatgaagaacaagggaagagcctatatgaagtaggtaaggattatattgaagagttagttaacacaagtatgttagaacctgtcgggattggccatgatggtaagaccgtatcttgtcggatacatgatatggtccttgatcttatcagtttcttgtcaaatgaggagcattttctaacaaaagtaggtgggcaacaacccgtatctcttgatctgcctaaaaaggtccgccggttatccctccaaattagccaggaagaggaagccaagcagctagctacaatgagcttctcccacctgagatatttgagtctcaatgcgaaatttattactgagatcccaagggagattcggaatctgcaatttttgcaagtacttgacataactaatcttgggcacaaagtaaagatgacaaccattattcacttgcgacagctgttgcggctttgttctaggtctgggtggagcataaaacagctagacggatttggaaaactaacctctctacaagaagttaaagggaccataactatcgagtcaccaagcatgctgcatgatctggggtgtctgaccaatctcaggaccttgggcatcaactttcgtgattgggatgagagctatgaggaacctttcatccaatgtctatctaaccttgtcagcctcaaatccatgaaaataaaaggtaccatgatgagcagcctatgttccgaatgtgacaaattgtaccctggtcctcaacaactttgctccattgatatgaagtcacttgcaagaactgtcatcatgactagagtaccaagatggatgtcatcactctgctccctgtctagcataaagatcacattattagctctgggagtacaagatatccatgtccttgggagcataccatctctacgttgtctcagtgtacatgtgaaggaaaccagagatgaaaggttggtcattgacaagtgttatccattccggtgcctaactgagatgcaaatcgattatgaatccatggcggtggtgttcgcaccagggagtatgcaaaacctcaaagaactccatttattgttcggggtgaaagaggtaatgcataagtacggtgattgtaactttggtttggagcacctcatgtcacttgagcatgtctctgttaaaacaatgtacactatcatgcccgaggaggtggaggccgtaaaagatgaattccagaaatccctggacatgaatcctggcaagcccacgttgatagtagattatttgtatccgaaagaacatattcccttctctaattggcactgcattctcaacgtcgcatgggtactagtggcaaataagctctctgaagtcatgaattttctacagataatgtaa

SEQ ID NO: 21686 - DNA, 561 bp, Zea mays
  Peptide Sequence Number=SeqID_63465
atgaagctgaagcagctggagggcctcttgggtggcctgacccagttctccgaccccaaggtactgctgactgcgccaccgccaccgcccccacctcttgggtggcctttctttcttcctttctcgtaccctgctcgatttcgcctcgcccaaccccgacaaaagggagggggaaaagcggaggagtatctgacttttgccaccaatggcgtgtttttttacaacgagatggcgttgttgggtgtagctggagctggagcagtatgcgacgggccctcacatcgcgtcgcggatgctctacatgggaatcaggaggggctgacccctattataaatttatataaagaacagaacaagctccaaatgagttttaggaaacaaaaaagacatgttcttggtattgatattgacccacagtcacttgaacttgctcaagaaaatgctgctgatctggagctggacatcgatttagtttggtctgacataaagaacttaaatctgaaaggagaactgcgcatttttgtattaagaagaaagagaataggggaaaggtccccataa

SEQ ID NO: 21687 - DNA, 1011 bp, Zea mays
  Peptide Sequence Number=SeqID_63466
atgcgaccactaggctctcctgcccgtctgctcggttcccccgcccatccactcggctcccccgctagtccgctcgtatttcccgcccgcccccttgtttctcgctcaggtgcctcctcctccgtcccaccctcgccggcgatcttcacgatcccggcgccctcctctgtgtcgccctcgccggtgatcctcacggtcccagcgtcctcggccgctgcgacagagccatccctcagctccgttgagcctggctctctccctgaggcacctcgttccacctccttgtctcctcgtggcattcttcaccggtcggtgggtcattcaaaggttgaacggtggcaggaggctagtccgcgttcgatcgggaattgcagcatcgatagccgatcggttaagcatcatgctggtcctaagtccttcctagataggcttgcgaaattttgtgcttctggagattactcagctagctccgtgtacagggctctttttcaggggtcaattgggtttgagccagcagagaaggtgtggaaatcttgggctccccggaaatgcaaattctttatctggcttgtggagcatgatagatgctggactgctgataggcttgcgaaacgcagactggatcaccctgatcgttgtccgctttgtgatcaagatgatgagtccattaatcatttattgatctccagtgtgttttctagacagttctggtttcaacttctaatgattggagggctgcagttgttgtgtgcgacgattgatgtttgttttgagaattggtggcgaatctgctcttacaaggtggctaatcatttgaagaagggtttcaattcgctggttatcctaggtgcttggactatttggaagcatagaaacaagtgtgtttttgataattgtaatcctagtttagctgctgctcttcgggcggctagagaggaggctttatgttggtttttggctggtgataaagctctgtctggtctcttccatatagacgagctgctggcctag

SEQ ID NO: 21688 - DNA, 309 bp, Zea mays
  Peptide Sequence Number=SeqID_63467
atgattgttggttccaaaattcgcattgatgtcttccaagacaacatcctcaggccgagtcttgagagtttgtcggccgatgagcagcgacaatttgaagatctcatgaatcaggctcatgaagcagcaaaggataaattcatatcatacttcatggggaggtcgagcttgtgtctctcctaccttcactataaactcccaatctgctatggcgtggattgtggagtgtacttcaaagaacttactgctgtgacgctgagggcagcattgaagtttgatcttcaacaacttcaaacgatatcttcctga

SEQ ID NO: 21689 - DNA, 309 bp, Zea mays
  Peptide Sequence Number=SeqID_63468
atggctcggactctccctcgacttaagaagactaactccgcctcgccagagcctagaggtcggactcgacctcgacctcggaggagccttcgcctcgcccgacctcgggctcggacctgccacgtcacagggaaggccaccattaccctacccctagctagctcaggctacggggaacaagaccggcgtcccatctggctcgccccgccccttacggaagcaaggagacgtcagcaaggatcccacagccccgacagctgtccttccacagggcccaagcgctcctccgacggccacgacatcacatga

SEQ ID NO: 21690 - DNA, 354 bp, Zea mays
  Peptide Sequence Number=SeqID_63469
atgggcaagggtaacaaacgcatgcgcgagccaactcctccatccgaggactttggtgactcggaatactcagaggaggagttctcctctgagtccgaggggtctccggctcccgtctctcccccggcatcgtccgacgactcggacgactctcaggggattgtcgcggaggaggactcgcccgaggaggacggcgaaggtgacgacggcgacgacgacggaggcgacggcggcgatgacggtgacggcgacggcaggggcggcaacggcgacggcaagggtggcgacggcggcagcagcaggggcagcaacagcggcggcagcagcaagggcagcaacaaggccagtggctag

SEQ ID NO: 21691 - DNA, 1088 bp, Zea mays
  Peptide Sequence Number=SeqID_63470
atggccgcctcaggctattcgggctccgcgcccattactgatcaggggttcgaaggctggcccccgaaggaaggacagcgccgcctgcgccactccgactgcagtgccactcgacagagtgagtctgacaggcagtcaggccttgccaaaggcgccacggcgaactccgctccgcccgaccccagggctcggactcgggctaagacccggaagacggcgaactccgctccgcccgaccccagggctcggactcgggataagacccggaagacggcgactccgctccgcccgaccccagggctcggactcgggctaagacccggaagacggcgaactccgctccgcccgaccccagggctcggactcgggctaagacccggaagacgacgaaactccgcctcgcccgaccccagggctcggactccgccctggcctcggccgaacgacttccgcctcgcccgaccccagggctcggactccgccctggcctcggccgaacgacttccgcctcgcccgaccccatggctcgggctcggccacggcaacggaaggcagactcaacctcggcttcggaggaacccccacgtcgccctgcctagggcacagaccgccacgtcaacaggaagcgccatcatcatcctaccccgaatcgactcgggacgacgtcagcagggactcgaccgctccaacagctgtccctccgccaggctccgccgcacctccgacagccacgacatcacgccagcagggtgcccagatctctccggctgccacattggcatggccttcttagagaaggttggccgcgcgggaccgaggacgggacaggcgctctcttggggccgctcgcttccctcacccgcgtggacgcttgtaacccccctactgcaagcgcacctgacctgggcgcgggacgaacacgaaggccgcgggacttccacctctctcacgctcgactccggccacctcgcctctccccccttcgcgctcgcccacacgctcgacccatctgggctggggcacgcagcacactcactcgtcggcttagggacccccctgtctcgaaacgccgacagttggcgcgccag

SEQ ID NO: 21692 - DNA, 768 bp, Zea mays
  Peptide Sequence Number=SeqID_63471
atgggtacaacagctcccgtcgccggagctgtcgtcgtcagggtcaagcaaagcatgctgctcgtcctcgttatcgtcaccagcgtactggtcgtcggccccacggccgaccgtggagccttcgccagcccgccgccggaacccgtgcagtgctcgtccggcggcggcacggccaactgcaccgtgtccagcgcctatggcgtgttcccggaccgctccacgtgccgcgcggccgccgcggtgttcccggcgtcggaggacgagttggtgcgtgccgtggccgccgccgccgccgcgtccgggaccaagatgaaggtggccacccgctactcccacagcatcccgaagctggcgtgccccgggaacggcaccggggagggcctcgtcatcagcaccaggcggctcgaccgcgtcgtttccgtcgacgccgcgacggggcacgtcacggtggagagcggcgtcacgctgcggcagctcatcgcggaggcggccaaggccggacttgccctgccctacgcgccttactggtgggggctcaccgtaggcggcatgctcggcacgggcgcgcatggcagctcgctctggggcaacggcagcgccgtgcacgagtacgtcgtcgggatgcgcatcgtcacgccggcgcccgccgccgagggctacgccaaggtgcgcgtgctcaccgccggcaacccggacctggacgccgccaaggtctctctcggcgtcctcggcgccatctctcaggtaaaaaaatcatacttatcttaa

SEQ ID NO: 21693 - DNA, 519 bp, Zea mays
  Peptide Sequence Number=SeqID_63472
atggcgggcgtgcggtgcggctgcgggtggccggtcggggtggccgggatgggtgcagacggtccggttggcgagcacgagctctggcgacggtgtgcgggcgccgtgagagagtccttggcgcgggtcggcagcgaggttgctctgctcggtctccgggtgaggcggggtcgcatcgggtgcgcaggggcgctcggctgctggcgcggtcgtcgaggttggcgctgcctggtgcggtcggcttcgggggtcggcggctggagtcgagcgtcgggcacggcgacggcttgggctggcagctgcgcgggcgcggggcgcttggctccatgggcgcggacggctctggcgcctgggctgcgcgcgcggacaagcagagaagagagagggagagatggccgggtgggagagagaagtggaaagggtggcggcggctgggagatagagcagggtgggcgcggcttagggttaggcgcggccggcttcatgggcctaatgggccgcttcggctgggtagattag

SEQ ID NO: 21694 - DNA, 549 bp, Zea mays
  Peptide Sequence Number=SeqID_63473
atggcgggcgtgcggcgcggctgcgggtggccggtcggggtggccgggatgggtgcagacggtccggttggcgagcacgagctctggcgacggtgtgcgggcgccgtgagagagggcagggcgctcgggcattgcgtgcggctcctgggcggcttcgggtgcgcgcggggctacgcgtcggggagtgtcgggtcacgtgcacgctcggtgtgtgcggcgccagtccttggcgcgggtcggcaacgaggtttctctgctcggtcttcgggtgaggcggggtcgcatcgggtgcgcaggggcgctcggctgctggcgcggtcgtcgaggttggcgctgcctggtgcggtcggcttcgggggtcggcggctggagtcgagcgtcgggcacggcgacggcttgggctggcagctgcgcgggcgcgttgcgcttggctccatgggcgcggacggctctggcgcctgggctgcgcgcggacaagcagagaagagagagggagagatggccgtgtgggagagagaagtggaaagggtggcggcggctgggagatag

SEQ ID NO: 21695 - DNA, 234 bp, Zea mays
  Peptide Sequence Number=SeqID_63474
atggcagcggcaatcaaggtcaatcccccagcccagagagcactgccagcacgacggagccccgatgagcacccaaccgggacggcgaattcccccaatggctcccaaggcaccgatcgaggcaccatgccctcggcggcgatcctcgcccgaggtagccccagcccccaacagccacgagcccgattccaaccaccggtcgccactatacgatgcccagaacagcacaaataa

SEQ ID NO: 21696 - DNA, 306 bp, Zea mays
  Peptide Sequence Number=SeqID_63475
atgaggaaagacgatgacagggctgagaaggcggtgcgcgtgctatacgctgggagtccgacaccaagagccatggaggaccatcacacggggaaggaggaccaccgcgccatagccgtcgaggcggagcttccatgctgcggtggaggaccttgcctcgactgcggcaaccgcgtgatggagcaaactgtggcactggtagaagctcgagaaaaggattgccgctatggtagaacaacgcggctggagcaaacagcgacactggtagacatggcgaaggtgctcgaagctacatccatggcgtaa

SEQ ID NO: 21697 - DNA, 618 bp, Zea mays
  Peptide Sequence Number=SeqID_63476
atgggcgaatgcaaagcacacctggagaagaagctttacgacgttcgcctcctcaccgccggttgccggcggtccgttcgaagcttggtgattggatggccgattcgccgagcatcgccatccagagctctcgacgctagctttcgtgccccatgcggcggctatagtagcccacgcgaacaaattcgacgtgctccgaaccaccagcccctcgagacctccaacactcgcgccgcggccgccacgcactggcagacgtgcctggcgggaggcgaaggggaggagaacgacgagactgggcgggctttgcattcgccgctcgccgtggttacccgtcgtcgactcctccccacgcacacgcccgcatcgcgcatgctcccgcttccacgcgtacggctgtgcaagacgtggcatgagctacccatgcggatgaggggaacgccacgcgtgcgcatcaaccttaccacatgtacgggctacggcaacgcagtacaaggacgaggttcagccatagattggtttagctcgatcgatcggtatctgacggtggtggctgagtttgcagctgcgttcccggctgggcgtacaaggactataatttctggttctgaagtctga

SEQ ID NO: 21698 - DNA, 738 bp, Zea mays
  Peptide Sequence Number=SeqID_63477
atggctcgtctgctcgcggcgcgagcccttgcgctggcccgcccctcggggacgccatccgccctacgcttctgcccctcccgtgcgctgtcggacgaggtggagttcgtcgagatcgacctatccgaggagtcccctgcctcttcatccggaggggaaggcgagggcgactcagccacggttcaggcgcagatggggtcgcggcgcctggaggacgccatctatggggtgctcgtgcgccgggcggcgcccgaatggctccccttcgtgcccggggcatcctactgggtcccgccgttgccgcggccgctcggggtggcgagtctcctcggcgcggctgtgtacaccgcgaggggcgccacggcgatgacggaggaggaggcgttcagcttcactaccgtacgggggtgtccatccgcggcgtactttgtgggaggtttgagcgggttcgcaaaccaagccgtgtgcatgtactctggtctgggttgggtagctctgcacagaaatctgcatggagattggttatgtatctatacacttagaatacatgacattccccaaggtcgagaaaaccccggaacccctgccaaacccatacacagtgtcaccgtagcccatgtggtcagagtttttggtctccttaggctccaaagtgtccagggccagaaatggctcctaccgaagagggctgctcggggctgtgaagctcctctgatgattgtagatgtagacagctag

SEQ ID NO: 21699 - DNA, 375 bp, Zea mays
  Peptide Sequence Number=SeqID_63478
atggcctgcactgccgcctgctggtcagctggtctggcgcggtggcgcctggcggttgtattccccttcgtactaatctacccttaccctgacttcgagtgttcttgccgcggctgcggccgtaactgcgcggctactggagctcgcggccgacaacgactccacgacgctcggggacctcctcgcggcgcgtactcccacgactggacggagtgccccttcgtccaccccggcgagaacacgcggcggcgggacccgcgcaagttcctgcaagaaagaagctcactggcctccaacgccaagatcaaaatcgatgacatggatacaggacgacgtgctgccaccaatttcgtcaagaactggagcacgagctag

SEQ ID NO: 21700 - DNA, 1164 bp, Zea mays
  Peptide Sequence Number=SeqID_63479
atgaagttgcatcaagtttggcagctgggcattaaggatatgaaggccgtcccacttcctcgcccgagggcagccacgagaaggcgcgcgtggatgctcgccgttgcagcttttatcttcgtcgcactagtctgggcttatctgtatcctcccccgcgttacacctctcctgtgagagattggcttcctggtaggctccctgcggaaccagccagggaattcactgatgaggagagggcctcgcgtgttgttttcagacagatcttaacaacacctcctgttcgatctaagaactcaaaaatagctttcatgttcttgactccggggacactgccatttgaaaggttgtgggaaaagttctttgagggccatgagggaaggtataccatatatgttcatgcctcaagagagaagccagaacatgtcagtcccatatttgttggtcgagagatacacagtgaaaaggtaacttggggtacaatttctatggttgatgctgagaggaggttgctggcaaatgctctacaagacatggacaatcagcattttattttgctatctgatagttgtgtacctttgcacaattttgactatgtatatgactacctgatgggtgcaaatctcagttttattgactgcttttatgatcctggaccgcatggaaattttagatattcaaagaatatgttacctgaggtcacagaggctgattttaggaagggttcacagtggttctcagttaagcgccaacatgcgttgatgatcattgcagatagtctttactataccaagttcaagcttcattgcagacctgggatggaagatggtcgcaactgctatgctgatgaacattatttgccaacagtattccatatgatggacccagatggaattgctaattggtctgtaacccatgttgactggtctgaagggaagtggcacccgaaagcttacagggcaaaggatgtcactttcgagcttctgaagaatataacatcaattgacataagtcaccatgtcactagtgatagcaagaaagtggttacagagaaggcctgcctatggaatgaaacaaagagaccatgctacctgtttgcgagaaagttctaccctgagtccataaacaatctcttgaccttgttcgcgaattatacacttatttga

SEQ ID NO: 21701 - DNA, 642 bp, Zea mays
  Peptide Sequence Number=SeqID_63480
atgaagcccacaccaaggtggcccacagccagccaagacgcccagccagcattcccgcaccgcacccttgaggccctgactctatccctagtgaccaaatcgatggcagcacccgcagcgtggcttagctatggtgcatcctgcccagtggtgctgcgagttagtgatggcgcatcccacggcaagcgtggcgcatcggcgcatcagcacccgccgcagggcttagctatggtgcatcctgctcagtggtgctgcgagttagcgatgacgcataccacgacgagcgtggcgcgccggcgcatcagcaccttgaaagccgatgcgacggtgcagcgggcgggaggtgcagctgctcatccaccacaggctcctgctcgggccgagaaccgtgctgctctgcctgcccagaatgatggcaatgagcagcccaatggcccggaaggcctcgacactaacgaatccaacgaaggtgacgaaggagggggaagggcgacgaggcggttccagccgagcaggggcatgctccggacctggcaggggggtttgacggcgacaggagaagcgggcgtcgcgggtgaaggagatttgcagagagtgggggaggatcagcgcctgggcattgcaggtcgagtggggaagtag

SEQ ID NO: 21702 - DNA, 624 bp, Zea mays
  Peptide Sequence Number=SeqID_63481
atggcagtcttgctgtggcggtgcatatgcgggccccaacaatccttcagtaagaatcgaggcgcatccaccccttctcctcttgctggcaggagatccaaatactcgggacaatctgtgaaagcaatgcccatgcgtttgttaacggttggaaagaagaggtctcgggggacacaactccttgttgaagaatacaaggagaagctcggtcactattgcgagttcgaggacactcttatcaggtccaacccaaagcttacaagtgatgtaaaggtgcaagttgaagcagaagacacggctatgatgcagcaactcaagtctgacgattttgtaatccttcttgctctggtagttgtgctggatgaaaacgggaaggatgtcatatccgagcagatagctgatctgattggggatgctggcaacacagctgtcctcactagttttgaaccatcaagttgccttgatagtcctcatggagcagctctacagggcatggactataataaaaggacagaagtatcaccattaggcctaagtgctatcatcattcgctgctctgaggttctgcaaaagcgaatggcacacctgaacattcttcttttactgagatcaagcgtgtcataa

SEQ ID NO: 21703 - DNA, 1440 bp, Zea mays
  Peptide Sequence Number=SeqID_63482
atgggtgctcgctgctccaagctctccgtctgctggtggcctccccacttcaaatcgccaatgctcgagaatggcgccgccggagatgatggcagcggcgtgccggtgttcgccgagtacagcttcgacgacctccgggtggccaccgacggcttcgcccccgatcgcatcgtgtcggagcacggggagaaggcacccaacgtggtctaccgtggcacgctcttcagctccggccgcaccgtcgctattaagcgcttcggccgctccgcctggccggactcacgccagttcctggaggaggcgagggctgttgggcagctgcgtagtggcaggctggccaatctgatcggttgctgctgcgagagcggcgagcgtctcctcgtcgcagagttcatgccgcacgagaccttggcaaagcatctcttccactgggagacaaatccattgagttgggcaatgaggatgagggctgcgctttatgtggcacaagcgttggactactgcagtagcaaagggagggcactctatcatgacctgcatgcatacagggttgtctttgatgtggatggtaacccaagattatcatgttttggtctgatgaagaacagccgagatggaaagagctacagtactaatttggccttcacgcctcctgaatatcttaagacaggcagagtaagtcctgagagtgtggtttacagttttggcactgtcttgcttgatctcctgagtggaaagcacattccaccaagtcatgcactcgaccttataagaggaaagaactttctagtgctgatggattcttgcttagaaggtcatgtatccaactcggacggaacagacttgatgcgattagcatcccgttgcctgcaatatgaagcacgtgaccgtccaaatctgaaaactgtgactccttcgcacactttgcttgggattcaacatgataagaacaactcaggtcaagtttccttatctgctattgggaaagcttttgccagagcagacctgaatgaagtgcatgaaatattgctgcatgatggatataatgaggacgacgaggctaatgctgagctatctctccagtcatggaatggtgatatatctgagagctttgttgttaagaggcgtgcagacaatgcctttaggtctaaggaatacacgactgcaatcgagtgttactcaaggttcctcgactcaggtgcagtggtggctccaaccatgctgggacggagatgcttcgcacatgtggtggccggcaacccacaggaaggcctcgaggatgcaaagagagccgagattattgcatcggactggccgatgggacactacctgcaggccctggcacttcataagctgggtagggaggctgaaagccaagaagcactgaagaatggcactgccttggaagctgcaaggaatagtagagctagaactgtatag

SEQ ID NO: 21704 - DNA, 207 bp, Zea mays
  Peptide Sequence Number=SeqID_63483
atggcgggacacacttttcagcttgagaaggaccttaaggaacaacaggttgtgcatggtgaggtggaaaacactttagggcctggttttatcaacttggcattagagaatccaataccaaaggattggagaactattcatatgattggagctgaaagcaatctacttgatattgtctctaattctgttgccacatctataacttaa

SEQ ID NO: 21705 - DNA, 231 bp, Zea mays
  Peptide Sequence Number=SeqID_63484
atggccgaggaccgaatcgaagatggggaggacgctgatggcagccttcgcatggaggcccgatggagttggtcttcggtgcctgacgacgctcgcaatgacctcagctacccgatcctgtctgctttgcgaagagatttgagccgtagcgatcggtgcgccaacggacccatcccggcatgcgaacacggtgcggatgcgaacacggtggagttggtctttggtgcctga

SEQ ID NO: 21706 - DNA, 129 bp, Zea mays
  Peptide Sequence Number=SeqID_63485
atgtgctgctggcgacgctgcgctatgctgctgtgcgccaccgccatggacgtgcgctggcagtctgcaccgcgtcatggcagcagccgctgctggttgagcccgaccgccaccggtcgcatattttag

SEQ ID NO: 21707 - DNA, 489 bp, Zea mays
  Peptide Sequence Number=SeqID_63486
atggatgagactcctacgtgcctctgctccagcgatggacgtcggggcgcccttctctggcccatggccgccacggtccgcagagcagagaagcacctctgttcctccttccttcctccaatgtctaccgacgccatggaaccaaacccaagatctccatctctaatccagcgcgcagggcatttctcagggtccgagctcgagcagcgcctaaagcgaacccctgccgcgcctgagatccgggcagccatggagggcagccggaccctttctccatggccgccaatcgtcctgctcctttcccctggtgtgctcgacgcctggtgcttcgacctcgacagcttcccctgcgagcgacacctctgctcggctccctctcccgccagcgagctccccttgctcggcccttcgctagtgcagcccgcagggcgcgtccctcctggaggacgagagcgaggcccaccattgacgcctctccctcagcggtag

SEQ ID NO: 21708 - DNA, 294 bp, Zea mays
  Peptide Sequence Number=SeqID_63487
atggaagcaaacccaagatctccatctctaatccagcgcgcagggcatttctcagggtccgagctcgagcagcgcctaaagcgaacccctgccgcgcctgagatccaggcagccatggagggcagccggaccctttctccatggccgccaatcgtcctgctcctttcccctggtgtgctcgacgcctgcccgcagggcgcgtccctcctggaggacgagagcgaggcccaccatcgacgcctctccctcagctgcagcacctgcagcaccctccctgtttccttcaccggctga

SEQ ID NO: 21709 - DNA, 330 bp, Zea mays
  Peptide Sequence Number=SeqID_63488
atggcaaggagactccaatcaccttcgatggcttggatcgggacctttgacaaaatcgaagacgaagccaccgacctgcgaggagggaaggggcggcgtttggctacatcaaacttggacgaatggacggtcgtcctcagtgctggcttgagctcgcgacgacctctgttcggacctgtccggctccggcaacttggggcccagcttcgccactgccttcgacaaacaacgccgggaacaaccggcgccgcggggagacagttgcaaccggaaaggagcgcgagaggaagcttccgccccgacgcgggagggagaagagtcggcgtataa

SEQ ID NO: 21710 - DNA, 2901 bp, Zea mays
  Peptide Sequence Number=SeqID_63489
atgggccttgtactgatccagggagtcgtcggacttgagctttctgtggaaaatccacttgccggtgaccacgttggtgccagggggacacgacaccaagtcccaggtgtggctggacagaagggctgcgtactcctccatagcgcgacaccaataaggatcggcgagaacggtgcgggcggaggaggggacaagtttgcgaccgaactggtgaacggtcctagtactaagatgtgcaccttggatctgcattctgcatcacttaacaagattagaattccagaatgcattttatgggttcatggacctatcattcatggtcttatacgcggggagaatatggagctgggacgtgattcagatacaggtggtcaggtgaaatatgttgtagaacttgctagggctttaggttcaacaccaggagtatacagagtggatctactaacaaggcagatttctgcacctgatgttgattggagttatggggaacctactgagatgctcagtccaataagttcagaaaactttgggcttgagctgggcgaaagcagtggtgcctatattgtccggataccattcggaccaagagacaaatatatccctaaagagcatctatggcctcacatccaggaatttgttgatggcgcacttgtccatatcatgcagatgtccaaggtccttggagaacaaattggtagtgggcaaccagtatggcctgttgttatacatggacactatgctgatgctggtgattctgctgctttactgtctggggcactcaatgtacccatggtattcactggtcattctcttggcagagataagttggaccagattttgaagcaagggcgtcaaaccagggatgaaataaatgcaacctataagataatgcgtcgaattgaggccgaggaactttgccttgatacatctgaaatcataattacaagtaccaggcaagaaatagaacagcaatggggattatatgatggttttgatctaactatggcccggaaactcagagcaagaataaggcgtggtgtgagctgctttggtcgttacatgccccgtatgattgcaatccctcctggcatggagtttagtcatatagcaccacatgatgttgacctcgacagtgaggaaggaaatggagatggctcaggttcaccagatccacctatttgggctgatataatgcgcttcttctcaaacccccggaagccaatgattcttgctcttgctcgtccggatccgaagaagaatatcactactctagtcaaagcatttggtgaacatcgtgaactgagaaatttagcaaatcttacactgatcatggggaatcgtgatgtcattgatgaaatgtcaagcacaaatgcagctgttttgacttcagcactcaagttaattgataaatatgatctatatggacaagtggcataccccaagcaccataagcaatctgaagttcctgatatttatcgtttagctgcgagaacaaaagctgctgcatatggtctacccatggttgccacccgaaatggtgggcctgtggacatacatcgggttcttgataatggaattcttgttgacccccacaatcaaaatgaaatagctgaggcactttataagcttgtgtcagataagcacttgtggtcacaatgtcgccagaatggtctgaaaaacatccataaattttcatggcctgaacattgccagaactatttggcacgtgtagtcactctcaagcctagacatccccgctggcaaaagaatgatgttgcagctgaaatatctgaagcagattcacccgaggactctctgagggatattcatgacatatcacttaacttaaagctttccttggacagtgaaaaatcaggcagcaaagaagggaattcaaatgctttgagaaggcattttgaggatgcagcgcaaaagttgtcaggtgttaatgacatcaaaaaggatgtgccaggtgagaatggtaagtggtcgtcattgcgtaggaggaagcacatcattgtaattgctgtagactctgtgcaagatgcagactttgttcaggttattaaaaatatttttgaagcttcaagaaatgagagatcaagtggtgctgttggttttgtgttgtcaacggctagagcaatatcagagttacatactttgcttatatctggagggatagaagctagtgactttgatgccttcatatgcaacagtggcagtgatctttgttatccatcttcaagctctgaggacatgcttaaccctgctgagctcccattcatgattgatcttgattatcactcccaaattgaatatcgctggggaggagaaggtttaaggaagacattaattcgttgggcagctgagaaaaacaaagaaagtggacaaaaaatatttattgaggatgaagaatgctcatccacctactgcatttcatttaaagtgtccaatactgcagctgcacctcctgtgaaggagattaggaggacaatgagaatacaagcactgcgttgccatgttttgtacagccatgatggtagcaagttgaatgtaattcctgttttggcttctcgctcacaggctttaagtataaaacaatgttttgcacgtctgtttgcacggtatttgtatatccgatggggggtagagctgtcaaacatcaccgtgattgtcggtgagtgtggtgacacagattatgaaggactacttggaggcgtgcacaaaactatcatactcaaaggctcgttcaatactgctccaaaccaagttcatgctaacagaagctattcatcccaagatgttgtatcctttgacaaacaaggaattgcttcaattgagggatatggtccagacaatctaaagtcagctctacggcaatttggtatattgaaagactaa

SEQ ID NO: 21711 - DNA, 828 bp, Zea mays
  Peptide Sequence Number=SeqID_63490
atgcaggcggcatgcaactgcaccaagggggtgcaccctttcgacttcgacgcgtccagcatggaggcccaggcccacatgtcatgtaaccggcgcgccggttactatgtgcgagaaactgcaccgccacttgcgcctgtaccgcgccctctcgactgcggaactggtgccgcgactcgaggcaaccctgcgcatggcccaacagtgccaaccgagcacatcggtcacggggaccgggaaaggggatactccgaaagggatccttctccgcgaaggaagtgggccccgagcccccctactgatcagaggttcgaaggctggcccctcggaaagggttcgacagccgcctcagagcactcgggctccgcgccaactactggtcagagggtgaggctgacaaccgtcaagtccggcctcaggcgccataggaagctccgcctcgcccgaccccagggttcggactcaacctcgacctcggacgacggactccgcctcgcccgaccccagggctcggactcaacctcgactccggaagacggtctccgcctcgcccgaccccaggtctcggactcaacctcgacctcggacgacggactccgcctcgcccgaccccagggctcgggctcaacctcgacctcagacgacgaactccgcctcgcccgaccccagggctcggactccacctcgactccggaagacggtttccgcctcgctcgaccccagggctcggactcagcctcgacctcggaggagtcaccgcctcgcccgacctcgggctcggaccgaccacgtcacaggggggaccatcattaccctacccctagctag

SEQ ID NO: 21712 - DNA, 282 bp, Zea mays
  Peptide Sequence Number=SeqID_63491
atgagggcaaatagcgtcggtggtccttgctgcaaggggcacaagaagtcgttgccttcgtccggcaccactgatgacatggccactgctgatgatgagggccaccaccagctttcccacgcgcctcggcttcgagcacttgctgcatatgggagcagagggagtcggcggcagtggagggtcatgggccacgacggcgagaagactcgtgaggtgggggagatggagagagatgggggcacagatctcacgggggagatagagagagggcgttctccttga

SEQ ID NO: 21713 - DNA, 1359 bp, Zea mays
  Peptide Sequence Number=SeqID_63492
atgggcagcttggacaccaatcctaacgccttctccgccttcggcgtcgacgccaccaccggcttccagcccctccaccccgacgacgtccgcgcctacctccacaaggccgtcgacttcatctccgactactacaagtccgtcgagtcactgcccgtgctgccggacgtcaagccagggtacctgcggcagcagctaaggccgcgccagccgccacggagatggaggtcctcgcgctcgactggctcgcgcagctcctgcgcctgccgccccagcttcatgaaccgcaccggcgcagctgggcgcggcaccggcggcggcgtcatcctcggcaccactagcgaggccatgctcgtcacgctcgtcgccgcgcgtgacgccgccctccgccggactggctcccagggcgtgtccggccttccgcggctggctgtctacgccgccgaccagacgcactccaccttcttcaaggcgtgccgcctcgccggcttcgacccggccaacattcgctccatccccaccggccccgagacggactacgccctcgacccggccaggctcttcgaggtcatgcaggccgacgtcgacgccggcctcgtgccgacctacgtctgcgccacggtcggcaccacgtcgtccaacgccgtcgacccggtcggagccattgccgacgtcgccgccgtgttcaacgcctgggtccacatcgacgccgcctacgccggtagcgcgtgcatctgcccggagttccggcaccacctggacggcgtggaacgcgtcgattccatcagcatgagcccgcacaagtggctcttgacgtgcctggactgcacgtgcttgtgggtgcgcgacacgcaccggctcactgactctctcgagaccaatccggagtacctaaagaacgacgccagcgactccggcaacgttaccgacctcaaggacatgcaggttggcgtcggccgccggttccgggggctcaagctctggatggtcatgcgcacctacggcgcggccaagctccaggagcacatccggagcgacgtcgccatggccaagatgttcgaggacgccgtgcgctccgacaaccggttcgaggtcgtggttccgaggaactttgctctcgtgtgcttcaggatcaagccccatggtggcggtataatgacggaggaggacgcggacgaggccaaccgtgagctcatggagcgcctcaacaggaccgggaaggcttacctcgcgcacacggtggtcggcgacagatttgtgctccggttcgccgtcggttcgtcgctgcaggaggagaggcacgtccggagcgcgtgggagctcatcaacaagaccaccactgagatcatgcagaaataa

SEQ ID NO: 21714 - DNA, 1410 bp, Zea mays
  Peptide Sequence Number=SeqID_63493
atgggcagcctcgacaccacccctaccgccgccttcgccgacgtcgccggcggtggcttcgagccgctcaacgccgacgacgtgcgctcctacctgcacaagtccgtcgacttcatctacgactactacaagtccgtggagtctctgcccgtgctgccgggcgtggagccgggctacctgcgccgcctgctgcagtccgtgccgcccacctcctccgcgcccttcgacattgccctaaaggaggccagccccgcctccaccgagatggaggtgctcgcgctcgactggctcgcgcagctcctgcgcctgccgcccaccttcatgaaccgcaccgccgctgcagggcgcgggaccggcggtggcggcgtcatcctcggcaccaccagcgaggccatgctcgtcacgcttgtctccgcgcgcgacgccgccctgcggagggcaggctccgtcggggtcgctgggatcaccaggctcgccgtctacgccgccgaccagacgcactccaccttcttcaaggcgtgccgcctcgccggcttcgacccggccaacatccgctccatccccaccggcccggagacggactacgccctcgacccggcgaggctgctcgaggtcatgcaggccgacgtggacgccggcctcgtgcccacctacgtgtgcgccacggtcggcaccacgtcgtccaacgcggtcgacccggtcggagccattgccgatgtcgccgccgtgttcaacgcctgggtccacatcgacgccgcctacgccggcagcgcgtgcatctgcccggagttccggcaccacctggacggcgtggagcgcgtggactccatcagcatgagcccgcacaagtggctcatgacgtgcctggattgcacgtgcttgtgggtgcgggacacgcaccggctcaccgattctctcgaaaccaacccggagtacctcaagaacgacgccagcgagtccggcaccgtcaccgacctcaaggacatgcaggtcggcgtcggccgccgcttccgcgggctcaagctctggatggtcatgcgcacctacggctccgccaagctccaggagcacatccggagcgacgtcgccatggccaagatgttcgaggacgccgtgcgtgccgaccaccgcttcgaggtcgtggtgccgaggaacttcgcgctcgtgtgcttcaggatcaggccacagggcaccgacttgacggaggaggacgccgacgtggtcaaccgtgagctaatggagcgcctgaacaggacgggcaaggcgtacctggcgcacacggcgatcggcggcaagttcgtgctgcggttcgcggtggggtcgtcgctgcaggaagagaggcacgtgcgaagcgcgtgggagctcatcaagaagacgaccaccgagatcttcgaggaagagacgatgtag

SEQ ID NO: 21715 - DNA, 657 bp, Zea mays
  Peptide Sequence Number=SeqID_63494
atggtggcgaggatgacaaactggtcattgttgttgttcctcctccgcgtcacctccagcgccaagatgacgccacagtccttgatatatttgtctacgaacgcgcgcgacatgatgtgccttctttgccaagtgttatggtcaatgcactcggcaaaggcacttatcggtacccaaggttgggctacccacttctactgggtcaatgcgggatccatgtggctacccatagcacacggtgataggcagtctaccctgactcaaagtctgggtccatctgatagggccactggcctctgggtcagtgtcaccatatgccccatcggtgggattgctcggcaactacagcctatggccggacccccacatatgccatctaaacatccagccaagggaggcccgatgctactgcgtgtctgggccatcacgaatgagatccgaacctccataagtgtcatacggatgcccagccagggaaggtccgggactgccacatctgcatgcattatgaactctcgctctccactcaagcggggaaacgatgcttccatgtggcctacagcgcatcacgaaagccgcaggcatagcctcatgcgagcctctagcatggggccgcccgcattaaatacggataggaagcatgcctattcacattag

SEQ ID NO: 21716 - DNA, 195 bp, Zea mays
  Peptide Sequence Number=SeqID_63495
atggctcctcattaccaagctgctaccttgattgcctctttgtcttacccaaatgccattgcatggtcaggtgacaatctcgtggctgtcgcatctagtcatattgtaactattctgttttcaatgtttgaagaaaacatcattaaagaggcttgcttagacgctcttaagcacgaggtggaactctggcgatga

SEQ ID NO: 21717 - DNA, 1146 bp, Zea mays
  Peptide Sequence Number=SeqID_63496
atggccatatcatcctccacctcgcgaacacaagatctggtgccattgctgtgtctgttgctaatggcagcagcagcaccacagcatagttgtgcgtcgccgccgttgcctgtgacactcccagggtgccccgacaagtgcggcaacataagcatcccctaccctttcggcaccaaggagggatgcttcaaacccgacttcgaggtcctctgcaacgacagcttccatccgcctcgcgccttcatccagatggcgggagcgaagatcaccgtcgacgacacgtactacaagaccaacgaggacggcatgccggacaatgatatcggaagttctgaatggccgatcgagctcgtcgacgtgtcggtctcggaggggaaagcgcgggtgctcggcgccttcagctacgactgcaagatgaacgacacgtaccacgcggtgaggcggcaggagatcgacttgggctactggatgccgttctccatgtcggacgccgatgatgtgctcatgggcatcgggagcaacgtcgtcgccaagcagacatccggaccgcagtgccagtcctacctcttataccagctctccaccaggaagaccgacgaccccgtcaacgggtcttgctctgggcagggctgctgcagcgccaaccttcgctctggtggcatggccgccaccgaggtgacaatccagaagaacaccaaagacgacggcggcttctacggcgacggtgtctcctgctcgtacgccatgatcgtggacaagtcctggtacaacttctcgtcgccggatgtcgacagcgacgctttcctacggaggaacgccgcgggggtccccgtcgtcgtaaacttctccttcggcgtagatggctgtcccaacgccagcgaaccaacgccagatgacttcgcctgcgtaagcaactacagcacctgcatcgagcgaccacccgtcctcgacaatgtgtccataccgtacttctgcagttgctcggctggatacgaagggaatccatacatccatggaggttgccaagatcgtaggtgtggaaggttggtgggcgagggcggtactcccgtgacctctggtcgccgccgtggttaccagggaggtggacagggttcagggaagcacgagcaaatagatgattggtga

SEQ ID NO: 21718 - DNA, 1047 bp, Zea mays
  Peptide Sequence Number=SeqID_63497
atgacggcggacgggcggagctcctcacggcggcggctcaaagtgcactgctcgcgtggcataggtggacttttcttaatagcactaatggtattcgtagttcttattcgtaacgagaaaaggaagatggcagaatttttcaaaaagaatggaggccctacattagagaaagcaaaaataataaagatttacagaaaggaggagctgaccccaatcttgacacgaagtaattttattggacgtggtgcttttggtgaagtttacaagggcctgcttgacaatcagttagttgcagtaaagaagccaattgatggcaatgtagcacagaatgatcaatttgccaatgaagtcattattcaatcacaagtgatccacaaaaacattgttaagctaataggttgttgcctagaagttgataaaccaatgcttgtgtatgagtatctctccaaagggagcctggatgatattcttcacggaagcagtggcgttctattaactttggagcaacgtttaaatattgctgcagaatcagcggaaggtctagcttatatgcattcgaaaacaggaaaaataatattgcatggtgatgttaaaccggccaatatacttttgaacgattgcttcacaccaaagatctctgactttggcatatcaaggctaattgttatagataaagaacaaacagatcatatcattggtgacaggacttatatggatccagtatatctacgagatggcatactaactgataaaagtgatgtctacagttttggggttgtgctcttggagctcataagcaggaagaaggccacgtattctgacaacaatagcttggtaaggagttttctcgatgctcacaaaaatcaaaaggaggcaacagagctatttgataaagaaattgcaaaaccagatgttttaaagattcttgcaagtgtttatgagattgcagtgagttgtctaaatcttgatgcggacgaaagaccaaacatggcacaggtagaagcaagtcttctgaagttgaaggcagatcttggtatgataaattga

SEQ ID NO: 21719 - DNA, 330 bp, Zea mays
  Peptide Sequence Number=SeqID_63498
atggcgaggctggtgcaggggcgtgcggcgtggcggtggcgaggtcgcagggcggagcggcggagacgacgtgcttggagggcagggcagcgcagcgcggggcgcagagcggagcggcgcgggagggtagggcagcgtggcgtgagcggcactacgcgcagagaggcgcggcgtggggcgcaggtcgacgcgggaggacgcgggggagcacagggcggcctctggagggagttaggcgcgcggtggatgggggcgacgctgaagggcggcggatgggggatgctggagggagacagagcgcgcgcacggctgatgtgcgtgggctgttag

SEQ ID NO: 21720 - DNA, 255 bp, Zea mays
  Peptide Sequence Number=SeqID_63499
atggccctatccgtgaacggaagggtgttcgagtgcaacacttattattacataactgggaggcaaaacatcctcccgccaacaagtttactgatttttgtcacacccggttttagaaggattattcatggaagctcaccgaagttggagctattcgatcgcgagaaacaaccaattttggagcctgttaaaacttttaattctcggcacgaatgccaactcgttacttattctcaacttataaatctcatctga

SEQ ID NO: 21721 - DNA, 393 bp, Zea mays
  Peptide Sequence Number=SeqID_63500
atggcgtcagcgactcagcgttgcttcgtgggcagcttccttcgatgggccggtgatgacagaaaggctgagccggcggcgcgcgacaccgaagaaaaccagcaaggccgtgtgatgatgcctaatggtgaacacaccgggcgtgctgcccaccgcgagctcccccgccacaccggcgactgggcacggacctcgggtggcgtgttgccccggcgacctcccccacccggttggctccctcccctggatggcgctcgggcgcttcaaaacattggtatagagactgtggtccccgtggtctacggcgcacctccaccaccgtgggtgcctccaccaccatgggtgcacacagagatcaccggcgagaagccggaggacgcaaggaacacatga

SEQ ID NO: 21722 - DNA, 2193 bp, Zea mays
  Peptide Sequence Number=SeqID_63501
atggagcatcgccgccgccagcctccagcgccctccgcgcccacctacctcgccgcaacgctcgccttcctcaccctcgccgcggtcgcctacttccgcgccgccttcccccgcttcccgcacccgccggccacccgcgggtgccgccacgacgccgaggggtcctggtccgccggtgtcttccttggggactcccccttctccctcaagcccgtcgagcactggaggatctctagtggccctggagcggcatggccagtggcgaatccggtggtgacgtgcgccgatgtggcggaggctggattccctagcagctttgtcgccaacccatttctcttcatacagggagactcaatttatatgtttttcgagaccaagaaccccattgcgtcacaaggcgacattgctgctgccgtgagcaaggatgccggcacaacatggcagcagttgggtgtagtgttggatgaggagtggcacctttcttatccatatgtgtttagttatggaaacgagacttacatgatgcctgaaagcagcaagaaaggaaaccttaagttatatcgtgccgttgactttccccttaagtgggagttagaaaaggtccttctggagagaccccttgtagattcggtcatcatacattccaagggttcctattggctcattggatcagatttaagttcttatggtgcaaaacagacaggtgaactctttatttggtacagcagctctcctcttggtccttggagttcacacaagcagaacccaattcgtaatacaggcaacaggccaagtgccagaaatggaggcaggccattcatttacaatgacaatctttatcgcgtaggcaaagatcgtggtggtggatctggctataccatccaagtattcaaagttcaagtcctaacagaagatcattacaaggaagttgcagtcccatttgtgcttgacaaacccctcaagggccgaaacgcatggaatggtgcaaggtcccatcactttgatgtccagcagcttccatcaagtcaacattggattggggtaatggatggtgacagagtgctctcaggtgactcaattcaccatctgactataggctgtatgttttatggtgctgcttgcattttggtccttctacttggtgggcttattggtgcaatcaagtgcaccttaccacttagatggtatttaccacatactgagaaacggagtgacaactttgatatagagaagcaggtattgctgtgccataagcttagttggcttatctgcaatgtgaacaggttgggatctcttattggtgggaaaattaattacagagcttggaaagaccgagtttatatagcttttataatattggtatcggtagtcctaacttttttggggactaactacatctttggtggcgatggtgcagaagagccatatcctattaggggtaggtattcacaattcacattgttgaccatgacctatgacgcccgattttggaatctgaagatgtttgtggagcattactctaaatgtgcatcggtgagggagattgtagtggtctggaacaaaggtcgagccccagtgcaaggtgaattgaagtctatggtgcctgttaggatcagagttgaaaacaataatactctgaacaacagattcaaaattgacaaagaaattaaaacaggagctgttatggagcttgatgatgatatcatgatggcatgtgatgacttagagcgtgggttcaaggtatggagggagcaccctgatagaattgtcggatactatccacgccttgctgagggctggcctctggaataccgcaatgagaggtatgctcggcaacaaggaggttataacatcatactaacaggagcagcatttatggatcatgaactagcctttaagaggtactggagcaaagaggctgagattggcaggcagattgttgatagtttctttaattgtgaggatattctcctaaatttcttatttgcgaatgcaagctcggcaagcacagtggagtatgtaaaaccagcttgggcaattgatatgtctaagttctcaggagtagccattagtcgaaacacgcaggaacattaccatgctaggagcaaatgccttgctatgttttcaggaatctttgggaatttgacttccaagaggttttttagcagccggggtgatggctgggatgtatag

SEQ ID NO: 21723 - DNA, 493 bp, Zea mays
  Peptide Sequence Number=SeqID_63502
atggcgcctcctgttgacgtggctggtctgcgccctaggttgggtgatgtggaagctcctccgaagccgaggtcgagtctgtcttctgtggccgaggtcgagtccgagcccctggttcaggcgaggcggagaccgtcggctgaggccagggcggagtccgagccctggggtcgggcggagcgaatttcgtcgtcttctgggggtgagcccaagtccgagccctgggtcgggcggagcggagtttgtcgtcttccggggcttagcccgagtccgagccctgggtcgggcggagcggagttcgtcgtcttccggggcttagcccgagtccgagccctgggtcgggcggagtggagcggcaatgtctttctgtcaggccggtcagtggagcggcgaagtgacggcggtcacttcggctctgtcggctggggggcgcgcgtcaggataaagctttatgctgatgggggttaccagctgagaattaggagccttgagg

SEQ ID NO: 21724 - DNA, 357 bp, Zea mays
  Peptide Sequence Number=SeqID_63503
atgacgaagtccggccgccaccggattgattccccctccaatccgtcaacgggtgatccaccggcaagcccccgaggcaccgcggcacaccacgtactcccggacgccgaccgtggacgcggtcagcaccggcgccccacccagcactcggccctcgttctctctcgggtactagtgtttaccgtacagattggggaagtggggaaacggaaggaacggcgtgttggctttatccacgaagtcgaggctcccgggcggttcgcagggaagttgcgaagagggttgaacggagtccgtcttcgccggcgaaggaagcggtccgcgcagtgcagagaagggacgagctgctcagcgtag

SEQ ID NO: 21725 - DNA, 297 bp, Zea mays
  Peptide Sequence Number=SeqID_63504
atggaaggtccgaccccgcgcatcgccatcctcgcacggctgctccaaggaaagctggcttcatcctcaacagaacgcgaggctcgcgggcgagctcaaccgaaccgcaaagaaggcgccgccgagatcctcgcgcggatggaccggggaggaaactgcttcggggccgcgtttgtggctgagcccctgagtccactgtccggccatggtgttgccgcggtgcgccgtgggcggtactctgggcttgttgtgagcaggaattggtgggggaaacgggctcgtaatgtcactaattag

SEQ ID NO: 21726 - DNA, 240 bp, Zea mays
  Peptide Sequence Number=SeqID_63505
atggctacacttaagctgagcctttcttggagtagttcaaccattgctttcctaattttttccatagcgtctggttctgcatacgtgtatccagatggtccggtcaaggtgatcggacgagccggcgcactaacggatggtccgtggatatacccggactctttggtcgtatcggatagtcatggttttctaccaccgaggggtcacatggtggccctcactgttagaaatatgccctag

SEQ ID NO: 21727 - DNA, 162 bp, Zea mays
  Peptide Sequence Number=SeqID_63506
atggctgcacctaccagcgagcaggcgtgcgcgtcgctgctccgcttctcctgttgtgcctgcctgcgccgctcaatgcagcctcctaccccatgcgtcgcgctcaatgcaacacagcccgtcgatgtgcccatgctcgactcgtttccccaagtaatgtga

SEQ ID NO: 21728 - DNA, 900 bp, Zea mays
  Peptide Sequence Number=SeqID_63507
atggggatcattaactggatgcaggatcgcttcaacggtaaacacgataagaggcgacccgaggccattaactcgggatcagctcgcgaaagctgccgccaagacgaccgcgcgcgcgagggcaagagccgcaacgacggcggcgactggccggcgccacagcacggcctcctgtcgatcgggacgctgggagacgacgacccgccgccgccgcgcgcgtcgtcgcaggccgacgacgtgctggacttcaccatcgaggaggtgaaaaagctccaggacgcgctgaacaagctgctccggcgcgccaagtccaagtccagctccagctccagctcctcccgcgggtcgggcgccagcgccaccgacgaggaccgccgcgccagccacagccagctgccgctcgacaggttcctcaactgcccctccagcctcgaggtcgaccggagggtctcgctgatcaggcacgacggtggtggcgagagcggcgagttctcgccggacacgcagatcatactcagcaaggccagggatctcctcgtccacagcaacggcaccgccatcaggaagaagtcgttcaagttcctcctgaagaagatgttcgtctgccatggcggcttcgcccccgcgccgagcttgaaggatccagttgaatcgagaatggagaagtgcacgcacatacagttgttcagaacgatgcttcagaagaagatgaatgctcgcccgagcaacgctgcagtgtcatccaggaagtactacctcgacgacaagccgagcgggaggatgatgacacgggatggtcgtcgtcgtcacgatggagaggacgatgacgagaagggctctgacagaatcaagtgggataaaactgatactgactgtaagaacatatttatacgctgctag

SEQ ID NO: 21729 - DNA, 513 bp, Zea mays
  Peptide Sequence Number=SeqID_63508
atggagcctggatacgtcgtcgccggtccacgagcgacagccaaaccccctcaagtcaatcgtggcgtgcaggccaagcgttggttccacgagacgagaccctgctgctccggctccggctccggctcccgcccagccctcgtcgacgctggtgacctccggcctgccgtggctcacacgaactgggaacgcgtgctcaccgtaaccgccaagcggacactcttccaagcccgctgtcgagctctgcgtgcaaagaaaagcctgagctcctgccatcgtctggagtctggactgtggtctgtggagatagcagccagtagtgacaccttgtgctggcacgtcaaccttggggcaaaaaattatggccacagcatgagcacaaagatggatgcagtccaagtgccatgctcacctggcaaacaatctaaagagtgcccgctcatggccaccaccaccaccaaggctgcacggttaaaccaagtggatgacaaatgggagaaatttctttactag

SEQ ID NO: 21730 - DNA, 177 bp, Zea mays
  Peptide Sequence Number=SeqID_63509
atgagcactctcaagttctgccgggaatgcaacaacatgctgtacccgcgggaggacaaggagacgcgcaccctcctgtacgcgtgccaaacgtgcgagcatgaggtggatcccttgttcgtccttagatttgtccattattttccagattttgttattgattcggggaaaccctag

SEQ ID NO: 21731 - DNA, 438 bp, Zea mays
  Peptide Sequence Number=SeqID_63510
atggggggcagccttggcgcgccagcacagcgatgctctggcctggtggcatatacatctttggaaggtggtgttcttgccccatgggctcgtgactccagcgaccgttaccactactgttccattggctccgatcccgtccgcgtccgggggcaaccgaggctcaaagcacgcggcggccagcggctggccgccgaccgggacggcgcagccgacgactggactggactgatcgatgcgcggtgtacgtgggcagagggtgaccctgcggtgcaggtgcaggtgcagatgatggatggatggatgctgaaagtggagacagtggcaagggcgtgcatgccctctcgtcccgttgctcacacgctcgtctcgctccaatcctaccctaccctaccctaccctaccctcggtgtgactgagtcggtggccaacctctga

SEQ ID NO: 21732 - DNA, 2907 bp, Zea mays
  Peptide Sequence Number=SeqID_63511
atggaggccgatgcgccgctcgacctcgcgctcttccagctatcccctcggcgtcagcggtgcgagctagtggtgtgcggcaatgggcggacggagaagatcgcgtcagggtcggtgaagccgttcgtggcgcacctgcgggctgcggaggaacaggcgtcggctcagccaccgccgctggccatccggctgcagctggagcggcccgccccgtggtttagcaagggcacccttgagaggttcgtgcgcttcgtgagcacaccggaggtgctggagttggcgaacacctatgatctggagatgtcgcagctggaaggggccaggaagatttatgcgcagggaggtactggagatgctacttcaggtggagctgctgaaaatgttacagcctcagcggcagcggcggcagatattacaaagaaagaacttcttagggcaattgatgtgcgtctaagttcccttaaacaagatctggccgcagcttgttctcgagcatcctctgctgggttcaatcctatcagtgtatctgagcttattctttttgctaaccattttggtgccagtcggctgagcgaagcatgcacaaagttcatgtcactttgccagcggcgtcctgacatcagtcctcaaactgcacagccagcagtttcatcacactggaaggtctttgacgatgggaatgtccgtggttcttcgagttcagacatgtctatagatgaaccactagttgatctcagtgaatccaagaacaaatctacagtcagtggaagtggctctcaggtccacagactaagcaacatccaaggtttagaatctgctgcagcacagcaacccaagccaaccatccaacaagcagtagataaacaagaagcagaaacagatgcgtctcctgcaccttctaaaggagagctttcaaggcggctgagtgtgaaggacaggataaacatgtttgagagccagaaaaaggagcagactccaagttctggtaacagcaactctgccggtactggtagagtggttccagggaaaggtgagcaccgcagggttccttctggcgcctccatggagaagttagttagaaggtggagcagtgttagcgacatgagtattgacctcagcaacaatgagagtagtagcttaaatgacaaaaaggataatggaactcctgccgggactccaacatctactgatttggaggccgactctaaagtaagagctaatgaggactctaatggacagaaggattcaatcacgtcacactcttggccttgtcaaaaggataatgtaccaatggatctggccaccacagatttgtgcccaccctcaattttaacattgaaagtgaagcatccttttgggaaagaaccgggggttattcaaggacacacaaggatgtcaaatcatgctacttcaaatgtttccactcaagaccgtctaaaatcttctgcaaagtcagttgaagaagccttgctgaaaaataaagttattgtaactagtgcatcgtcagaggagcatgtctgcatgatagacaaggaaatcacagctgttgctcatgaagtaccagttgcaagtgaacagattccccagaatgatattagaggtctccatacaaaagatattcacactgaagcagaagtgactggaaggaaggatcagccttcacgatcatttggaagggtatctggtggtgttaatcctaaaccaaaagcctcatccaattcccgagctaatgctaaaggctcatctgttagggatgcgattgcctctacagaaactgagttccgtgacgttagtttgcagcggaatcgtctaccacggaagtcagaagatgtagggaaaaaggttacagctggttctgattcagattgctctggtcgtcagggaaaaaatttgagcaggcaatcatccattaccgatcaggaactaaacttgcaggctagagtgacaagaccaggaaaagggaaccaagatcggcatggtgaattgcaaatgaaggccaatgagttggagaaattatttgctgaacacaagttaacatcctcccgacgaggtaaacctacagatgtgcaggttgaaagcacacctatggtgagtgaggtaaagccgacaatggttcttcatgagacaattcatacaaaacaagttgtaaaggagagtataactgtcaatgattttgatgccggtgagcttctgaagatggtgaataatcaagaatttaacattagcacaccacaaaaacttggcattctaagtttagaagagtcgagagggaagttttatgagcattatatgcagaagagggatgcaaaactgaaggaaggctggaagctgcagagagaggagaaggaagcaatgttaaaggctatgcatgacagcctagaacggagcaaggctgagttgcttacaaaattctctcggtctgcagatgtccctgactcaacttatgtttcccattgttctcagaagattcctccttcgcgatcagcaagaaaaaataaagatcagggggttggctcattcttggtggaagaggaaatgaatagtgactacctatctggtgatggttcttccaggagtgctgattccagaaagcatttttcaaataaagttgcttctacccaaaatgcatctgctggtcctatccataaacgttcatcaagaaccgcaagctctggttatgctaatcgcaggaatccaccagaaaatcctctcgcacagtctgtccccagtttttctgacttgagaaaagaaaatacaaagccttcacctggagtcagtagagtgagtgcaagagttcagcaaaagtcttttgcccgtagcaagagtattattgaagagtcaaagagcatattgaaagaagatcaatcgaggaggtcacaatctatgaggaagaacccaaattcctga

SEQ ID NO: 21733 - DNA, 499 bp, Zea mays
  Peptide Sequence Number=SeqID_63512
ggacttcttcctgagctttgtgtacttgaacaggtcaagcaaaaactgaaaggacacaaaggcagagatgagcaacagatttatggcctgaaactgggattcggtaacaaagatgctacacgggaaaatctcatcacaggatttggagacatgaatccggcagagaaatctgtgatgctccaaaagggatcgggctgttgcagccgcgtcgcagactgcctctgctgcatgtgctgcatcaaggcgtgcaacaggatgaacgaccagtgcgccgttctgatggcacagatctgcgcggctctagcgtgcctcggctgctacgagtgttgtgcagaggacccgctaaatttagaggacgtagatctggagggagtagaggacgtcctcgtcctaaatagtacaggacccgctagtcttagccggttcctcccgaatggacgtactcggaggatgatagaaaagcccgtctatggcttagtgcaggtaccagccttcccag

SEQ ID NO: 21734 - DNA, 624 bp, Zea mays
  Peptide Sequence Number=SeqID_63513
atggcggtcgtgacacaaactcggttgtcacgtgtcctagccacatcaagagcaccgggggtggccggcctcggcgccgcgttcttcgccgtcacggaggccctcgaggtcaacgagaacgtcggcaccgtgagcgaccactcgccgtcgccgatgaggagtttgttcccggtactccctgtggcagtcctcaacgctgtgttcgtgtactggatcttcagctcgttgtcgaagacgctgaacaagctcaaggtgaggatcaacactgttttggccttccatttcggctttttatttcttcagtatgaaaaagcaacttttgatgtttgcagtcgaaaaagaatgacgacgaagctggagatgtatcggaggttgaacaacgccttgatcatcgcggtggccatgtcactcgtctggatcacatttgagagcgcggcgaggtacgcctacctggatgacgaggaccgtgacatggaggacacgcggccgctgattaggcccggcccgctgtcgtatgtggacaaccgggcgatctctgtgtccaaggacaccaccaccatcatcttgagaaccgactcccgcgtgtacgcgaaagccgccgacgatggaggcaagtgggtgtag

SEQ ID NO: 21735 - DNA, 450 bp, Zea mays
  Peptide Sequence Number=SeqID_63514
atggctgagaagaaggttccttttgggtatccccgagaagagatccagtggagacggggtgggcctgtagctcagaggattagagcacgtggctacgaaccacagtgtcgggggttcgaatccctcctcgcccacagcctcctaagggcatgtttgcttaggcccttcccggtggggattgcagcccaatccccgtggacctccgccgcctggaagatctgctccggcatcgatctcctcaagcatttagggttcttgattcttgcgtcgatgccgtcgcggagttctatcaccacctggagcaaccccatgacttcaatcggaggtccgaggacctataccggtggtaccatcgagctcaactcgtggaccccagatgagcggccacccgtgtggaatttaattgccagacggccatcttggggaacttcgtgtataactgcgtcgtga

SEQ ID NO: 21736 - DNA, 306 bp, Zea mays
  Peptide Sequence Number=SeqID_63515
atgtccgcgcgcccgttccaccaccactgttgggcgctcgccgcgcctattgtctcgtgctcgccaagtcctccccaacctttccagctattcagaccgacctctcgcaccctaggagccccggtttgcctcgcctccggcgacggcgccgccgtgtccgcggggagcgccgcccctggatacccagcgaaggctggaaagggatcacgactcgtgggtaaagtgtgcaacctctgcagagtgttagaacctggtatatcagccgagctcaaggttaagaggggccttggtatcctcattgattag

SEQ ID NO: 21737 - DNA, 438 bp, Zea mays
  Peptide Sequence Number=SeqID_63516
atggcgtcatggcgtcttcaacctcttcttcggggcactcgtggaggatatcgtggacgagccttgcttcccttgttggcgcccagtctcgctcggaggcttatcccccaccggataaagttatcccctctccgcatctcgcgctcggctaacaaactccgaccgccgtgcaacagccgtggatcctgtgactgcccgcctgctactcctcgggaatcggagcgccataccaagctgggtgttcgccgtctctcgctatgggtgttgatggactcctcaggcaaggctatcaaccagggccgtgggaattcgtcgccggtgtccgatttgccgccgcggccgcaccttaccgtgggcagcctcgtcgccgtacccatcgccggtaaggaacccaccctcgcattcgcctttgtacaccctctctcatgcaccaggtag

SEQ ID NO: 21738 - DNA, 486 bp, Zea mays
  Peptide Sequence Number=SeqID_63517
atggagggtttaatttccaaattcgaagcatgtgacctctatgagttcatggggcagaggactggtgataatgagtgttgtgatctctatggagaagacatgtatgaagagtatgagcagtattatgggcatgcaaggttagggattgctatgcgatttggtgagaccccggaacttaggcatcacccagctgacattaacaatatagctagggttactatcctccctagagtggggataagagcaagattagagacaaattttgtaacatcatccaccgtggatgtcgtgacctttatgctcaggcagctcaacgatctgaagatggacaagaaccagattttggcctatgccccatacatcatggcattgatcaaggggaagaccaggtttgaggggagatgtgaagtggctcatactttctttagacctttcaagaatgacactgctttcactcatagacctatgactcctttcctaatctag

SEQ ID NO: 21739 - DNA, 960 bp, Zea mays
  Peptide Sequence Number=SeqID_63518
atgcaagtgcagcgtctgagaaaagatgagaagatcaagctctggctgtttcttcctggctgccactcatcggtatctgaaatcgcccaacctgctgtaaacaagctgagagttgcttcaaatggtttatgggtagccccaggcaactcggaagaggtagcagctgcactatcacaggctttaagaaattctttagaaagatcactgaaagggctttcatatgcaaggtttggtgatgtttttacaaaatacaacccccctacaagaaatcaaaacagctttaggagagcacagcctacagtcgagtttgtctttgctgccaccgaggaagcaatatttgttcacgttgtaatatctgctaggtatgttcggaacctttgtagtgatgacatagagaaagttctcgctcattctcctccctccatcggtgaaggtcttccagttgttgttgctcctagtgggatgctgggtaggcttgtcggttgttgtccaagtgatcttgtacgacaagtttattcaagcaaatcattgacgcctaatttaccaggttttagtcaacctactgtatgccagctgagaggccaaagttactatgttgaagttgcgcttggctttccagctgcttcagccaaaaaagtttctgagtttgagcatattcatataaaaaaagaattggatccagtgaaggatgctatggtcggttctgatggacagcgtaaggtagaatcacctgatggccttccaattcttgagaggacatttatttacccacctgaagctgttttggtacctatggtccatcaagcatttgttcgcttttcgagcaaacgaatgtgtttacagggctcgctgggaagttcatcatgggaggcatggccattctggaattttgctccgtcttcttactttcagaacaggagaactgtgtttcattatattaagaaggagaaaaaggtctaa

SEQ ID NO: 21740 - DNA, 3530 bp, Zea mays
  Peptide Sequence Number=SeqID_63519
gtactgctgaatcacatgctctagtaattcctgcttcagactgtggagatgtcacattcacagatagtccatcaacagcaatggatatccctgaacaaagactttctcctgttggtttcacaactttggatgcatttgaccatcaaattatggccccagctcaagatgttgttgctaaagttcaagaacctcataatgatactgcaacacctgcacagtcccactcgcaagttttatcatctggaagatttgattatcttaccaaagctgaagcaaagctcacatttgctccagaatatgcagctgttgaaattttgattgctgaggccccaacaccattgtttacaaatccatactttcctagatcaaagaaaccaggcagttctagttttagtgcaagagtttattcatatgatgttgcacaaagctctcaaattgaatccacaggagacaagccagataagacttctaaactaatatctggtaatcatttacatgatattagttcatcaaacttgtacacacttgtccaaggtgggaataaagggagtgataagatcttaaagagtactgatacacagccctctaagggagaattgtcaccacctatttctggtgtgacttcatttaatttttctcttgtttcacaaaagaagagtggcaacatgttcaatgctggctattttctgctgtctatgaagactgctttggcaactgaaattgaatgcatcacgttccaggctgccatgtgcagaattaggcatacactattgtctctgagaagcaaagcatctgccgagtttaacagtgcaacatccagcttcatacagacaaatgtcagcaacaaatcagatctcacccccaggtatgacatgagaaaaaaagaaattatgactgtaaggttatctagtgatattgatcatgaaatgtttgacagatccttaatggacaatgtgggagtttggaggcctgttgttacacctaaagggcctaaatctcttgagtctttgtctgctaacacattaactggtgcaagcccaagtctgtctatacaaagacaacctgttgtagatcttctctgtgccatgactctgcttgttcaacaatctacttcgtttgttgatatgtcacttgatatggatgacggggacggttcttttttctggctttccctggatgagcaaaagagacgtggattttcttgtgatccttctatggttcatgctggctgtggtggcctattaggaacatgccattcaaaggattgcgctggtgttgatttagtcgatccactttctgcagagtcagatataagagtagctcttaaagctgcctttgcaaacatggatggcccgttatcagtaattgattggtgcaggggtcgaggcaatgctgctgagtctgcaggtacgggagatgcatactcttttcagtactccagtggtgatatcctggagccgtcaagttcgttgtccattggtggagattcaatgagcccaccccagccaaccagtagcaatcgaggcatttcagaattagagttccaaaagggatatcaccgtgtcagaccaaccattgctgtcctcccttcaccttctatgctagtcggttaccaggatgattggttgaaggcctcggtgaatagtcttaaaacatgggagaaagctccttttgaaccttatgccttgccgaagcctgttgccaaagccctaaacagcagtgcttctgtagatgaagcatcagcatcaaatgtcgttatgctatccgggttcagtatacccaagctcgtcttgcagattgttactattgaaactgtactgagaatggataagccaaacaaggagcttgctgttttgaaggacatagcattcacagtgtacaacaaggcacgacgaatcccacgggctgtctccacaagcgatatgttccagtcaccaacttatttgggtagatctcagtccacaatgatgcatgttacatctcctgctcctactctttggaaggaatgtttagttcctcgaatgtctgggccaactctctctcgagaaaccgattttgatgcatccatgaggtcggcaacatgggataactcatggcagcctgctcgttcgggaggacttctggacccaagtaagctgcctgatttatgtgctcaggatgataggaaatatgcctttgagccacttttcatactagcagaccctgggtctgccgatcttaatgctttaatggaaccatcaaaatctggagcagatgcatctggcagcagggtatatggctcaatttcaggaagtaactctgatagtggagtgagccctctactcgacgtatctgagagtgacagtgcagcaagtcttcattgctgttatggttggactgaggactggcgatggctagtgtgcatttggacagatgctagaggagaattattggacagcttaatatttccttttggtggtattagtagccgccaagacactaaagttctccaaagccttttcatccaaattctacagcaaggctgtcaaataatgtcgtcttcacctgaggctagcaatatgagaccacgagatgtcataataactcgtatcggaggtttccttgagcttgaaatccaagaatggcagaaggcaatatactcttatggtggcaatgaagtgaagaagtggcctgtgcagttacggcgatccatacctgagggtattccacctagttcaaatggtcctacgctccagcagcagcagcagcaagacatggccttaattcaagatagaaacatgccttcctcaccaaaccctctgtatagccctcatccaaaatcaagcttcatgaaagtttcccaagatcattcgttgcatctcacatgccaagcagatctactgagcagacctgcttcagctggcgaagggagtcaaggcagcagtggcccttggagttacctggaaggtttcactccagtgaagtccattgggtcaatgtcagcgtcacactcgtaccttctagttccttcgccaagtatgagatacctctctcctgcaacattacagctcccgacatgcctcacatcggagtcaccgccgcttgcccatctactgcacagcaaagggactgcgattcctttagcgatgggctatgtcgtctcgaaagccgtcccacctgttaggagggactctgcacaactcaccaaggatgaacagccctctgttctctcagtcagcatcatcgatcactatggaggcagcagtgggactgttcaagagaagatgagccgaggcggcggcggcggcagcaaacaggcaaggaacttgagtcaggagacaacaggtcgtgagtgtgagatggagatgcatagtgtgctggaagctgtggccgcggagcttcactctctgtcttggttgacagtaagcccggtgtacacagaaaggcgcacagcactgccctttcactgtgacatggtcctaaggatgcggcggcttctacactacgcagataagtatctatctgaacctaagggagagacaactcactaa

SEQ ID NO: 21741 - DNA, 783 bp, Zea mays
  Peptide Sequence Number=SeqID_63520
atgaatcctctcacatttcttagggtcttaggtcctgagccatggaatgtcgcttacgtggagccaagtataagaccagacgacagtcgctatggggacaatcccaataggcttcagcgccatactcagtttcaggtaattctgaagcctgatcctggaaattcgcaagatctctttctgcacagcctttcagcaataggtattaacatccatgaacatgacatccgcttcgttgaagacaactgggagagtccggttcttggtgcttggggactgggctgggaggtttggatggatggcatggaaatcacacagttcacatattttcagcaggaaactaaaatggtagtcatctctacaagaactattctagcagccttgggttcggacttctgccagttctcctttctaccgtctagtggtgctagtggtggcatcctggtcgcttggaagcgccaccttggtgtgactgggttgactaggattgacagacacaacatctcaattcaattctgcaatgaacataatcgttgctgggcttcagacaaaaacaactcaaatattaacagagctatgatggggagatttaggaagttggttgaggacttgagtctcaaagaggttccactatacgggcgtaaatatacatggtcaaatcagcaagacagtcctgtccttgttaagcttgacagggccctttgttcactggagtgggaagacatatttcccaatgtccttcttcaaagtgctgcctctgaagagccccctgctgtttggcattag

SEQ ID NO: 21742 - DNA, 1401 bp, Zea mays
  Peptide Sequence Number=SeqID_63521
atgaatgcactagcagagataaaccaggggataagcccctgctacgactcagggctgtgcgctggcctactgccgcgccccccttacttcttgctgcacctggagcggaaggaaaaagtcttacatgcctctactgtattggctcaaggtgttggtggcgatttcattgcgcctgatagcttgctgcaggaggttgtcaatcttgtggaggcacctgtgcccatccttggtcgatatgatgattccttcttagaacttcctaaagatgtactgattacggttgccaatggtgcaattagcaaggaagttgttcgcaaagggaatgaagctgttctcagggcaaggtatgaggatgccaaattcttttataagatggatacacaaaagaaattttctgaattccgaggccagcttagtggcattctttttcatgaaaaacttgggacaatgctcgataaaatgacacgtgtcgagaataccgttgctgaattggcccttattcttggaataaatgagagaacggtcccaattatcaaagatgcggctgcattggctatgtcagatcttgccacttctattgtcacagaatttacttcacttgctggaattatggcacgccattatgctttgagagacagcatccctgaagagattgcagaagcactatttgagataacactccctcggtcttcgggtgatgtgtttccaagaacagatgctggtatagttcttgcggttgctgatagattggatagcctagttggattgtttggagctggatgccagccaagttctaccaatgatccatttggacttcgaagggtctcttatggattggtccaaatattagttgagaacaaaaagagctttgacctcagacgagctctcaccttattggcaggggtgcaacccatagcaatagagagtgatgttatagatgaggtggatgagggaattaactgcgagatagtccgatcagtgcttatggagcgtgcaaactgcccttatctagcagcacaaacagcgaccgaaatggaagcattttcgagaacagaaacatttcaaaaaatcgttgaagcgtattcaaggccaacaaggatcatccgtggaaaagaaattgagtctgctttggaggttgacccacacgtatttgagaaagatgaagagaaagttttgtggagcgcctacttggaggttgctgataagatccatcctggtgttgatattaagacctttgtggatgcttctcttatcctgatacaacccctagaagatttcttcaatagtgtcttcgtgatggcggaagacgagagagttcgcaacaaccggctaacgttgctgaggaagattgagagtttgcccaaggggattgcggacctgtcagttttacctgggttttaa

SEQ ID NO: 21743 - DNA, 1167 bp, Zea mays
  Peptide Sequence Number=SeqID_63522
atggcggtggaccgcgtggacggcgaggaggcgttcgaggaggtggacccgacggggcggttcgggcggtacgcggacgtgctggggctcgggtccgtcaagaaggtgtaccgcgggttcgaccaggaggaggggatcgaggtggcgtggaaccgcgtccggctgcggtcgctggccgaccgcgaccccggcatggtggagcgcctccacgccgaggtgcgcctcctccgctcgctcagccacgaccacatcatcggcttccacaaggtgtggctggaccgcgacgccggcgtcctcaacttcatcaccgaggtctgcacctccgggagcctccgcgagtaccgccaccgacaccgccacgtctccgtcaaggcgctcaagaagtgggcgcgccagatcctcgaggggctcaaccacctccacacccacgacccctgcatcatccaccgcgacctcaactgcagcaacgtcttcatcaatggcaacaacggccagctaagctaccataacagcagcaagcaaggagccgtcggcgcgcgggattccgcacgcgctgcttgcctgcctgctcttttttgtgttgaaaacgccgcgtctgttggatgttgctttccatccatccatacacgaacgatcgatgcgtgttcgacccgcgctgccaaatctaaaccgtgtgcgcggcggcaggtcaagatcggcgacctcgggctggcggcgatcgtggacaagacgcacgtggcgcacaccatcctgggcacgccggagttcatggcgccggagctgtacacggagacgtacacggagtcggtggacatctactcgtacggcatgtgcgtgctggagatggtcacgcgggaggtgccctacgccgagtgcggcagcgtcgtgcagatcttccacaacgtcacccggggcgtcccgcccgcggcgctcaagcggctcaaggacgccgagctgcggggcttcatcgagcgctgcatcggccagccccggaaccggccctcggccgctgacctcctgcaggaccccttcttcaacggcgtccgtggcggggacgacgacgacgacgccgcggcgctcgccgacgcctccagcgtcgtcgccgccgcgcccgtgccgcgccccaggagctacgtcgacgacctcgccgggctccggctggactga

SEQ ID NO: 21744 - DNA, 1530 bp, Zea mays
  Peptide Sequence Number=SeqID_63523
gatgtgattagctcaattctgtgcgatccggccgggaagctcggggagcatcatctggatcctcgcgagctcggccaccacctcccgggcgtcgggccgatcgtccttgtctggccccacgcaccggaacgccagctccaccactgcctcgacgctggccatcacggcggggccctcgcccagcaccggcgcgtcgacgtcccgccgctccctgcccacgtccacgggcctcagccccgtgacaagctccagcaccacgacgcgacggcggctaggaactggggcaagggcacggttccaccgttccaggttccagccgcgcgggtcccggccggagccggacgcgccgagccgccgacgggcgtccccatgccgttgccgctgcgggtgccggcgcggctgctgttcgcgcggcacaagactaccgcggcgcagcacgtggcggcgcggcacctggaccacgccttcgagcggctcgcggcggcgcacctgcccctcgtcgcggcgtcgccgctggtcgacgcgctgcgggcctcccccgaaccgctcgcgctgccgaacctggcgcgccgcctcccgctccgcctccaccgccgcggcccactccacttcctccgcctcttcccgcgcgtgttcgacctccgcgccccgctcccgctctccctgtccctgacccccgccgccgcgggcctcctcgcagtcgccagctcccccgccgacgcagcgcggacgctccaccgcctcctagcgatgtcggtcacccgctccctgcccctccgcgccgtcttccgcgtctggcgcgagctcgccctccccgacgacttcgaggactccgtcgtcgaggggcacccacacctcttccgcctcgtctccaatcccgccgagcccaacactcacatcctccacctcgtcgccgaccaggcgaccgaggacttcaccccggcggtggagaaggcccgcccggacaggtacgccttcaaactgcagtttccgccggggttcaggctggccaaggaatatcggaagaaggtgaaggagtggcagctgctgccttacaccggaccgtatcaggtcgtcagtccgagcgctggaggtagcaagagggtgtcgaagttggcgaggaggaagatggagaagagggcagtagggattgcgcacgagttcctgagcctgaccgtggagaagatggtggaggtggagaagttcagtcagttcaggaagtggtttgggatcgaggtcaatgtccgggacgtgttcttggatcatcccgggatattctacctctcggcgaaagggaagcggcacacggtgtttctgagggagatgtatgatcgtggaaagcttctcgagtcgaatgatgtctctgaggcaagagccaaactcgttgagctcatgctccttcgtcggcgtggtctcgggaatgccaattcaagtgccaacatggcttcaggtgccactgctgatgccagagagagtggtgatgattttgttgatcatgaggattgtttgttggatgtatcagagaagtga

SEQ ID NO: 21745 - DNA, 441 bp, Zea mays
  Peptide Sequence Number=SeqID_63524
atggaggtatttggcaaatctgtgattgctgagcccagcaatgtgattttcttgtccgcaatccttaacacagaaggatcaaaccctagtcacaagtgtgacaagaggtgccagaacgagaacatttttgggaacatgtaccgttgcaaactgactggaaccactcacatctgtgacaaaaactgtaaccagagaatcctctatgacaaccataactcgctctgccgagtgagtgggcagttttttccgctctctccattggagcagcaagcagtgaggggtatccgcaggaagcacgaagtggacagcaatgaaggctgctcctttaagcgcaggcgtggtgcacagctgcatccttcccccttcgagaggtcctactcagctgtgtctccaatcccgagccaggtgaacatctctggttctattttcatcgtcgggtaa

SEQ ID NO: 21746 - DNA, 1283 bp, Zea mays
  Peptide Sequence Number=SeqID_63525
atgggccattttacaaaatccgaaaatcgccgtaaaatccacctgccgtcctcagtcctcactttcgtccaccgccttctcccgccgccgcggcgttttcccgtctccgtcttcgctcaccgacctctgggccaggagtttgcgctccgattccccgccaatgctcgggccagggcgttctgctaccgccttgctgtttctggcggcgacggcgggagatgtcaagtggataaggaggagtggcggatgcggctaggggtcgagccggactccgagcgcgaggggaacacaacaaaggcatctgagtgctctactcctgcaattctgaatatgtccgatgataatggtccgtctgagatgggtgttggtcagccaatggttgttggcaggaagctgcttccaccaattgtaccaggtggtgaaccaatttttgtgtgtgaaaagcagtatgctgctatccttcgtctgcgtgaacgccggcttcgtgccaaagaagcaagggagcgaaggttgctccaagccaagaagaaccgtccaagaggtcctaatgggcgttttgtcatgatcaaggacaatcaggaagagcccaatggaggaagcatggtggaatgcaaccctgccccaggagacagtcatcagcacttaatcacaaccagtggataccagcaagtgaccactggtggcagtgaggcgcaaagcagcatcccattaggtttctattggtatgttttcacaaccagtgaaggtgggcaaagcagcacccctgctggaatgggtttctactatcccttcaacacaaccaatggcggggaaaatgtcggtggcgtcgcctctggcagtgaggtgccaagcagcaatgccccaagcggcttcttttggcccctcatcatggccagcagcgaggaaaacaatggtgaggtcacctacggcagcatggtaccgatcagcaaccctgcaggatacttctgttggcccgtggctgtgaccaatgaacacggggaagacactggtgagtctgccgatgggggcgaggcgccaataagcaaccctgcaggagacttctgcagttggcctgttgtcgcaaccaacgacgatgaggaaaatgtcggcgaggtcgcctacaacagcgtcctgaacctcgaatcacctgaccacaccgacctcctcaggatcatgatgggcaacaggtacagcactgatgaagcctcggagcagttccagaacgtggcccgcctccaggctcctggcttcaccgccctcctaaccgtcatgaacaacgcagg

SEQ ID NO: 21747 - DNA, 684 bp, Zea mays
  Peptide Sequence Number=SeqID_63526
atgatgagcttcaggagcagcagccacgagggcttcggcttcggccacgccgccgccgcggccagcggagcgccgctgccgtggtgggcagggccggccccgatgctgagcggcgagccgctggccctgtcgccggaggcccactgccgggacggccgcatccaggccccccagggacctcccgtgccgtcggtcaaggctcctgtactggcaccccagcagccgcctccgctgccggagagggggatccctgagctcctcaacctctccgtggatcctcaaggtcaggaactcaggatacgcttctgcctgtgtctgcttgcaaggaggctaggacaagcaagagggggacatggtatggtagcatccatcatgccaaacacagttttcatggttccatctatttatgggaccgagtacatgggtggatactccctggacatgttgaatccacagaccaagacatcatgtagctatactttgacaacccccacccccacacaaaagaatggtaaagggaagaaaggatctgatcactctgccactattgctttgcaatcaccatttgcaatatacaatgctcattttgagctgggccttggtcaatcaatgatttccgctgataattcttatgctgatcaacactatggcctgctttctccttatccagtgggtgcaacgtga

SEQ ID NO: 21748 - DNA, 765 bp, Zea mays
  Peptide Sequence Number=SeqID_63527
atggccgcagcggcgtcaatggggcacccttacgcgccagccgagctggaccttccgggtttcgtgccgctgaagctgtcccaggtcgagatcctcgtgtcctacctcggcgcctccgtcttcgttttcctcgccgtctggctcgtctccggaagatgtgtcagattatccaagaccgaccgtctgctcatgtgctggtgggcattcacagggttgacccacataatgatcgaggggcccttcgtcttcactcctgatttcttcaagaaggagaaccccaatttctttgatgaagtttggaaagagtatagtaagggagactctaggtatgttgctagggacactgcaactgttacggtcgaagggatcaccgctgtattggaaggccctgcatcactacttgctgtctacgctattgcatccaggaagtccttcagccacattctccagttcgccgtctgtctgggccagctctacggatgcctggtttacttcatcaccgcgtacttggacggcttcaacttctgggtcggcccgttctacttctgggcgtatttcattggcgcaaacagcttctggatctggataccgatgctcatcgccataaggtcctggaagaaaacttgcgccgcgtttcaagctgagaaggtaaccaagagaaaaacaacaatcagaggaagcatgggtgaacaatcagaagatgaaaacttaaggaagatatctcctcttacttttctgcagaaaggttcagtgcatataggataa

SEQ ID NO: 21749 - DNA, 867 bp, Zea mays
  Peptide Sequence Number=SeqID_63528
atgccgctggccacaactgctccgacgccggcgccgccctgtcctccgccgagtccagcagcggcaccagtccggacgcagctcctctcctccgtcgcgaagctcgcgctcacggccgcgctcgtgtgcggctctggcggtcccgctgccgtcgtcgtcgttccggccgccgctcaggccgtcccgttcgtccgtcctcctcctcctcccctgcaaggaaggcccttcgcctcctccactccttacgcgcagtcccagaagctgcagcttggcctcgacaagctcggaaagatcaggccatgcccgtccaccaacccggggtgcgtgtccaccaacccgctgggatcctccggctccttcgcctcgccactgctcatcccggaatcatccgcaggggagaagaccgtcgccaaaagaaattctagctcttcccctttccaaattaaacatagcgtcaatcgtgtgatgctttgcttttgcgtttctcaattgatctcttgctactttgtggtggccggcggcgtacgtacctgctgcaagtcgctgcggcaagccatcgagaagacgcagcgtaatgtggagtttaaggtcgacgaagacactccatatggacactacatcgaggcggagatggacggcggcgtcggccgggacgtgatggagttcctggtgaagaaagacgccggcgtggtggcgtaccggtgcatggccaccaaggtcaccttcgtctaccccttcaccaccgctgtcggcgactccaagggccagaagcagaggatcgcggccatctcgcaggagctcggatggtacgccccggacatccagtcctccatggactccgtcgacgacgtcaattacgttccgtga

SEQ ID NO: 21750 - DNA, 573 bp, Zea mays
  Peptide Sequence Number=SeqID_63529
gattccgtggtttctcttgatgatcagcttcttgacgatgacatacaaatgatctgcagacctgattcccgtgctgttgacagatacttatcagtcgaggaaatgtctggatgcattatgttaactgagtcagcatcaaacaaagcagggatatcgcggccaagaggtgcccattcaatggaaaaaggatctctgtctcctaagaaaccttctccaaagaaaggaatactcaagaggaatacaagggggtgtaagggtatctgcatgtgcttagactgctgcacattccgactacatgctgaccgagcttttgagttctctaggaagcagatgaaagaagcagatgatataataactaacttactgaaggaggtggccagtcttaggagtctgctggagaagcctgctggccaaagccccaccagggaggccgacggcagtgcacacgcctgcgccgatcaaggtggccacacccacgacagaatagaaggggtgttggcggatctagtcagaaatgccacagtagcgacggatccagccatgaagacgacgatccggccaaagaaacagtag

SEQ ID NO: 21751 - DNA, 189 bp, Zea mays
  Peptide Sequence Number=SeqID_63530
atgcccgattctaaagatctcaacgatgtttctccagacagcgacacaatactagttaatttatcggccactgagcatgaggagttagaatactacatgaagaagtgggacgaggaggtccatcgacaacaagctcagaagctagctgctccaaagaaaaactggaggaggaggatcgaatccaattga

SEQ ID NO: 21752 - DNA, 1197 bp, Zea mays
  Peptide Sequence Number=SeqID_63531
atgatgacagtcgaccttggcctgcaggcggcgccgccgccgtcgtcttccggcggcgtgccgagcagttgcacggcgctgccgccggggttccggttccaccccacggacgaggagctcatcgtccactacctccgcaagcgcgcggccgcggcgccgtgcccggcccccgtcatcgccgaggtcgacatctacaagttcgacccatgggacctgccagccaaggcggttttcggggaggcggagtggtacttcttcagcccgagggaccgcaagtaccccaacggcgtgcgccccaaccgcgccgccgggtcaggctactggaaggccaccggcaccgacaagcccatcacgctctcctcctcctcctcctcctccgccgccgccgccgccggcatgatcggcgtgaagaaggcgctcgtcttctacagggggcggccgcccaagggcgtcaagacgagctggatcatgcacgagtaccgcctcgccgaggcgctccacgccgtcgtcaacgcctacagacccacgcggttcaagaacaacgcctcgtcgtccatgaggctggacgactgggtgctgtgcaggatctacaagaagaccaccccgcagctggcgtacagcatgtcgccgccgccgcacgaggaggtggaggcgtcgtcgacgtcgttcatggacggcggcggcggcttcgacctcagccgcctgcacccggcggacgactccgcctccgtctccgccgacgacgacatcatggcgttggcggcggcggcggccacgtcgtactacgccgcccggccgctgccgcgcccggcgtccatctcggactacctcctcgactactcggccgtgtccgagctgttcgaggccaccccgctaacggagacgacggcgcagcccgggacggcgacggacgcagcaggcgggttctactacgacttcggtaacggcggcggcgagcctgctgcagccgcctccgtagtagcgcagcagcatcagctgagcccactcaagaggcggtcttccgtggacgaggataactgcaacggtggcattactgacatgctgcacgcttcgtcgtcgtccagcagcaagagggtgatgggcgatcatcactcatcgtcgtcgtccatggctgcaaacagctccgtgtttgagcccggacagacttcttctcatcagctgcacgacagaatatga

SEQ ID NO: 21753 - DNA, 417 bp, Zea mays
  Peptide Sequence Number=SeqID_63532
atgtcgctgctctgcttcctactggaccttcgcaacatcccccctcccctgctccaccgcctcaaggagtgcctgctcgacctcgccaacctctacgccgccactacgtcacagacacacgcagtgaccgcatcccccgccgccgccggcacgctccccgaccgcttggccctcggctacgtctacgatccttcatccaaaccatcctcctcgtgctcctcctcttgccctgaggtccttctgttaacttcatgtgctgcctttcatgctcctatggcaaaaccggtttaccaccttgtgtttgctagaaatgaggaccaatttgtcactgctattatacaaatgattgtggatgttgatatttgggattacttgaatcacttctatgtcacctttagcagccaacgatgcagataa

SEQ ID NO: 21754 - DNA, 501 bp, Zea mays
  Peptide Sequence Number=SeqID_63533
atgaaccacagggggagcgagaacatcggcggcgtggctgcacagcggctcaacggcggcctgggctggttcgaccaggcttcggccacggcgagcgagcaccgcaccgagcacggaaagaggcgaggagggcgagctctggacttcacaccatgcgacaaactcgacgaggaagaatcgcgggcgcggcttactccgggcggacggcgaggctcgacggcgtcgtttggtgtgaagtatttggaactgcctttcatggttcccaagtacttttgcagaataaggacttgccttggtgccgaaccttacatgtttgattcaaatcctgtgaatgaaaaaggaatgctcatatcagataaagtggcagcaaacaaagagctcaagggaatgatgaaagccgtcaaagttgatgaaattgatgcttttgagtttttcctatgcaactatctacgtctattttcgaagggcaggcttggttcaatggccacatcaaataactga

SEQ ID NO: 21755 - DNA, 441 bp, Zea mays
  Peptide Sequence Number=SeqID_63534
atgtggtgggatcggctccacgcggacccatgcgccgctgtagcaagcaacccgccgcccatcgtctgcgcttggccttcggatctgaccagtgccacgactgcctcgtcgcgcggagcaggggcgtggccacccctccgtgtcgtagggggtgcacgggagcagcaccgccttcgccctgctgttgtgtttggccacggctccgcgtggaggcacacacagctgcagcgagcagaggatgcggcccgctgcgtggacatcgttgcctcacggctgcgcacaggtcgtccacagttcaacagcgacacgacatgggcgtcgaccctattctcgcttctcacgccaaaagctgaacagtatatagcagcttctgccaattgcctcaacgccataacaagcacaaacgaaaaccgtgacaaacagaaagaaggttcaaagtag

SEQ ID NO: 21756 - DNA, 360 bp, Zea mays
  Peptide Sequence Number=SeqID_63535
atggcggagccggggctcgaggacagccagccggtggatctgtcaagcacccctccgcatcgtccccacgctccagtgtttaaggacttattgtaccactcaatcggtggaggctattggaatctaatggctgagtcctacgctgtccttgttcttccccgcgacggccacccagatcctcctcgcctgacctctcctttctcatttttaggccttgcactgtatctgcagcaaagagaaggatccgaggttctctgtattcacactaagaacatgaagctagctgaagatgttaatttggaactagaaatcactcttatcaatacaggtagatacaaagcgatcgacaactattcttag

SEQ ID NO: 21757 - DNA, 318 bp, Zea mays
  Peptide Sequence Number=SeqID_63536
atggggcaggcgagcgagcggatctcgcgctcgggagatgactggcaggtggggtggagggacgaatggagctgcaccttgttggaaccccatgaccttatccagcctcgcccgcataactggagacggcacggcatggagacggtcgttcgggtgtggtcgacgcggagccgggacgacgacgaccctgtcgccgcgtgtggggagggctggtggaagcgatgcggggacgctgaggaggcacgcgcggcgaccgacggagagggcacgaaggcacatgcggcggcagagaagaggaggactcgacgaagctggtga

SEQ ID NO: 21758 - DNA, 369 bp, Zea mays
  Peptide Sequence Number=SeqID_63537
atggcctcacccacactcattgaaggaggagacacacctttccacactaacagtatcactcaagagggctttcccctcattctgtgggagatggcaactcaccccatccatctattccccgctgagaaggaggatgacctgatatggagggaccatgttgaccacgccaaggatgtgtgggaaatctaccctggagccaccgctcgactgacggttcagtgcatgagtgcactgtaccgcatgcaagcccttcaacgggaggccatgtcacacttgctgggcctcgctcaggatgtgaaagtcaccatcatcgaccgagaagatcttgtggtggatctatctattgagttggtggagaaggatctctag

SEQ ID NO: 21759 - DNA, 255 bp, Zea mays
  Peptide Sequence Number=SeqID_63538
atgacgtggagcgacccccttcttcgtgggcttgtttgcttcgaagatgaggcatttggcagaggcggggcggtggatcaaggttttggaagtctcgctgtcatcgtcgtgtttccttcggccttgtggtgcctgtcttggggagtcgagctgctcgtcacttgtattgaactcggcaacgatgactcacgatggacattagtgcttcctccagatgaagtcgcccacctcatgctgtcgtgcagaaggcgctaa

SEQ ID NO: 21760 - DNA, 651 bp, Zea mays
  Peptide Sequence Number=SeqID_63539
atggccgcctccgggaacaacagattctcccttacgtgcgctcgcttgcgcaagttcatgatggagcagaacaggaaggtgcggatggatgacctcgtcggctcctcctcgttccagcggccgctccaactgacaccggtccctgtagccacggggccggcggcggcggcggcctgggagaccggcacgagcaggacgaccttgccgctgttccccgtccgcactgctggcaccgccgagatcaccaggccagaggagggcaaggccaccctgaccatcttctaccaggggcaggtgtccacgttccaccacttcccagcagacagagccaaggtcctgatgcaaatggcaagttctgtgaccgggaacacgccggagaaaggggtggcggtggcgaccgccgtgccaaagaaggcgcagaccagcgatgaccagccatcgcctgcaggggcaggcatgccgcccatcgcaaggaagctgacgctgcagaactttctcaggaaaaggaagaacaggatcgcaggcaccgacgacgctgaccgcaacgaggatgcttcgccgtggaagaagagagactccgccgccggcgccggcggcacccccgcgggagacgtgcccgacgatgcctcgtggctcgcgctcaggctctga

SEQ ID NO: 21761 - DNA, 285 bp, Zea mays
  Peptide Sequence Number=SeqID_63540
atgctcaagttcgtagacaggtgcctttcacccatcgccaccgtccctagcactcgggagcctatcatcggtaccctccccactcacgacgaccacaagtccaagggggtgagacaacaacatgccaccaaggcaccaatggagccaatcttaggcacatgcctagatagggcaagccctgcctccacctatgtgtgtttgaacttgttgtcttggttgttcgctggtacacaaacattatcaccattggctcccactgcagccaaggatgaaagtgggtggtga

SEQ ID NO: 21762 - DNA, 645 bp, Zea mays
  Peptide Sequence Number=SeqID_63541
atgaagtttggcaagaggctcaagaagcaggtggaggagagcctcccggactggagagacaagttcctagcgtacaagcgcctcaagaggctcgtccgcctcgtcccggcctcctcgcccagcaggaggggcggccgcgcagccgatgccgccttcctgcgcctcctccacgccgaggtcgaccggttcaacgccttcttcctggagcgggaggaggacttcgtcatacggcacagggcacgtgcacgtcctgacgtccctcctatcatacggctggccaagatcctcaagaagtacgacaaacgcaccgggcggctgctgcggctgcccttcatcggaaaggtgctccggcagcccttcttcgccacggagctcatctccaggctcgtccgcgactgcgaggccaccatggaggccgtgttcgaggccagcacaggccacgcccgctcgtcggcggggacggcccccgtggcctcagccaggcagggcatcttccggaacaccgtggccgcgctggtgaccatgggcgagctccgcagcgggagttccacgtacggtcacttctcgctgccaccgatggccccgccggagtccgatctcctgcggcgcgtgtgcgtccaggtcgccggtcaagtgtccatctga

SEQ ID NO: 21763 - DNA, 1110 bp, Zea mays
  Peptide Sequence Number=SeqID_63542
atgtcgtccgccgcggtgccagaccagtcgccgcggcccgtgcgcttcggtatcctgggctgcgccgccatcgcgcgaaagctggcacgcgccatgctgctcgcgcccggcgcagccgtcgccgccgtcgggagccgctccgaagtgaaggcccgcctcttcgccgccgacaacggcctcgacgtcgccaccacccgcctccacggctcgtacgatgcgctcctcgacgacccggacatcgacgccgtctacatgccgctccccaccagcctccacgtgcgctgggctaccgcagccgccgcacgtggcaagcacgtgctcctagagaagcccacggcgctgtgcgccgccgacctcgacaccatcctcgcggcttgcgacaccgcgggggtccagttcatggactccaccatgtggatgcaccacccgcgcaccgccaagatgcgggagaccgtcgacaacaaggacgccatcggggacatcagaacgattaacagtgtgttcagctttcgagcaaacgaagatttcctccagaatgatatcagagtaaagccaggtcttgatgccctgggtgctcttggtgatgctgggtggtactgcatccgtgcaatcctgtgggctgttgactacgagttgcccaagactgtgatcgcactgcgtgaccctgtaaagaaccaagctggagtgcttcttgcctgcggcgcgacattgtactggtcggacggcaagactgccaccttcagctgctctttcctcaccaatctcaccatggacatcaccttagttggcacaaacggaactgtctatgtcactgactttgtcatcccatacgaagagaagtcggcggagttcccggtggcttcgaagtcgaacttcgctgagctccacgttgggtgggatcctctgccaagcaagcacgtcgtggcaacagacctgccacaggaggcccttatggtccaggaattcgcgaggcttgtgcagaacatccgggatgctgggggcaagcctgagggcaagtggccggccatcaccaggaagacgcagctggttttggatgctgtgaaagcctccattgacaaagggtctgcgccagttgaggtggctagctaa

SEQ ID NO: 21764 - DNA, 726 bp, Zea mays
  Peptide Sequence Number=SeqID_63543
atgacgtgcttgggccagagttgtggcccgcagggcgtctggctcgtgccgggccgtcgtttggccatttataggcgtgcaacggggatcccccgtatgaccgccatcgcagcaaaatcaacccgagaacctccctacaccgaccactcccctactgctcttgcccctttcgggcttccctggtcgcggccgagctccgccagcgacagccacagtatagagcggcgaaggaggccaaggcggtgttcaaccctcttctcggacctatcaaacggtggcgaggtgttttcgatggtatggggcatgcgagcgtggccgagtggccccatcccgacttatatatgcaaggggaaaggctatcaagtcaacgacatccagaggatcgcggcaaaggtggcgtggatgcggcgatattctgttacgctggcacgtggagttcgcgggggaggaggcctccgccaggtggccccaccagtcattgacgagcggcgtgtgcccgggaggctgaggagtgggccgggcgtgggtggaatggccatgtgggccccacccagcagtgaccctagggcgattgatttcaacggcccacaagtcggcgccctcgcactcgtatgggccgcgcgcttcgctgaggacgaagccttcatggcttcagaaatcggcaaggtggatgagggtagtgaatgtggcccgctctaccgcttttatactgaggaatgggtgtga

SEQ ID NO: 21765 - DNA, 288 bp, Zea mays
  Peptide Sequence Number=SeqID_63544
atggccatgggggctgcgctacgacacttatacacggtcaccatatccaacaaccggcgcgggatcgtaactgccccaacaaatcctaacaacccgcccggcggcatcggtatgctacaacgcatgcgagcatggtttcgagaagcttttggtgaggaaacaactatcaagtggggtccacgcgtcagtgactttggcgtgcatgcggtggttgtgaggctaacagggcaggccccacccggcagcggcatgggagtgagcagattactccaacaaagggataactaa

SEQ ID NO: 21766 - DNA, 579 bp, Zea mays
  Peptide Sequence Number=SeqID_63545
atgtccggtgcaccagaggacaccaactcaaactcgtcaccttcgggaaattccagaggcaactccgctataattcaccggactgtccggtgtacaccggacagtgtccggtgctccaaggaagagcggcctcaggaactcgccagcttcgggaaactacaacggctgctccgctataattcaccggacatgtccggtgtacaccggactgtccggtgtaactgcggggcaacggctacttcggcgccaacggctacctgcggcgcatttattgcgcgccagcgcgcgcagaagtcaggcacgcccatgctggcgcaccggacactctacagtacatgtccggtgcgccaccggacatccaggcgggcccagaagtcagaactccaacgtttcgccctattcacccccccctctaggcgactttcaccatccaactactatgccaggaggatactgccactcccaccatctcccacgcccaatgctcggttgtctttgcacgtatggaatagccaggttcaagttgaccctgtcccataccagggtatgtgcctagttgcaaagtctcaaccacaatag

SEQ ID NO: 21767 - DNA, 1215 bp, Zea mays
  Peptide Sequence Number=SeqID_63546
atggctaccaggtcggttttcctgatccctcgatcctcaatcagtttcacggcttctcgcttattgatggatgtcgtggagctcgatgcggcgaggcatggatgcaaggtctgcggaaaaagcttcctgtccggccggtcgctcggaggacatatgagatcgcacatctcgctcggcgaggcagcgctggaggttcacgccgccgacgagctgacgcctgtttcgtcgaatggtggccggggctgtgacggactggtcgcgtacgggctgagggagaatcccaggaagactcggcgcctatccgactttgctgacgagaaggatgtcggccatggcgttgagtgcgggaagtcgtggaagtctttgttcggccacatacgcaatcatgcgtccggcgacaggtatcacgacgtcgacgacgacgaggacgtggaagaggatgaattctctgtagaggagggggaagcagaggaagcagaaatggtgaagccgacggaggcgcctgtggcggctctgacggtgctgtcggcgtcccctaggcggaggcgccgatcgatgcgcgtggcggctccgccgccgcgggtgctgagtgggctcgagaaagagactgaagacgtcgcgctctgtctactgatgctctcgcgcgacaccggtatgtgtagctcgccggccaagaacgagactttggagagcgcaaagaagatcaagatcaagatcaagggcggcgtcgccaagaacaggaagcgagcttcccggaagaatcaacacgatcccgtgcccgtggcgccgaagcggacccggtacgagtgtccgggatgccgcaaactgttcagctcgtatcaggcgctcggcggccatcgcgcgagccacaagcgcatgaacgccagctgcagctcccctaagaataagatcactcccgccgcgtcctccgcgccgccggagccaagcaccgagacgtacacgtcgttcaacacgatgtccccctccgcgtcaccggactcggtggccatcggcttcggcaagcccaaggacgacgaggcggtgcccgacgcggagttggagcacaagcggtcgcatctgatgtcctgcgagtccaacggcgtcgatctctactatgtcgccggcgccggcgcagaccatcaggagcagcattcagcagtcgccgacgggttacttgatctcaacttcccaccggctgcagcggaggagacctga

SEQ ID NO: 21768 - DNA, 1683 bp, Zea mays
  Peptide Sequence Number=SeqID_63547
atggtgacaccagcctccaccgcccctgcgtccaccgcttccgccgccgcggcgaccggctccggccgcgggcgtactccgcctcctccgctatcccgcccgctgcctccttcctttggctgcggcgcccaggacaggcacgcggctgaccaccgtgctccgcgcaagaacccagccggcggagcccgagctggtggagcagtaggcctccccatgggctgcgcgccgctgggacacgttctattcgacgagttcctccggttcaacccgaagaaccccgcctggttcgaccgcgaccgcttcgtgctctccgccggccacgggtgcatgatccagtacgctctcctccacctcgctgggtacaatggcgtcaagatggacgatctgaaaactttccgacaatggagaagcagaactcctggtcacccagaaaattttgaaacacctggcgttgaagtcaccacaggtcctcttgggcagggttttgcaaatgctgttggactagcacttgctgagaaacatctagcttcacgtttcaacaagactgacatgaaagtcgtggaccattacacgcactggagtcgccatatcgatgagggtgcttcacttgaagctgaatggaatgccaggtttgtagaatatgaaaagaaatacaaccaggaggctgctgagttaaagagcataatttcaggggaactggcttctgggtgggaaaatgctcttcgaaactacactcctgaaatgtctcctgatgctactaggaacttatctcagcagtgcttgaatgcacttgccaaagtaatacctggatttcttggaggtagttcggatctcgcaacgtcaaacatgacactgcttaagaagtttggtgacttccagagggatactcctgaagagagaaacattcgcttcggtgtgcgagagcatgctatgggtgccatttcgaatggcatcgctgttcacagccctggtctgataccttattgtgcaacgttctttgtcttcaccgactatatgagagcttccatccgcctttcagccttaagcgaatctggggtgatcttcgtgatgactcacgactccgttggcctcggggaagatgggccaacccatcagcctgttgagcatttattcagcctccgagcaatgcctaacatcttaatgcttcgtccagctgatggaaacgagacatcgggggcctataagattgcagttcttaacaggaaaaggccctcagtcattgccctctcacggcagaagctcccgcagctgagaggaacatcggtcgatgctgtttctaaaggagggtatattgtctccgatgactcatcaggcaacaaacctgatttcattctcattggcactggttcagagcttgagatcgcagaaaatgcagcaggcgagctgcggaagaaggggaggaccgtacgagtggtttcactagtttgctgggagctatttgaggagcagcctgaggagtacaaggaaagtgttctcccgagtgaggttacttctaggattagcattgaggcaggggtcacatttggatgggagaagtatattggacagaaaggcaaagctattggtatcgaccgttttggtgcaagtgctcctgcggggaaaatatacaaggaacttggtttgacagtggaacacgtcattgcagcagccgaggccctgtaa

SEQ ID NO: 21769 - DNA, 204 bp, Zea mays
  Peptide Sequence Number=SeqID_63548
atggttaagccaatttccctttcagccatttacaaaactctgccgacaaaggagaaaagggtttcaaatgtaagggaaaacattgaagcgggcatagatgctggaacgggacatgatgccgaagtgtttcttcttatgggaccttcggcgacgaagcagacccccaacagtagccccttcacggtgctagatcgtttttcgtaa

SEQ ID NO: 21770 - DNA, 123 bp, Zea mays
  Peptide Sequence Number=SeqID_63549
atggggcttcggggcgtcgcgactcgggtccggttgctggtgcggctgctggcggctttgggtcacgcaggcgcgaccgtggccggggcgtcgaggtggggctgggtctcgggcagccgttaa

SEQ ID NO: 21771 - DNA, 212 bp, Zea mays
  Peptide Sequence Number=SeqID_63550
cttcacgtgttgccgagggagatactaggcgtctccacgttcgggctctccgtgttccttctcaggtggtcccggcaatccagcggttcacagagaacggggtggaattcgtagatggccaccaagaggacttcgatgccgtcatcttcgcaaccgggtacaagagcaacgtgccttcatggctcaaggcttcaaagtgtacaagccaataa

SEQ ID NO: 21772 - DNA, 780 bp, Zea mays
  Peptide Sequence Number=SeqID_63551
aattatgccgatggcattgccgtcgccgccatcgccatcgtcgccgctgccatcatcgtcgtcgtcaccattgcctttgctgtcatcgcctttgccggcgccgtccccgctgccctcaccgtcgtcgtcaccgctgcccttgccgtcgtcgtcgccgctactaccgtctccctcgccactgtcgccatcatcgttgagtcggaggacgcgatctcatacgccgcctgcgccgctccgactgctgtgccactcggcagagtgaggctgacagcagccaagtccggcctcaggcgccattggaaactccgcttcgcccgaccccagggctcggacttgggttcagccctggaagacggtgaactccactccgcccgaccccagggctcggacttgggctcagccccagaagacgacgaactccgctccgcccgaccccagggctcggactcgggctcagccccggaagacggcgaactccgctccgcccgaccccagggctcggacttgggctcagccccggaagacggcgaactctgctccgcccgaccccagggctcggactcgggctcagccccggaagacggcgaactccgctccgcccgaccccggggctcggacttgggctcagccccggaagacgacgaactccgctccgcccgaccccagggctcggacttgggctcagccccagaagacgacgaactccgcttcgcccgaccccagggctcggacttgggctcagccccgaaggacgacaaactccgcttcgcccgaccctag

SEQ ID NO: 21773 - DNA, 189 bp, Zea mays
  Peptide Sequence Number=SeqID_63552
atggaggcgaagacgacgatggtggtggacagcgacggtggtggacagcaagccgacgatcctctcctgcaagccgacgccgacaacgaactgagcacggtgacggtggtcgagtgcgaggacggtgacggcgtcgggaccctgcgacggaggctcagcggtcgcgacaacggcgtgaggtacaactag

SEQ ID NO: 21774 - DNA, 771 bp, Zea mays
  Peptide Sequence Number=SeqID_63553
atgccaacatcgcgagaggaaggacaagcagaacccgacgagcaccaccccaccatcctacaccgtggcgggggtggcgacgccgccggcggcagcggcggcaggcccaggcaggtgtgggttcctggccccgtcatcgtgggcgccgggccgtcggggctggccacggcggcgtgcctcaaggcgcgcggcgtgccgtcgctgatgctggagaaggactcgtgcgtggccgcgtcgtggcgccaccgcacgtatgagcggctccggctgcacctgccgcggtgcttctgcgagctcccgctcgcgccgttccctcccggcacgccgccgtaccctacccgggaccagttcatcgcctacctcgacgactacgcccgcgtcttcggcattcagcctcacctcaacgcgcgcgtccacagggctgcctacgacgcggccatcggtttctggagggtgaccgtcaaggaggacagcggcggcgatggtgccacggcggccaacaccgagttcttgtcacggtggctcgtagtggccaccggcgagaatgcggagccggcgtggccggagggcgtggaggggatggacacgtaccgcggcgtggccatgcacacgagcagctacaagaagggggacgaattcaggggcaagaatgtgctcgtggtcggctgtgggcaactccggcatggaggtcagcctcgacctctgcaacaatggcgccaaagcctccatggttgtcagggacaaggtgagtgcccgctccacgttcgttaa

SEQ ID NO: 21775 - DNA, 465 bp, Zea mays
  Peptide Sequence Number=SeqID_63554
atgaatttcatcgatgtcgtttatgcagcttcaatgggagaggaaggggaaacggaagcaatgaattccaataacgtcgagggagagcggacggcgcgcggtcagctcgagacttggtcaggcggttgtcgcgtcgggcgctcggtcttcggctggtcgggtgtggctgccggggtcggcttcctggcgcgttggcggctcggcagcagggtctcggtcgacatcgggtcgtgcaggcgtcgggcgggatcgcgaggcgggcgctcggccggcttgagcgcgtgggctgcgcggctgctgctcctagcgaggtcgcggcacaggggctgggcgtgcgaccgggtcgggtgtcggggaagggcgaggcggctacgcatcggtcgaggcaggggctgctcggggaagggcgaggcggctacgcatcggtcgaggcaggggatgctcggtggcgtcctggcggggtga

SEQ ID NO: 21776 - DNA, 375 bp, Zea mays
  Peptide Sequence Number=SeqID_63555
atggcggaacgcgtgcatggcggatgcgacgctggcgctattttagcgcacatgaatcggttgaccgtgccaggagataaagcctcagccgcccttgcctcctcttcttttctccgctgccactccacgccgattctcgcgtcgtcgcgtgccgcacagagaaagctcgccgccgccatggtgtcgcgtctatgccactggtgtagccacgatagcagaccagggagctcctgcaaggttgctggtgttcgtgcgtgtcctggattggagctattggcgctcgggtcaccggtaatcgctcactggtgcttcaccaccgccacagggtccgccgcgcaccgtggtcacgtctgcgcgatccataatcgctggtga

SEQ ID NO: 21777 - DNA, 957 bp, Zea mays
  Peptide Sequence Number=SeqID_63556
atggagcctaggcatcgggatctggaggagggagaggcgttgaggagtattgcgggtgctcacagtgacgagcttgctgctgcttcaaggctggaagatagcatcaacttttatcaaacttcgattcctgatgttgctaagcttttccatatcgacccagcagcaaagcgtccatccatagtattactgaagaaagaggaggagaagttgaccttctatgatggaaagtttaaagcatcagccattgctgattttgtgtctgctaacaagcttcctttggttaccacactaactcaagaaacttccccttctatttttggcaatgcaatcaagaagcaggcacgtgatgttgcctacagtaggatctcttttctacattctaagggagtgtttgaatgcactagagctaatagttctcagattttactatttgctgttgcaagtgaatcctcaaaatttctgtccatctttaaggaagcagcaaagccatttaagggaaagctattatttgtctttgtggagcgagacaatgatgaagttggtgaaccagttgccaactactttggtcttactggacaagagaccacagttcttgcttacactggtaatgaagatgctaggaaatttttccttgatggcgaggtgtcacttgaagccattaaggacttcgctgaaggtttcttggaagacaaacttacaccattctacaagtctgaaccagtacctgaatctaatgatggggatgtcaaaattgttgttggaaagagtctggatgtaatagttttggatgaatcaaaagatgtacttctggagatatatgcaccgtggtgtgggcattgtcaatcactggagcctacttacaacaaactagccaagcatctaagtggagttgactcccttgtgatagccaaaatggatggtactaccaatgagcatccacgtgcaaaggatttataa

SEQ ID NO: 21778 - DNA, 327 bp, Zea mays
  Peptide Sequence Number=SeqID_63557
atggactattttaagatcagtgttagtaagagtttcactatattcaagaaaagagagaagaaaacatcccattctcatgtcatcttccctgagaggatgaaggacttcctcatgaatccaatcaagtttcgctttgggtccatggatgctagactccaactctgcgcacgacaacttggtgacttctggaagctcggtgtccgcatcgacgtcatagagtcttcccccgaggatcgtggcgctgctcatccacaagattggcaatccctccatctcttagagaaggtgctgcacaaccctaagatcttgttcggttacatgggatga

SEQ ID NO: 21779 - DNA, 1148 bp, Zea mays
  Peptide Sequence Number=SeqID_63558
atgagtgacagcacgttcaattcttgtttcacacatcagtttaagcttaactatgaggatacggagaaggtcgccatcggttactcggtcagctccgaggacatcctcgccggtgggcacctctggaggatcgtctgctacccgcgtggggatcgtcatgagaaagagaacaagaagggtgagtgcttatctatgttcctccgccatgagagcgaatccaaagatgccaaagctatcttcgaggcctttgtcatggacaaagaaggtactgtatcttcgtcccatcattccaggctggtgcgcgttttcgcaccgaagggcagcggcggtggcatcggcagcctgggttggcgttcattcgtgaagcgaagcgtcctggagtcgcgctacgtgacgaatgatggatggttcgtcattgtgggagcagtcaaggttgtgcaggaggaggatcccctcgacttgccaccctccaacaacatcgggagccacctcggcctcctgctgtactccgcggccggttccgacgttacgttcgttgtcgacggcgagaggttcgctgctcaccgggccgtgctcgccgcccgctcgccggtcttcaaggcgcagctcttcggctccatggcggaagctaccatgactacgtcgataccattgcatggaaccagcgcagcgacgttcagagctatgctccgcttcatgtacaccgatgcttgtcctgaagaagccgatgactcggactccgactccgactccgactcctccccgggtgagatgtttcacgacttgctcgccgctgccgaccgcttcgacttggatcgcttgaagcttctctgcgctaggaagctgtggaacaatgtctgtgaggatacagttgctgatacgctgatctgtgccgaaacatataactgcccgcagcttaaaaggaagtgccttggtttcttcggcgaggggaaggacttcaagacaaaggctgtgttaacggatggttttgctcggctggcactggaattcccatggattcttgatgagctgagggagaagagcaggtgccggcggttcatgtgcacagacgccattccggggggtgctgagcttgggggactctcctaccgagatgttgaagagcatctgctggttgctgccgacag

SEQ ID NO: 21780 - DNA, 534 bp, Zea mays
  Peptide Sequence Number=SeqID_63559
atggacggctcccgctatcttaacccaatcggtccccagtttctaatctgggccgttcgccgtgcatccaacggtgcccggatacccctgccacaaccctgccgcacggtggcgcacccgccgaaccgcgacggcgccatcgccggggatccaatcctccacatcccggagctaatcccacgcgcaacccggtgcaaactgaagcggacgcaatgggggtgtttccacggggctttgcccgcagctacccgccatggagtttctcggccacaggtgtggcgaattcacggcggaattcaacggcgtcgagctaccccagagtctatgctagtaaaatttgggcacgaggcgattctccaccgatcaaggaacatgacgaagctgagggatggaaattaccagcggacacgacgtgaatcactcggtgcggggcgagtcgcgaacgacggcgaggttggtcagtcagcaagcgattcccccgattgccgctggagtccttccaattggatcgtctcccagccgccgcgagagtag

SEQ ID NO: 21781 - DNA, 105 bp, Zea mays
  Peptide Sequence Number=SeqID_63560
atggccagacattggtggacgtgggcggctgcctgccagagctctggacatgtcagcctgctggcagggcttgaggtgattcgggcactggttagggagttatag

SEQ ID NO: 21782 - DNA, 243 bp, Zea mays
  Peptide Sequence Number=SeqID_63561
atggcgggctggttagcgggggctggggagtgggcgcggagcgtggggatgacaatgaggcgaaggtcacaacaggcgtggagcagggcgctgaggacgaggggccgcgatggaggtcgcgacgggggcaggggcgggcaacgcgacgatggaggctcggatggaaggccgacgacgggcgcgaggttgggcaagacgggcgacagagatatcgcgtgggcgaggggcaaaggcggggcttag

SEQ ID NO: 21783 - DNA, 885 bp, Zea mays
  Peptide Sequence Number=SeqID_63562
atgtggttcggtggcggacccatcgacgcggcgggcgcgctgcgcggcttcgtgcgggaagcaggcgggtgcgcggtggtggacgggggtctcggcacggagctggaggcgcacggcgcggacctgcacgacgcgctctggagcgccaagtgcctcgcctccgccccgcatctcatccgcaaggccacgatcgaggggttccagtcgaggggcttctcgcgggacgagagcgaggagctgctgcggcgtagcgtgcacgtcgcgcaggaggcgcgcagggtcttcgcggcggagggcgacagcggggattatggaaaatcgatgacgaaagaagatctgaagaacttccacaggaggcggctgcaggtgctggcaggcgcggggcccgacctcatcgccttcgagacgatcccaaacaaactcgaagcgcaggtctacgctgagctcctcgaggagaacggcatacggatcccagcctggttctccttcacttccaaggacggggtgaacgcggcgagcggagacccgatcaacgagtgcgcggccgtcgctgattcctgcccgagggtggccgcggtcggagtgaactgcactgctcccaggttcatccacgggcttatcctctccataaagaaggtgacgagcaagccgatcgtcgtgtatccgaacagcggggagtcgtacgtcgcggagacgaacgaatgggtggactcggacggcgccacggggacggacgacttcgtgtcgcgcgtcggcgagtggaggcgggcgggggccgcgctcatcggagggtgctgcaggacgagcccggccacggtgcgagccatcgcgcgggcggtgcgcgaggcggaatacgacgatatccctgccgtggccgtgctctaa

SEQ ID NO: 21784 - DNA, 513 bp, Zea mays
  Peptide Sequence Number=SeqID_63563
atgacaacggggcaagggaaggaggcgccaggatcgggtgcggttggacggcgtcacatcaggattggggtggcggctgaaagggaattaggaggactccaactcgaactcgccaccttcgggaatttccaggggccactccgctataattcaccggactgtctggtgttcaccggacatgtccggtgctccaaggaagggcggccccaggaactcgccagcctcgggttttcattccagccgctccgctataattcaccggactgtccggtgtgcaccggactgtccggtgcatctgcggagcaacggctacttcaggcgccaacggctacctgcagcgcatttattgcgcgccagcgcgcgcagagatcaggcacgcccatgctggcgcaccggacactctacagtacatgtccggtgcgccaccggacatcaaggcgggcccagaagtctgaactccaacggtcgatttccaacggcactggtgacgtggcaggggcaccggactgtccg

SEQ ID NO: 21785 - DNA, 174 bp, Zea mays
  Peptide Sequence Number=SeqID_63564
atggccatggatagccccggcacgcacgtgctgcaccacgcattgatgcggctccacacttctattgttctctggatatgttctactctggctccaacgttctggccgaggaagcaagccacatctttatgtggcaacatcagccatgacaattacatcgacatcaataactaa

SEQ ID NO: 21786 - DNA, 233 bp, Zea mays
  Peptide Sequence Number=SeqID_63565
gccttaaatgggccgcctccgcgctgccatctccagctccacgacaccgccccgcgaccccgaccaggaggagcctcccgcgcctgcctctgcggcggaggcggagaagggcgtccgcaccagaggagcctgccgcggtggaggagaaagtcgaggagaaggtggtcgagttggaggagaaggtggaggaggccgccgccgacaaggccgaggttcttgaggctgagaactaa

SEQ ID NO: 21787 - DNA, 207 bp, Zea mays
  Peptide Sequence Number=SeqID_63566
atggcggatgaactacgctctacttctatggtccagagggttcatgggcagtctgtgttgttgagcagcatatcttcctattctaccatgaacaatcattggggtataggggaaggatttagggggaaccgctgtacagggtggagatataggggggaaaagaacgctgatgtgacacatgactgggatatagtgggagaaatttag

SEQ ID NO: 21788 - DNA, 1587 bp, Zea mays
  Peptide Sequence Number=SeqID_63567
atggcgggcagggccagggcacggcggttcgtgctcgccggcgctctgatgatcgcctggctcctctgtcttctcccacgggccacggcggcggccgtccgcaggagcgacttcccgccgtcgttcctcttcggcaccgccacctcctcgtaccagaggatgaatatagaggacgttgctggagacagcctgattgatctgctgatgatcgaaggcgcgtacctcgagggcaacaagagcttgagcaactgggatgtcttcagccacgtaccaggaagaatcgaagacggaagcaccggagatgtcgcggatgatcactatcatcgttacgaggatgacattgagctcatgcactctctcggcaccaacgcctacagattttctatatcatgggccagaattcttccgagagggagattcggcgaggtcaacccagcaggcatcgcgttctacaacagactcatcgactcgctcctgctcaaagggatagagccgttcgtgacgctgtcccactacgacatcccgcaagagctggaggacaggtacggggcgtggctcggcggcgccgaggcgcggcgcgacttcggccacctggcggacgtgtgcttcgcggcgttcggggaccgcgtcaggcactgggccaccttcaacgagcccaacgtcgcggtcaccaggggctacatgctcggcacctacccgccgggccgatgctcgcgctcctgcgcccggggtaactccgacgccgagccctacgtcgccgcgcacaacgtcgtcctggcccacgccgccgccgtccagatctacaagaccaagtaccagagcaagcagaagggcttgatcggcatcgtgatgtccactgtctggttcgtgccgctgacggacgcgccggcggaccggctggcgactgagcgggcgctggccttcgacgttccatggtttcttgacccgataatctacggagactaccctccggagatgcgccggctcctgggctccaggctgccgaccttctcgccggaggagaggaggacgctgggctacgggctggacttcatcggcatcaaccactacacgacgctgtacgccagggactgcatgatctcgccaggttattgcccgtcggggcaggagttccaccaatcgctggcggcctacacgggagaaagagacgggattcccatcggacctccgacagcgatgccgacgttctacgtcgttcctgacgggatagagaagatggtcacctacatcatgaacagatacagcaatctccccatgttcataaccgaaaatggctacgcacaaggtggggatggttatactacccgtgccgaggactggcttgacgaccagggcaggatacagtacctcgagggctacctcgccaaactcgccaaagtcatcagtgacggcgccgatgtccgtggctacttcatctggtctctcattgacaatttcgagtggctatatgggtacaccctccgcttcggccttcactacgttgactaccaaacgcaggagagaaagccgaagtcgtcggcgctgtggtacaaacggttcctccagagttcacttgaagctcaatag

SEQ ID NO: 21789 - DNA, 882 bp, Zea mays
  Peptide Sequence Number=SeqID_63568
atgactccgtcgattcctcgcacgggcggacgtgcctgcactacgcggcgtactacgggcacgcggactacctccgggaccatcctctcggcggcggccaaggggttcgcgcgcttcgtgaacgtgcgggacgacaccggagcgacgccgctgcacctcgcggcgaggcagggctggcggcgctgcgtccacgtcctactcgagaacggcgccatcgtgtctgcctccagtggcgccttcgggagaattccgtatgaggtcgccgcgaagcgagggcacgtcgcgtgcgcggcgctgctgaacccgtcatccgcggagccccttgtctggccgtccgctctcaagttcatcagcgagctggaacccgatgccaaatctttgctcgaagcagccctgatggaggccaacagagagagggagaggaggatcctgaaaggcgccaagaatgcattgccctcaccatcgcaccccgatgatggcgctcatgacaccgccatagctgagcatctgcttcgagcaggcgtgcagcatcgaggtccgggagtgcgggcaccagatgtgtgcggcgtgcacgctggcgctgtgctgcactgctgccacgccaagcccaacccggcgatgcagtcccagccgctgccgacctgcccgttctgccgcggcggcatcgcccggctggtggtggccacgcgcacgagggccggcgacgacgaggagcggggcaagctggagtctcccaggcactgccggtcccgccggtccatgagcctcagcggcgacgcgggcagcaccagcacccttatgggcagcatcgcctcctccatcggcaagatgggccaccggcgaacagagagcagcgagcaggtcgacgacgacaagccgtag

SEQ ID NO: 21790 - DNA, 1035 bp, Zea mays
  Peptide Sequence Number=SeqID_63569
atgaagcgggtgcagatgcagagcgcgtcggggacgctcacgacgggagagctggtccgcgagttcgcggccttgaaggagaggtgcccccgggagtacacggcgtaccgcctcgggcacgcggcgcgcgcaatcgcagcgccgctgctgcgcgcggcgttccagcggtgggaaccgctggaggacccgtcgcgcgggctggagacggtgaccactctcagagacatactctcggacgacggctcggccgcctcgccgtacggagcgctggtcgacgacgtggtggtgggacccgcgctggcatcggcggccgagacgtgggaggccaggaacccggagccgatggcccggttcttggagacgtggggcgacgcgttgccgctctccgccgtccagcgcctcctggagcaggtggtcgtgccgaagctgtcggccgccgtggagtcgtgggagccgcgttgggagcctgtgccgtgccacgtctgggtgcagcggtggatcccgctcctcgggcgacgacggcttgagccgctgtacgtgacagtgcagcgcaagctcgggaaggcgctggtgggatggcacgcggcgcgcgcctgcgctgactacggcatggtattgccgtggaaggaagcgttcagggcggaggcctgggaggagttcgtcggccggcacgttgtgccttacctgaggcagggcctgcgggcactgcacgtcacaccgccgaagcaggacgacggcgggttcgccggggtgatgaggtgggcctccgtggtgccggcgcaagacatggcgcagctcctggaggaggagttcttcggcaagtggcaggacgcgctgtgccggtggctgtgggctgcgaaacccacggcgggggaggccgtcgcgtggcacgaagggtggaaacggctcttgacgccggagctgctcgccgaggagcgtgtcatggtgcctatcgaggccggtctccagaagatcagccgtgcggcgcaggggctgcaaatttatcggcgcggtggttggcagtggaagcaataa

SEQ ID NO: 21791 - DNA, 177 bp, Zea mays
  Peptide Sequence Number=SeqID_63570
atgccgctaccaagcccaaatatccaagatgctcacgaggactggtgcagtataccaacagtcgtatgtggtattgttgtagggcatgttccattatctgtaataaacaaaggcatgaagttgtgttttaatgagtacaggtcggcgattgctgaggagggctctcaagcttgctga

SEQ ID NO: 21792 - DNA, 343 bp, Zea mays
  Peptide Sequence Number=SeqID_63571
tgggatgaggcatggttccccgacgctaggcgtggttgaagctctggacgccacgagggccactgcagtcactgccgaggaagcgcgcactaccgccaaggagatggagaagaaggccaccactactgcaaagctagccgccatcgctatggacaaggtgggatttgtcgtcgttgctgtggccagtgtcgtcgccgaggaagccaacgcgcgttggattcagtggcacatcgctatttggctgaagcgatcgcgaacttccgccaagaagatgtaccgttgttgcagcatgtcgtccacggtctgggtccacgatgtgcccgtcaagggcatgttcgcttag

SEQ ID NO: 21793 - DNA, 201 bp, Zea mays
  Peptide Sequence Number=SeqID_63572
atggaccactatagcctcaagttcctcctcgaccagcggctatcgataattctgcagcaccattgggtcagcgttacagttggtccatgtgggccacgatgcttccagaagacattacatcggctgtgcacgaacttctacatcatcggcgattgcgcagtggtggagcattccagccggctggactcctacaacccctaa

SEQ ID NO: 21794 - DNA, 300 bp, Zea mays
  Peptide Sequence Number=SeqID_63573
atggtgacggggaaggaggggaatccctcggtgcacaagggcctcgcctcgacgctgaaggctgaagctgtccccatggctacagcaggtatcctcggacaagtcggcgttgctgtaaaccggaataatacgaaggttgatacagagccgaaggtgaacagtatccctgtactgttcacgctgtcttggcattcgctttttgcgtcacacttgtattgtcatttccttccgattgaagtgcttgagaacaagtccccaacattggcgcccacctccggtgaactcacttccatttcttga

SEQ ID NO: 21795 - DNA, 489 bp, Zea mays
  Peptide Sequence Number=SeqID_63574
atgcaacttgtagtcaatgtagtcaatgacagtgaatatgtgatcaaccgaatagtgcttctgtttctgtccccgacggcggcgtggccgctgacgacgggcgccgccgcgccggcctggctctccacccgctgggacatgttccgcaggagcaggtcggcggaggagctgtacgaggcggacgtccagatcaggcgcagcgcaacgagcagcttcctggacatccgcttccacaggggcacgctttacctgctgcccatcaccgtggatgacacaactgagtatgtgctgctcaacctgatggcgttcgagcgcctgcacgtgggagccggcaacgacgtcaccgcctacgtcttcttcatggacaacatggtcgactcggcgcgggacgtggcgctgctccaatgcatcatctggtacacgctcatgctcttcatgttcgagtaccgcgtcgtgcggctgctgatcgttttatttttccttgtttaa

SEQ ID NO: 21796 - DNA, 330 bp, Zea mays
  Peptide Sequence Number=SeqID_63575
atggctagcttccacgtcgatcgagggccaatggtcaagtggtgcaccggacagtccggttctcccgccggacggtctggtgcccccggaacaggaaaccaggcaatcacacgattctgtgcccgcacactattcactgtccgatgtgcaccggacagttcggtgcactcgcggatagaaggcaaccagggccttccaaatggagctccaacggctcctaggtcccttggggctataaaagggacccctaggcgcatggagcatgacaccaagcacctattgaacatcctacaacaccgagtctttgcaatcacgctattgtttcattga

SEQ ID NO: 21797 - DNA, 159 bp, Zea mays
  Peptide Sequence Number=SeqID_63576
atggcgcggctgacgatgcgctcgcagcagacgaagaagacattgcaacgtaccggcggcggcggcgcgcggcgaaggctggattcgcgaaacccgccaggacaggccaagggcgctaaccggacggaggcctgttcgaccccctttgctcatacgtga

SEQ ID NO: 21798 - DNA, 414 bp, Zea mays
  Peptide Sequence Number=SeqID_63577
atggagttggagctgaggaacatccgcagccatcgcaagaagacggagtctaacacccgcgctggggtcgagctggcgcacacacttttcgtggaagcatactgtgagctcggcgcgcagatcgctccctccgacgaatcgggggaggaggtggggcttcgctttctgggggcgctttatgataggatgtggggtccccacagttgtggcatcgttcgggagagggcggatcgagcgcaggcacaggtgatgaatgaggaagaagttgatgacctcaccggccttgaaagctcggtgacccgggtgggtgccttggctgaggcgggagctaaagggcatacaacgcctccaaggggtgttgctgaagaccctacggcggcggcttcttcggcacaggttgaagggatgcattag

SEQ ID NO: 21799 - DNA, 648 bp, Zea mays
  Peptide Sequence Number=SeqID_63578
atggcgtcctccactctgccagcctaccccttccgtatgtctcttcccggactacgagccccggaccctgctaaggttaagcacgtatccgttcgagcccccgctcgccgtcttcccgttgcagcctccgcggcaccatcaggcgccgcggcggcggcggcgagggagcgcaggcgtttcctggagagctacgggctcaacccaaacgacttcgaggaagatgcagaggagaatccgagggtctactccaattattctgaacttattcgtaatgattgtcgctgcgaattggaagagagaaaggacaggcggagacgtcggcagtcggggagaggggagcaaactgcggaagcggcagtgactccagcgaaggtggaggagcctcgggagactcacaaaatgctccaggtgctaggtggaaaagtccgcagaaggaaattactttcacccaaagataggaatgtccgtccaatgatggaagttgtccgaggagcagcctttgacattttacaggcacatttcgttgagatggatccttgggtcatctctgaggtcctcaaaccaaatctggagtgtactggatttattgacgtgtcacagatacatatgctccgcgttgaaaaattcttggccaatgccgaaaaataa

SEQ ID NO: 21800 - DNA, 1482 bp, Zea mays
  Peptide Sequence Number=SeqID_63579
atgttcgggcgggacccctggggcgggcctctggagatctccaacgccgactcggcgacagatgacgaccggagccgggacctggaccgggcggcgctgatgcggcagctggacgagacgcagcagagctggctcctggccgggcccggcgaccaggcgggcaagaagaagaagaggtacgtcgacctgggctgcgtcgtcgtcgaccgcaagatcttcatgtggaccgtcggcaccatcctcggcctcggcgtcttcatcggcttcatcatgatgatcgtcaagctcgtcccgcacaagcgcccgccgccgccgccgcccgaccagtacacgcaggcgctgcacaaggcgctcatgttcttcaacgcgcagcgatccggtccgctgccgaagcacaacggcgtcagctggaggggcaattcctgcatgaaggatggcctctccgacagcaccgtccgccggagcttggtcggaggcttctacgatgcgggggacgccatcaagttcaactaccccatggcctggtccatgaccatgctcagctggagtgtgatcgagtacagggcgaagtatgaggccatcggtgagctcgaccatatcaaggagctgatcaagtggggaacagactacatcctcaaaaccttcaattcatctgctgacacgatagacaggattgtcgctcaggtgggtgtaggtgacacctctaaaggcagcagtcagcctaatgaccattactgctggatgagaccagaggacatcgactacaaaaggccagtcaccgagtgtcactcttgctcagatctagcgtctgaaatggctgctgccctggctgcagcttccatagtgttcaaggacagcaaaacctactccgacaagctcgtcaaaggcgcaaaagccctgtacaagttcggaaggctgcagcgcgggcgatacagccccaatgggtctgaccaggcaatcttctacaattccaccagctactgggatgagtttgtgtggggtgacacgcctgggtggtactgcggacctaacttctacaccacagaagtcctccgcaagtttgccaggtcacagctcgactacatccttggcaagaacccattgaagatgagctacgttgtgggtttcggaaacaagtacccgaagcgccctcatcacagaggcgcgtcgatacctcacaacggcgtcaagtatgggtgcaaaggaggttacaagtggagggacacaaagaaggcaaaccctaacatccttgtcggagcaatggtggctggccccgacaggcgcgatggctacaaagatgtccgcacgaactacaactacacggagcctactctcgcagcgaatgctggtctggttgcagcgctgatctctatatccgatatcaaaaccggacggttcggcatcgataagaacaccatcttctctgcgattcctccgatgttcccaacacccccgccgccgccatcagcatggaaaccatag

SEQ ID NO: 21801 - DNA, 329 bp, Zea mays
  Peptide Sequence Number=SeqID_63580
ctgctaaaacacaagccaagaatgctgagccaggaaaaggtggtgtgagccaggaaaaggtggtgtggtatgctaaaactgcattaccattgccagcagcgatgttggcttccgccaccaccacaagcgcgatgaggaggaggctgactgccaatgtcgagggtgaggacctcgacgacgaagcgcctccacaagctccgccggcttcaacagcaggaagggagaaggagcttgctatcccctccgtagctccgcccggcttcaacagcaggaaaggagaccggagcttgccatcccctccgtcgtgggcaccactgggcgaaacataa

SEQ ID NO: 21802 - DNA, 354 bp, Zea mays
  Peptide Sequence Number=SeqID_63581
atggggtggaggaagcggtctctggtgggtaagccgatgccatgccgcggtggggaaggggggaaggacgcggtctccggtgggtggggaaggggggccgcggtggggaagaggccgacggacgagacctctacggggctggggcaggcgccgatgcgagattgccagggggagggcgagggcggaggtgtggtgatgccagtggggctgggcggaggcgggcgtgcgcgagatctgggggcgagggcatccatgcgcgggcgtgggagggagcggagcggagccgtggatgtcgcgggtgcgaccgtgcgagtggaggcagaaccagtacaaaggaactttctctatatttag

SEQ ID NO: 21803 - DNA, 201 bp, Zea mays
  Peptide Sequence Number=SeqID_63582
atggaagttatctctgaattcctcctaaatgatggcttcggggtcggcatgggtggcgagataggactcccaccaggactgagctactcccctcaacagacagggaccatgcaggacgttctctctgtcattgcattgggtggtatgcagctcccactccatgggtctgcccaattgcttgcactgcttgagtctgcatga

SEQ ID NO: 21804 - DNA, 1734 bp, Zea mays
  Peptide Sequence Number=SeqID_63583
atgctcttggggttcatcgtctccgagcggggcatcgaggccaacccggagaaaatcgcggccatcaccaacatggggcccatcaaggacttgaaaggcgtacagagggtcacgggatgccttgcggctctgagccgtttcatctcgcgcctcggcgaaagaggcatgcctctgtaccgcctcttgaggaaggccgagtgcttcacttggacccctgaggccgaggaagccctcggggacctgaaggcgctcctcatgaacgcgcccatcttggtgcctcccgctgccggagaagccctcttgatctacgtcgccgctaccactcaggtggttagcgccgcgatcgtggttgagagacgagaagaggggcatgcattgcccgtccagaggccagtctacttcatcagtgaggtactgtccgagaccaagatccgctatccacaaattcagaagctgctgtacacggtgatcctgacgcggcggatgttgcgacactacttcaagtctcatccggtaactgtggtgtcatccttccccctgggggagatcatccagtgtcgagaggcctcgggtagaattgcaaagtgggcggtggaaatcatgggcgagacgatctcgttcacccctcggaaggccattaagtcccaggtcttggcggactttgtggctgaatgggtcgacacccagctcccaacagctccgatccaaccggaactctggaccatgtttttcgacgggtcactgatgaagacaggggcaggcgcaggcctgctcttcatctcacccctcgagaagcacctacgctacgtgctatgcctccacttcccggcgtccaacaatgtgtccgagtatgaggctctggtcaaagggttgcacatcgccatcgagctaggggtccaacgcctcgacgctcgcgatgactcgcagctcgtcatcgaccaagtcatgaagaactcccactgccgcgacccgaagatggaagcctactgcgatgagctggccaagatagcctcagggcgaacaacggttcccccggacgtcttctcccgagacctgcatcaaccctccgtcaagaccgacgacacgcccgagcccgagaaggcctcggcccagcccgaggcaccctcggccaagtccgaggcaccctcggagcccgaggcaccctcggctcagcctgaggcaccctcgaccctcgaaggtttctactggccgaccgcggtggccgacgccactagaattgtccgcacctgcaaagggtgtcagttctatgcgaggcagacccacctgcccgctcaggccctacagacgatacccatcacctggccgtttgctgtgtggggtctagacctcgtcggccccttgcagaaggcacccgggggctacacgcacctgctggtcaccattgacaaattctccaagtggatcgaggtccgacccctaaacagcatcaggtccgaacaagcggtggcgttcttcaccaacatcatccatcgttttggggtcccgaactccatcatcaccggcaacggcacccagttcaccggcagaaagttcctggacttctgcgaggatcaccacatccgggtggactgggccgttgtggctcaccccatgacgaatgggcaagtagagcgtgccaacggcatgatcctgcaaggactcaagccgcggatctacaacgacctcaacaagttcggcaagcgatggaagaaggagctcccctcggtggtctag

SEQ ID NO: 21805 - DNA, 351 bp, Zea mays
  Peptide Sequence Number=SeqID_63584
atggggctctccaccacggcccgggcgtactggcgctccatcaagcacgctgggctcggtgggtcggatgagtcgggggtctcctcgaatgaggcggactcctccgactcttccgagtgcagcggcggtgacagcgacgacgagggtgatggcagtagcgacggcgacgacgacaagggcgatagcggcaaaggcggtggtggtgacggcagcagcgatggtggcaagggccacagtggcgatggcagcagcgatggctgcaagggcgacggagacggcagcggcaagggcgacggcggcagtggcgacgacagcggtgggaaggccggtggcataatgccactggtttaa

SEQ ID NO: 21806 - DNA, 546 bp, Zea mays
  Peptide Sequence Number=SeqID_63585
atgcttcggcaattatgcaagatatcgggggtaaaggtctgctttgatactgaaaatgctcgtgattctttctacagagcagcagtgaactttgttttagatgattgcagcagagcagcaaaagacatcggtgcagcaaaacttaatggtgaggatccaagggattttctcgccggccttgctagcaatattggattagacaagtttcgtgctgccactcttgctctagagattcaaggaaaacggccagaagcactggatgaactcgtgaagatttgtagaattcattacatatttcctccagaggacaattctgcagagatggaaatggtggctgctggactagaaaagaatttgcatgttgccgagagggttcaccttctatatctatacaggagcgtttgtactgctggtaacttaaaaacagctgcacaggctcttggtctggactttgtgcatatgccatcttgctatgttgcatttgatgaccatgacgtctacatgtggggcacttcaaagattcgtgtcccttgtatcgaaggttag

SEQ ID NO: 21807 - DNA, 351 bp, Zea mays
  Peptide Sequence Number=SeqID_63586
atggaggcgacggtggtcgtcgcggctgccgtggaggccgaggaggaggaggctgctgctgctgcggcttcgacgccgcagcggtctgggaggaaacggccccgcgcgattgggagtgggcggtaccgctcggtgtccagcacccgcctcgtctcgctgccggctgccgctggtgatcctgctccctgtggcattggccctagccagcaggcaggcagtcggccagggacggatggacggagacgacggatggaagccgcagccactagccagccacaccgcagaccgcgcacgcaagagaaagaagcggtgtttgcatggactgggattgccgacttgactgcggattga

SEQ ID NO: 21808 - DNA, 1176 bp, Zea mays
  Peptide Sequence Number=SeqID_63587
atggccgcagccaccgccaccgtcaccttctcgccatctcccccatccttcctcaactcccatatccctcgtggccaccgacctgcctccaccacgacgatagcttttgcacgccgttttcgcggtgtaaaacctagtcccgatcgctcccgaggcaaggtcgaccaggtcgcccaccccgacgatggattcggcgcactcgaagcggagctctggcgcctgcgccgcctcgtggagctaaagatccaccgcctcggcaccgaggccgacgccgcctaccgcgacctacgctcggcggtgcgcgaggtcagcggagaccgcgtcgtcctaaccttccgccgctcgtcgctgcgctacctcaccggagcactcctcttcttgctcgcctgcgccatcgcggcgcgattgctgctggggatggtcttacgggcgtggcagcggcggggtttgaggaggggattgtggggtgaaggcggcagggcggttgtgcgaaggagggaccgcagcttgggagggaaggaggtggtggttgctgtgtcgtcgccgcctaaggaggcagctcggaccagtcgtgtcgcagagccagcaaaggaggtctggagggggtactcacaagctaagttgccagactggtggcccaatgttggagcgacggtgatggaacctgggccagagatggagaagtgggcaagaatggcaaacagattggtccgagcaataattgatagtagagtcatggggagggattacagatatgatgatgcaattcaagtgcgtgcccgtagggataaacacgccaagtttgcgagaataaagtggtggaaactaaaaggtgatacatcagaagtcttcaaggaaagggtcatcaaagagggcacttggaaggaagcgataggttttaaatatccggtctcttttctatgggccatcccactatctttaaaggttgcatgtaagttcacgggcaacgtactgatcaagtggttcctaaaaagcttcgggctacatgacaacaccgtgctgatgaagtggttcctaatgcgagggctacatgacaacaacgtgctgatgaagtggttcctaatgcgagagcgtattggtgaagtggttcctaatgcaagagtcgaagttactcaaggactggtattgacatcaatggaaggaatgaagtggtga

SEQ ID NO: 21809 - DNA, 372 bp, Zea mays
  Peptide Sequence Number=SeqID_63588
atggattccaccaggtcgaactttattcattgcatcaaacgaaagaactccaggcttcttttcccctctgtcagacaggtttctacctccatgtgtgcttacctaaagtgtttgatcattcatttggcaacaattcagagtactggcgaatggcgatcaaggccccatgcaacaattgagaatcgagacaatcaaaatatgtcacctcaggatccaccccttgttgcactgagggggctcttccagcgggctaattgtgatgaactgcgagcactacttagtttgctgatgagcaatagaattcttggcgacaattctaggcagcaggcttgccaaatccttgatgaggagattgcgaagcaatggcactga

SEQ ID NO: 21810 - DNA, 327 bp, Zea mays
  Peptide Sequence Number=SeqID_63589
atggccagcgatgggaagcataagaaggtgcctacaccattctctgagtccttcgaagattcagagtactttgaagaggagtacaccggctctaaggggtacctcctcgtcgcctccacactcgccatcgagttccttattggacaagcaggagacgaaggaggaggaggcaacaagggtgacatcggcaaaggcggtgacaatagcaagggcaagggcggtggcagtgacaagggcggtggcaacgatgacgacaatggcaagggcgacggaggcagcatgggcgccagtggctgcagcgccggtggcaaagcgccatcggcttaa

SEQ ID NO: 21811 - DNA, 1827 bp, Zea mays
  Peptide Sequence Number=SeqID_63590
gagggcctggatgccatcaagcacaaagggtacattgccgaccgggtgctggaatccgttgtcagggccgacgagcgcgtcggcctacccgagcgaccgcctgttcccgaagttaaaaaatgcaagattgatcatgtacctcctgtgaataaagcttgtgtgggactgcaagttgtgaaacttgccgcgaaaccggaaggtgctgctcctgctagtgaagatgctgctgatcctgcaactaaagctggtgtttttgttgtcaatgatgctgctattgagcagggagttaaatgtatagcttctctctcaggtggtgcctccaagatggaggttacagtggagaattctcttgcaaatggaccgaccactgaattagaagtttccaattctcttgcaaatggaccgaccactgaattaggagtttccaagggcacgtcccttgctaatgaatcggctgatctgccaggggttacatgcattatgccagaagttacagacaaacctgttactgatctaggggttataagcaccgtggtggaagttagtgatacaggtcctgtcgttcatgaaactactgaactggaatctgcaggggaggattatattgctagtgaagccactgctgaaccagaagatgctggtagagcttcttgcaatgtagatgacactgctgctttagatgagccacagccgcctaactgtgatctgtacttaggcaatgtgcaggatggaaatgctatagatactgttaccagtacactgcagccttctcgatgtgatgctgcagaaggtggtggttctgtgaatttcacaaccaatattcctgttagagccagaggaccaacctttaagggaggagtgctgaaggataaatctgttgcacccagtgttttacttgtattggacgtattgactagaagcattggtaaatcagggagaacagatgttatttgttatgctaggcgaacaggtaagaggaaggcagagctgctgaaggtaaagaaggaaaatattgacttagaagatggtgttatatgtgagaaagaggagacactggtgagcactgatcgttgtgaatgtgtcttgtcaacagctgggtccatagatgttaaacttgccgacataaagaaagaccttatggataattccgctgtaggcaaggttaaaaagatgaagagaaatagatttgaatgtaatattgattactgccacatggtgttcaagacagaagctgagcttgctgtccacaagaagaacatgtgcacggtcagttcatgcagcagacatttcagatcccacagatacctgaggcgccaccagagtgcacacaacgatgatatgccttacaagtgcccatgggatggttgtaatatggctttcaagtggtcatgggatcgggctgagcatttcaaggtccatgctggggccaagccttacaaatgcacgacgcctgggtgcagcaaaatatttaagtttgtttcagatttcacccggcataggaggaggtgcaaacctcagaggtgtctcttctatgcattccaagaagaatccactaaatattatgtgacactgtcaatttggaaattactatgttgttcgtctttaccaaggaaaaaagatgtcagcaaactgcgaggtcgtcggaatgtgaagaatacgaatatcctcaacgacaacacactcacggatgaagtgaagatcgatctcaacatgcttcatgtgttggtgctgaatcgggttgacagagaggtagacaatgctgacattgtcgtagtagataaatgtgctcctggtgagagggtcgtgaatcctggaggcgttgactga

SEQ ID NO: 21812 - DNA, 144 bp, Zea mays
  Peptide Sequence Number=SeqID_63591
atgggcgcatggttgctgggagcctgggactggctctgggccctcgccgtgtgcgcggatctgggagggatgggcgccggggatctagcttgccatgcgccacaaggtgacgcggaggtgtggaagactggatggttgagttag

SEQ ID NO: 21813 - DNA, 255 bp, Zea mays
  Peptide Sequence Number=SeqID_63592
atgacgagcggggtagggcgccaagaatggggcggggtcagacgccgtcacgtcgagaacggggtgtcaagccgaactggctcaagcgacgtcgaaaagaatgaagccggacagatagatcccctccgcaccgcgtccgcgtcccccgtgcagctgcccaccccctaccccaccggcaccaccgaccaccgtgtccgccgccttcccttcgcctcccccaaccccgcggctgaccagcgccatgcgcatccgccg

SEQ ID NO: 21814 - DNA, 3207 bp, Zea mays
  Peptide Sequence Number=SeqID_63593
atgcccggcataccgagggatgtcgccgagcactcgctggatattcgggccggagcccgacccgtcaggcagcctctgcgccgattcgacgaggagaagcgcagagtgataggcgaggagatccacaagctaatggcagcagggttcatcaaagaggtattccatcccgaatggcttgccaaccctgtgcttgtgaggaagaaaggggggaaatggcggatgtgtgtagactacactggtctcaacaaagcatgtccgaaggttccctaccctctacctcgcatcgatcaaatcgtggattccactgctgggtgcgaaaccctgtccttcctcgatgcctactcagggtatcaccaaatccggatgaaagagtccgaccagctcgcgacttctttcatctcgcccttcggcatgtactgctatgtcaccatgtcgttcggtttgaggaatgcgggcgcgacgtaccagcggtgcatgaaccatgtgttcggcgaacacatcggtcgcacggtcaaggcctacatcgatgacatcgtagtcaagacaaggaaggcttctgacctcctctccgaccttgaagtgacatttcgatgtctcaaagcgaaaggcgtcaagctcaatcccgagaagtgtgtcttcggggtgccccggggcatgctcttggggttcatcgtctccgagcgaggcatcgaagccaacccggagaagatcgcagctatcaccagcatggggcccatcaaggacttaaaaggcgtacagagggtcatgggatgtctcgcggccctgagccgcttcatctcacgcctcggcgaaagaggtctgcctctgtaccacctcttaaggaaggccgtgtgtttcacttggacccctgaggccgaggaagctctcgggaacctgaaggcactccttacaaaggcgcctatcttggtgcccccagctgatggagaagccctcttggtctacgtcgccgcgaccactcaggtggttagcgccgcgattgtggtcgagaggcaagaagaggggcatgcgttgcccgttcagaggccagtttacttcgtcagcgaggtactgtccgagaccaagatccgctacccacaagttcagaagttgctgtatgcagtggtcctgacgaggcgaaagttgcggcattacttcgagtctcatccggtaactgtggtgtcatccttccccctgggggagatcatccagtgccgagaggcctcgagtaggatcgcaaagtgggcggtggaaatcatgggcgagacaatctcgttcgcccctcggaaggccatcaagtcccaagtattggcggacttcgtagccgaatgggtcgacacccagctgccgacggctccgatccaaccggagctctggaccatgtttttcgacgggtcgctgatgaagacgggagccggcgcgggcctgctcttcatctcgcccctcgggaaacacctacgctacgtgctatgcctccatttcccggcgtccaacaacgtggctgagtacgaggctctggtcaacgggttgcggatcgccatcgagctaggggtcagacgcctcgacgcccgcggtgactcgcagctcgtcatcgaccaagtcatgaagaactcccactgccgcgacccgaagatggaggcctactgcgatgaggttcggcgcctggaagacaagttctacgggctcgagcttaaccacatcgctcgacgctacaacgagactgcggacgagctggcaaaaatagcctcggggcgaacgacggttcccccggacgtcttctcccaggatctgcatcaaccctccgtcaagatcaacgacacgcccgagcccgaggcacccttggtccagcccgaggtaccctcagctcagccagaggcatcctcggttcagcccgaggtaccctcgccccccgagggcgaggcactgcacgtcgaggaggagcaaagcggggccacgcctgatcgaaattggcagaccccgtacctgcaatatctccgccaaggagagctacccctcgaccaagccgaggctcggcgggtagcgcgacgcgccaagtcgttcgtcttgctgggcgatgaggaggagctctaccaccgcagcccctcgggcatcctccagcgatgtatctccatcgccgaaggtcaggaactcctgcaagaaatacactcgggggcttgcggccatcatgcagcgcttcgagcccttgtcgggaatgctttccggcaaggcttctactggccaacggcggtggctgacgccactagaattgtccgcacctgcgaagggtgccaattctatgcgaagcagacccacctgcccgctcaggctctgcagacgatacccatcacctggccctttgctgtatggggtctggacctcgtcggtcccttgcagaaggcgcccgggggctacacgcacctgctggtcgccatcgacaaattctccaagtggatcgaggtccgacccctgaacagcatcaggtccgagcaggcggtggcgttcttcaccaacatcatccatcgcttcgaggtcccaaactccatcatcaccgacaacggtacccagttcaccggcagaaaattcttggatttttgcgaggatcaccacatccgggtggactgggccgccgtggctcatcccatgtcgaatgggcaagtagagcgtgccaacgacatgattctacaagggctcaagccccggatttacaacgacctcaacaagttcggcaagcgatggatgaaggaactcccctcggtggtctggagcctgaggacaacgccgagccgagccacgggtttcacgccgttcttcctggtctacggggctgaggccatcttgcccactgacctggaatacggctccccgaggacgagggcctacaacgatcaaaacaaccaagctagccgagaagaatcgctggaccagctggaagaggctcgggacaaggccttactacactcggcgcggtaccagcagtccctgcgacgctaccacgcccgaggggtccggccccgagacctccaggtgggcgacctggtgcttcggctgcggcaagacgcccgagggaggcacaagctcacgccaccctgggaggggccattcgtcatcgccaaagttctgaagcccggaacgtacaagctggccaacaatcaaggcgagatctacggcaacgcttggaacatccaacagctacgtcgcttctacccttaa

SEQ ID NO: 21815 - DNA, 213 bp, Zea mays
  Peptide Sequence Number=SeqID_63594
atggccggcgcagtgctgggagcctgggagtacggcgagagtgtgcaaattgtgcgtgcatggaagcgcaagcaaagggccgggcagggatcacacgtggttgccgccagccagcactctccccttgcatggcgcctgaagggggcgctccacgcctgcagcgttgccccctacagggcccctaccggccggtccccttctctctccctctag

SEQ ID NO: 21816 - DNA, 858 bp, Zea mays
  Peptide Sequence Number=SeqID_63595
atgaccactgcgcgcgtgcagcggtttgggcatactgcccgctgctttgattggacaggccctgctctccggctttcgtcacgggccgcgagccacgtggcagcatcgggtttccgcccaggcggggagagtaggcgcgcctggcaagatctcgacaagtgtctgtgccggacccctcgctctggtcggctggtcctcatccctccagtacgcgagacttcttccttgatccttccctccgccgcgcactgtggaagtctctgggccgcccatcctgcgtacgccaccgctctactcgatcttcagctccagcagcgcgatattttttcgctcggcgtcgtcctcatctccttccccgacgctgcgctctctctcttggtttcctgctcgccgctctctctctccctatttatctcacacgcgctcaacttccttgcttcaactttctggccgtgcgagcgcagtcggccgcgacagccaacgcgtgggcgtgcggaggcgcgcgccatggggctggacgtgcacgtccctggcaggtttcagctccagcgcgtcgtcctccatggccgccgtgtgctcgccagcgagctcctcccttctccctgcagcttgccgagctcgccggcgtttctcccgctccctggtggccgagcctggcccctgcgccctgctgcagcccgtcgtcaccttgctgctcgccgtccgcgcgccacttcgcccatggcagccacgcctgctcccttcgccgcgcgtcgtgtcgcgccgttcgccgtcgagtctcgctacccatcgcgaagtcccatgctgtcagcctccgcatatgtcctaagccgtcagtttgcctccatctcgtggtag

SEQ ID NO: 21817 - DNA, 486 bp, Zea mays
  Peptide Sequence Number=SeqID_63596
atggcatggccatggcgtgctctgcgcgtgcgcctacccggcgtggcgcggcgtccccatccccagccgagcgtttggccccctccctgcgtgtgcacccgccgtggctccctgcgcgaccccgtcccggcgcacggcccccgcgacccacccgcctcgacatgccctgctcgtgtcgtgtcgccccgacacggccttgaagctcggcccagcgtgcctatggcacgcggccttgagctcggccagcgcgcggccccgacgtgtgcatggctagttcgcgacgcgttagccctggcttgcgcgcgcgtgctcgcgtggtgcgcgcgggggctcgagcggtttctcgagtgcctctctgtggcaatgagattcatggttcttggtattggctctggtaatggttgtccgcattgcaaccactgctcaggagaagatgaagccgtggaaggagacttccaggagttccatgactacgacgagttctag

SEQ ID NO: 21818 - DNA, 936 bp, Zea mays
  Peptide Sequence Number=SeqID_63597
atgtggcaactacaacaagcattgagaagaaaggttcaaaaaccatatgagttagggcacaaaccctcttctcatcaagagactgatgagggcatagcacaggctatcatccggtccaacatcgacttccgcagagagccttggtcaaaggtgtcggaaaatgcaaaagatcttgtgaggaagatgcttgatccaagcccctactgtcggttgactgcccagcaggttctagaacatccctggatacagaatgccagtgcagctcccaacatcccacttggagaagcagtgaggtccaggctgaagcaattcactgttatgaacaagttcaagaagaaggccctgcttgtggtggcagagtacctaccagccgaagagctggaagcaatcagggagttgtttcagttgctggacacgaacaaggatgggcatcttacaatcgaagaactcaggaagggaatgcgattgataggccacaatgtccatgacactgacgtcgatatgctcatggaagctgccgacatcgacgggaacgggaccctggactgcaaggagttcgtgacagtctccattcacctgaagaaaatccgtagcgaggatcacctgcccaaggtgttcagctacttcgacaagaacgggagcgggtacatcgagatcgaagagctgaaggaggccctctctccaagaggtgaccagaaggcgatcgaggacataatcctagacgtcgatatagacagggacgggaagataagctacgaggagtttgagctgatgatgaaagctggagtggactggaggaatacgtcgcggcagtactcgagagcggtgtacaacaccctcagccgcaagatgttcaaggacgcgtcactgaagcttggtagtaacaatggtccacttgctgctgcagccgtcaaagaacaacaagatgttgattga

SEQ ID NO: 21819 - DNA, 516 bp, Zea mays
  Peptide Sequence Number=SeqID_63598
atggcaagaacaccgggcgctgccacaggagacgagcgcaggggtgtttcagctggaacgctgcggcagtgcactaccggtgacgacgacggtcaggcactggggactggaacacggagcagggagcagggagcaggcactactgtgcaggaccgtgacttagccacgcaaagtatcgaacacccggcaggcgtcaatggcgctgcgcacgactcgacgatctgctcagacattttatcggatacctcgcaagcagcggaatggagtaggggagtagccagggaaggggcggtgactttgcgagctccttgcgctatggagcagcgatggagggctcggtcgagcaccatagggaggggcgagctcaaccaggtaggggaagaacgcgacaggaagggaggtttagaactcaagccgagcagaaaatgggcaagctcggcatgggaatcaggggcgcgtgtccaaggagctggagtcgatgttggcagtgagaagacaaccggccatcagcagtga

SEQ ID NO: 21820 - DNA, 693 bp, Zea mays
  Peptide Sequence Number=SeqID_63599
atggcggctcggctctccggcgtggtcggccccggcctcgcccgccctcggcgccccctccctctctcgcgcccgcccgcggcctcggcgcgcccaaccccgcccccatctcgcgcggcggcccgaccccggtccggcacggcgcgtccccggcgacccgcccagccccggcgcgttccccctcccgacgtgggcgcggcccagccatggcacgcccgtgcagcccgacccccagcgtggcgcggctttgcgcgcggctccggtgcagtggcgtggtgcacccgccttgctcgccatggcggcgtggcccgcccgcctgcggcttggcgcgtccttgcccccgccttgctcgccgtggcggcgtggctcgcctgcccgcggctcggcgcggccttgcgcccgccctgcccgccgtggcggcgtggctcgcccgcccgcgacctcggcgcggctcggccatggcggtcggagctcgaccgtgacgtccggcgcgtccccggcgtcctgcgcaggcccgccctggctgctggcgcgcggccatggccccgccgcggctttggtgcggtgacaatgagactgatggttcttggttttgactctggcaatggttgtcagcattgtaaccactgctcaggagaagatgaagccgtggaaggagacttccaggagttccaagactacgacgagttctag

SEQ ID NO: 21821 - DNA, 663 bp, Zea mays
  Peptide Sequence Number=SeqID_63600
gatccattttccttttcatttgcatgtaagaagggagtggctgggaattctccgaaggctgacgagctggttttggccttgacaaatcatgacctattcctgtactttgggcatggaagtggaacccagtatatttctagtaaggaagtcgaaaagatagataactgtgcagctgctcttcttatgggatgtagcagtggaacacttcattgcaaaggaagttatgctcctcgaggggccccattatcatatttatttgctggttcccctgctatcattgcgaatctctgggatgtttcagacaaggacattgacaggtttagtaaggctttgctcaattcatggttgcatgacaaatctctagatggcaacaattgttcaaaatgttgccagctaacaatggagcttgagtccatgagtattgcttccaaggaaaatggtaaagcaagacgacaaggcacacgaggaaagaagcaacaacatataaatgatagtaccaagtgctgcagctgcaagcagaggcgaatagcttcatatataagtgaagctaggagggcttgcaggcttccacttttgataggcgcatctcctgtgtgttacggcgtgcctacaatcattaggaagaaagtaatgacggattctaccacgagagagatgacctaa

SEQ ID NO: 21822 - DNA, 3351 bp, Zea mays
  Peptide Sequence Number=SeqID_63601
atgcagataaggatcatagatgttctgcttcataaaatttactgtacgaaagaacattttttggagagatcaagggttcttattagaaaggcaggtgcacttcgtgcatctggagtggaaaacataaaaaactgccttgagtctctacgtgatgccatatctttactgttggccattgcgtactgtttgtatgcgcagtgtgctcaggaagacaaacttggtggggaggtaatatttgatagcgctgagaaagcacttaacttgtggttggacatggaggcttttgaccattcttcttctgatatggtcttgcaacagccatcaaaaactattgtaccacttatttgtttcctggttgatttgttgtctatgaagggctgttttgagcttcagtttaagttgtgcaaggttatgataatgatatggaagcaagaaaaattacccattgagaagttgttgtccttgctgttcaccagtgggcgccttagtcatgcatgctgttatctcccactggatgagcgatttctttctattgccaaagagcatcttggtagaacgctgcctagtgccttatttattcctcaatcatgtaagcatccctttggaaggcagttcagtttcgtcacgagtgttgatgaagtcagcaaagttgcctcatctctggtatctggagatacttcaaatgagcaatctacctttctagctggatgtttatactatgacttgtcagaaaaagttttttcacgcggacaacttttccaggccttttcatatggaaacaaagccctccatttgcgcaaaaagctcctaaaaaagaagttcaaaatcaattcgggcatatctggaaatatggaaagacaacactgtgggcaggacatctctcttgaagtgtgtggccctacaatagttgagatttggccaaattccagcagttcagtcaacactaaagattttttccttaccccatggaatgtccttaggtgctatcttgagagcactttacaggttgctatgatgcacgaattgattggcaatggtgctgaagctgaagttctcttacagacaggaaaagagatatcaaatttccatggtttatcagttttctgtattgtatttacatcatttctaggtcaactatattgtaagcggcagctatgggatgaagcggagagtgagcttaattatgcccgagatcttgtgaaaaatgatgcaacaatttcatttcgaaggaaaaactcagggaatgctgaagctggtccacctttagatgcaaaagcaaggaggtcatcaagaaattcatcacgtttagctaagggacagaatgtagagactcttgcaaagactagaactcgctctagtaaacgaaatgcatgtatgaaaagtgagaaggttttaactgagctaaatagtaaaaataacgtaactgggagtaaggaattggctgcagatgcttctgtttgtggtgaagcagagtgttttcctgatggcattgatcacagcaaagacgacctatgcaatatgtttggttgctggagctgccttttcattaaatccctcaattcggggtgcattcagaatattttgcagctgagattggactatgttcaccgacactaccttgtgtcacttcttttaaaaaaagctagagccttgggatctcatagcaatggggactgtgaagttcatagtgtctattggaagtgcatatcactgctgttcttcaggtcccttccacaagattgctgtaggacttatgggccttatttaattggactaatcatggataggagcattggtgattttcttcctttagagtgtgcagaaatactattcaatatgagcttcttcttgctaaaaagccccctttctgaacagtcaagggacatctgctgtatcttctctagtgtaacaatggcagacgttgtcccctggttgctcaaagcttttgttctatccagagagagcccctcacttgttcaggaggtttgcaagttacttgcatgcatattcttgctatcaactacagattcctcaattcaactgcctttgggttctcataaagaatctctttctttgaatcactgggccacatacttccatcaagtttctgtgggaactaatctcaattgtcattactttgctagcttacaagcatcgtccgaggaaaaggttccaaaggacacctataaagatttcagaaatgagacagatgacaatgtctcgaaatttctcaggttgtcatcaagggacatcaaatatattgagaaacatatgacagaattcttccaaaaacttcctgatgtaccagttctgtgcattagtatgcttggaggtgattatgttaatgcccttctgaaattccattgccatcctccgttttttcctgcttggatgttgctttcaaggtttgattcaacaaatgaacccacaacattgcttcttccagtggattctatttcagaaatgcaatttgaagattcctgcaccaaagatttgggcaatccaacgagagttttagataagtggcaatgcccttggggctatggaattactgactatgtagccccagtttttagaaatatactcgaggagaattttatgtccctctccagcgcaacccttactattgatgatgtaaatgcagatcgtgtcaggtggtggtcccatagaatgaagctcaacaattaccttgctaacacattgaaagacattgaagattcttggtttggaccctggaaatgccttctgttgggccatcaattatctgatgaacacattgagactgcctcatcaatgattatcactggtctggatacagaattcgaatttgaagtcaatccaatgctcatcaaggctatccttggtggtgctgtgtcagtggatgaagtacaagaatgttttctccaactcattttgtataaaggttactttggaaggggaggatgctgtgggaaagatagacttaaagctttctcttcctgccaaatggatgatggatctatggagacactcaaacgtataataacggatgcatcatatgagttgcctcagccagctgatagagatccagttattttagttcttgatgtcaatgttcagatgcttccttgggagaacctgcctgtactaaggaatcaagaaatttatcgcatgccgtcaatgggtagcatctttttagcattatctcgaaccaataatgattacaaagatcacagttctccttttcctgtcatcgatcctttcaatacatattatctgttgaatcctagcggtgatctgagtagcacacaagaagaatttgttcagttattcagaaactatgagtggaagactataaattgccaaatttag

SEQ ID NO: 21823 - DNA, 579 bp, Zea mays
  Peptide Sequence Number=SeqID_63602
atggcgagcgtggcagaatccgggaaggagcggttcggcttgcggtcgctcttgcgcaagggcgcggcgcgctcgcgacgggagctagggttagggttcggggagcggccgcgggacttggagcgggaggtgcgtttcttggagcatggggtggaggcacgcggcagcagcagaggcggagccgacttcgtccatggcgtgcggggaaggccgcttggagggcatcggcggtgtgggggcgagggctcagcaggcgggcgattcaaatttcgatgtgtatcgagaaatcggggagcagatggggagccgaggcagaaggggaaggcgagtccagtgggcagcggcgcaggctgcagcactccagagctgatattggcgcgcactgccctataccaagttccttcattgggtcttcgttgggcccttcgctggatcttcatctggccggttgccgacgaacaacaccaccaggagtacaacctgaaaccaattggtgatgctggtcctgtaactgaggcgggagggatctttgcctatgcccggaagacaggaatgattgcgttgaaagctgttgcatga

SEQ ID NO: 21824 - DNA, 342 bp, Zea mays
  Peptide Sequence Number=SeqID_63603
atggcatgcagaggagcagcgtggctggggcagggtgcactcgtgaggagaccggcacggctgggcaagcagaggatagggactggcttcatcgggcaatggtggctcgccggacagatcacacggcctggccggctacgggccgccgcgctggggaactcatcggggcgcagggacaggggcggctcggccgcgcccaggctgcaggggagcttgccgaggcacgggaggagtaacggctacagcgccaacggtcgtctgcaaaaggtgaaccgtgagctacagtgcgcggactgcgcgcacagaagtcagagcaggcgcagatggcgcaccagacagtga

SEQ ID NO: 21825 - DNA, 1404 bp, Zea mays
  Peptide Sequence Number=SeqID_63604
atggcggcgatgtgcaggatcttgcgctgcctctcgggatgtccttcgcggcggtgcttgcccagtgtaaaggttgtaaatagatgcgctggttctgaagggggattacgacctgatgtcctctcaaagatgtgtacctcggcagtgaaggagtccttaacaaatatttatggtgacagatttcatagcttcatgagtaactttgagaaagcttttggtagtacattgagaaccattcaccttatcaatgaaacgcctgtttttgagcaagatgtggagcaatgttcttacaaagatgatgattctgtacctcaaatcaagttgggtggtgctgattcattacctgaaataaaggttggtggtgctgattcacaaagtcagatacatgatgtccagactgacatgccctcgagttcaatgaatagccagattgttcttcatacaggcatcaatgatcagttggttcatcttacttgtagcaggtctaatccagaaattggtcagcacatccttagtgtatttgagagatcgctgaatgagcaagctcgttcaaatgagctcaaagagcttgaaataggacttactatgagaaaattgcaattgagtcgatctcagttagctctgagctctgaatcacaaatgttagagaagatcaaagttcatatgggatttcagaaagcctcattcaaagagaagaaattcaagactgaaatggaggatacaaagcatgcagaacttttcaggaaacttatagatatgctccttactgcagtggtactcatgtctgtctgttttggatatggaacatatatttattcgtaccagcggataactgctgctacttcagcttgtgcagcaatttcaagggagtatacatcttggtggatgccaagttcagtgtcagcaatcaactccggtttgctgcttttcaaatgccatgtgatagccgcaacaaggatattctttggaattttgatgctcctactaatcggttggttgatattccagcgttctgcaatgactggaccaaacatgccagtaacattcaatgttatgatattgggagttctttgtggttattttggaagctgctgtgttgacacactgggcggggatggaaatgtatggcttatatactgggaggccctttgctccatccatttacttggaaatatttggccatctcttttacatcacatgctgtatggtcctatttctgtgactcacaggaccaaggctggtcatttgccatattgggcccgccgatacacattttacattttggtgtcacttattctgccatgcttggctggtttgctgccatttgcatctctgtcagactggaaagagcttgctgttcaatatttgaagtccagattcagtggaattaatattgaggattga

SEQ ID NO: 21826 - DNA, 423 bp, Zea mays
  Peptide Sequence Number=SeqID_63605
atggggcttgttgcctggtggcaagagaggttgcccaaaagcctcacgctgaaggcagaccacgatgaatgctcaatatcctccatcgtcttcaccggcccggtgccgcctctccatagtcagcatgggctcgccaccagcaaggccaaagcaacttggaggtatattcattctacatctgggaaaattctcataggccttggcctcatatggttgtggcaggattccaaggtgttagctagtgagagaatgaagaaggatctatcttgcattgtgatagacacacggcattttgatgcgatcacgtcaacctcggtgggggatggcaaatccactaagttctgggtaaatgtctggttgaggggcatgaggccaagtttcactacgccatccagaggcaacaagctgagctcccctatgtaa

SEQ ID NO: 21827 - DNA, 675 bp, Zea mays
  Peptide Sequence Number=SeqID_63606
atgaagggccttctcaagggcctccgatacatctcgcaaatttttggagatgcgaaggagccggagatgcagatcgggaagccgaccgacgtgaagcacgtggcgcacatcggctgggacaacgcctccgtcaccgcgcccagctgggtagccgcttccgttccagttccacccccgaccacgccgttcccgtgctccgcgccgcgtccgaatgtccgaactccaactaacagctgcggttgggcgtgtcatgtgctgcagatggacgaattcaaggcttcgccggggacggcgagaggcagcgatcctgagccctcgcagcccggtggatcggaaggatgcggagaggagcatgccggaggaggagaagacggcggcggcaaggcggagcggccgcggagggcgagggggaacaaggggtcgggcggcaacgagccggcgaagcggcgggactgcgcggccgaggggttgcggcgcgaccggcgggtcgcgaaggcggcggacgcggcagagggcgccgagggccagggggacgccgcggcggcggcgccgaagcagcggcggaggaagccccgggcggcgtccgggggcaggtccaagtcatcgtcgggaggcgccgccgcctcggactcggcgggggcgccgccggacgaggacgatcgctgcggctgttga

SEQ ID NO: 21828 - DNA, 135 bp, Zea mays
  Peptide Sequence Number=SeqID_63607
atggcagaagtcagagcagcaggtcagaggggcaccggaatgtccggtgtgacaccggactgtccggtgccacatgaggacaaagcctccaatggtcgaccagctccaagccctaacgacaagggtcttaagtga

SEQ ID NO: 21829 - DNA, 186 bp, Zea mays
  Peptide Sequence Number=SeqID_63608
atgacgaagacgacgccgccggcgttcgtgtaccggatcagcacggccgacgagtgggcggagtttcagcgcacgggcgccacccttggaggcgacctcgacagctccaccggctgcatccatctcagcgacctaaaccaggtggtggcccaacgcctaggcgccttgcccgcctacctcgcctag

SEQ ID NO: 21830 - DNA, 417 bp, Zea mays
  Peptide Sequence Number=SeqID_63609
cttgattcgttggacgccgtcgtctggctcgacgcctgcacgctccgatactccgcgcgcgccttcttcggcgaggtcgaccgggaccaccgcgccgtcgcggcgctccgggacgcgaggccggccgagctcggccgcgaggtcgtcgccggcctgctgacgcggctcactaggacggcgtacctctcgccgctgctgttcgccgccggggaggaggacgctgcagtcggccagcagcagaggctgcgcgccatggtgcagtgcaccaaggacctctccggcggggactgcaaggcctgcctggaggctgccattgcgcagctgctggccaggggacgggcgccggagggcgccagggtgctgggcggaagctgcagcctcagatacgagctgtccccgttcatttctgactcctaa

SEQ ID NO: 21831 - DNA, 585 bp, Zea mays
  Peptide Sequence Number=SeqID_63610
atggcgcctcctgtcgacgtggtcggtccgtgccctaggttgggcgaggtggaggctcctccgaggtcgaggtcgagtctgtcttccaaggtcgaggtcgagtccgagcccccgggtcggacaaggcggagaccgtcggctaaggccagggctgagtccgagccctggggtcgggcgaagcggagttcgtcgtcctttggggctgagcttgagtccgagccctggggtcgggcgaagcggagttcgtcgtcttccagggctgagcccgagtccgagcccaggggtcgggcggagcggagttcgtcgtcttccggggctgagcccgagtccgagccctggggtcgggcagagcggagttcgtcatcttccggggctgagcccgagtccgagccctggggtcaggcggagcggagtttcccatggcgcctagggccggacttggctgctgtcagcctcactctgtcgagtggctcagcagtcggagcggcgcaagcggcgctgtcctcttgtcagaccggtcagtggagcggcgaagtcactgcggtcacttcggctctgtcgactggagggcgtgcgtcaggataa

SEQ ID NO: 21832 - DNA, 492 bp, Zea mays
  Peptide Sequence Number=SeqID_63611
atggatcaggcgacaagatcgctcgttcgctgcgacgctacccagttgtcgatcaagcggacgaagacagacgccggcgtcgttgcggtggcgttctttaccaacatcatccatcgctttggggtcccgaactccatcatcaccgacaacggcacccagttcaccggcagaaagttcctggacttctgcgaggatcaccacatccgggtggactgggccgccgtggcccaccccatgacaaatgggcaggtagaacgtgccaacgacatgattctgcaaggactcaagcctcggatctacaacgacctcaacaagttcggcaagcggtggatgaaggagctcccctcggtggtctggagtctgaggacaacaccgagccgagccacgggcttcacaccgttcttcctagtctatggggccgaggccatcttgcccacagacttagaatacggttccccgaggacgagtgtaacacccctggtgttactgtaa

SEQ ID NO: 21833 - DNA, 351 bp, Zea mays
  Peptide Sequence Number=SeqID_63612
atggttcctcaagccgcattcctcctggcactcgttgccgccgccgccgccgccgcctccacctggccgtcgacggaggcggcgggctcctggaccacgacgaacgcgcccgccgcgtcgtgctccggctgcggggaccttcgcggcagacagcgcgtcaacatgtttggtgttctgtgtcgtgggcggctttggaaatgcaggaatgttgtggtattccgcggggaaagatcgccgcttgcaacaaccatgctactgtgccgctctaaagctgaattatggagacacaggctacgacatgaggactaccagatcgtggttgcctggtatcgtgctttgtatgtaacatag

SEQ ID NO: 21834 - DNA, 1031 bp, Zea mays
  Peptide Sequence Number=SeqID_63613
atgggcgagacgatctcgttcgcccctcggaaagccatcaagtcccaggtcttggccgactttgtggctgaaagggtcgacacccagctcccaacagctctgatccaaccggaactctggaccatgtttttcgacgggtcgctgatgaagacgggggtcggcgcgggcctgctcttcatctcgcccctcgagaagcacctacgctacgtgctacgcctccacttcccggcgtccaacaacgcggctgagtacgaggctctggtaaacgggttgcgaatcgccatcgagctaggggtccgacgcctcgacgctcgcggtgactcgcagctcatcatcgaccaagtcatgaacaactcccactgccgcgacccgaagatggaagcttactgcgacgaggttcggcgcctggaagacaagttctacgggctcgagctcaaccacatcgcccgacgctacaacgagactacagacgagctggctaaaatagcctcggggcgaacaacggttcccccagacgtattctcccgagacctgcatcaaccctccgtcaagaccgacgacacgcccgagcccgagaaggcctcggcccagcctgaggtaccctcggctcagtccgaggtaccctcggcacagtccgaggtaccctcggctcggcccgaggcaccctcagctcaacccgaggcaccctcggctcaacccgaggcaccctcggctcggcccgaggtaccctcggcccccgaggcacctcgagcccttgttggaaacaccttccgacaaggtttctactggccgacggcggtggctgacgccactagaatattccgcacctgcgaagggtgtcagttctacgcaaggcagacccacctgcctgctcaggccctgcagaccatacccatcacctggctgtttgctgtgtggggtctggacctagtcggccccttgcagaaggcacccgggggctacacgcacctgttggtcaccatcgacaaattctccaagtggatcgaggtccgacccctaaacagcatcag

SEQ ID NO: 21835 - DNA, 450 bp, Zea mays
  Peptide Sequence Number=SeqID_63614
atgtggctgtcccttttcgttctacccggcccaccgttcgacgtcgtccgccgggagatcattccgctcgcggcccgtctggcgcgcggcgagagcgtggcgctcgcccccgccgcgctcgccaccatctaccacgatctctccgcgctcaaacgccacataacctcgggcgacaaaaacggacccttcgtcatctcggcaccgatccacatcctccagctctgggtctgggagcatttcacccagctccgccctgaaacagtgggctcgtctactcctgatgatcatgacatgccaagggctgcccgatggcgtgaagctggaaaaaggctgagctccaaggacttgcacgcagtgctcatgtcaccgaaggggtttgagtggaggccctataaaaatagcaggttttttggtctgcacccagggtgcagtgagtactgtaaagagtga

SEQ ID NO: 21836 - DNA, 900 bp, Zea mays
  Peptide Sequence Number=SeqID_63615
atggcgcccagcttcgcccgctccatctccttcccactcagcccgtccaggtcatcaacgtcgtcgtcgggcaccaagccccgcgcgggggcggcggcggcgggctccaccgccgcggcgtaccacgcgcgctccgtcagcctgccgtgccgctcgcacccgatcctcgcgcacctccacgcgcacatcggcgccgtgcgcgcctgggcacaagacccgccggccacctccgcccccggcgccgccgcgggcctggcgcgcgtggacgcgctccacggcgcgctcgccgacctgctcggcctccccgaggcgcgggccgcgctgtcgctctccgccaccggcgaccgcctcctggacgccttcctccgcctggccgacgcgcacggcagcttccaggaggccgtggtggagctgaagcgggacgtggccgaggcgctggccgccgcgcgccgccgcgacggcgcgcgcctcgcgtccgcgctcaggtcgcagcggaaggccgccaaggacctcgcccggctcgccgcctgcgcggcatccggcggcggcaggccctcgcgcctcggcctcagcctcggcctcggcggcgcggcggaggtcgaggtggccgggctgctggccgaggccgccgctgccacggccgccgcgtcggccgcgctgttcggcgccgtcgccgccatgtccgcgtcggcctccgcgtgctcctgcaagaggactgcggcgctcgtgtgcctcaccaagaaggtgccggaggaggagaaggagacggcggcgctcgtggagaggctggaggagctggaggagtgcatcgacggcctggaggccggcagcgacaaagtgttcaggagcctcgtgcagaccagggttgcgctgctcaacatacacacccacatcgtctag

SEQ ID NO: 21837 - DNA, 255 bp, Zea mays
  Peptide Sequence Number=SeqID_63616
atgagcaaagcaggcgacggcccctgctcggccccggtcccgacggccacggtcgcggcggccgcggtgcagaagcagaagtcgctactgcagaaggcagacgccgacgtctccagcctcgtcgacaatttctcctccctcatcaacatcgcccgagtcaacgatccgccagtgtgcaactcgcaggaggccttccagatggagatgcgcgccacccgcatggtatggacctactcgctgcccaccgatcgttag

SEQ ID NO: 21838 - DNA, 279 bp, Zea mays
  Peptide Sequence Number=SeqID_63617
atggtgcctgtatggttggagattctgaattctgaccactggcctggaagttcacgacgaaagctatctagaaaaaggcttcaggcgaggctcgtgaaaaaggagaggcgaggatggctcctggttgccattcatcttcgtgctgttagtgccgtgaggctggggacggtggatgttcctgaactaggggtggtaatggatcgtgatccaaatgaatttcttgagaggatcaaggccgagtgtaatctattgcctatagctggaacactgctcctctga

SEQ ID NO: 21839 - DNA, 642 bp, Zea mays
  Peptide Sequence Number=SeqID_63618
atggcagaggagagggagggcgggggctatgccgccgcggaaggcgctattggtgaaggggagcccgagggaacgagttacgccgtcggtggggaagatgttagttgcagccgcgtcgcaggagatgaggaagagggtcgtaccgctgctacaggcggtggctacgcggtggccatgggccgtgctgccgtggaaggcatccgcgccgctggagctaggggtgaaggcctcatcggtggggggaggagggcagtgtccgcaccgctagtggggagaggcgggacaccggcgtccgggtcgtcggaggtgtggctgcgcccgcgtggctggagacggcaccgggaggggtcctgccatggcgtcgtcgggaagggaggtggccgcgtcgatggccgtcacaggaatatgcaatttgcagttgttgagaatccaggattctggaactggacctttaacctggtggatgaagatgataaaatgttggctcagattgatcgtaattggaggggcctcggctttgagatgaaagctcctcaagctgagagcttcgagtcctccaccaatcttcaaaggagtctcccagctgcggcacagcagattggagccccactgagcacagaagctgaaactataattgcctag

SEQ ID NO: 21840 - DNA, 234 bp, Zea mays
  Peptide Sequence Number=SeqID_63619
atggtctcgtttggtcaccgcaaccgcaacacctgtctgggagactgggacgacacgtggggccgagttgacgtgggtccaacagatcccgccgttggatcggatctggggcgtgtggtggctggcctgagcccctgggcgcaggacccacccaataagggccaagaccaaggattcggtgtgggggctgtcttatatttggtaattctatcagagcctctactgtatgtgtga

SEQ ID NO: 21841 - DNA, 411 bp, Zea mays
  Peptide Sequence Number=SeqID_63620
atgggcggcgggggcccgtcgccgtacgacccgtcgtcggttgccaccgcgtcgtcccgggacgaggcttccgtgtccctcagcaacgcgagcgacctggaggccacggagtgggtcgaggaggacgagccaggcgtgtgcctcaccatccgcgagctcggcgacggcacccgcgagctccgccgcatccggttcagccgggagaggttcggcgaggagagggcgaaggtttacgtgagtagtatagaacagatgttgtgcatgaaaaatatcataatgctggcaaactggggtggagtttgtagtgcaggaatggtcagacacttagactctaaccaaccacacaagacaggaaatcaaaggaggcagcaagacccccgatccatcacgattgatctactggtccaataa

SEQ ID NO: 21842 - DNA, 399 bp, Zea mays
  Peptide Sequence Number=SeqID_63621
atgaccgtcaaaatgggaaccttggtgatcatgcccccaggtagctttcaccgttggatggtgcagggtgaaggggcaaggagtgaaggaccttcaaggctctcggttcacgagcggttgggtggcactaggacgagttcccagtggttgagcgacgctttggagaccctgccaaatgaggatttcgtggaagatcatgcttctgttatcaaggagtccaagcggctgtttacggggccttggaggatcacgggtggatcatccaaggagcccttacggccagagtcattttgggagtttatggagttgtacgaggtgcttgaaaatgttgttctcaagcccaagactcctgatgttcacagctgggagactttcctccaatggttagttctccactaa

SEQ ID NO: 21843 - DNA, 327 bp, Zea mays
  Peptide Sequence Number=SeqID_63622
atgcagacgggtaagatcgtaggagcagatcatggacagtggcaaggttttctcaatgaaacaaagggaagctgttctcacccggcgacgtgtggggcagctagcgccctgcgccccgtaggcattggccacagccctgcacccccacatgtgcccaacgacgttgtccttctcgaggactgtgcaaatgtaggagtattgactattgaccgccttgacttctcgtgcacctctttactcttcacggtccgatatcaatccacggactggcacgctgcctcctacaaaccagaaccctaccgcgccgccgaacacactgggcagtag

SEQ ID NO: 21844 - DNA, 306 bp, Zea mays
  Peptide Sequence Number=SeqID_63623
atggataaaacaatgaagccgatttccgcgacttgtaacaacgacgatggagtgccagaagaaacagggatggacgaagtattttctgatctacaagcgctcaagaggctatacgggttgcttcaaaggttagatgaggcctcgagggcccttctgaagaagttgctcgacgatgctacccgccgggctctcctgaagcagaccaatgtaatttgtataaactgcatcaccttcccagcaaactctcgtagagttccttacctacccatacagcgtttcgcaggctctcactgctacctcttctag

SEQ ID NO: 21845 - DNA, 1161 bp, Zea mays
  Peptide Sequence Number=SeqID_63624
atggagcaaattttgactgatctgcaggcgctcacgaggctatacggcctgcttcacagtccagcagacgaaaatttagatgaggcatccagggctcttctgatgaagatactagaagatgctacccaggaggctgtccggaggcaggcgaagatgctaatgccatcaggttctctaatgtcccctgtgctagagagagagctctccacacaatcacactgccggacacgccatgccgatccaatcctgaggccactggcctcgccccgccccagcctcctggccagtgagcgatcgcgccggctagacccgcaacattctacagtgtcacgccgatccggcctctacgccgacggccagcgccatgcagcggaagagcctcctccccttgctcgcctcgcctccaaccgctcgtcgagaaccgcattgacggcgcggcaccgtccaagccaagagcagcggtgccccagcctcagcctgcaccgtttccccgtagctggaacgtcgagacatggcacggtgatcggaagtactcggcttgcccgtcgccgggacagcatccgtcacagctccggtcgtggtgaccagtggtcgctggaacgcagcaatagcaatagcagcagcagccgccgttccgtgtcacggcgagagctgtcgtctctgcggccgtcgtcaaggctgcgtggccgcgccaccccgcggcacgtgggaacggaaaactcctcctcggtgtctcccttcgagaggctggactctgggttgtccctgagcttgacgtcgcgtcatggcgtggagcatgccggacgcggcgtggctacgccggaacgctcttcctcgagcaagacggtggcgaccattcaaagccgcatccgaccaagcagtactcctctcagggagcgctccctacaccgacctgcagtagaagcgaagactctgcgcgggaggcaacaagacagccacgttttaagcgaggaggacacgtacagcagcatgttcagcggcagcgggaagctcatcggacgccgccagcctgtccgcctccacgagcccgacggcgtcgccggcgccggcgccggcgccgcgtgcttctgctactccctactactactacccgtcggtggcgacacgtggcattgcgccaccaccgttgtacgcacctga

SEQ ID NO: 21846 - DNA, 275 bp, Zea mays
  Peptide Sequence Number=SeqID_63625
atggcgctgcatgcacgcagcgcagctggatcattacggcttgctgcttgcgttgcatgcatgctgcacggtctggtccctggcaatggcaaccgcaccggccccgcccccggttggcatcgcccgcacggccgcgcgacacgatccaagtcgccgtggaacccgacgcccgtgcccgccggcactgacgcgcttgatctgccaattggacttggaatggaacggtctgcagcccggcgcgcgctcgtgtgtgcagcgttctggggctgcccgct

SEQ ID NO: 21847 - DNA, 327 bp, Zea mays
  Peptide Sequence Number=SeqID_63626
atgcagatagctgctgcgtattctcgaacttggagaggtcatcttcagaatctacttggatatgctttatcagtctattgtgtttataagatgctcaagagtgtagtctttaaggagtcaggctctgttgatcctgtaacaatgtcaataacgattttcctgagacattttgacattggcattgatgttgcactgttatctcagtacatatctttgatgttcatcgggatgttggttgtcatatctgttcgaggtttcctggcaaatgttatgaagatgcacctctacgatcgggatgaagagaactggaaggcggctcagctgtga

SEQ ID NO: 21848 - DNA, 591 bp, Zea mays
  Peptide Sequence Number=SeqID_63627
atggccgcatacttttcagagaatccctgctacacaatagcgcaaccaataatgccactgtttcagtacagtaaacatggtttgcgtcgcgtgaccgatcgacaagagtttgtccatgctgtcgtgctcattgctgctgtgtggcgtctgaaatccaggtactctgcatacggggtgaaatctctgtcggacgagcacagcacgctcttgtcgggcggcatggatccgtcgatgatggacaactcgtggcgcctgctgccatcccaaaccaacacattccaagccacaagctaccctgtgttcggcacgctgagtgggctagacgagagcaccatcgcgtcgctgccgaagacccagagggagcccctctctttcttcggcagcgacttcgtaaccgccgccaagcaggagaaccagacgctgcgccctttcttcgacgagtggcccaagtcgagggactcgtggccggagctgggcgaggacagcagcctcggcttctcggccacccagctctccatctccattcccatggcgacctccgacttctccaacaccagctccagatcgccgggtggaataccgtcgaggtaa

SEQ ID NO: 21849 - DNA, 1128 bp, Zea mays
  Peptide Sequence Number=SeqID_63628
atggttgaacttccaatagctgttgctgatctgggcccagcattgttgtttcttgggagtgcattagggaatattatctcgttatcttgggcggcaccgggcccggacccggcagaggcaggcagaggcgagaagcaagaagaaaaacgaggggagcaaggaaatcgaggcaagaaagcaagggcagaggcgcagagcctgcaatctgctgtcccccgtcgccgccgctgcctcgccgttgcaatcgaggcaagaaagttagggagtgctggcgttgggcaagtcgctctgggcctctggggagacgggggctggaggggcggcgagatgatggaggccggcggcgcgggagcggggggaagggacgagagggtgccgcagtggggcgtgcaggagacacgggagctgatcgtggcgcgcagggagatggagcgggaggccgtcgcggcgcgccgcagcgccaagacgatgtgggaggccgtcgcggcgcggctccgggagcgaggctaccgacgaaccgccgagcagtgcaagtgcaagtggaagaacctcgggaaagaaacttctgatccagaaaatggtaggcagtgtcccttctttgatgagctgcatgccgtcttcacagaccgtgcaagagatatgcaacgacaactccttgagtctgaatctggggcttctgtcaaaaggaaactgaagcaacctggtggtgaccggtcatctgggctgtctgatgacgagggcaatggtggtgaagaaagtgatgaggagaaaccgttgcccagcaggaagaggaaagctgacgacaagaaacagcaacatcaaagaatgtctgggaaatcaagagcaggattttcaagcatacatgaactgctgcaggatttccttgtgcaacaacagcacattgatgtctggtggcgggagatgatggagagacgcgcccaggagcggattgtttttgaacagcaatggcggcagacaatgcagaagctggagcaggagaggttgctgttggaacactcgtggatggaacgggaggagcaaagaaggatgagagaagaaacacgggcagagaaaagggatgcactcctgactgctctgttgaacaaactcctacaggaagatctatag

SEQ ID NO: 21850 - DNA, 366 bp, Zea mays
  Peptide Sequence Number=SeqID_63629
atgggctatggcgccaaggtacctggtgagttggcaactagatacgagctggcaaatgatgtggcctatctcggcgccacgatctgtaacgccgagttaggagatgacgtcgaccgtgtgatggccgttgggccctacagttctgacaattggtatcagagccggttcttcttcatcgttgccaggtctcagacgcctgccaagatcaagccgactgacaacgtcgacgagtcgaagcccgagccatcacgctcgccgcgccgtcaccgtggtcgttccggtagtcgccaccgctctggatcacggatcgtggagcacgtcatcgagcgttcatccgccaacatcgcgtggccgatgctcacatga

SEQ ID NO: 21851 - DNA, 273 bp, Zea mays
  Peptide Sequence Number=SeqID_63630
atggccgccggcggagagccctcccccctgtcccctgccaaatactctcgcttgcccgacgacgcccagcccgacgcatccccgaagcgccgcaagcgccaccaccgccaccaccaccaccaccaccaccgtcgacaccgtcacgccgattccccgatacccgaggcggccgacgaagaggtagaggagggggagatactcgacgatgcttcctccgtctctgctatggaggtcaatgccgagtccgccgccccacagtcttcccttgctccg

SEQ ID NO: 21852 - DNA, 417 bp, Zea mays
  Peptide Sequence Number=SeqID_63631
atgggcaagagcaagaagggcggtagttcttcgcatcactccggtgataagcggaagcgtgagccgactcctccctcggaggacttcggcgactcggagtactcggaggaggagttctcctccgagtccgagggctcaccggtgtggacctacatccgggccgtcgagcgcgccgggctcgagggctcggatgagtcagagtactcctcggacgaggagaacttcttggactcgtccgaggagggcggcagtggcgatggcggtgatggcgatgacgacagaggcgatggtgacggcggcggtgacggcggtgaaggcgacggcaagggcggtgacggcggcggcaagggtggcaacggcgacggcggcgatggcagcaagggcagcagtagggacagcaacaaggccagtggctag

SEQ ID NO: 21853 - DNA, 153 bp, Zea mays
  Peptide Sequence Number=SeqID_63632
atggcgcttgatggcactgccatgcatgctgatgactatgacaaaaggagcagaaactttgggaagcaattggcaataaagcaacaaaaggcaaagaactctcagataaacatttcagttggttggtgggatgctattgacagccttaactga

SEQ ID NO: 21854 - DNA, 2568 bp, Zea mays
  Peptide Sequence Number=SeqID_63633
gagcactttggtaatggtgctgatattaacacagatgcaaccaagatgcaagctcctgctccgcctacccttccatcctcaaaagatagaaggaggtcacttcacggtgcccctgagtctgaaagcggaggtatcctatcaagtgatgctgaggataacaaagggcatggacggaggcaaagtcaaagttgttcaaaatctccaaagcccagaagggagaaggaaaggaggcacaaagatgggcatcactcttcatcttcaaaagatcattatcccaaaaatcgctctagagcatctccatactcaaggcatcagagtgaagctcattcaagagatcacttgagatctggagaaagaggtgatgatactaatggttctgatcgtgagagcaatgatcagaatgggaagtctggcagacatacgactgggacccaggagaatgaaagagaaaggagcagcagccatggtattcatgatagacatggtgataggcataatgacagacatggcagccaggaaaggtacagagacgataggacatatagagacaaaattgattcgctagaagctacttggaagcacagagaaagaagcaggagtcatagtagatcggatctaagggaaagtacacgtcttcgtgatcaaagccgggagagtgaaagacggattggtagttcaatgcatagggatcatggcagcaagagggatacaagtaaacatagagaatctgacagggttaacagtgcatatgaaagggagagagggagagatgctggggacagggaatggcacagggtcaagggaagcgaaactcatagagctaaggaaggacgggacaaagttagcgatagtgataggtacagggattcaacacgctcgaaatatagtgtgtctgatggctacaaagagagaacaagatctggggagaaaggtagagatgttgaccgtaaaaaccgaaagtttgaagaaatgaaggaaaattatctcaaggaggaagatgaagagaagtaccaagagaaaatagaacagcagttagcaatgcaggaggaagaggaccctgaaaaaatcaaagaggaagcaaggaggaggaaagaagctatcatggcgaagtacaggcagcagcaatcacagaagcaggatatggaagctaaaccaagcagcaatgatgaagaagtaagagctatggatggaaatgtaactatgcatcagaaagatgataacggtagcagttccacgggcaatgacaaagctgaaaataagcatgattcttcagaggtatttgatggcaaaaccgacttttctgtgggaaagtctcctgctcaaaatgatacttcaactagcacgggagcattcactgatgagaggacaatagatgtttcaggtcttggagagggttctcccaagggcaagggtgatggtttgcatgttgagagaaatgctcttcatgacaactgggatgatgcagatgggtactacacttaccggttcggagaattgctggatggccattacgaaatcatagcagcacatgggaagggtgtgttctcaaaagtcgtgcgggcaaaagatcttaaagcgagtaaagatgatcctgaagaagttgctatcaaaattattcgcaacaaggagacaatgtacaaggctggtaagcaagaggtttcaatactggaaaaacttgcaagtgtggaccgtgaggacaaacgccactgcgtgcggtttatttctagtttcatgtaccggaaccatctttgcttagtttttgaatctctcaatatgaatcttcgtgaggttttaaagaaatttggtcgtaatattgggcttaaactgactgcggtgagggcatattcaaagcagcttttcatcgccctgaagcacctgaagaactgcaaagttttgcactgtgatattaaacctgacaatatgctggtgaatgaggctaagaatgtgctcaagctatgtgattttgggaatgctatgcttgctggtatgaatgaagttacgccttatcttgttagccgtttctatcgggcacctgagatcattcttgggttagcctatgatcatcctttagacatgtggtcagttggctgctgtctatatgagctttataccggtaaagtcttatttcctggtccatcaaacaatgccatgcttcggcttcatatggaattgaagggtccattccctaagaagatgcttcgaaagggtgcctttactatgcaacactttgatcaagatctcaattttcatgctaccgaggaggatcctgtgacaaaaacggattctgccagggcctctgctgtgtgtacactttatatgcttaagcgccaacatttgaaggtcctgggatggagatcgctggaccctcctctcctcatcatggttgatttagtttctcaatttagcaaccgttactgtttatcaggtgtatttctaattgtttttgcgttttgccctaagaaaattgggtacagggaaaagaaatcccaacttggcctcccctctataagcatgcagaagctgaaaggctctcagcctgttgtccccgtagaatgctctcctttgtga

SEQ ID NO: 21855 - DNA, 369 bp, Zea mays
  Peptide Sequence Number=SeqID_63634
atggaggagttgctgacgctgctgttcaacgcgctgctgctggtgttcgtggtgaagctcttgctggccttgttacacaccaagatcatcgtcatcctcctctacatcctcgtcctcctcttcgccatgctcctctccggcagattccccgattgtcttcgattgattgatctgttggattggattggatctgaaaggagccggaaatggggaaaaatgaggagtaagaagagaaaagggagcgccgccgcgagggaaagggccaaggaaagggaaggctcttcttttgccctcccagcgaaaccaagccccgttctggaagggaggcggagacctttcgttgcacagcacagcacagccaccgtgtaa

SEQ ID NO: 21856 - DNA, 2604 bp, Zea mays
  Peptide Sequence Number=SeqID_63635
atggcgtcgcctgtcctccaccgcctgatcctactctcggtctcgctgtcggtggcaatcgccgctgccgatgccagcgctgtgcccgtcgagtacctctacccgaccctgaatctcacctacatacactccatcgacaccgacggagtcttcctccgctcccccagcgccaacttctccgccgccatctacaacgccgccggagccggccagtcctcagacgactcccagtcccgcttcttcttctccgtcctgcacactgcctcacggaccccagtctggaccgccaccgccaccggctcaaccatgttcaactccatcgtcctgtccgtcgcccccaccgggctcgctctctacgacccttccgccgccaagcccgacgacccggcctggtccacgccgcgcctccgcgaacccgtcgtagcgctgcgcctcctcgacaccggcgagctcgcgctcatcgatagccgaaacaccacgctctggtcctccttcgaccgccccaccgacacgctgctcccgggacagccgctcctcctcgggagcccgctcacgtcctccgcgtccgaccgcgacctctcccccggagcttaccgccttgtcctcacacccaacgacgcgctccttcagtgggccaccaacgcctccactgccttcctcacctactggtccatgtcctccgaccccgccgccttgcaagactccaaccaagccgtcgccgccatggccgtcaactcctccggcctctacctcttcgccgccaacggcagggacaccgtttacaggctcctcttcccttcgccgccggcgtcaaagtccgagtcgcgcatcctcaagctctacccttccggcagcctgccctctgcacatcggacgccaacggatccacctgcacctgtcccgaggcccttcagcacctactccaacggcggctgcgagccggccgacggctccgcgctgccatccatcgccgacacctgtgccaaacaagaggcaacgacgcgttacaactacgtcagcctcggcgccgggatcggctacctgtcgaccaagttcgcggtagccgatacctccggcgacgagctcccagcgtgccgcgacctctgctccgccaattgctcctgcctcggcttcttctacaagaacacctccgggtcctgcttcctcctgcacaaccggatcggctccgtcttccgcgccggcgccgacgtcgccgtgggcttcatcaagactctcccgttaccgcagcagcagcagcgcggcagtaaaggctcgtcgtcgtccctgagcctgataactatcgtgttcggcatcgtgttccccaccgtggcggccgtgctcatctccttcctgctctacgcgctcaggaggcgccggccgcagcacgtcaagaagagcaccagcagcagctggttcaagctgccggcgatgctgtcgtcgtcctccgccccgtccgacagcgagggcctcgacgaggacgtgctcatcccgggcctgccgacccggttcacgtacgccgacctggacgctgcgacggacggcttcaagtggcagatcggctccggcgggttcggctccgtgttccgcggcgagctccccgaccggagccccgtggcggtgaagcggatgaacgggctgggcacgcagggccggcgcgagttcctgacggagatcgccgtgatcggcaacgtccatcacgtgaacctggtgaagctccgtgggttctgcgccgagggcgcggggcggcagctgctggtgtacgagtatatgaaccggggctccctggaccagacgctcttccgcagcgcgccggcgctggagctggagtgggcggcccggctgcgggtgtgcgtgggcgcggcgcgcgggctggcgtacctccacgctgggtgcgaccgtaagatcctgcactgcgacgtgaaaccagagaacatcctcctggacgaccacggcggcgtgaagatctccgacttcgggctggcgaagctgatgagcccggagcagtcggggctgttcacgacgatgcgcggcacgcgcgggtacctggcgccggagtggctcatgaacgcgcccatcaccgacaaggcggacgtgtacagcttcggcatggtgctcctggagatcgtgcgcgggaggaagaactcaaagaagcagggggaggagcatcagatggcgagcgggtccagcgcgtcgtcgtcgtcgtcgtcatcggagagcagcggctacttccccgcgctggcgctggagctgcacgagcagggccggtacgaggagctggtggacccgaggctggaggggcgcgcggacgcggtgcaggtggaacgtgtggtgcgggtggcgctctgctgcctccacgaggacgcggcgctgcggcccaccatgacggtggtgtccgccatgctcgacggcagcatggaggcgggccagccccgggcggagctcctccggtaccttaggatgtacgggcgtgggttggtggacctgcggcccgccgctgccgggtggatggagcaagggaaagccaggggaagcgccggcggcgtcagcagtggctggtcgccgccgtcgtgcgtgtcggcgcagcagctctcgggacccagatga

SEQ ID NO: 21857 - DNA, 807 bp, Zea mays
  Peptide Sequence Number=SeqID_63636
atgggtcgacgcgagacggagcgcgaaggggggaaaccagtgggagacaggcgtaaaggggaaacaggcggccttcgtgttgtcccacgcccaggtcggccctgggttgggcgaggcggaggctcctccgaggtcgaggtggagtctgtcttccgtggtcgaggtcaagtccgagccccgggtcgggcgaggcggagaccgtcggctgagaccagggctgagtccgagccctggggtcggactaggcggagtttttcgtcttccggagccgaggccgagtccgagccctggggtcgggcgaggcggagttcgtcgtctttcagggccgaggccgagtctgagccctggggtcgggcaaggcggagttcgtcgtcttcctcgagtccgaaccctgtggtcgggcgaggcggagttcgtcgtcttccggggccgaggccgagtccgagccctggggtcgggcgaggcggagcttcctatggcgcccgaggccggacttggctgctgtcaacctcactctgtcgagtggcacagcagtcggagcgacgcaggcggcgctgtcctcttgtcaggctgctttgtgctgatgggggttaccagctgagattaggagtcttaggggtacccctaattatggtccccgacaagccccacccaccaaagtggccattggggatggctgctgtcgacgggtgcaccggacagtccggtgcgccaccggacagtccgacgaccgttggtgcagtagccgttgctccgctggcacaccggatagtccggtgctacaccggacagtctggtgaattatag

SEQ ID NO: 21858 - DNA, 1071 bp, Zea mays
  Peptide Sequence Number=SeqID_63637
atgacggcgacaaagataaaagagagcagagcagtgtcggtcttgctgccgctctcagttctaacttctcatcgccgggcaagtgctagtgctaatgctactactagggagatcatgcacgcgatgtggcgtcctcagaagttcaaggccatctacctgctggcgacgctgtacgtgctgacgctgaccctcccttccgccgccgcctcctactgggcgttcggcgacgagctgctgacgcactccaacgcgctggcgctgctcccgcggacgcccttccgcgacgccgccgtggtgctcatgctcatccaccagttcatcaccttcggcttcgcctgcaccccgctctacttcgtctgggagaagctcatcggcctccacgactgccgtagcctctgcaagcgcgccgccgccaggctccccgtcgtcgtccccatctggttcctcgccatcatcttccccttcttcgggcccatcaactccgccgtcggctcgctcctcgtcagcttcaccgtctatatcatcccggcgctcgcgcacatggtcaccttcaggtcgccgcagtcgagggagaacgccgtggagcggccgccgaggttcgccggagggtggacaggcgcttacgtcatcaactccttcgtggtggcgtgggtgctggtggtcggcttcggcttcggaggctgggccagcataactaacttcgtgcagcaggtcaacaccttcggcctcttcgccaagtgctaccagtgcccgccgcatctcactgctgccccgccggcggccttcatgccgccgccgccaccaatggccgcggcgccctccatgccaccggcggcgacggcgttcaatgccaccggcctcttcttccctcgctgcagccccggctccggctccgtctccgatgatcaacttattcctccgccaccaccaccgtgggcaccacggccgccacggcctgtgacgtcgtcgttgacgcgctgtgcacagcaggcatggtcgctagcgctgcgcttctgtcagactcgcacgatccttaaagcaccttgggccaggctcactagatacgagtag

SEQ ID NO: 21859 - DNA, 2049 bp, Zea mays
  Peptide Sequence Number=SeqID_63638
atgccgctccaccagatccgctcctccatgatctgctccgccgctcccatccctcgggcagccccttcatccttcggacagatcccatcctcgagtcccaccggagctctgaaggtaatctgtgcagggcaagattcagctacgaagagaaggccaaatggcaggcagtcgaagcccattcaaactctcctttcccaaatcagaagtaagggagtgacagcccatcctccttcagagcattcaacgcctacaagcctgagccctccgaggaaggaaagcagcaacattgaagtcgccgatgcaggttgggagatggttaagcctcccttctggtggaggaaagacaggcgcaacgctcgctctgcccaggcctcgcaaagatccatctccaaagaggagcaagaagagagggaaaaaagatttttgaagcacgttcaaggtaagtgctgtaattgtttcgccaccaaccacagagctgcagcctgtactaagcccactaaatgctggagatgtcacaaggatgggcaccaagcctcccgttgcccctcctataaagagagcagtttgaagattgttgaacagcaaagcaaaacttcatctccaatctctgaaccaccgtacaaatcctacctccaagttgtcaagggtggtcaccaggacatggccacataccccggcgacccgcgcgcacggccagggcgtgtggactgtgcggtgtcggcaaatggagagattaagcgtgagagggacaacctggttggtaaatcggtggtgtgttctcatgatggcaacaaccatgcctcagagcccaggcatgtcattgaagcactatccgagcaactagggatcagaggaaacaagatgaaggttttgaagcatcacccggagcagtacctcatcatctttgaggagcagcaagatcagagaagggtgctgcaccaaagtcgcctccatcaccgtggctgggttttctgctttgctaagtggaatgaacaacgctacagctccgtggtgcgctgggacttccatgttcggctgcggctggagggtgtcccggtgcacgcctggacaaaggacgttgctgcccagatcataggaagccattgtgccatccatgtgttggacgagaagaccatgccacgcaagcgaactcgcacttttgatctgtgggcatggagtgaagatcctagcaagatcccccgcgagctgaacctggccggatgcgtcgctgcatgtttgagtggcactacggtgttcctgaccatctgggagctcgcagagagcgtggtcgtgctgtcgcgtgtgaccccctgcaccggcgtcgtgacgaccatgaagaccatgatgacgactgcaacggtcgcgggcaccgtcgccatcgcagtcgctcagggtgggagcgggggcctctgccatggtgaggtggaggactgcgtctcctctagtaggcgccgctggaatcgcactcccacccctttttggcgccgccccttcgagcccccccaccttgcctggggacagggtgcgcaggcgtcgagcactaagctcatatggcgccctaagaggaagccctccggcaagcgtgtctccttcgctagccctttggctgtggtcctgggagtgaaccctattgtgcagctgttgcccagcgttgatccagcttctggtattctccctcttgctgtttctacctttcatccacgtaatgacccaatgcttgatgaagtgctatatggtgctgctgtttcagaagcgcaagcgctgcgtgcatccaagattatgcagttgatccattcagcggaggacagggagtacatgctagctgctcttccagggctgaccagtgaagctaccatggagcacaacatccaggtggaaactgtgcaggtgatagggcctgccccttcggtggcgtccctgcaggaggaaatcaggcctaattcagaggtacacaacattgatgatttcctgatttccatatctaaacctatcccagtacctgaaagggaaatgtgcccttgggccatttctaagtattttggtgattga

SEQ ID NO: 21860 - DNA, 207 bp, Zea mays
  Peptide Sequence Number=SeqID_63639
atggtgaggcgatggtctggtctccgcggctgcgtgcggcggccccagcgcgccaccttccgcgatgatttgcgagcgcgggaggaacttctcgggttctcgtccgccctttacccgaagccgacgtcagttactggtcgatttcccgttctaatggcgcgaccgtttctgtccgttgtccttctcactccttctgactacctataa

SEQ ID NO: 21861 - DNA, 321 bp, Zea mays
  Peptide Sequence Number=SeqID_63640
atggcgatgcggaccgcgctgacctccctccctgcgcgcctgcacgcccctgcgccccccgcggcgatgggcggccggcgcctcctcagtgatgggaaggggcgcgtgctcagcgaggaggagcgcgccaaggagagcgtctacatccaggagaaggccgactccgaaaaggtgaagtccgccgacgccgacaagacaactgatcaagccaagtatggaggcaagaagagctttgaggtaccaagtgcacgagagaaggtcaaagaggctgaggaacccaaagccaagtgtgaagaagaagacttgcaaagtcaagggtga

SEQ ID NO: 21862 - DNA, 927 bp, Zea mays
  Peptide Sequence Number=SeqID_63641
atggcgcggtgccaggggaccgttgagagcctctgccaggggctgctcgacctcgacgacgacaagttcggtgcaatgtgcagcgccttcggctacctccaggagtggccggacctgggtgccgccatgtgcggcgccaatctcgccgtgccgcctgccgtggcgacgccgagcgccggcgacggcaacgattcctcctcttgcagcgtcagcggcgggttgaggaagaggaggccggacgcgtacctcgatgccaaggtgaggagggagaggatcagcgagcggatgcggtacctgcaggagctggtgcccgggtgcagcaaggtcacgggcaaggccggcatgctcgacgagatcatcaactacgtccagtccctgcagaagcaagtcgaggtaccgacccaccggcaccgtcctgcttcatcttccccgcttctcccagctagccagctagttattccgcgatcgctcaccgccgggtctccttgcgcgcagttcttgtccatgaagatcgccgcttccaacccggtggtgagcttcgacatcgtcgaggacctcttcggccgccagctgaagcaggcgtgcggcccggcggccggccagctggagccgtcctgccttcagatgagcatgagccccatgcagcaggtagtgcacccgtctgcagcggcgggctccactggctttgggccgctggacatggtcctcagcaacctgtacgcgcccgccgccgcaagctgccctgtgtcggctgccccgtcggtctcggtggccgccggaccgtcgaccatcgagccgtgcctcaacgtgaatggaactgctgctgcctgggatattggctcccagaatttgttcagcggatttgatgcacaatttcagtcggtagaaagtggctgcttgctagacaacctcaaaatggaaatgtga

SEQ ID NO: 21863 - DNA, 624 bp, Zea mays
  Peptide Sequence Number=SeqID_63642
atggatcatccgctccaaaccaataaccccaccgtcggatgcacgcagatgcacatgtggggccacgggtcgcagtaccgcaagggcccggagtcgctgcggggcacgcagccgacggcgatgctgcggctgccgtgctactgctgcgcggcgggctgccggaacaacatcgaccacccgcgggcgcgcccgctcaaggacttccgcacgctgcagacgcactaccgccgcaggcacggcatcaagcccttcatgtgccgcaagtgcggcaagcccttcgccgtgcgcggcgactggcgcacccacgagaagaactgcggcaggctctggtactgcgcctgcggctccgacttcaagcacaagcgctccctcaaggaccacatccgggcgttcggccgcggccacgccgcctgcggcgtcgacgactgcttcgacgacgacgacgaccgcgacgacccgtcgtcatccgaggtcgaccacgcagccaccaacactactagtaacagcaccactactaccgctgccgccgccaatgctcaccaccatcaccacaccagctggaagccgccgccgccgccactgtcgtcgtcgagcagaggctccggcgacgaccgactactatag

SEQ ID NO: 21864 - DNA, 381 bp, Zea mays
  Peptide Sequence Number=SeqID_63643
atggagacttggagagccgattgcgatggagactggagagccgaacagcgccaggagcagcagcatcctcgtctcgaccaggaggaggagcagcagcgtcctcgtctcggccggggacggtcctcggtccctcggcggctgctgctggacaaagggcgaggagaggaacaagtaacaacgggagttgtgagtgtgacacaggcggcggctagggttagcaacaggagcaactgggcacgacagaggagagctgatttattagtaggtgcaagagagagcatgcacgcaagggttcgttctattaaaatagatggagactttgatccatctggtatatatggtcaacggtgcaaatacagatttgttaatgctaacttttga

SEQ ID NO: 21865 - DNA, 723 bp, Zea mays
  Peptide Sequence Number=SeqID_63644
atgccatgcgcgcgtccgtccgtccgtccgcttagtgcaggtagtaggcgaggagggagaaagaggagcgcggcgggcgcggcggcgaggggcgggcgcggcgccgctggcggagggccccgcggcggtgccggtgccggcgccggcgccggcggcgccagcgggggcttcggcggacgccgacgactcggaggcggctggggcgccggcggcggcggcctcggtggaggccagcactgcggtggccgagacggcgactacgaggagcgcggcgatgaggatcctcttgatcatctccatctttctctcgggttggcgcggtgtgtccacgtcaaggacaccctgcagcgagcctccactccagtcgcaattcctgtcgccgtgagggagagctgcctccttcagtcctccagccaaaacggtgcagtagggatgcctcctcggctcctcctccagcaaaaattgtgtggaaaggcctctcctaccaatctagtgccgccctcctcctctatctgttgtgccaccatcgcccgccattgctgcatcggcactgaacgccattactgcaccatcatcgcccgcctctgctgtgtcggccaaaaacaggtgtactgtgggatggagactccttgcggcgcggatagccagggaaactatgcgatcgtcgtcgaccacaggcagattgctgatggagatgggtggatatcgattgatcatgcctga

SEQ ID NO: 21866 - DNA, 321 bp, Zea mays
  Peptide Sequence Number=SeqID_63645
atggggctcggtgtatgcggctcgctctgccgagggtggattgcccttggggaggagagcgcggccaagggagctccattgattagagatactttgatcagagatgtttggtttacaggtggtgacgaggatgatggttttgattatgattatgctagtccactacaaccaaacgggacaattcctgagtatgttgatgtgtactcacccttgctttacacacaaaacccccctaggttgtccacgtgcaaccactgctcaggagaagatgaagtcatggaggaggacttccaggagttccaagagtacgatgagttctag

SEQ ID NO: 21867 - DNA, 384 bp, Zea mays
  Peptide Sequence Number=SeqID_63646
atggggtccgggcacagtacttgctctaccgaggctggttgcagtggttctttgatagggatggcaacggggaccgaaggggagtcaggagtggccgagtcatcgtcgcagctcgcagggacacccggtgggcacatggcacaggcggcaggccgcagatgcgatgcgcgagtgccgcagggacggacgattgcgcgcagccgtgcgactgcggtaggagccggagtgccggagccggagtgcagcgggagtctgggagaggacagaggagagatagagcatggagtgggcggtggcgataggagtggtcgggtgggagaggacagaggagagaatgagagatggaggccgagcgagggcttcgctggcagcctggaggactag

SEQ ID NO: 21868 - DNA, 351 bp, Zea mays
  Peptide Sequence Number=SeqID_63647
atggaccagatgtatggtctttctgtcgccgagcaccccatcaagtcatctgaaccttcggatgacggcaatagaagcaccggtggcgaggactcctcaccctctgaggagaatcactcctccgagaacttagagtcgccgaagtcctctaatgaagctacaaaacgacaaactcaagaccagtcaaacaggagtcaaccggacctctatcggttgagcccagtcagcggtcgcattaaaaccctggccgagcatgcggtgcggtggcgtgggcacaatggcactcaacagcagggaggttcgacgaggttagcacaatggcgatgcagaggacaaggttgtggtgcttga

SEQ ID NO: 21869 - DNA, 816 bp, Zea mays
  Peptide Sequence Number=SeqID_63648
atgggcctgctcattgtccctattttgccttccccaagaagccacgtggatggccttgccctcgccatcatcgttcgcggccttatcttctacgcgcagccgctccagccattgtcttccccagccgcgtgcacaggactgtgccctccctgctccatcttcccgttgcgcgctcctcaagttcccagtgcccagctgaattcccttgcgtgcgccctatcttccaccacgcgccctgctcacccatggcaccggccacagctcggagctccctctgctatccccaggcccgcacctgctgctcgccccagcttggagctcactcggcctctagctccggcgcccgaccgagctccctggccgccgcgccctactctttgttgctgctcgccggtgctccagctcgcggcgcccctgcttttctctctcctcctctactcccgccatggcacgcgtctctgctccctcccccgcggcgcgcccctcaagctcgtcctggtcgcgacctcgccgtggagcttcctcgccggcgctcctccctactcaactctccaacgcgcgccccatctcgctgcgctcggcccccagctcggtcttcctcggtcgtgctcgctctggccgcggacaccgtcgagctcagggcccttctcgcagtctgtccacgcgtcattcgtggagcaacgggggaaaatctgcagcctaagccttggtcaatgtctgtgtggatttgggaaagaagacggggatatggttgtagaagacagtgaagtcggcttgtgtcgcacgtctggtgctcgacgaaaagctcgaacatga

SEQ ID NO: 21870 - DNA, 144 bp, Zea mays
  Peptide Sequence Number=SeqID_63649
atggcgggcggccaaagtctggcgacggtgattccgcttctccggcagcgtcgagttgaagccaccagcggcgctaatctgaagagagcggctaggaggaagaagaaaattctgacttatgggtcccacacgccatacaaataa

SEQ ID NO: 21871 - DNA, 717 bp, Zea mays
  Peptide Sequence Number=SeqID_63650
atggggcccttgcgtcagaccgatccacgttggcgcgctctcgctgttgtgtggtcctggtttgtcagcgcggtatctcctatgccgcaaccaccggggccgcttcgctcgccgccattgtcgcgtctctccccagctcggttgaccgtccctgcggggcaggagggcgaccggagcgcgtccaatttacctccgccgtcgcacattcgcggttcgccgtggactgaccgaaacaacgtcggacttcgggtaaggacccgctctccatgttcgccttcacctcaatttcattttgcacctagtgtatttagcgattgtgcaccatggcgtgccgtgggcagtccggcgatggtgaccgccgcgggattgcacacgccgccgtgctccggcgagatatgtagaggattaggtctgggctgtgtgatcctgaatcgatggttacgattaaaagccagataccgattcagccaacgacgcgatggccgtccgatcgggatcgcgggcgtctggggcatgttccactgtattaaatcgagaccgctgatccaccatcgtgcggtcatgagggagcgtgggctggctggcgcagtggatcgtggatctttgatccaacggtcaatagagcttacagtagaagagactgtgaccgaggatcctggtgatcagcagatagaagtagctgagcaggagctcattgaaggcaagttgtgtccttga

SEQ ID NO: 21872 - DNA, 732 bp, Zea mays
  Peptide Sequence Number=SeqID_63651
atggacgcgacggccagagatctacgcgcaggggcgaagcgaccggcgcgcagaacagcgagcagagaagcagtcactgagctggggcgaactgcggcgcgtaggagctgggcgcacagcagagaccgagcgccatggggagcaagcagcgagcgcggatgtgagagagatccgtgtaggggaaattctaggcaccacgagagagagcagagctccgaccgggcgtgcgcaggaaagaggacgagggcgctggggctaggcgcggtccgagcagagagggagatgagcgccgagttgaaggaggaagccgctgcgctaggagctccgagctgggactgggaagcaagggcgcggccaggcgagtaccaaagccgagacagggagctccggccatgggaagttagggaccgcgggagagagaaacaggagctcggctggggttttggcgaggccatggcgagcaagaagcatagcacgcggcatgggagcttgagaggagagagctgggcgcagcgctcggcgctggccagcagggaggagcagagggcgcgcggtgatgagagattaggggaaggaggtcgagctggagctgagcgtgcgccatgggagccgcgcggtcggccatggagatgggcagagggagcgcgcaggaactccatggctcaggagcaagaagaaaaaatcagggagcaggagctcgcggggaagataagcatgtccaccagcggctag

SEQ ID NO: 21873 - DNA, 948 bp, Zea mays
  Peptide Sequence Number=SeqID_63652
atgacgtggtcgtcgagcagcgacgcggcggaggcggagggcggggaggagaaatttgccattacgcatggcgccgtcgttgtgcgaaagggctccatcgacgggagcggcggcgccggcaacagcaacttcgactccttctccgaggccgggtggtccagggagatctccggcgcggcggattcggcatccaccagcgccccgtgggacgagacgagccgcgactacctcaccttcgtcaaggagtaccgagaagccgccatattgtgcccatctcatgccagggcactcaagctcctggggagcactctctttggcgttggggagtaccgagctgctgagaaggcactggaggaggccatcttcctgaaggaagactatgctaatgcgcactgtgaccttgggtcggccctgcatgcagtaggggaggatgaccgtgctatccaggagtttcagacagcaattgatctcaaacctggccatgttgatgccttgtacaatcttggtggattgaacatggatgctggccgcttcgtatgggctgcagagatgtatactcgtgtgctgagcatccgaccaaaccattggcgtgcacagctaaacaaggcggtggctttgcttgggcagggtgaatctgaggaggctaagaaggcactcaaggaggcgtttaagatgacacagagggtgaaagtgtatgatgctatctcacatttgaagacattgcaaaagaaaaagccaaagccttccttgatgctcctggttctggtcgtgttgatctggatgttcaatgatccggattggggatttgggatcctaagcactctggtgaagctcgaagagagtgaccacatacgccatggtagccacacatcccagtcccctgagctcgtagtagtcgccgccaccgtgacgggctccgctgcgggcgccgaggatgcatggcgatga

SEQ ID NO: 21874 - DNA, 405 bp, Zea mays
  Peptide Sequence Number=SeqID_63653
atggcatatatccccgcatgtgagagctcccccacccgttgctggtctggttttcctgcggtggatccgtcgccatcggaggtggctcaacaacccgagggaggattcccccctgacgaccggtcccacagacgaaggcttggtacgacggttggcgtagctccggcgagctccacgggctccgacgacggcgtggcgaattccagcgatggcggcagtggctcaaacgacgaggagagtgagagagagaagggggcgagctcggcagggaggagggagacagaggagcttggcagacgaacaaacgcgtgggtggtggctcgggtggcggggcttcggccgtgggcgtcgggtcctgggcgcggcgcaagcgtcgcggcctggacggggcgtcgcgcggcttag

SEQ ID NO: 21875 - DNA, 231 bp, Zea mays
  Peptide Sequence Number=SeqID_63654
atgtgtgaggcgaacctgtgggccgaggaggtcgagtcgaccttgcgggcgacgaacgcacacctagaggaggcaaactcggacctcttgcgggagcatagggcggccagaggattaaacgaacatggcctaaatgagatcgatgctgttgtgattgtggagggcttcgctgctgactggagcgacgaggagctggacagcatcgaagagcagatgagccctcatgcctag

SEQ ID NO: 21876 - DNA, 330 bp, Zea mays
  Peptide Sequence Number=SeqID_63655
atgcagagcatgatgaaggtacaaaaagtcgttcctaagggaacgcagcgtaagttttctgctcaaaagtcgttcctaagggaatgcagagccaagagcatgacgaagctacaaaaagtcgttcctaagggagcgcagccagcttcatcaatcttcgaaatgagcttcggactgttgaccttcggcattgtcatccagtacacaacaaagaagtataaggcttcgggcctcgtcactagccaattctcgaccacccttcgcccaaatctgcgttataaatctgctccctgtgcttcgggctatattggggatgtcaaccaaatccgatga

SEQ ID NO: 21877 - DNA, 678 bp, Zea mays
  Peptide Sequence Number=SeqID_63656
atggccgctgtcgattgtccctggacggtctcaagcgccctcgtcttcctttggcttcagcttgccgtcgactttccttgccgcgcgtgccttggtccgagctcacccatgtcgagctccctcggcgtccctcccatgcccgcgctcgcccaggtcacgcgccgtcgcccagctcaccctcagccatggacgtgccaagccgcttcctccttggccggccgtcgtgagcccctgcgcggcctcctcccaattcaatttggagctgctgcgcctcagcctcgatctgtcgtgcccctgctcaccgtcaacccgcctcggccaagccttcctgttcctgccgtcgcgggttgtcgttcgtctttgcatcgtgtgtacagcaacgtcgttgattcctccatggtgcttgtcgtcaaacttcgcttcatcgattccctgccttcggttcgctcatgcccaaccattgatgccgttgttgttcgcctccacgttgtgtgcgacaacatcgtcgttttcccttcatgtgctcctcctcgatctctgcctcgccatcaccctctgtcgcagcaccgtgtcgacgacttgcgattctcgcctttgtgctcacacctcgcaagatgctgctctagtactcaccagttggatgctgaactgaagaaggcccctgtgcgacgccactaa

SEQ ID NO: 21878 - DNA, 945 bp, Zea mays
  Peptide Sequence Number=SeqID_63657
atggacgccttcgtcgccggttcgcgcggccgcccagccctcagcttcctttgccctaagatatcgctattctccccgccctcgcactcctggttccgctggctcgtcgacgaaatccgggggttgctgccacgcggtttcgacatcataggggtgctgctcgtggggggagagggttctgatgcggacgtcactcgcgcactggagcaggctcgggcgctgagggagctgctgtttggtgtggcagcgagccatggcttggtaggaggccacatggatgcagccactggggagattcgatttgttgtatctgagagtggatggacgaactcggtggaaggatctgtggttacatgggaggatgagcccgggaggttgttgtgggagaagggatgcctcctgcgctgcgaactgctgctgaagcttccactctatcttaggcctgacgtgaattctgatgcaattgcaataactgtcaaccaatcagcgcctagcttgaagcctggcggtacccctgtggtagagtattttcctggattagcagatcagatgattgtaatgaagagaattattgcttcagagataactcaacaagcacagcttcaaccattccattttattccttctggttggcatgttccagtaacagctatatacaatacaagatatggtgagactgaggagaggcaaagtgagctgcgaaaagaactgcatttaaggctaggacttcccttagatcggcctttgttgcgaatttctaatgcattgactttcggtggcatgggaaggaggaagaaaagcatgccaagaagtggttcttcgctgcttcgagacatccacagagaacttccatctagtggtgtatccggaggtgttatgtctttgattgatggttcatatgagtattatcattatcttcacgatggtattgatgacaatgtatga

SEQ ID NO: 21879 - DNA, 312 bp, Zea mays
  Peptide Sequence Number=SeqID_63658
atgaagcctctgaagcagtggttcctgctgtctgttcgaccaggtccatgggatgctctgcacatgggagggaacatcccaacgttcggcttggctcggtcttctttggcaacagttgtgctcctagttctcaaggtgccaaaattattcatatcagctccccgggaggatctcgattcaatcatctccgtctcatacccggaggactacaacaacatgatggagcaatacgagaagctgactatcgctgcacctgaaagttccctatgtccgggaacaggatctggatatcgcctagaggggggtgaatag

SEQ ID NO: 21880 - DNA, 561 bp, Zea mays
  Peptide Sequence Number=SeqID_63659
atggagagcggcacggagcggcggcggcggcggcaccacttcgtgctggtgcacggcacctgccacggcgcgtggtgctggtacaaggtggccacactcctgtcatccgcgggccaccgcgtgacggcgctggacatggccgcgtgcggcgccagccccgggcgcgccgaggaggtgccgtcctttgaggagtacagccggccgctcctggccacggtggccggcctggcgcccgaggagaaggtggtcctcgtcggccacagcttcggcggggtcagcctcgcgctggccatggagcagtacccggacagggtcgccgtcgccgtcttcgtcgcgaccggcatgccctccgctgggaagccgatggcgttcgtcttcgagcagtttttgcaagaagagtacccagcggaccgctacatggactgcgaattcgaaaccagcggcgacccccagcgtcccgtggagacatttcggttcgggccacagtacctgaagcagagactgtaccagctcagtcccccagaggtaggtgacaacggacaatggccactagcccactag

SEQ ID NO: 21881 - DNA, 291 bp, Zea mays
  Peptide Sequence Number=SeqID_63660
atgggcaagagcaagaaaggcggaagctcctcgcaccattccggcgataagcggaagcgcgagccgactcgtcctttggaggacttcggcgattccgagtactcggaggaggagttctcctccgagtccaagggatcgccggggagcgacggcgacgacggcggcgagggcgacggcggcgacgacgatggcgatggcgacggcagcaggggcggcgacaagggtgacggtggcaacggcaaggcggcagcggcagcggcaaggccagtgtccaggcaccactgggcttag

SEQ ID NO: 21882 - DNA, 1959 bp, Zea mays
  Peptide Sequence Number=SeqID_63661
atggagctcgtcctcgtcaagcccgcggcaggagctctcgtcgaggtgggctccgggtccgttgccggcgcgggctcgatcccggcgatggtggcggcgcagcaggagattttgcacgaacaggtggaccagctccaacgcctcgtcgtcgctcagtgccgcctcaccggcgtcaaccccctcgcccaggagatggctgccggtgcattgtctatcaagataggtaagaggccaagggatctgttgaatccaaaagcagttaagtgcatgcagtcactttttgccttgaaggacattcttggcaaaaaagaaacccgagaaattagtttactctgtggggtcactgttacacaggttagggaattctttacagttcaacgatcgcgagtgagaaaatttgttcgtctgtctcaagaaaaagcgctgagaatagagacacccaaagagcaggacaattcatactccataaacactgagcagataccgccggacatagaagcacaagctgaagttattgaacctttgagaactttagaaccggtggtcctacagagctctttgcaaccaacgtgtgtccctcagatctcttcgcaatcaatggagctccaacaaagcgatttgcagcacatggaagtcttccaaaactctttgcaacaagcagaggcacaacataacattgcagctcctataatgccatctggagcaatggttatgcaaccaactgacgctaagattagttcagactctgttcaaaaggaagttaagcaagagggagttcattctggtgttgcgtcagaagataagaagttcttggaaagtatctttgctctaatgcagaaggaggaaacattctctgggcaggttaaattaatggaatggattctgcaaataaataatgttacagttcttagtaggttcgtaacaatgggtggtttgaccattatgtcaacatggttgagtcaagcagcaattgaagagcagacatcagttatccatgttattttcaaggtgctgctccaccttccgttgcataaggctttaccagtccacatgtcagttgttctgcaaacaattaataagttgcgcttttatagaacacaagacatatcgagcagggctaggaacctcctctccagattgagcaaagtgcttgtaaggattcaggcattgaagaaacctcagaaggacttaatatgtaaacaaaggataagtgaaattctccgtgacgagtcttggaaatctgaagttgatattaccgaggaggtacttgctttgactgatggtgctaatgagagcagaaagcctgaacccagaaaaacaccaatgcttctcactgcttctgctattgagacaaataaaaggagttctgtgcagacaaaatccaaacaaaaaagaaaagttctacttgtggagcaaccaaacaagaaagctacgtggaagaatgctaattctgtcaggaacacatctacaaacaatagccggccattatctgcagatgatattcaaaaagcaaagatgcgtgccatgttcatgcaggagaagcgtggcaagattgacataaataaattgagtgataaaccacaagcaatggacacgaaaaaagcagctggattagtaaattcaaatccatcagctatgcccataagtccccatacgtcagctgcacaacctgttgacccaagcccatctacttcaaaacaaagcacagatcctcagcctgataatacagaaatttcaggtggtttgaagttaaacataggttccaaaaacaatgtcatagagaagttggattgcaagagagttctttggcaaataccaccagttctgagctgcttattggacgataagaatcagcaaataggtgtgcagaagttccaagaactaagcatgctgtcaccagtgcaagcttccgaagtatttacattagtcaccgttctccaaatcagcatgtttctgtga

SEQ ID NO: 21883 - DNA, 360 bp, Zea mays
  Peptide Sequence Number=SeqID_63662
atggccttgggcccactcgtcataggcacaaggaggtcttcttcaacctccagccatctcctccacgcaagggagcagagaaggccggccgggctgggaggtgagggaggggagacgaccatggatgggggagggtgccatggggaagaaggaggagctccctgctcagccaaaatagagaagggaagggagtggtgtatgggagaagggagagggtgggctgccatttatagagccaagctctggacatgccagactgcaccagcagatgcacttgaggtgattcgagcactggttagagagataaagacccacaaaaattggtttgtcagtgggttagaaaacagtggaaactcgtga

SEQ ID NO: 21884 - DNA, 540 bp, Zea mays
  Peptide Sequence Number=SeqID_63663
atggagagcttgggcgtcgatgcttgtgctctggcatcgcgctgccgtaaccgagcaccaagagcgagaagagggagaaaacgggatgccaaacgcgccgtcgccatcgattcaaggacctatggccgttcggagcatgaagatagatctatgggcttcgccaggtgctcagggacgtgctcgatgcggcactgggagcaaagaccggctggttgtcgaggaatttctcaccgtcgttcgtgtgccgccatagatccgccccgcccgtggtcggggtatctcgacttcctagctacgggatcgttcatccatgatcctgcggcctatatcaccctgtacccctttcgccagttcattttgcacaagaacccctcggtttacctaaaaacaacccgcggtccacgtagttgggttctgtttcttggtggcacttgcgctgaggcccctggatttccgtttattagtgtgcgtggaccagagtcggatgaattcattttagaaatgattttcaatacaaatttccgccagaaacttatttaa

SEQ ID NO: 21885 - DNA, 384 bp, Zea mays
  Peptide Sequence Number=SeqID_63664
atggagagcttgggcgtcgatgcttgtgctctggcatcgcgctgccgtaaccgagcaccaagaacgagaagagggagaaaacgggatgccaaacgcgccgtcgccatcgattcaaggacctatggccgttcggagcatgaagatagatctatgggcttcgccaggtgctcagggacgtgctcgatgcggcgctgggagcaaagaccggctggttgtcgaggaatttctcaccgtcgttcgtgtgccgccatagatccgccccgcccgtggtcggggtatctcgacttcctagctgcggatcattatgttaattggaacatggagcgaccacccgggaaaacagtgctaccacaagggtataatgggacgcccttggctgattaa

SEQ ID NO: 21886 - DNA, 391 bp, Zea mays
  Peptide Sequence Number=SeqID_63665
atggcgacatccccagcgctcctcttcccttctccctcctcggcatcctctgcgccttcgtcggcgcgggtggaggcagtggtgcttttcaacgtctgcgacagctacgtgcggcgcccggaccaggcggaccgcgtcatcggcaccctcctcggttccctcctctccgacggcaccgtccacgtccgcaactcctatgtcgtcccccacagcgagtcagccgaccaggtcggctcagatcacatctccaacgaactcactcgttcgttcgcattgggttacttgctgatgattggcgctgatgcaggtcgccatcgacatcgactaaccaccataaacatgtacgcctcgcaccagaaggtgaaccccaaggaggcatccgtccggatgg

SEQ ID NO: 21887 - DNA, 168 bp, Zea mays
  Peptide Sequence Number=SeqID_63666
atggaggacttgagtcaaatgacctcgatcattgtgattggttgtgattgtttctactttgacatttgtggaacagatcccaagtcccctatgacacaaggcaagccccggtgcatttaccccttccttgttgttttaaattctttatcacttgaaatgatgcattag

SEQ ID NO: 21888 - DNA, 378 bp, Zea mays
  Peptide Sequence Number=SeqID_63667
atgtcgagagaacacaccaagagggaaatggtcaccggcgaaaagcctgaagcttcgggaaagaagaacaaagaatggactccattgaaggaggccggggataagcacaaggaggaatccactggctctatcaagtcacaaaggaagggtgacaagaagaaaaagaaaataaagaaggtggtctactacgagaacgactcttcatcaccttccacatccggcgccgagtctacatcatcaaaacgccaagagcgtaagaagtataaaagagggaatcagaaaaagaaaaagaaaaagaaagccacatgggccgactacctcctttccagcccaattcacgtttacacccgcgcggcccaactgcggatgcgcgtgtaa

SEQ ID NO: 21889 - DNA, 210 bp, Zea mays
  Peptide Sequence Number=SeqID_63668
atggtcggcatgcctacgttcgcccaaccgccgcgcgcgctcgcctctgcgcacggccagactcctcgccgccgccaagctcttccgcccccgtgcgcggccagagcgaccccgaccacctctgaccgccatcagcccatcgacgtgttcgccaggacctccccaacctccgtggacacttcgccggagctagatcaccgccggtattga

SEQ ID NO: 21890 - DNA, 1005 bp, Zea mays
  Peptide Sequence Number=SeqID_63669
atgcgctccttgtccgtcgccgtcctcctcctcgtcgccgccgccgcttcagcatccgccgccaaggatcgctgccactcgggcgacaaggcggcgctgctggccatcaaggcggcgctcggcaacccgtaccacttcgcgtcgtggacgcccgacaacccctgctgcgactggtacgacgtggactgcgacgccaccaccggccgcgtcgtcggcctcgccgtgttccaggacgccaacctgacgggcaccatccccgacgccgtcgcgggcctcgtccacctccagaacctcatgctgcaccacctcccgggcatctccgggcccatcccgccggccatcggcaggctctccaacctctccttcctcaccatctcctggacgggcgtctccggccccgtgccgtcgttcctgggcacgctcaccaggctcaaccagctggacctctccttcaacgccctcaccggcgccgtcccggcctcgctcgccgcgctccccagcctttacagcatcgacatcagccgcaaccgcctcacgggctccctgccgccgctgctcttcagcaggctcgataaggcgcagcaggaggcgtacctccggctgtcgcacaacaacctcaccggcagcgttccgcctgagttctccgcggtggccttcgcgcaggtcgacctgtcccgcaacgccttcgccggcgacgcgtcgggcctgttcggcagggcgaagccggtgcagcagatggacctctcgcgcaacgccttcagcttcaacctgtccgccgtggagctgccggagcagctcaactcgctggaccttagccacaacgccatctacggcggcatccccgcgcaggtggtgaacctgaccaacctgcagttgttcaacgtcagctacaaccggctgtgcggcgcggtgcccaccggcggcaacatggcgagcttcgatgcctacagctaccagcacaacaggtgcttgtgtggacctccgcttgctgatccctgcaaatga

SEQ ID NO: 21891 - DNA, 519 bp, Zea mays
  Peptide Sequence Number=SeqID_63670
atggacccctgtatcggcgccatcatcattggcgctgagaacttgctgaaatttaggaagggtcctttgaccggaactgccttcgacccactgcctttgccaactggtgacaaggagaggatagagaaaagacgagaggagcttgcggccgagcaacaatgggtagacgtgcaagaaatgaggcgtgttgctgaatgcagggagaaggagaagaagcatgagctgcagaaggtggaggaccaacattcttgctatgacaagaacagcagcaatatggatatgagcatacttgcacctaacaagtattctacaaaagtagttaaaattgaatacatggccttccgccagaaggcacccctggtggctctcgtcgtagaacgggtcgaggaggtggaactgtgccatcctacaaaattaaattcagggctcggcgccaagatctatggcgtcgacccctgccatgtccgcgtccacgtaagactgattgaagccaatgctattggcgtcgctttgcgttag

SEQ ID NO: 21892 - DNA, 630 bp, Zea mays
  Peptide Sequence Number=SeqID_63671
atgaaagaaacactatcatattgtagattttatggtccaaatattttagaggattatatgtggacatatggctcctcccagacacgccgtcccggctacccgtgcaagcccaaaggtctcgtcagctccgacgacttctactccgacgccttggccaggcctggcccggtcatcgcccccttcaacaccagcctggcctccgccgccgttaaacagctccccggcctgaatggcctcggcatctccgccacgcgtgtcgatgtccagccaggtggggtcgtgcccatgcacacccacccggaagcctcggagctcatcttcctcctcgaaggaacccttttcgctggcttcatcagcgccgaaaccaataaggcctatgtcaagatcctaaagaagggcgacctctacgtgttcccgcagggcttgctgcacttccagttcaacaccggcaacacgaccgccaccgccatcgccgcgtacagcaaccagaaccccggcctacagatcgctgtctatgcactcttcggcaacaccctcacagtggaaacggtgaataagaccaccttcgtaacaaaggaggaggtcatgaggctcaaggacctcttcggccagtcttcagtgccatcctga

SEQ ID NO: 21893 - DNA, 801 bp, Zea mays
  Peptide Sequence Number=SeqID_63672
atggcgtggtggcgggtccatcatgacaccctattgctgatgtggacgctgctccacaatcatagggggctccaccgctacctctccttcttggtcagggcgctggagatagacttagcattatcgcggagggccatggatcccccggaggctgtggaggtcatgtcctccatattagtggaggggcaccgggaggaggagcggcactcggtaaacaggcccaccatgacacgacttgggggaatccgccgttccagttctcagtcgcctcgggccccgaacggtaacccaaccattcggcgcctgccaagcaggtccaccacgaaaatttcacagcgtaggaggatccaccgctccaactttagaccctctcagaccctgagcggggaaaccaccctttttgctgttggttccttcctcggacagagcgctagaagaacgcgccacgcaggggacatgcctgtgctaggcgagacgttatccatctcgtcaaaccgcccacgcacgccagccctagacaagacatcgcatgtgtcaaccacccatgccaagtgtcatcattatggtttcctctcccatcaggtcgccatcgttgccgtgactgccataggccaacaagcaaaaaagcgtccgaacgactctgaggagttacacaacggctcgggggctacatctaaaccttcgagcaactccaacgagtttcacgaaggctcgagggctactgacgggtacccaagaatagggtacctaaagttccgccgagcaactctggatggcgaaccagccaacaagtaccgctaa

SEQ ID NO: 21894 - DNA, 396 bp, Zea mays
  Peptide Sequence Number=SeqID_63673
atggctgagcgccgtgagggaggatctttgcaacccctggcggtggttctcctggaatatattgttttcgtgccgcctacaagggcatctgacagtgccgctgtgccagcagccacaacgccggcgcccaagataacagcatccagccgccatgcgatcaacagcaaggtgtcatggtgcagcaggcggctttgtacaacagtggtgcagcttagcttccgccatggctcatccgcgcagcaacagcagggtgtcatgatgtcgcggtgcagcgaccagccgaccatccttgcacttccgcgatggctaactgtgtgcgatgtcgacacctctaggaacatcaacgccaaacgttcacggatcacagtagcatggtgttgtggtgcagccgtgtga

SEQ ID NO: 21895 - DNA, 222 bp, Zea mays
  Peptide Sequence Number=SeqID_63674
atggatcgcggtggattcgtgggtgttggtgcgtgtctgaacgacctctggaaggggcagggcgacacggcgaagtgcgcggcgacggggcaggtcactggaacaacaacgtgggccgtgggcgtcaagaggagtgctgggatgaaggtggccagcgcagccggcgtggccatgggcatggggaaccacgtcctctacatgcttgcgcccgtgccgctctga

SEQ ID NO: 21896 - DNA, 432 bp, Zea mays
  Peptide Sequence Number=SeqID_63675
atgcacaagaatcggctcggccccagacagcagagacccaaacgcacagccaggcaagggagccgtgagtcgtcggaactcggacgtcagtacgtcacacaaactgccgagccgttgtggggcgagcaggaaacggactgcaggagcaggactgcaggagcaccaggagccttggagtttccgtttcagtctggcgctgcgccagcgcggccgtgcctggccccggtgccctccgaagagccggcatccgcctcctacgccgtcgtcgtcacggacaagcccgatacgcctgccgacgacaaggccgaggaggttagcgccgcgcctagtggctccgcggaggcgcctatggcagagctggtgccgtcagaggcgtcatcatccccagatgatggcggcctggatgagattctaagcaaggaaggaatttaa

SEQ ID NO: 21897 - DNA, 402 bp, Zea mays
  Peptide Sequence Number=SeqID_63676
atggctggaacagttgaaggagtggccttctgcgggattcgcgggggacagttggccgaggccgagctcgagcgagacggagtttgctccgaggccggggccggcttcggtgaaactagaatattttatgaatttttaatattgcggtattggttctacaatgtccttttgaacattgaagtgactccgactttaatcctcactggatttggtgcttttattgctttatggatcctatcttctgttgttgctgcagttgattcagtccccctgctcccaaaattgctggaattaataggaactgcttacacaatttggttcatcgcacggtatctccttttcaaggaaagcagagatgaactgtttgcaaagttcgaagatctcaaacagaggattatttga

SEQ ID NO: 21898 - DNA, 1734 bp, Zea mays
  Peptide Sequence Number=SeqID_63677
atggcgactctcaaggatctcctaccggcgcccaagacgtcggcgtccaccttctacgaccatagtagcgacccctggttcaaggagcggtacggcggggagtcggcgcaggcggccgcggcagcgaggcccgcggccgccgccaggctcatgcctccgtacgggaagcgagcggggttcgtgccgagacggccggaggacttcggggatggcggcgccttcccggagatccacgtcgcgcagtacccgctcggcatgggacgccgcgacgataagggcgggtccaggatccttgcgctcaccgtcgacgcacacgggagcgtcgccttcgacgccgtcgtcaagcagggggagaacgcaggcaagatcgtctactccaagcatagcgacctcgtgccgaagatagccactgccgattctcaggcgatgtcagacgacgacgaggagcagaagcagatcgaggagaccactgaacggaccaaggccgccttggagaagcccaagaacgtgccgactcatgattctgagtccaagttcatcaagtataagccgtcccagcaatccgcggccttcaattcaggtgcaaaggagaggatcattaggatgtcagaggtggcggtggatcctcttgagccaccaaaattcaagcacaagcgtgtgccccgggcatctgggtcaccacctgtgccagtgatgcactcgcctccaaggccggttactgtgaaggatcagcaggattggaagatcccgccttgcatttcaaattggaaaaacccaaagggttacacgatcccacttgataaaaggttggcggctgatgggagggggctgcaggaggtgcagatcaacgataactttgcaaagctttctgaagcattgtatgtggcagagcagaaggcgagggaggcagtacagatgcgctccaaggttcagagggaacttatgctgaaggagaaggagaggaaggagcaagagctaagggctcttgctcagagggcacgcatggagaggactggtgccccacctgcaccatcaggtgtgcctgctggtggcggcaggggagcacgcagggagtctagagaagagagggaagcacggattgagcgtgataaaattcgtgaggagcgcaggcgcgagagggagagggagaggaggctggaagccaaggatgctgcaatgggcaagaagagtaagatcacgagagacagggatcgtgatatcagcgagaagattgctcttggtatggcaagcactggtgctgcaaaagctggtgaggtcatgtatgaccagcggttgttcaaccaggacaagggaatggactctggctttgccacagatgatcagtacaacatctactctaagggtctcttcacagcgcagtccactatgtccacgctatacaggcctaagaaggacggggattctgatgtatacggtgatgcagatgaacagttggagaaggttatgaagacagagaggttcaagcctgacaagggatttactggtgcttcagagaggactggcaagcgagacaggcctgttgaatttgataagcaggaagaaaatgatccgttcggtctggatcagttcttgactgaggtgaagaagggtaagaaagctgtggagaagattggcggcggaggaagcatgaaggcgagtggtggatcctcaatgagggatgattatgatggtggatcagggaggtcgcgcattaattttgagagggggcgctga

SEQ ID NO: 21899 - DNA, 492 bp, Zea mays
  Peptide Sequence Number=SeqID_63678
atggcggggtttttcgcgggggctggcgggcatttgatggccgaggcgactaggcgaggggcgctcggcggcaatcgcgccggtgagggatgggcgagggagaagggagctgacagtgtcttttgtttcttaaccaaaaattctctaaatgaacttggtgataaatatggcctatgtgaggtgctccaaactattttaagtggaccgggaaagggggataccccggaaaggatccttccctatgaaggaaccaggctccgagcctccctactgatcagaggttcaaaggctggcccctcggaagggttcaacagccgcctcagagcacgtgggctccacacccactactggtcagaggttcaaaggccggcccctaggaagggttcaacggccgcctcaggctactcgggctccgcgcccacttctgatcaggggttcgaaggctggcccccgaagggttcacagccgcctcagacacagagcgagggatga

SEQ ID NO: 21900 - DNA, 1926 bp, Zea mays
  Peptide Sequence Number=SeqID_63679
atgcccggcataccgagggatgtcgccgagcactcgctggacattcgagccggagctcgacccgtcaagcagcctctgtgccgattcgacgaggagaagcgcagagcgataggcgaggagatccacaagctaatgacagcagggttcattaaagaggtattccatcccgagtggctttccaaccctgtgcttgtgagaaagaaaggggggaaatggcggatgtgtgtagactacactggtctcaacaaagcatgtccgaaggttccctaccctctgcctcgcatcgatcaaatcgtggattccactgctgggtgcgaaaccctgtctttcctcgacgcctactcagggtatcaccaaatcaggatgaaagagtccgaccagctcgcgacttctttcatcacgcccttcggcatgtactgctatgtcaccatgacgttcggcttgaggaatgcgggtgcgacgtaccagcggtgcatgaaccatgtgttcggcgaacacatcggtcgcacggtcgaggcctacgtcgatgacatcgtagtcaagacgaggaaagcttctgacctcctttccgaccttgaagtgacattccgatgtctcaaggcgaaaggcgtcaagctcaatcccaagaagtgtgtcttcggggtgccccaaggcatgctcttggggttcatcgtctccgagcggggcatcgaagccaacccagagaagatcgcagccgtcaccagcatggggcccatcaaggacctaaaaggcgtacagaggatcatgggatgtctcgcggctctgagccgcttcatctcacgcctcgacgaaagaggtctgcctctgtaccgcctcttaaggaaggctgagtgcttcacttggacccctgaggccgaggaagctctcgggaacctgaaggcgctcctcacaaaggcgcctatcttggttcccccagctaccggagaagccctcttggtctacgtcgccgcgaccactcaggtggttagcgccgcgattgtaatcgagaggcaagaagaggggcatgcattgcccgttcagaggccagtctacttcgtcagcaaggtactgtccgaaaccaagatccgctacccacaagttcagaagctgctgtatgcagtgatcctgacgcggcggaagttgcgacactacttcgagtctcatccggtaaccgtggtgtcgtccttccccctgggggagatcatccagtgccgagaggcctcgggcaggattgcaaagtgggcggtggaaatcatgggcgagacaatctcgttcgcccctcggaaggccatcaagtcccaggtcttggcggacttcgtagctgaatgggtcgacacccagctaccgacggctccgatccaaccggagctctggaccatgtttttcgacgggtcgctgatgaagacgggagccggcgcaggcctcctcttcatctcgcccctcgggaaacacctacgctatgtgctgcgcctccatttcccggcgtccaacaatgtggctgagtatgaggctctggtcaacgggttgcggatcgccatcgagctaggggtcaggcgtctcgacgcccgcggtgactcgcaactcgtcatcgaccaagtcatgaagaactcccactgccgcgacccgaagatggaggcctactgcgatgaggttcggcgcctggaagacaagttctacgggctcgagcttaaccacatcgctcggcgctacaacgagactgcggacgagctggcaaaaatagcctcggggcgaacaacggttcccccggacgtcttctcccgagatctgcatcaaccctccgtcaagatcgacgatacgcccgagcctgagttgccctcggcacagcccgaggcaccctcagctcggcccgaggcggcctcggttcaacccgaggtactgagagcacctagaggggggggtgaatag

SEQ ID NO: 21901 - DNA, 282 bp, Zea mays
  Peptide Sequence Number=SeqID_63680
atggaagctttgccggtgctggagaaaaaggaatgccgaggacccagcggatcggtggcgagctttaggtcgcggtgccggaagtaccgcagatcggaaagccgcagcgaagattgggacgtgggtgagcaggaagggaagggaagcagcaggagggtttctatcaacgaacagctagcgccctgttcattgaaaaatgtgggaagggagagggggacggggagggggagactgcttcgactgttgttaattaaagaaataggtgagcaagatggatcctaa

SEQ ID NO: 21902 - DNA, 240 bp, Zea mays
  Peptide Sequence Number=SeqID_63681
atgacggagcgcgtccgtcaagcgagaccgcatgtgcccagcagcgcgggccgctacggcagaggcaggcggcaggccaaccaccgcgccgcctgggtgtgggtggcaaagcacgacttcttcgccgctgctacctttgtcttcgtggctcctgacagtggctctgttgaagctgctccttttgttttatcagatttgcttgttggaaatgaagtacttcgtcaagacaactggtcttag

SEQ ID NO: 21903 - DNA, 687 bp, Zea mays
  Peptide Sequence Number=SeqID_63682
atgagaggcggcgcgaagacgagaacgaggacggagggggctgcaatcgccggccgcgccttttatacggatgggcagaccatcctaatctctcgtgcggcctctgcgactgggaaaccagcgtctcatcccctttccccccctgatacgacgcttcctctcccccttctgggcagcgacgccttggggagccgccgcacgctccgctccctgcacctcatccccttcccctactccccctcacacgacgtgcggcggtgcgaggaccggccctggcaccagcgccctcggtgcctggagcagtgcagggaggaggagcgggagaagcggcaagagcggagcaggcacgaggccgacgaccgcagcggcgagggctcgtcggaggatgagcgcgagcaggagaaggaggagaagcagaaggaccggcagtccggaggcatgccagtcggggcgcaggacgaggactgctaccggtggaacgccccggacatcctctgctaccggtgcgactcgtgcagggccggcgtgatggagcaggtgcgccaagactggcacaagatctttgtgctcgacgtcgccgtgctcgccgctctcgtctgcatctgctcatgcgggtgttgtgccttcaggaacgctcgccactcccggtcccagtacccatacggggtggcgatgatggggtggtag

SEQ ID NO: 21904 - DNA, 363 bp, Zea mays
  Peptide Sequence Number=SeqID_63683
atgccctacacgcctacacggacagaaaggataggaagagaggctggagtagtggacccacctgtcggcacccggattcccagcctgggctacgtagacgccggggtggattgggccgcacggaatgaagaacgatcgtggatgggggatgctgaacctggtagctggccttctagagagcacaactacaattatcagcaaattgtagtttggatcagtgataaaaggaactcattatggtttgatatcaggaggtctgcttttggaaacatcttcagtgctaatttgagacaagctcctgcaaggcaagctgcactgggcacagggataccaaacactgctgtttgtgctttttatgattga

SEQ ID NO: 21905 - DNA, 366 bp, Zea mays
  Peptide Sequence Number=SeqID_63684
atgaggataagggagcccaagacaacgacactgatatttgcttcagggaagatgtttgcgcgtatcgtccagaagctcggttccccagctcggttcaaagatttcaaggtccaaaatatagttgggtcatgtgacctcaagtttcctattcgtctggagggcctcgctttggccagtggtttgtctgccacttatgaaccagagatcttccctgggctggtctaccgtatggtggaccctaaggtcgtgatcctcgtcttcgtctccgggaagattgtcctcacaggagcaaaggtgcgggaagagatatgcgcggccttcgagaagatacacccgatgcttgtgcagttcaggaaacggtcgtag

SEQ ID NO: 21906 - DNA, 1866 bp, Zea mays
  Peptide Sequence Number=SeqID_63685
atggcggcgggaacggaggcctttgaggcatacttccgccgcgcggatttggaccaggacggccgcatcagcggccaggaagctgtcgccttcttccagggcgccaacctgccgcagccagtcctcgcccaggtatggatgcacgccgatcagaacaagactggtttcctcggccgcccggaattcttcaacgcgctgcgcctggtcaccgtagcgcagagcgggcgtcagctcacgcccgacatagtgcagtcggcactgtatggtcccgccgcggctcgaattccagctcccaagatagccgcgggggcggctcgttcacagatgggtgctgcgggggcgcctaggcctcaggggagcgctgcgatgacgcccgggcaggttggagcagctcagatgaatccggctggcacaccaaggccccagggaagcggtatgatgccgacatctacccaagttagtatgctgcaggtgaaccctggtgctgctccaaggccccaagggatcagttctatgatgccagctgcgagtcagggtggtgctctacaagcaactcaatttgctgcaccaagggcaatgcagccacagcctcctaacctgggaattactcaacagcaaccttctagtaccggtttcatgcggccaccacaggttggaactccagcagcttcatttcaagctcaagcgcctggaatcaatcaaggtttggtccatggaggcagcatggaaggatctatcagttggcaaggcggtaatgctgcctcagttggaggcatcccacgagctataccaggagctgctccttctcagacaacacgtggatttggtccaggtttacctagcacaatgggcatggtgcctggacaacaggtacaagcaatgtcttcatcgccattgcctccacagagcaacagtgctgttttgcctcagaattcaaaagctttggtactgtctggaaatggccctgccagcagctctggatcaagcacagacatcttctctgcacttacacagccaaagccaagcttatctgcacctcagacaagctcgattccgagttcatccagttttatggccacgcctactggctcccagaacctgactaatctcactcagtttggttctttgcaaggtagcagccaacctcaacagactcagcctatcgtaaagtccattcctgctccagctacacctgttgtctctgctgggatttctaattcagcttctcaatggcccaaaattactcaaccggacatccagaagtacatgaaagtctttggggatgttgatagggacagagatggcaaaataactggtgcagaagctcgcactctgttcctcagttggaggcttccaagggaggtcctgaagcaagtgtgggatttgtctgaccaagacaatgatggcatgctttctttgagagagttttgcatcgctctttatttaatggagaggcaccgagctggaattcctcttcccccagcccttcctgactcttttaggcatgatgagacactgttacgagttacaggcttgccttcaacagcatacaatagtccatcatggcaacacaatcaagggtcaggaggattaccacaaagaggccctggagcacctggggtgcctgctggtggtgtgcggccacccttgccatcacatttgcattcacaaactgatggagctagcaaacaagggcaaccaagatctcacatgcctgggatggataatcatgtggtaattcaaggaaacaaagatgacaaaagtgcgctgaaccaggctgcacaggaggtggtggatgctcctaagaaggtgggatctgggtttgaagtgtggatcattatgtgtgtcatatctggactggtttaa

SEQ ID NO: 21907 - DNA, 780 bp, Zea mays
  Peptide Sequence Number=SeqID_63686
atggccgctgtgccgtcggggttcctcctcatcactggcccgccgggcgtggggaagacgacgctggtcatgcgggtgtttgaaaccctcagaggctcccacccgaacctcaacattcgcggattctatacccgtactgcgttgcctcgccttctcgaactccggagaggtgagagagggcggagaaaggatagggttcgaggttgtcacgctcgacgcccggagtctgttagatggcctaccgtcgggaaatacaaagtagacgtagcatccttggaatcattagcagtacctgagctgcaggttaaggaagaaacagatctcttcatcattgacgaagtgggtaaaatggagctgttcagttcagcatttttccctgcggtaatgagagttattgaatccaatataccagtgttggccaccatacccattcctaggcagggccgggacattccaggagttgcgaggttgcggaatcatcctggagcagctgttttcaccttagacactggtaacagagatacgatgagagatactatatgcagtcagctaaggagtttgttgcagaggctgtttaatggagaagacatcatgcagtgttatgggtcacagtctgctgaatcgtccggcagcccactgagctcccagttccccctttctctgagccctagcggaaaggcgccattaaacgccaacgctgcgagctttgtttcgatgaaggcggaaagcgcaagggcaaatctcacaggagatacgctcgctactccgttctttgtctaa

SEQ ID NO: 21908 - DNA, 918 bp, Zea mays
  Peptide Sequence Number=SeqID_63687
atggcggccgtgcagcgcctcctccgggcagtcgcccccggtggctcggcagcggcggcggtcaggaggcgcatgacgtcgcttgcgccggagcaggcgccgtctgcggccgccgggttcccattcgcggcggagcagagagcaaggcggccggtggcggcggagaggaacgtgcagtgggtgttcctgggctgccccggcgtgggcaagggcacctacgcgagccgcctgtcgcgcctcctcggcgtgccgcacatcgcgacgggggatcttgttcgcgacgagctcgcctccaccgggccacttgctacgcagcttgctgaaattgttaatcaggggaaattagtttctgatgaaattatcatcaatcttttgtccaaaaggcttaagaaaggagaagaccagggagaatcaggatttattcttgatggttttccccgtacagtaaaacaagcggaaattcttgatggcgttacagacattgatatggtggttaatctgaaactaagagaagatgttatagtagagaagtgccttggcagaaggatttgcggccaatgtggaaagaacttcaatttggcctgcattgatgttaagggtgaaaatggactcccaccaatctacatggcaccactgttgcccccaaacaactgcatgtcgaagcttattacccgagctgatgataccgaagaggtggtcagaaatcggcttcagatatataatgacatggtatggctctatgtgcaattcatacttaccattgataataaaatagtcaacctgtggaaggtttctaccgagagcagggggaagctcttggaatttgacttgcctggtgggatccctgaatcttggccaaagctgctccaggttctaaacctcgaggaccaagaggagttgaggttggctgcagcgtag

SEQ ID NO: 21909 - DNA, 1242 bp, Zea mays
  Peptide Sequence Number=SeqID_63688
atggacgccaccgtcgtcgccatcgccgacgaccatgatgactccgactgccgccgccccctgctcgcccagaacgaagagatccacctctacacagagccccctaaccgtcaacatcctccactggatgctgcggcgacgcagctcgaggagcagcggaagccggagagagtggcctctctggacgtgttccgcggcttcaccgttgccatgatgatactcgtggacgacgccggcgggggcgtggccgggcatcaaccacgcgccgtggttcggggttacggtggcggacttcgtcatgcctgccttcctcttcatcatcggcgtctccgccgcactcgtattcaaggtaatgttcgactgcagaaaatggcaaacaagacagctgcaactaagaaggctgcaattcgggcttcaaaacttttcatattgggtgtgattttgcaagggggatacattcatggacgacacaaattaacttatggtgttgatttggatcatattcgatggctaggtgtgttgcagaggatagctattggatactttgtagcagcaatgtcagagatttggcttgtcaacaataatttggtggattcacctgtaccatttgtgaagaaatacttcatagagtggatagctattggatactttgtagcagcaatgtcagagatttggcttgtcaacaataatttggtggattcacctgtaccatttgtgaagaaatacttcatagagtggttcatggccatagctattacagtactttatgttgccttggtatttggcctttatgttgcaaactgggaatttgaaattcaaactagcaattcaaccctttctatcccaagcaattcaattgaaacaaagatgatccaatgtggagtcagaggtagtcttggaccaccttgcaatgcagttggcttggtagatcgagttttgcttggtgaaaatcacctatataagaacccagtctacaaaaggacaaaggaatgcagtattaattctcctgattatggaccacttcctccgaatgcaccagattggtgtctggctccatttgatcctgagggtttattaagcaagcctttgtatacagtgaactacatgctactcactggaggagtatctgggttcttgttgctgctgttgtactacatagttgatgttattcatattaagaagcccttcgtactattccaatggatgggcatgaacgcacttatagtctatgtctcgctgctt

SEQ ID NO: 21910 - DNA, 204 bp, Zea mays
  Peptide Sequence Number=SeqID_63689
atgggagccaagtcggcgataggcccgtggcggggcacgaggttaatctcgggcgtctttcaaggcgatgcatggcatcgacgggtcgagggcgtccccagcgctgctccaatcactcaccggagcgcggcagtcgtcctgggaacactcctcgtcgtttgtagaccttctcgctacacggttaactttgatgggatccaatag

SEQ ID NO: 21911 - DNA, 534 bp, Zea mays
  Peptide Sequence Number=SeqID_63690
atggtggctggcacctatgacatgcacggttgtgaggacatggcagagcagatcatgttgtcagcatggttgatggctggcaggacacatgtctacgtgcttcctaatgagcccgagcttgtcgacaccgagatgtggaggctgaccaacgtcgtcgaggggctagggtcttcgctggcccgccacttcgaggctgaggtggttccgcctcctccgtcgctgactgctgtcagcttgtacgttcctggctttaacaccttggcgatgatcaagggtccttcccaaggaggaacacctttcgtggtagcgtcgaagggactgttgatatttggtcgaatgatggagtgctacttctcgagcttcctccagctagtcaagcgaatcttcacagttgacttgattgttgggttcgttagttgggaccccgaagcgatggatgatgtccgtgaagaatgctaccgcatgctcggatttgatgttggcgaggggtcggacctcgatccacttggagaatttgtcgatggcgaccatcag

SEQ ID NO: 21912 - DNA, 570 bp, Zea mays
  Peptide Sequence Number=SeqID_63691
atgggcggacccacagggtggtccgggtgggccctggcacaccctaagccaggtccaccgggaccccacccggtcattcggttcggcggacgtccgactgctgttccaacttccatctccgaatctccgatcgttcggcttcccacagccccaaaacgatcgatcctcctgcgcaagacggatgttcctagcggctggcttcctgcgcggccacaaccacaagacaatcccttctcctgcgcggctattcctggcgactggcttcctgcgcggctgaccggctgttccgggcttccagctctcgtctcgtctcgcgaaatccggtccgccaagctctccctctcctctctccctgcccgcaccggagcgccgctcgccgagccatcggaccatccatcgtccgcaccctcctcggcgttcgcgccggagccccgcccagaccgtctgcgtccgccatccacgccctcgccgcgcgcacccgagtttgcctgtcttgccgcgccgttcgccattcgccgtactgtctgcaccctgccccatcgagcccctgctggccgagcctcgccgtag

SEQ ID NO: 21913 - DNA, 270 bp, Zea mays
  Peptide Sequence Number=SeqID_63692
atgcctcctagactccgcctcctgctgaggcgaaggggaagagtcttgttgctcctgctcttagcgtcggcgctcctactccttgtgcaggtggtgatgcagtctctacaggtggctagactgacctatcactatgcggcgcggagggcgctccacaaggcaagaggagctcatcgtagtcctggaaatcctcaaagtcctccatgttgcctgcatctcctcctgagcattgaatacagtggggacaacctagggtggagtggtttttga

SEQ ID NO: 21914 - DNA, 534 bp, Zea mays
  Peptide Sequence Number=SeqID_63693
atggcgggcttaggctgggttactggcctgctcgcggtgagggtcttgggcactgaggaagggctcaagcgaactcggggtgacacagcggactcagccatgggcacgacaccagcgcagaggctccagagggtgcggtccgcggcggagcagcccaatggcggcgcaaatcactctggtgagcgattgcgtggacaacagggcattacacaggaaattaagggtgtgggggagttgctcacctcgagaggggactctggagcgcttgagcaacggtggggacacatggaggccttcggtcgacggcagcggagctccggttgcacagggagaagaccggtgagcgtggactgggcaaaacagaggggctgggggcaaaccagagggtgtctcgcgttgctggcaaggagacggagctcaccaaggcaacagacgcgacagaagctcgacgacggtgaaggaacagacggcggaccacagcgaagctccacgggcgcgcgcgcagtgcgagagagagcgagggtgtttggctga

SEQ ID NO: 21915 - DNA, 213 bp, Zea mays
  Peptide Sequence Number=SeqID_63694
atgcagaaacctgattcagatcggcgtgactctaagcacacctctcttcagcattggaacaccgtcgagtcagagctgagagggcaagaggaaaagatacaggggaagcagccgaagaagagccaggctcgggaccctcgggtgctggctcaccctcagaagcacccttggggcctgggttgtggcggaaccgaccgaattattccagcttaa

SEQ ID NO: 21916 - DNA, 1332 bp, Zea mays
  Peptide Sequence Number=SeqID_63695
atgggcaaggcgagccagtggctcagaaacttgttgctgtccggcaggaaagggaggaaggccaaggacagggctgaagccgactgccagtcggtgctgtccgcgccgctgccctcgcacgcgcaggcggcggcgacaccgcacgggagggagaagaggcggtggagcttccggcggccgggcgcggcagcgtccagctcccagggcccgctcgcgtcctcgtcgtcgcactgcttctcggaggcggagctgcatgtcgtcgtggtgcagcaggagcagggacagcagcaggccgcggccgccgccgtccctgaggcggcgtccacctcgggcacggtcgtcgcgcttccggcgtcggggaggaggacgaggaggaggaacgcccgcggcggtggtcgtggcggggaggccgccgcggcggcggtcaagatccagtcggccttccgatcgtacctggcgaggaaggcgctatgcgcgctgcgagggatggtgatgctgcaggcgattgtgaggggacagctggtgcggcgccaggccagcctgacgctccggcgcatgcaggcgctcgtctacgcccagcgccgcgcgcgcgccgagcggctgcgcctcctcgatgtcgtcgaggacgacgcctccaggcagcaggccgcctcagccacgccgccgaggcggcgctcgccgtcgccgcagcacccgcggtcctggaagccactggaggcggtggagaggcgtctagaggagaacgtccggaccgtggaggtggacgacggcgcgccgagggcgggcgcgcggcgcaacagctgcggccactgctcggcgtcgacgacgccgagccgcacgcccatgccgaaggccgagccgcgccagaaggtctcgccgtcaccgtcgccgtcggcgctgacggacgggagcgcgcggacgcccagcggccgcttggacgacgcgtccttcacctccacgtcggagccgatgccgagcctgcgcgcggccccgccgtcctacatggccaacacggagtcgtcgcgcgccaaggcgcggtcgcagagcgcgccgaggcagcgcctctcatcggcgcccgagacggcgccggcggccacggccgtgctgtctccgtcgtgctgcgaccgtccgcctagccagggcgggggcagcgcgcggcgcagggcgtcgctggacccgctggacctgcccggcggcgcgccgtcaaggcgcatggagcggtgcgcgtcgcgggcgcgcgcgaccacgatgtcgtcggtccccggcagcgagtgcgggtcttcgagcaccgtcgggcaccgcggcagcgcgcacgggccatggcttgggtga

SEQ ID NO: 21917 - DNA, 632 bp, Zea mays
  Peptide Sequence Number=SeqID_63696
catcgtcatcacaaggcgcacttcacaaggaatcatcgcggggctcgctcagggcgtcggagggccgcggccggccgtttagccggttcgagaccatcctggcgcacctctggcgcaccctcacgcgcgcccgcgcgctgagccccgacgagacctcgcagatccgcctgtccgtcgacggccgccaccgcctcggcctgcccgccgagtacttcggcaacctggtcctctgggcgttccctaccgcgacggtcgccgacctgctggcacagccgctgaagcacgcggcgcaggtgatccacgacgaggtggcccgcgtggacggcaactacttccggtcgttcatcgacttcgccacgtcgggcgccgtggagaaggaggggctggcgcccagcgccgtctgcaaggacgtgctgtgcccgaacgtgtcggtggacagctggctcacgttcccgttctgcgagctggacttcggcacgggcagcccgacctacttcatgccttcctactaccccagcgaggggacgctctacctggtgccgtccttcggcgacggcagcgtcgacgccttcgtgcccgtattcaagcacaacctcgaggcctttaaggaatgctgctaccacgtggagtag

SEQ ID NO: 21918 - DNA, 1737 bp, Zea mays
  Peptide Sequence Number=SeqID_63697
atgagactcctccttgacccaattgattaccaagttagtacaaggctggacaccgttgaaaacacagcggttgcggtgattccaaatggcccaagctgcaagaatgatcagggaattcagacccttgtgcagccccttgcacagaactcatggactaagcttgctgtggagatcgacagtccacaagctatgtctctggaccagttagccgatccagccaatagcacctgtgcacaagtaatccactcaaagtcagagatatgtagccacagatggctaccaggtagcagcaacagaaactgcaagaagcaaaaatacactaatgatgactttaagggaaaagacttggagatagatggtcctggaaatctatatatggatcaccaatcttccccaaatgagagacccatcaaagcagcagatcatgaaaacaattccaaggagtcaatgatgggaaatttaggggatgcaactgttcgagctgctgacctaattggttcaatggccaaaaacatggatgcccaacaggcagcaagagctgcagatacccctaatttctcttctgaagtgccagaagggaaagatgactttaagggaaaggacttggagataggtggccctagaaatttatatatggatcaccaatcttccccaaatgagagacccatcaaagcagcagatcatgaaaacaactccaaggagtcaatgatagaaaatttagaggagccaactgttcgagctgctgacctaattggttcaatggccaaaaacatggatacccaacaggcagcaagagctgcagaagatacccctaatttctcttccaaagtgccagaagggaaagttaccacttttattgcaaggtaccatacatctgcggcttccaatcaaggtgggacaggattggtaggtagctgttcgccgcatgataacagctcggaggctgtgaaaacggattctacttacaacatgaagtcaaattcagatgctgccgcaataaaacaaggctccaacggcagtagcaataacaatgacatgggttccactacaaaggatgttgtgacaaaacccagcacaaataacgagagggtgatgttgccctctgctattaaggctaatggatacacgtcaacattccatcctgtgcagcagtggatggttccagataatgcgacagcagggaaagcgaaggctgatgaagtggccaacaatgcaggcagaaatagtcatcctggtgacgtgcagagcaacctgacgcaacaacatcgtccaacccttcattacgtccattttgagaatagtggatcaggtgccctgcaatgtggttcctccaatgtatttgatcccccacttgaaggccaggctaccaataactatggtgtgaaagccgggagcaactcaggcagcaacaaggggcagaataatgggagtacagctggtgcgagcacggctgctgcaaatgctggacggacagatacagagatacgggctatcgataaaagtggacctggaggtggcagtgggagtggcaatgacacatatgtcagacggcttgctgcgagcatgacaccacgacaagaacagctaaagaaatatagagagaaaaagaaagatcggaactttgggaaaaaggtgcggtaccagagcagaaagaggctagccgaccagcggccaagggttcgtggacagttcgtgaagcaagctgtgcaaaatcaagagggagatggagagagatga

SEQ ID NO: 21919 - DNA, 315 bp, Zea mays
  Peptide Sequence Number=SeqID_63698
atgaggctgatgggaggtgcctgtcagcaactctccgtggacggagatgcgaggacgcctgcgaatgaccgcgatccggccggcctgctccagcatgatgatacggaaaaccagcagcagcagcaggcctgctgggagcgcttcctcctcaaggagactctcaacgtcttgcttgtggagagtgatgattcaaccaggcaggtcgtcagtgccctgcttcgttgctgcatgtaccaagccgaggaaggagcgctaggcgtgacagtggtgtacggactggattgctcccgatcggtggagcagggagagcggtag

SEQ ID NO: 21920 - DNA, 330 bp, Zea mays
  Peptide Sequence Number=SeqID_63699
atggcgcctcccgttgacgtggtcggcccgcgccctaggttgggcgatgtggaggctcctccgaggtcgaggtcgagtccgtcttccgtggccgaggtcgagtccgagcccctaggttgggcgaggcggaggccattggctgaggccagggcggagttcgagtcctggggtcgggcgaagcggagttcgtcgtcttctagggctgagcccaagtccgagccctgtgctgggcggagcggaattcgtcatcttctgcagctgagcccaagtccgagccctgggtcgggcggaacggagttcgccgtcttccagggcttagcccgagtctga

SEQ ID NO: 21921 - DNA, 345 bp, Zea mays
  Peptide Sequence Number=SeqID_63700
atggccaaccggagagatcttaagcgactccgggagaaggcagttgcaaatggcgcctgcaaaggagaagatgcacttgatcatcgcaactccacgtcgtctggggacgccccgagtgacctgtcgacccagggcgcccctaagatctcttccctcagggggcgagatctaggttccagcgaggaggaagacgaccctgcgccatcgcggaccgtccggtgcgacacagggaaggcgtcgctcctgcgtccaagtcgtggaccgtccggcccagagccgcgaaccgtccgcgccgcggcagtgggcattgccaggcggtacacccgaatgattggcgctgcctag

SEQ ID NO: 21922 - DNA, 234 bp, Zea mays
  Peptide Sequence Number=SeqID_63701
atgcccactgccgcggcgcggacggttcgcggctctgggccggacggtccacgacttggacgcaggagcgacgccttccctgtgtcgcaccggacggtccgcgatggcgcagggtcgtcttcctcctcgctggaacctagatctcgccccctgagggaagagatcttaggggcgccctgggtcgacaggtcactcggggcgtccccagacgacgtggagttgcctaggaattaa

SEQ ID NO: 21923 - DNA, 282 bp, Zea mays
  Peptide Sequence Number=SeqID_63702
atggccacgtttcgactcgccatggcggtggtgctctcctcctcagaacctcactggcaaaccatttttctactcgagcctgagaacgtacacttggggtcatatttaagctcggaatcccaccatcgcccggccctcctcgtcctcgaggccgcctcggcatccgcgcctcgctccggcgacgcagtcgcccgaacccacctcgcgcgtgtcgcttcgcgggaggagccagaccttgtctgtttcatccttaaacaaccatgggaatttaaaaaagattag

SEQ ID NO: 21924 - DNA, 1056 bp, Zea mays
  Peptide Sequence Number=SeqID_63703
atgccgggcgtcaggtcagagtccccctcgccggaggtaagccgcgtccggatggccctacccactgcttccgccaagatagccagtgccagggcgaaggtcggtgagagagccaagacgccggccaactcgaaggcgaagggacgatcggatgctcaagagaagcggggcaggaatggaaggctcgtcccgtcacttgggtgcatgagctcgcctcctctggtgccaattggcccggactcggagaagaggaggtgttcctggatcactgcaaactcggagccccactacgtcgcattccacgatggagaatggggagttcccgttcacgatgaccgaatgcttttcgagctgctcacactttcacaagccttaggcgaactcacctggccttctattctgagcaagagggaggaactcaggtgtgttagagtgttcactgatggatccagcctttgtaccagggagattttttgtggcttcaacttagtattggtatctgaattctcagagaataagataaacctgttgagatcaaatggaatcgtgccgctgtcagagcaaaagattcgcgcagttgtaacaaatgccaagcaaatacagaaggtggttgaggaattggggtcgttcagcaactactgctggagctttgtgaaccacaggcccatcgcaaacggcttccgctatgctcgccaggtgcctacaaagacgccgaaagctgaagccataagcaaggacttgatgcgccgagggttccagttgccgggatcgttaacgaccatctgtcatgttgcttcagatttcaggcttgcagccagcacaaggccagtgaaaagtgaaaacggtgcgagggcagagccagcattgcctgatagaaggttgggctcggcagcttcggagggttcagatatcagggaggacagtttgacagtgcattgggatgctactgagcaagtggttcatactgtatatgcgttgtataagatcgtgcagctttctggcgagtgcactttgattgggctagatgtaaaggcaactcccgctgttgttttctga

SEQ ID NO: 21925 - DNA, 807 bp, Zea mays
  Peptide Sequence Number=SeqID_63704
atggaagtctgcgacgagctgcggtcatttgaggccacaggcgtctaccgcctcaatggcacctgcaccagcgccggagccacttacctcgacccggaagcgaagcctttactattgaacgcacatgaatcactcgttaaggctaaacatctactggagtacatttccaagacaatcaaaggcaatgagcacacacttgatgcgggtagtggttctgagaataatttcgttgagcttgggacctcatggcgagcacctttctatgagatcactatttgcttccggaacccccatgttctgggcaatgaggaaggtagtccaaatcaagggtataatcttatagttgttgacccaccatgggagaatggatgtgttcggcagaaagaagtgtatcctacacttcccaacaaaaatttcttatatcttccagtgcaacaacttgcccatccaaccggagcgcttcttgttttgtggattacaaatagggagaaactgcgggcatttgttgagaaaaaactgcttccttcttggggagtggaagattccaccgtgttttattggcttaaggtgaaacctgatggctctctaattggtgatttagacttgttccatcacaggccctatgagtgcctcctccttggctacataaatgttaatgcaaatgctaagaaagggtcaaatttcaagttgttagaaagaagccaagtaatcatgagtgtccctggtgctcactcaaggaaacctccccttgagagtatccttccttgcaatacacaaatgcaatatgacctttttagctggatatag

SEQ ID NO: 21926 - DNA, 444 bp, Zea mays
  Peptide Sequence Number=SeqID_63705
atggcgcagggtgagcagctcaggagctcgcgtgggccccgtcggatctcggggcggccgagcgggcacacgcgcaggcagcggcggaggaagcgcaacgggcgcgaggataggcggtgcgcggcgaggtgcgggcagggcggtgaaaagtcctgccccacctccgttaacgcgggcgaccgccccgccatactgcatgtcctgtccaaggcctcgccgccgcccgaggtgtcgccgttcaagccgcagtttatgtggtcgctcgagggggagctcaatttcggctcagcgacatcaagtggaccacgaccggcaccagccacaccgacgcccgacggcacgtccacgcaggccacgcgcaacacctcctacgatagcttccggtcgcacaacacggccgacagcagcgacggttacttcctcgccctctcatccggtcgttga

SEQ ID NO: 21927 - DNA, 255 bp, Zea mays
  Peptide Sequence Number=SeqID_63706
atggcgacgcggttggctgcggccgcggccgccacgttcatgcggcgcctggccccagcgcgcccaccagtacctatcctggcggcagcatctacggcggaggcggtgacgtgcgggcgcggggacaagaaaaccaagcgcgggaagcggttcaagggctcctacggcaacgcccgaccgaagcgtgagaagaagattgagcgcatcaaggaccgcgtcgagggttatatcttcactgtagcaactagtttgtga

SEQ ID NO: 21928 - DNA, 657 bp, Zea mays
  Peptide Sequence Number=SeqID_63707
atggccatgatgggttcaacatcgaaaaagatgtacctctgccagaaccggcggcagccgacgctaaagcgcacggcaagggaacttcgacggcacgaacagcgagcagcgagcttcgcgcgcacaacagaggagctcgacaacacgcagcacgggcaaacgcagtccgagcaggggcgcaagctgcgcgcaggcacgcgcgcaggaagaatggaacgcgcgcgcagggaaaaacaccagagagacgcggctacgcgccatgggaacaggaagctcgcggcccgcgcgaggagtttgcaggggacccggtcaggaacgagctacaggaacaaggagcgggggcagtccgagctgagcgccatgggagatggtggtcggtgtcggtgttcctatccagcgaccggtggagctcagcgccttagaggagagaggaaaacagagatgccggtggccggacagagagagccgccatgggagatgggcgtagggaggagcagagccgaatcaggggctggggcgtggcacaggaggagcgagctgagggagaagaagcgcgcgcacggagccaagctcgacaggacgcggctgggaaggggaagatgcgtgaaagggagatggagcagagggagcggcgcgccaggaaactcagccgaatga

SEQ ID NO: 21929 - DNA, 424 bp, Zea mays
  Peptide Sequence Number=SeqID_63708
gtgggaaacaggtgggaacaactcatcctaccaagaatgtgatgacaacgtcggaccactggaacttcttcatatggatctcttcggacccgttgcttatcttagcaccgggggaagtaaatatggtcttgtaattgttgatgatgtttcccgcttcacttgggtgttctttttgcaggataaaacaaaaactcaaggtacattaaagtgcttcctaaggagagccaaaatgagttttgagctcaaggtgaagaaaatcagaagcgacaatggatctgagttcaagaatcttcatgtggatgatgtggtgtcccttgaaagctgccttgaattcatcccacattactatatggcctgctggttgcctgctcctacatcatgggaggctgtggtggcggcggaggaacttgctcgttctgtgtaa

SEQ ID NO: 21930 - DNA, 719 bp, Zea mays
  Peptide Sequence Number=SeqID_63709
atggatgactctgggtacgtccgttacatggccgaggctcaggctacgctcccgaggcgcattcaatgcgaggagcgcctaacaccttatcctgacacatgtgcctcagttggcaaggtcgaacctcaggcgcaacaggaagctccgcctcgcccgaccttgggcctcggcctcaggaggaggtctccgcctcgcccgaccctagggctcggtttcgccctcggcctcggaaggtggtctccgcctcacccgaccctagggctcggcctcaccctcggcctcggaaggtggtctctgcctcgcccgaccccagggctcgacctcgacctcgggaggaattgcgtcctcgcccgacctcggcctaaggaggagtctccgcctcgccctaccttgggctcggacagaccgcgccacaggggatacatcattaccctacccctatctagctcaggctacagtggaacaagaccggcgtcccatccaggctcaccccgccccgacagctgtgcttctacagggctccagcgctcctccgacggccacgacaccgcgctggcccctcggaagggttcgacggccgacccagagcactcgggcttcaagctcattactgatcaggggttcgaagaagggttcgacagccgccttagagcacgcagagcgagggatgaccctaggtacgtccgttacatggctgaggctcgggctacgctcccgag

SEQ ID NO: 21931 - DNA, 546 bp, Zea mays
  Peptide Sequence Number=SeqID_63710
atgatgaccgcgtcaaaaaagggttcgacggccgccccagagcactcgggcttcaagctcattactgatcaggggttcgaaggctggcccctcgaaagggttcgacagccgccccagagcactcgggctccgcatccactactgatcaggggttcgaaggctggcccctcggaagggttcgacagccgcctcagagcacgcagagcgagggatgactcttggtatgtccgttacatggccgaggctcgggctacgctcccgaggttgtggaaaccaaagcagaaggcgagcagcagagtaaagaaccactgccgggccctcttccagggcaagcaccacctttggcaggcgaagcaggcgtcgtttcacctccgccatgatgaccgcgtcaaaaaagggaccgaaaaaggggacatttcgaaagggatccttcttcgcgaaggaagcgggccccgagccctcctactgatcaggggttcgaaggctggccccgcgaaagggttcgacagccgccccagagcactcgggctccgcgcccactactga

SEQ ID NO: 21932 - DNA, 216 bp, Zea mays
  Peptide Sequence Number=SeqID_63711
atgggcgccgccaaccatggtgctcgcctcttccagtcgttcctatctccagcgctggctgccatctcctccacgagcagcacgacggggcagacctatgtcctcgacgcgcaccagatgtttgatgggaggttcgttacacgtgatgcggaggacaagagccgagttgatctcaaaatgatgctggtgaacgaaccagcggaatggatgatctga

SEQ ID NO: 21933 - DNA, 168 bp, Zea mays
  Peptide Sequence Number=SeqID_63712
atgggcgccgccaaccctggtgctcgcctctcccagtcgttcctatctccagtgctggctgtcatctcctccacgagcagcacgccggggcagacctatgtccttgacgcgcaccaggtgtttgatgggaggtttgaactagagttcatcattactttccatccgtga

SEQ ID NO: 21934 - DNA, 243 bp, Zea mays
  Peptide Sequence Number=SeqID_63713
atggcaatgaatcaggcgatagacgaggtatctacagcggtctactgcgatgtgttatcgctcccaaatacatggcgtccaggcggcaagcgtcgaactccggcgatggtcatctcgactggtcgcagggaaagtgggggtgttacatccttccccccacaaaagaatctcgtcccgagatttaaggtcttagggttacatgaagctaaaaacttaggaaattttttctctaagaaatcttga

SEQ ID NO: 21935 - DNA, 213 bp, Zea mays
  Peptide Sequence Number=SeqID_63714
ggctttcattcaagatttttgaagatctatctagaacttccaccaatagtccaaccattacaaatggaagaggatctagagcaactgaaagtttttgaaaacagctatcggatgaagttcaaaaatgaactagcggatgataaatatttaagaacggaggtgatcaaagtggagcaaaatgcccgtggtgtggatgcacctgaggtgcattga

SEQ ID NO: 21936 - DNA, 423 bp, Zea mays
  Peptide Sequence Number=SeqID_63715
atggggtcttcgcgcagtgggcccacgcaacaaccagccgcggagctcggcgtctgttgcgaggattccggcgtggttctgttgtgtgcgattgaagaggacgctcctgacatcagggtcccacgtgacataccatcatggataaaaatattgacctatgagacatacttacacaattttactgcattttctgaacttaatatgtttgtgaaccctgttatggatggctactgtagtgtgaaccctatagcctgggcagttcctacaaaacatgagggcgatgctagtgaagaagcttctctcgccgatgagacacttgcatcagaagtagtgctaacccggaagaggaaaataggaagctctttgtcagtagagccaaaccatctctttgatgaatttgaaccaaagttcgaggatgcttaa

SEQ ID NO: 21937 - DNA, 420 bp, Zea mays
  Peptide Sequence Number=SeqID_63716
atggcggcggcggaactcgaccttgtcgtcgtctcgctctcggcgtgctgcgtcattgcaccggagggctttggcgaccacggaactaccatgcgccatggccgggccaagccatcccctgcaacgtcggtggggcacccatgtctctgttcgcttgggcagcgagttggagggcgcgcgaaccatgaggggctggacggttattggcgttggcgcaagggcggtcaagctctcgggaatcgctcgccatcgcactgtgggtgccacagatccgccgcgcgcgttgtgcgaggctcggagtggtttgaatcgaagattagaaggtcgcgataccccttctcaaatgaaatccgagccacaggttttagatctgacggcagtcgtagcttaccgattcatacgcatcgggatctaatctaa

SEQ ID NO: 21938 - DNA, 240 bp, Zea mays
  Peptide Sequence Number=SeqID_63717
atggcggagggcattgcgcggcggggttacaccgctgtcaccttcgacatgcgcgacgaaggtagaaatgctttttatccatttgttggctcaatttgttcatttgtcactgccatcattggcactattggtaggtttttgaacatgtgggttctgagagagtacttggagattgaatttaagattctggaaccattctgtgagtctgatattgagaggctaatagatggcacattatag

SEQ ID NO: 21939 - DNA, 654 bp, Zea mays
  Peptide Sequence Number=SeqID_63718
gacgacggtgtggggccgaaggaggatgaggagggcatagggggccgatgttgcagcagtgtctggtcggaggtcgtcgaggcgtcgtgcgtcgagtggcggcacctggtcggaggtcatcgaggtgtaggcctgcagcccccgagtccgaaatcgttggacggggaaaggaaagcgaaacaagccacgctaagcaagatgcaccgaaaccctcgcgccgtcatccgcgccgccgtctccctcacccgccggccccccgccgttcctgccgcggaggctctccaaaccctgcctaaagcgacgccctcgcctgcgcttggggcgtggcggccagaccaggcggtggggcctttgggtagcgtcagccgccgccgcgccttctcctcctccgcggcagagtatggcaaggatgtggacgaggtgaaccgcaagttcgcggaggcgcgggaggagatcgaggcggccatggagagcaaggagacggtctacttcaacgaggaggcctccatcgcgcgtgacgccgccaacgaggcgctcgctgctttcgacgcgcttttagcgcgcctcccgcccaccgacgccgacgcgctccgccgctccatggggctaaagatggaacaactgaaggccgagctcaagcagctcgaggactag

SEQ ID NO: 21940 - DNA, 417 bp, Zea mays
  Peptide Sequence Number=SeqID_63719
atgttggcaaagtcgctcgctgctcgatggttcgtgcaaagcacgacaaaacacaatggattatacaagtttgggccgctcaagcaagtaataccctacatcttgtgtgctctgaagatgggtcaagaaggacctacttcattaaggctatatgctttcacatgtgaagagaatagaaatatgaagggcaagaagaaggttgaaagttcaagagaagaagaggaatctgaagaagaagaagaagaagatggtgatgctgaagaagatgatcaaccctctacatcatcctccgaatatgatgatacaattcgacaggtcgaaaaggtggagggaggatgcttcacatgtgagaaggaccacttccaggaaaattgcccaaacaaagccgcacccaagaagaggagaagcaaagattga

SEQ ID NO: 21941 - DNA, 282 bp, Zea mays
  Peptide Sequence Number=SeqID_63720
atgggctcgctgccgatgcggccaagcaaggctggcgcgagcatccaggcaaggacagcaaaggtgctcctgaagccgatgcaggcagggactaccttggcggtgattgaaccaaagcaagcagcattgcttctatccgcgccagatccagatccacgcagggaagacggcggcaagggcgcggcggcagtggtccgcgcacagaggacgccgcggcggcagccgatccgcgactgcaggatggtccgcgacggcagcaaggtccgcgacggcggcagctag

SEQ ID NO: 21942 - DNA, 450 bp, Zea mays
  Peptide Sequence Number=SeqID_63721
atggagcgtgcaggggaggggcacgcggctgggcaccagaggaccgagcagatgaacgcgactgcgcgcagggagcttcgacggcggcggcttgggatctccgaccatggggggtgggcatcagatagagagcagagggagcagggagaggggcgcggtgaaggaaaaccgagctggagcacgagcgcagggagatgggcgacctggcgtggttggggaaaaggcagggtgccggcgagctggaggaggagggagccggacgcggcaccagggagctcagcaagcgagttgagcgcgagctcgggaacgccaggctgggagccggcgcgcagaacagagaaccagggcgccgtggccatggggagagagaagctgggggagggagctgcattgctggagcaggacgccgagcaggaagcggaaggaagctttgggcgcgccagggagtga

SEQ ID NO: 21943 - DNA, 423 bp, Zea mays
  Peptide Sequence Number=SeqID_63722
atggcggatggcggtgatccatcgattctggcgagcaattcgccgccagacgatggctcacgagctcgattgcccacccgcgtgcgatccacacagaacggagatcccttggtcaactcctccgccaacgagcaacaccgggcgtgggatgagcacatggcggcgagatggaatgcagagggaaagcaacagcagcgcccgacgtgggaatcgctggagcaggcgggggaccttctctccctctcctatttctctcgcgtcggctggttcaatggtggctatcccgcacggctaaaatcttccaaggcgtgcgaagaacggtggcgactgatatttacatctgcgaggaccccgcaacggcccgagaagggggaagaaacgaggaccgggctcggtggtcgtccgatggccatgcgaggatag

SEQ ID NO: 21944 - DNA, 126 bp, Zea mays
  Peptide Sequence Number=SeqID_63723
gagtcccctatccgagcgctcgaccactactgccctcacggacagcagctcctgccggtggaagatcatgtccttggagcacgtcaggaatctcaagaagcttgcggcctagagccaaacggatga

SEQ ID NO: 21945 - DNA, 428 bp, Zea mays
  Peptide Sequence Number=SeqID_63724
atgcagtaccacctgctttgaagaacatcgcactaataacagaagcagatgagcagttggagacttggaggcgagacagaggccagtttcctagtgctactggtgcatcagttctagccggaattggcggcaccgcgtcatcccgtccgcctgaaacttgctcgaacaaaaccgaggagagcgagatgggcttttgcggtggcgggccattccgacgctacgccaccgaccggtcactcctcgcctcgcgccatcaggagtggacggaggctttcggctccccgcttctctgttgccaaggcccagccgagcacactttgactgttcgactcgactcgagcatgctgcagcttctgctgctaccgaatccgctcctgcaaaatcagttcccaaaaacccaaccaaaggcactcaaggtccacttttga

SEQ ID NO: 21946 - DNA, 510 bp, Zea mays
  Peptide Sequence Number=SeqID_63725
atggcggccgtctcctccaccgccaccgcctcctcgcagccggagctgccgacctccaccgcccaccctaccgccaatgccgccgccaacagcaggctggcgcggcggccgcggcgaaacaacagcttcgtgatggtggaggaggcgtcctatgccagcggcggcggcgacggcggggtggccaggacgaagagcctcacggaggacgacctggaggagctcaagggctgcgtcgacctcggcttcggcttcgcgtacagcgagatacccgagctctgcgggacgctgcccgcgctcgagctctgctactccatgacccggaggttcctcgacgagcagagggcgccgggacaggatgaggaggaggaggagcctgcgtcgccgccgctcccaaattggaggatctttgcaccggcatcggttctggcaggtgacgatccggaggaagtgaaggccaggttgaagtattgggctcaagcagtagcatgcactgtcaagctctgcagctga

SEQ ID NO: 21947 - DNA, 1659 bp, Zea mays
  Peptide Sequence Number=SeqID_63726
atgccggtgccccccacccaagttattgacaaaagcgcgcgcgtgtgggcgtggcgtgcatggccccggccgctgcagctttcctctcaggtctcaactctcaacttcctcccctcctgtagcagtgacactacgggtggatttggagggattgcgacatgcgtgcaagcctccacaggtgaattcctttccacaccctgttctctttataagcccccgctccccgcgcggctagctccatccatgcaacactctccccctcctctcctcctcgtcgtctatggtcttcgcgttcccaccgccaacaacaccagcgcgcctaggttgctagctcaccatggccttggcatccaccgcaagggcggcagcggcagtggcggcgacggcgattcatcagcaatgcgggggagcgacggccgcgcatacgcagcagcggcgagcccggtgccgcgcggcggctgccagcgtcgccgcggcgtgcgcgccggtgaaggcagtggggccacggcgcggggcgcggagcaccacgggcacggcgcccgtggtggcgggcatgtggcggcagctgcaggggtgcgacgactggcaggggctgctggatccggcggcgggcggcgcacccggtgctgcgcgccgaggtggcgcgctacgggcgagctggtgcacgcgtgctacaaggcgttcgacctggacccggcgtcgcgccggcacctcagctgcaagtacggccgcgggcggctgctggaggaggtgggcatggccggcgccgggtacgagatcacgcgctacgtctacgcggcgtccgacgtggcggtgcccaccatggagccgtccaccagcgggcgcggccgctggatcggctacgtggccgtgtccacggacgagatgacgcggcggctaggcaggcgcgacgtccttgtctcgttccgcggcaccgtgacgcccgccgagtgggtggccaacctcatgagctcgttggagccggcgcgcctggacccctgcgacccgcgcccggacgtcaaggtggagtcggggttcctcagcctctacacctcggtcgacacgacgtgccgcttcggcggcgccgggagctgccgggagcagctcctccgcgagcaggcgaggacgtcagcgtcaccctggcgggggcacagcatggggagcgcgctggcgctgctcttcgcgtacgacctcgcggagctgggcctcaaccgcggcgcgcccgtcaccgtcttctccttcggcggccccagggtcgggaacgccgccttcaaggcccgctgcgacgagctgggcgtcaaggcgctgcgcgtggccaacgtccacgaccccatcaccaagctcccgggcatcttcctcaacgaggccacggccggggtgcaggcgctgcgcccgtggcgcgcctcctgctacacccacgtcggcgtggagctgcccctcgacttcttcaggatgggcgacctggccagcgtccacgacctcggcacgtacgtcgcattgctcaagagcggcgacaaggcgggcgcggcctggcgcggcgactgcggcgttctggcgaaggtggtcgagttcgtggggcggcaacgcgcgggcgccttgccgtggcaggacgccgccctgcagatgggcggcctggtgcagactctggggctcatctga

SEQ ID NO: 21948 - DNA, 1542 bp, Zea mays
  Peptide Sequence Number=SeqID_63727
atgacgtgggagccgtcctggaataaccggcgccaccaccgccacgccgacttcgacgccgacgtcgacgcgcggtccgcggcgtcggccaggaatctcgccagcgccttcgaggaggacctggaggaggaaggggacgttgggtgggacgcggccgccaagcgccggagctgctcggatcaccggtgcagcgcgtcggtcgaggtgttgtccaagctgtcgaggagaaagaccagggctttcaaggacggtgatgggggcaggagctggcacaacggccgtgcgcatggccactgcttctcagatgcgagtgcgatcaccagtggcggtggtggctctgtgggtggtcgcactccagcacgccagggtgacaacagaacggagcagatgcaggagctgtacaacagcctgaccgcttccaacgagctggtcagggtcctggccaacgtcctgggccccgcgggcgcgctcaacccgacggcggcgtccgtgctcgcggcgctgcgctccgagctggacgccgcgcgccagctcgtgaagcagcagcgcaggcgcggcgtggacggcgaggagcgcctgctgcggaggcagctcgcggaggaggtgcgcgcgtggaagtgcaggcacagggagaaggcggcggcggccgcgcgcctcgtcgcctcggagctcgacggcgagcggcgggcgcggaggcgggcggagagggtggggacgaagctggcggaggcgctggcgggcgcggaggcgtcgctgcgggcggccacgcgggagcttgggctggagcgggcggcgagggcgcgcctggagaaggtgtgcgacgagctcgcctccagagacgttggcggcggcacggaggcggaggcggaggacgacgacggcctcaggcgggaggccgccgccaccgcgctggaggagttggaacgggagagggagatgctgcaggtcgccgacgagctgcgcgaggagcgggtccggatgaagctggcggaggcgaggctacacttcgaggagaagaacgccgccgtcgaccgcctgcgccaggagctcgaggccttcttgggcaacgaacgtcgagaacaaacgcctgcccaccatgaaatggccaaggaggaggaggaggaggatcaccagctgcagatcagaagagcggacaggaagaaaatgcccaaagctggtgacgacgacgacgactcggaaggcagcgacatcgagctgaacatggacggcaacagctggagctacaccaccacctccaggtccagggacacgtcggccaagaacgcaacgtcggcgcacggctcactttcggacagagcaacggaatgtggcgccgacgccggcgccttcgatcgtagatctgaagcgacgagagatgcgccggagcaggactgggcggctgacggatgcagcgacggcgggaccaccggcagggacgaggacgaggacgccgagaggtacgaggcgatcaagaacctcagggagcagatgctgaccgggccacgccttcctcttcctgtccaagggcgaggcagacgatga

SEQ ID NO: 21949 - DNA, 288 bp, Zea mays
  Peptide Sequence Number=SeqID_63728
atgggtagcgtgctcaccggggttagagatgaaggcgcagctatccatggtgaagggcggatctggggtggcggttctctacggcgaggaattctgccgataccaggcaccaatctgagcggcgcgacttcactcccttatccaatagccggagacaaccccacggctcgagacgacgcggatatgctccaggaactaaatgggggtgtggatggtggtcgaggtggggttgataagctagccggctccgagggaatcgtgacggacgttgcgcgcgagcaaaggtag

SEQ ID NO: 21950 - DNA, 150 bp, Zea mays
  Peptide Sequence Number=SeqID_63729
atgccaagacttcccctgtcactccggatgaagagggatttgggtgaggcaatggggttttggggtcaaagattgatccccgttttggtgcttgatgccaaagggggagaaaataaggccaaagcaacaaatggatcagctaccacgtga

SEQ ID NO: 21951 - DNA, 600 bp, Zea mays
  Peptide Sequence Number=SeqID_63730
atgacgaaggtgatgcttgccgaaggtgttgaaaagctcaagaaatggaaaaaaccaggggctagcgcaaaaagtacccaagactcaggacctacccgcggtggactgcgagttagttttctagaaaccgagggttctatttgcaaggtggcgcgaccgaaggggtatcctaagatcccaaccgttggatcggatccgagggaccagattagtttgcgttgcggaaggaggcgcccagggcatgagcatcgatgcctgctcaacggtggcgtcaaggaaggcgaggatggaggagagcaccacccacggtcgggactggaactcgacctcccctgctatctatggtattccggtggcggcccaattcgctgcccagtaccctacgcatcctcaccggtgatggcatgcgcaaaagggggtgcggcgaacgggtcacaacggtcagggtcccgattatatggctcgaggggtagcaacaaccaccccggaatccatgggttccgttgggaatttccggtcatggaggaaggagttcggcgagcaggcgcacctgccaagttggtcccaccatcagggaagacgacgcacggtgcagactga

SEQ ID NO: 21952 - DNA, 600 bp, Zea mays
  Peptide Sequence Number=SeqID_63731
atggccaaccaccgggggccgttgcgccatatccgccgccctgaccggctcaccgtgcctataaaacctgagccccgccccggtacccaagccatagccgagccaaccaccatgggagaatcgagtgtctgcacaggatgggttggggaaaggggtctgccgccgccgtcaagggcacgattggccacctcgtggacctcagcatggggttcggatagggcgccgggacgcttggaagccagggccgccgcgaattcgacaattatgcagaggaagccggggcatgaagactgtgcgctgggcgaagccaccaccggagtacgtggtgctgcaaacgccgtgcgccctcgtcgatccctcgtgaccaacctgggatgctcgcggagccttggggaaatagttgggtcagtgccaaccaaaatgggagccgggcgcgtcagtatttgtacgtcggtggtgctccgtcgtttcaataccgccatgcaacgtcgtcgggcgtcatcggcgccgaatccggggatgggttggggaaaggggtctgccgccgccgtcaagggcacgattggccacctcgtggacctcagcatggggttcggatag

SEQ ID NO: 21953 - DNA, 513 bp, Zea mays
  Peptide Sequence Number=SeqID_63732
atggagatcacgctcaagggtttgctgacatatcagagcgacttcgagaaggggaggccaggaatcgaagcggaggaggtggggatgatggaagcaccaaagtccgttcagaatctggtggcgaacgccatatcggcgcgcgtcatctccattgagaaggatggctccgtctccgacacgccagcaacgtccatgccttctccggcctcagatccgcggcatgataccagcttcaccaccacacgcacgtgtctgggcacagaccatgctgtcaccgccgcgagcaggcgcgccgccattgttcgagctgtaactggttccaaggggtgctacacggatgcaaagatgtgtgaagtcgtgacgaggccctgcgtcaggggagggatgcatagtgacgctgtcagggtgttcggtgaaatgaccggcgcctgggtcaagcccgacgaacacgtttatgccaccacaatcacatgtttgggcaggctacatgatgcagatcatgcacttcagtga

SEQ ID NO: 21954 - DNA, 459 bp, Zea mays
  Peptide Sequence Number=SeqID_63733
atggctgcgcccgtggcgacagcgccggcgaaggggggggggggggtcgcgcccgtgctccagcggggaggggaggggcgggcgcgccggcggcagacgcggtcggcgagcgcggatctgggccgcgccggatgggggcacaggggaggcggcgactgtgagaaggaggccgctggctgggaagtccgcgcccgcgccctgagcggagccggggaagggggacccggccgcaccgccgtgcgccggcggggaggggcggctacgctccgagcagaggagggtgctcggctgggggagctccggcgctggatggggaagagaggtggggctggcggctgctgggtggaagggccacctcgggagggatggatgagcctcccggggcggcggcgcggaagcaggtggctgtgggggtgggcagggaggaggtggttgtgggggtgggaggagaaaccctaa

SEQ ID NO: 21955 - DNA, 930 bp, Zea mays
  Peptide Sequence Number=SeqID_63734
cgccggagctcccccagccgagcaccctcctctgctcggagcgtagccgcccctccccgccggcgcacggcggtgcggccgggtcccccttccccggctccgctcagggcgcgggcgcggacttcccagccagcggcctccttctcacagtcgccgcctcccctgtgcccccatccggcgcggcccagatccgcgctcgccgaccgcgtctgccgccggcgcgcccgcccctcccctccccgctggagcacgggcgcgaccccccccccccccttcgccggcgctgtcgccacgggcgcagccatgggatccgctgccccagccccaccggatccgcgcgctccctccatgcggcatgccgccaaccggcctcccttgcgtggcccacccccgaggcgggtcctcccgtggatgccgccgccacggcgcgcggacgcacgcccaaccaccgccggctgcgctcccccacggccgtacctccctggttccggcgccctctcccttccccaccacgtcgtcgcggctctagaggcggatgtctctgccgagcaggccgcgaacgccgctgctgccctggctgcgcgtcccgccgcgcccatgggcgccagcacgccctcccctgccgtcgtcgtggccttccccttcctctctggcgccgacgtcaccggcccctacacgtccagcgacgccgccgcgtgcacggctagtccccccgcgcccacagcggccgccgccgctgcggccaacgcgcgcggctgggcaccaaccaccgtgcctccagcgtccaacctcttgtcctcgcgcttgcagcagctcagcgtccgcgccaaccggtcgctgttcggcgcgctgccgccgccgctggccagcatgcagtcgctccaggtggccttgctcccttccccaacactggccgccctgatccgctga

SEQ ID NO: 21956 - DNA, 498 bp, Zea mays
  Peptide Sequence Number=SeqID_63735
atggaagaaatggcacgaactgggcactccactagcggccaagcccaaagcaacgatgatcctgggcacacgagcgctagccgcaaccaattccccgctgcgcacatcatggcgactgagcgactcgcgggtgggacagtcgaccctggacagatcacaggcgtcgggcatggccaaaacacggcccacatgccgaggcctggcagcaatggccgagggactacaagccacatgctgacgagggccacccgttccccatctccagctagtggagttcccatggggcacgcgggtaccgggacatggcggatcggggcccggctcgtcgagtcgaggcaaggcaagggccctcattctcaaccggcgaccgtgtccaatgcacgactgaggatgtcgcgtcccctgctttcctcgctaccgatccctccatttccaggagacccatcggtcaaatcccctgcttgttcatgtacctggccatggcaacatcgtggctga

SEQ ID NO: 21957 - DNA, 240 bp, Zea mays
  Peptide Sequence Number=SeqID_63736
atgacgcacgccttccatcgtcgacagcacaccgtgattaatattaaagagtgggaaaggggcgccataagcgatgccgtcacccagcacgaggacaatgtcggtggaaggcggcccttccctcaaagagaccttgaaaggccttccgacgggggatgcatgcaaatcaaggatcaagcccttagaagaccacccgctcagaggatcaccacccaggactacgtccggttccggcactaa

SEQ ID NO: 21958 - DNA, 339 bp, Zea mays
  Peptide Sequence Number=SeqID_63737
atggtcagagactatgcagaggcatgcaaattaacaagactcatacaagcgcggaacaatgtgctgatggggcacaagggtaacacatgctcagatcttaacatgtttggcttccgagcaaactttctccagaccccaaggaaatataatatccgatcagatatgtttgagttcctaaatcagtttggcaacaagcaacaagtgtttggctcggtttctgttattgggagtctagaatttctttgggtggattatatggacagtgggtccgaagatgggagtgcatctaatgatgggagtaccatgttcctaattgtggagaaggggtcctccaaatga

SEQ ID NO: 21959 - DNA, 396 bp, Zea mays
  Peptide Sequence Number=SeqID_63738
atgaccaagaagaagattgcgacagcagagcggagcatcttcacagcacactgcaaccctaggttatcagtcatcgtttgtcttgataagtgccattgcaggcagcacaaagtccatagggtgaagaacccaactgcacagcagactgatacgaagtccccagagaagagcattgctacgaagatgacggtgatcatatccatgtatgcagacgtgtatgtcagaaggcacaggaaggatctgcagctcctgttcttcttcgtctgcgctgatatcatcttcgatggttcttctcatgctcttattgccaagttttcagatactatgaacacaaaatttgagatgagtattatgccgtccatacgcatatcccacaagcatgcaagcaaaggataa

SEQ ID NO: 21960 - DNA, 195 bp, Zea mays
  Peptide Sequence Number=SeqID_63739
atgtcgggcgaggcggaggcttctcctgaggccgaggctaaggtcaggcgaggcggagaccttctcccgaggccaaagctgaggctgaggcctggggtcgggcaaggcggagatcttctcccgaggccgaggcctgaggataaggtgtcagacgatccccgcattaaatgcgcatgcgatacggtcggttggtaa

SEQ ID NO: 21961 - DNA, 813 bp, Zea mays
  Peptide Sequence Number=SeqID_63740
atggccgtcctcctccgcagcacctccgccgccgcctcgactgctggcccctcctcggcgctgctcgccaccaccttccgccgctcccgcggctgccttctgccccgtgccgcgccgcagcgccgcttgtatgtggcccgcgcctcggcccagcccctcgaggtctgcgctaaggagtccatcaccatccctggccgcctcggagactgtcctttcacacagagggttttgttgactatagaggagaagcatctgccttatgatctgaagctagttgatctagctaataagccagattggttatttgaaatcaacccagaaggtaaagtgcctatcgtgaagctcgaggaaaaatggattggtgattctgatgttataacacaagcattagaggagaaataccctgaaccacccttggcaactccaccagaaaaagcttcagttggatcaaaaatattttccactttcattggtttcctcaaaagcaaagatccaagcgatggaacagaagaggcactacttaatgagcttacttcatttgatagttatctaaaagacaatgttcactggtgcagagaccccgaccaaagaggcctccatcgagcgggcccggcattgaggggccgcgccaggcggcaacggaacgacaaagacttcgctacatcccgggagcgaagtccttgtcacccttggcgacgcatcgaaaggggagcccttgctaaacctccgttcagcccagccggccaaagggcatctggggactccatcatactccggaggcgactctttccctaccccttgtctagccgttga

SEQ ID NO: 21962 - DNA, 165 bp, Zea mays
  Peptide Sequence Number=SeqID_63741
atggccatggattccatcatgataggcgccgcagacgtggacgaggatgccatcggtgaggtggagatcggtcgtgcggcggaggaggaaataatatctaataatagtaattatgataagttgggctttaagccctatggtgctagcggccatattagcgactaa

SEQ ID NO: 21963 - DNA, 612 bp, Zea mays
  Peptide Sequence Number=SeqID_63742
atgacagccacgtaccgcgttcgtccaccacgcgctgacaactggacccgctggttagcgctgcacccctcccttgcctaccctcgcagcgtcgcggacccactcgtcagcggagccctggtgatcttctcagacgcgcttactgctggtgcggcagacgcagaccccacgccgatctcgcgatggttacaaccaccgatgagctggccctgccttgcgcccgacggctacggatggaaccacttcttcctcgattcgtggagaccaggatatttagacccgttcggcgttctcgatgctctgttttccctgcgccgccgccacggtttggcagggattgctcgccggactcagtgtctgccgccgggccgcttcgctccgtggtcgtgctccaccgcctatgtcaagccctcggtggtcgatccgggaggaagcacagtgcacatgtatgctctctgcggcctcgtctgggcggaatcgagctctggcccaccaagattcctcgccggaacgcgtaggtctctcgggttttgggagaagggtgtcggcgtgccaggacagtgttcaccagcgggagctctgccgtgtggacctgtgcgtcgccacggctag

SEQ ID NO: 21964 - DNA, 171 bp, Zea mays
  Peptide Sequence Number=SeqID_63743
atggcaccgtcgtccacgacgggtatgccgccgctcggctggggtggggtagtcggggaacatcggacatgggataaagctgtacatgagatgaagggcgtagttcaggagaaggatgaaccaatgccgaagctacccgtggaaaagcttcggctcagcagtggaaaatga

SEQ ID NO: 21965 - DNA, 201 bp, Zea mays
  Peptide Sequence Number=SeqID_63744
atggggatcaacccagaaaaatctattgcttattctatgatttacgaagctcaaaagtcgttcctaaggaaatgcagagtcaacataaacaaagctacaaaagtcgttcctaagggagcgcagcgtaagttttttgctcaaaagttgttcctaagggaatgcaaagccaaaattgatgacgctacaaaaagtcgttcctaa

SEQ ID NO: 21966 - DNA, 244 bp, Zea mays
  Peptide Sequence Number=SeqID_63745
atgggccctctagatcccaagaaagggggtttggagcagctccattgccctgaagtaaaagcatttgttgactacaagatcagtttcggacccccaggagtggttcctgaccccgcgtatgccatttggacctctagccaggtgaggtctggtgctgccatgtgtccggaccattacgacttgggcccagaccccctcaagcatgataatagaccacaggcaaggaagggtctggggggtgcac

SEQ ID NO: 21967 - DNA, 423 bp, Zea mays
  Peptide Sequence Number=SeqID_63746
atgtcgagggcgccgctagggaatccgtgcggggggtatgctgattaccgccgcgccgcagaccacgaaaccaaactccaccaagcgtgtaccagtcgtgcggggcctttcctctggctgcttggtggggaccaactcgtcagctttatcctctccacacctcggtcaatggacacccgagctctggcggatgcgcgtagccgttgcgcaatcgtacccaccatccggccgcgcttcaagcgcatacagcctcctgggatccgtcaccataagcaccaagcggtgagggagaagattgtcgtctcgactgcaattggctaccatcgtcgttatgctcgtgcgggtggcctgggagattcgttagggtgcctcggtgacgtccggggcatcgtggtgctcggtgtgggtgctggcattgggtga

SEQ ID NO: 21968 - DNA, 136 bp, Zea mays
  Peptide Sequence Number=SeqID_63747
atggagcggctcacgcgtggggtaggggtgtcggcgcccaccacagtgcgcgcggacgaccgtgatgggccgcgcgacaacgagcagtttgaggttcctgagtgtgttgttggagacctccctgagcaacaacctg

SEQ ID NO: 21969 - DNA, 153 bp, Zea mays
  Peptide Sequence Number=SeqID_63748
atggccaacttcaacctttattttgttgatcaaccttacacttcacatgaactcccacctttggagaagaacaagtggttcaagagaagccacacaacgaggagttcgattcgatctaggtggcgtttcccagttgacttgcgccaaggatga

SEQ ID NO: 21970 - DNA, 243 bp, Zea mays
  Peptide Sequence Number=SeqID_63749
atggggctcggtgtatgcggctcgctctgccaaggtggtgacgaggatgatggttttgattatgactatggtaatgctagtccactacagccaaacgggacaattgctgagtatgttgatgtgtactcaccctcgctttacacaccaaaccacccaggttatccacgttgcaaccattgctcaggagaagatgaagtcgtggaggaagacttccaggggtttcaagagtacgatgagttctag

SEQ ID NO: 21971 - DNA, 366 bp, Zea mays
  Peptide Sequence Number=SeqID_63750
atgaagctgtggaaggagacttccaggagttccaagactacgacgagttctaggtgtgggttagcggtaacccccagtcggctgcctgtgaaggccgcggttatctacatttcttttccgcactttgatttattgaagtttcaaggaattaacgagatcaccaaggatgtgcgaaataaaacgaatgctcatggatcatcgagaaacaagggtgctcaagggcatgtaagcgtaaaaaataagagtatgaaagatttcaaggagatgagcataccaataccaagagacaagaaattgccgaaagatagcgacttaacaacagaagaggaaagggtttccaaagaccagaaggtcatggacatatga

SEQ ID NO: 21972 - DNA, 1464 bp, Zea mays
  Peptide Sequence Number=SeqID_63751
atgaaatctgttgatcatcctccctccaatccaaagaaaattacaatcgaatcaagtcaggaagtattcactgttgaaatcccccgccctgggaataatgccaacaagccgaggcagtctattgctccagatgttgatacaccaaaacaaatgaagcaactttatgttaggcgtaatacaaagcgttctgcaggacgtggaaaaaacaaactgatacatgttatttaccattcaccaaatccgccaaagcaaaaaaatattgttgaagaggcaactatcaagcaaacaaatgtggtgaagaataaaaacaaaaagaaaaccagggatagaagaaaacagaaactaaacatctggtgtatcccatatgatgtcataatgcctatgtggataatgaataaccgtcaacgcgaggctgtagtgaggaaaggcttccaaagtatactgcaaatgtcaacagatggccttgttgttggatcgttaatgaattggttgatggataaggttgatccagttgacatgaccatacggcctggcccaggaaaggagctgaagataacaaagaagtctgttcgcctaattcttgggttgcctagtgctgggggagggaaatcgtttatggattggtatggagaagttgatgctgctggcaggcttaggaaacaactcaaaatttcgaaggatgagtttgatattgccacccttcaggaaataattgttacaggccgtgatgatgatctaaccattaggtgtttcttccttatcctattcaaccggctgttgttcccgacttcttcatggtcaatctccaacaatgaagttctaatgacagaagacatggaccgcttccgagacatcgattggtgtcagttagtattttgtatatattatctagaccatcttcatcacgaggcagctccagagaacaaatatggtactccacgtataaaatactttgataaagagacaattgatgcactgaccaaggctgacaggaggaagcctcgtcatgctggcgaaacgtatggtcattgtcattttcatagcaggacagacacatgctatgttgctgctcctgaacaaccaacaaatgatatgttccatattcatgtttctcgcatgaaagatttgatctctagcaatgttatttgccttctaccaccataccgttcttgttttgactctttgttgaaagctcatgacaaagatgttgataagtactgtgcaacgcttgaacgtgctcaccgcaaattagtatcaaagcagctccagctagctgagacatttgcagacatgattgacggtgtcattcgtcttggatcacaggttcaagaatcccagcagcgagacacacaaaaagaacaacctagccagtttgatgtcaacatgcccaatgacctgcacatgggtgtagctcatgatgtgatgccagaagcaaatacacaatctaaaaattttgatgtttag

SEQ ID NO: 21973 - DNA, 456 bp, Zea mays
  Peptide Sequence Number=SeqID_63752
atggcgcttagaagtggtggaggccgattccgagccggagatatcttagattccaacccgtatggtcctgcaattggtggtaccaactggaaacattattacaatgaaatcataacttttgagaagaaaaaatatgcttggtccagattgatgatgtcccgacttagcatgggaatgcaactggctaggccgaaggcaatgctttctaaatttgggaatttcaagattgatcttgttaaagactgtccaactatgccagtaggctcaaatgattgtggcttctttgtcaccagatatattatcttttatgaatatacagaagggtatatgcctgatgagattgacacggacctatcccttgagaaccgtgctactcttctacattacttgacattccacagtctgaacaagatcaaaccactcccatctgatattaggaggttcagctatgattga

SEQ ID NO: 21974 - DNA, 495 bp, Zea mays
  Peptide Sequence Number=SeqID_63753
atgggtgtgcccaaggggtgccttggtgtgcagagtgtttatcgcgttgtcctgaagtactcgggcgtactggcgctccatcaagcacgtcgtcttggtggaccagatgactcaaaggaggtctcctcggaagaggtggaatcctccgactcttccgaggagtggagcggcagcgaaggtgacgacagggaggacgatggcattagcagcgacgacgacggcaaaggtggcaacggcgagggcgatggcgacggcaacggtgaggacgatggcgagggtgacggcgaggacgatgacggtgacggcgagggcgagggagacagcaaaggagacggtgacggcaagggtgacggcgacgatggtgacggcggcaatggcgacggcaacgatggtgatggcggcaagggcaacagcgacggtagcaagggcgacgacgacggtggcaagggcaacagcggcgatggcaaggccagtggcataatgctgctggtttag

SEQ ID NO: 21975 - DNA, 369 bp, Zea mays
  Peptide Sequence Number=SeqID_63754
atgggcaagaacaagaagggtagagattcatcgcaccactctggtgataggcgaaagctctacgcttctcctccggtgtcgtccgatgactcgaacgattcccaggggatagccaccgtggtgtggacatacatccaggccatcaagcactccgggctcgaggtctcggatgagtcggaggtctcctcggatgaggagaactcctccgactcgtctaagggggagagcggcggtgacggtgatgacgagggcgacggcggcgatggcggtgacgtcggcgatgacggtgacgacgacggcaagggcgacggcaacggcaagggcagcggcgacagcaggaaggccagtggcaaagcgccactggtttaa

SEQ ID NO: 21976 - DNA, 261 bp, Zea mays
  Peptide Sequence Number=SeqID_63755
atgggcgcacctggcagtccggtgcgccaccggacaggcactgttccttgtccgatgcgccgtcacgtcacccaaccgttagggttcggagctgggtcgaccgttggagatttgtcttcttgtggcaccggacagtccggtgcccctctgacttcctgctctaacttctgccgtgacactgtttactttgtagagtcgaccgttggcgcagatagccgttgcttcgctggcacaccggacaatctggttacttggaattaa

SEQ ID NO: 21977 - DNA, 159 bp, Zea mays
  Peptide Sequence Number=SeqID_63756
atggcgcggaacctggcagtgctggaatggcgcccaggacacggcaggtccgcgacgagggaggaggacgcgaccccacgaccagggtcctcggccagaccggcggccggacatgaaggagaagagggagatctaaatgaggccaacgataatatttag

SEQ ID NO: 21978 - DNA, 438 bp, Zea mays
  Peptide Sequence Number=SeqID_63757
atgctcgacgcggcgctccgcgttcgcgtgctccgccgccgccgctcccaccgcgtgcgccgtcgaggcaggcggtcgctcgatcgggtcggggacgacgacgacgacgagggaggccgggagccggtgctgctagtgtccgggatgggcggctccgtgctgcacgcgcgccgccggtccaactccaagttcgacctccgggtctgggtgcgcatcctcttcgccaacctcgacttcaagaagtacctccgggtccaaggcctcgatccactgaccacggcggggctgttcgcggaggcgcggtgcgtgggcgagaagaaggtgaacggcgaggactgcttcatcctgaagctgagcgtcgacccgcagatgctgaagctgcgcagcgagggcccggcggagatcatccggcacgtgctgttcggctacttcagctag

SEQ ID NO: 21979 - DNA, 492 bp, Zea mays
  Peptide Sequence Number=SeqID_63758
atgggcgcgccgaagcagaagtggacgtcggaagaggaggatgcgctccgccgtggcgttcgcaagcacggcgccggcaaatggcggaccatccagaaggacccccagttcagcccgatcctctcctcccgctccaatatcgacctcaaggtcgataacttctataggctcccagattcatttgcaacaaggactccagctcaaataaaagtttcagatccaaaacagaaggatccatctaaggcgtcaaagaccataggcttgtttgctgcctccagccctgcactagaggcagcgatggcagctgctgtcaaggtgactgacgccgaggcaaaagcacatgatgcacatgatcagatgatggaggcagaaaggatgctgaagatggctgaggataccgagtctatcctcacaattgcagcagagatctatgatcgatgttcaaggggggagataaccacattagttccagtggcgcaaagggagttttga

SEQ ID NO: 21980 - DNA, 669 bp, Zea mays
  Peptide Sequence Number=SeqID_63759
atgcaggcggcatgcaaccgcgccaagtgggcgcgcttctccgacttccaacacgcccagcatggcggcccaggcccacgcgtcatgcaaccggcgcgccggatgctgcgtgcgagcaactgcaccgccactcacgccactgccatgcctcctcgactgcggaaccagtaccgcgactcgaggcaaccctacgcacgacccggcggcgccagcctggcgcgatggggaagcgagcggcgcttcgccttcgccataatgaccgcgtcaagaaaaaaggctggcccctcggaagggttcaacagccgcctcagagcgtgtgggctccacacccactactggtcagaggttcgaaggccggcccctcggaagggttcaacgaccacctcaggctactcgggctccgcgcccactactgatcaggggttcgaaggctggccctcgaagggttcacatccgcctcagacacagagcgaggggctactgtcggggaccataattaggggtaccctcaaggctcctaattctcagctgggctcggactcgggctcagcccctgaagacggcgaactccgctccgcccgacccaaggctcggactcgggctaagccccggaagacggcgaacaccgctccgcccgacccagggctcggacttgggctaagcccctga

SEQ ID NO: 21981 - DNA, 633 bp, Zea mays
  Peptide Sequence Number=SeqID_63760
atggctcaccacggacaaaagggtcaggaagaggggtcatggctcaccacggacaaaaggttcgtgatttccatcaccacgctcccacaggaatttatcgaggaggttatggctctggtagagcttgatcggctgagatatgcattagtagggaaacaaagttctactgggttatcaatagagcaaaggaagcgccttactaattgtcggcgtttcgagaccggggggtccctaggccgacgagtgaaatgtcgccgcgtgccccagcccagatgggtcggcacggggccaagcgcgaagggggggagaaaggtggccggagatgggcgtgagagaggtggaaatcccgcggccttcgtgttcatcccgcgcccaggtcggcctgagtcagcttggggtagggtaatcatggcgcctcctgttgacgtggccggctcgcgcctgaggttgggcgatgtggaggctcctccgaggtcgaggtcgagtctgtcttccatggccgtggtcgagtccgagcctctgggtcgggcgaggcggagaccgtcggctgaggccagggctgagtccgagccctggggttgggcgaagcggagttcgtcgtcttctggggctgagcccaagtccgagccctag

SEQ ID NO: 21982 - DNA, 219 bp, Zea mays
  Peptide Sequence Number=SeqID_63761
atggggaagatgataaggccgccggaaaaatcagagcaaggggcggcggaaaaaaatctgcgcgcgatagagatcaagctggggcaggagatgagcacggcgttgagagctaggagagggtggccgggcaggagggaattaggagttgttttggtgaatactctgcagtcggatgaagctacacccgttatttatatccgaacggtcggacctgggtga

SEQ ID NO: 21983 - DNA, 231 bp, Zea mays
  Peptide Sequence Number=SeqID_63762
atggggaagatgataaggccgctggaaaaatcagagcagggggcggcggaaaaaaatctgcgcgcgatagagatcaagctagggcaggagatgagcacggcgttgagagctgggagagggtggccgggcaggagggtgaggacgagcgcgcggcggccggcgtgctcgacctccacggatgcggcgtgcggcaaaaaaaatcccacgccggatgaggatgactgcgcgtag

SEQ ID NO: 21984 - DNA, 246 bp, Zea mays
  Peptide Sequence Number=SeqID_63763
atgaaggtgggttcccctgttaaggttgtcgtccacctcggccgcgcgctcagagtgagcgccatggccggagtcggcgacctcacgcgggcaaaggaggttacggggcagtttgaccatggtcagggacagtggggcggccttgccgtggttgatctgaggctcaaacgatgcggcagcgagagggcttcggcgagctcgggcacgggcgggtggagcttgggtgggcgtgctgaggtggaatga

SEQ ID NO: 21985 - DNA, 618 bp, Zea mays
  Peptide Sequence Number=SeqID_63764
atgagcacgataagggacgtgctgctgcacggcgcgaaggcgaacgacgacaatctacgacggcaggaacggaagacttggtcgaggcggggtccgagcgtccagagtttttatcgaggccgaaattggcgagctgcacgtaggcacgcgtcgaccacgggacaagcaggagcaagggcgcggtgcggcccatggggagagggaagagagaactccggccagggagccgagggcagggcgagcgccatggcaggcggccgagccaggggctgggacgcggcactaggaaaccgcgcggggccaaatagggagcagcgcgcgcgaagggagaaagacagggcatgcggcgctggagcagagaggaagaagcagagcgcgtgcattgggaggagatggagtgcggcagagagctccggcgagctggaggagctccgcgagcagagcacgacactggagctgacacagccatggcgagcagaggacgctggccaccggaaatcagagagcggcgcagtccgagcaggggcgccgcggcatgggcgagcgcgccaaggagtagcgcgcgcgacaagcagagaggcgtcgggagcgctgaaggagaggcagggcgcgcgctag

SEQ ID NO: 21986 - DNA, 483 bp, Zea mays
  Peptide Sequence Number=SeqID_63765
atgccgataggaatcaaacaaggatcgtcgtggtctcaccggagtgaacgacgtcgatgtttggggctgcgcaaaaacagtgaacacacggagggcatcacggcatgctgtccattggctccacaaaacagggagccgacagcgcgcgtagacgatggggctgctgcacattttgtcgagcacctagcaagcaccatgggcactgcgcagcagcacgcaagcagggaggacaccgagtcgcgagccatggcgaggatgctccaaggcgtctgctgcagtacgccatggggagttggaggagtggctggagctctgagcgccggccatggagagaatgggaggagctgctgctgcaatttctgggcgccatggaggaagaacagaggcatcgctagtttccctggaagggtgagcgcagggctgctgctgctggccggagtagaggcatgggtctgcacagaggggcgccgaactcgccagtag

SEQ ID NO: 21987 - DNA, 327 bp, Zea mays
  Peptide Sequence Number=SeqID_63766
atgcctttggcagggcctgactgcccgtcagtctcactctgtcaggtgacactgcagtcggagtggcgcaggcggcgctgtccttctgtcaggccgctagcatacatcgaattggagacttcggtggcaagactgttgatgaggcgatcttcttctcagtggcggcattggattcgtcatggtattctagaagcttcgagctccatagataccaaaggagcacgccatatgaaaaacattggatttaatgaggatcaacaccatggtgatagaagtagtggcatcagatatggaaggaggaagaggaaaaatttattcgcaatatga

SEQ ID NO: 21988 - DNA, 2337 bp, Zea mays
  Peptide Sequence Number=SeqID_63767
atggaaagatttttcaaaagaaaagcgccagagccagatagtgccaacattgctagcaatctgtgtttggatgatatcaactgggaagaggagattaaatatgatccaggtttgcggaaacaaatagatgactaccatcctaatctcagagaaatggtgagaagaaagtacttggaaaaagggccttgtcaacctcgcacatgtagttttcctgtaacaaatattggaggagggccaagaaggtttattccagattggtttgatgagtttggaagttggcttgaatacagtgaatctaaagatagagcgtattgtttttcctgtttcctattcagaggaaagaaagatggtggatatgaagcttttgtgaaaaatggttggaatggttttcacagaaaacaaaggctgagagaacatgtgggtgatgttggtcgctcgcactatctagcaatgaagaagtgtgatgatttgttgcaaacaagacaacacattaatgtggctttccgtggtgtaagtgaaagtgctaagagggactatatgattcgactgaatgggtctattgatgtcgctagaatgttagcaaagcaaggcttgcctttccgaggccatgatgagtcaaaggattccctaaatagagggaatttcagggaatttcgtgattttgcagcggagcaaaatccagtcttaaggaaggcaacaggtaaaggaaaatcagaaaatagtcttttggtttctcctgaaatacaaagggacattgtgcattgttttgcaaaggaggtgttacaggctattctagaagaaattcggaatgatgttttttgcttgctagttgatgagtcaagagatgtttcttggaaagaacaaatggatgtggtcttgagatatgtagataaatgtggaattgtgaaagaaagatttgttggacttgttcatgtaagtgaaacaacttcagcccatcttaagacttccattgatgcactatttgctgagcttaacttaagtttgaagcaagttagaggccaaggatatgatggtgctagcaatatgagaggtgagttcaatggcttgcaatcattgatcatgagagaaaatagttcagcttattatgtgcattgttttgctcaccaactccagttagtccttgtggctattgtgagaaagcataaaggggttagtgatttttttaccaaggtttccatattattaaatgttgttggtggatcatctaagagaagggaaatgattagagatattaaccttaaagaaatgagtaaggcacttgggtgtgggcaacttcaaactggtacagggttaaatcaagagcaaagtgttcaaagacctggagatactcgttggagttctcattataaatctctgaagagtatagttgacatgttttctacaataatgaaggtgctagaaattgtggaaaaggataaggactggaaaattagagatcaagcatcaaatcttcgggagtatttccagtcttttgactccatcttctatttgcatctcatgttgactatattaggaatcacaaataccttgtgcttagcactgcagcgcaaggatcaagacatagtgaatgctattaactgtgtgagagccactagatgccaattagatgatcttagaagagaaaagtgggaaaaactaatagatgatgtgtatgaattttgtgagaagaatgatattgccaaattggaaatggaagatgaatatattgatccaaagaagaggaggcacaaatctggaatcacaaacaagcattactatcaagtagattgtttcaatgatattattgattgggtactccaagagcttgacagccgcttcaacgagacaagctctcaattgcttgtatgctcggcctcttttagtccaagagactcgttttgtgattttaatgtggacaagttgttgagcctagcaaagctttatccacatgattttgattctgggaatctgagggaccttagcaatgaacttggcctctacatatttgatgtgagaaatgatgatagattctccaacatacaaactattgctgagctttctcagaaaatggtggagactagaaaacatgatcgttacccactagtttatcgacttctgaagcttgtactagtactgccagttgctactgctacagttgagaggattttctctggcatgaagattgtgaaaacaaatttgcgcaaccgcattggtgatcaatttatgagcgattgtcttatttgctatgtggagaaagaagaaatgatgaaagtcacgaatgagtctgtgattcgtcgcttcatgaaaatgcaagaacgcagatttgatgataattaa

SEQ ID NO: 21989 - DNA, 3225 bp, Zea mays
  Peptide Sequence Number=SeqID_63768
atggcagtagagttcaattggtcggttcggggtgctttaccaggtgacgcagaagctgtgcgcacgaggaatttgagaattgtgcagcggcttacccggtccacactctccggtgggcggaggaagtccggcgaggggcttgggaagcttcacgagtctctagtgaagctatccgagcagctggcgtgggtgaggggtggctggggtgagctggccacggtggccagagctcgggtggctcggcgggcggtgagctctcggttcacggtcagggctccagtgattgagcgcgaattcctgacgaatttctcgtggattccgtggagaaaaagtgtgacctttccgatgcagtacaaccaccgcagccgcttgccgccgccgccgctgccgttcggccgcggagggcatcctcgcggccccaagcagccatgctacgctccgcttcctccgccaccgtttcctccggcgccgccgccgccgccgccgtcgctagagcgcaagtacgaggtgcttatggaggccggtcgcctcgccaccgagtatctggtcgcccagggcgtgctccccccggccgctctgcagcgcggcgccggcatctctggcgcgtggcctgatcatcctcttcctccgccaccgcagctgcaacagcaggaaccccgggggggttatggccggaggcggtacaaagatgaatacaacaataatcctaggcgagccaatgacactagtagtagcaccagtagcagagatgattgcagccgtggcagctacaatggaagagggaagatgaagtatgggaaatacaggagggggtatttggattcagggagggacagggagaaggagaggagaaggccatttccaaatggccggcgctacgaggaggataaggatgaagatggggcacctgggtttcggagggagcgacacggcaatcgggggagtgatgaggtgaggcctcatgatacagaggcactgagggaagggacaccattgacagcgaaggctgtagaagggttctgcatggaggatgcaacgtcaaagattatgagctctttcaaagatactattaaggattctaatgatgcgccaaaggtgccggaggagactgaggaaggcgaggtggaggatgacagggagacgcagaattcagaaactgaggtagtgaagcaagggatagataccgatgtaaatcatgcttcttgttatgttattacagagtcaaatcccaaccagttatcagatggtaagattcaagatgagattcctgacgaggaagctgaagatgacaaaaaagttatggatgaggctactttggatcacaacacttgtgatggtgaggtgacaaatatggaagttgagatgcacgttggtaaggagagtttgattgactattgtaacttcacgagaaccccaacaaggcctaggtcagcacgtgcacacagaaatgcagcatctatcccaggagaacctgcagtagttgaaacatttgatttagtttcttctggtcaagcttcacatatggtaagcgctgaatctgctgagagattttttactaaaattgtgtcagaaaacacagaagataaattttgccaagaaaacactagctctggtgatgtccgtgctccaccaaaggagctgatgcttcttcaagaaaatggaataacagttgtgactgaaaacatggcagaagataatgttgatgcagaaccacatgtggtcgtccagcaatataaggaagaaactaacctatctccgttaacagatgccctcgagaagagcttgaggcaggaaatcacattatctccatttgcagcttctcacaaggatagcttgatgcaagagggtggcttgatgcaagaagttgatttatctccgttgacagctaatcacagggagagcttcactgaagaaaccgaattgccaccatcaacagcttctcacaaggacagcttgattgagggaactgacttaactcagacaatatcttcttataataataacttgaaattgcaatttaaggaaggaacacaggtatgcgatattgatatgctgccacaagatgtgaacctcattgagttgcccgatcaaaggaaaatcattggtcgtgatgttggtgctaaagctgtcaccggaatggaagaaggaaagctggatcaatctagctcactaaatctatcggatgttgacctagttggtggtacagaggttgccgctatacacaataatccagtgttggtccagctgtctgcagctggatcttccacagagtcaaataataaacagcaacaagatcctgaaacttttacaggtgccaatgccagtcctacagatgatttatgccagcttccattagataataaggatgttcaggtagttaatatagaatgtggcacaccagttgaagttggtggatttggtttgtcaaaatcaatacacaataatccagtgttggtccagatgtctgtagctggatcttctgcagagttaattaataaacagcaagaagatcctgaaacttttacaggtgccaatgctaatcctacagatgatttatgccagcttccattagacaataaggatgttcaagtaattgacatagaatgtggcacaccagttgaagttggtggatttgatttgtcaaagtcaaattctgatataccatgctacccgtcaatgcaatcagatcttcatgctggaataagtgccaacgactcagaggtgagacgggaggcttcctgctcggcctccggccgtgcttcacggcgcatctggcacctcctcagctccttggaccctcctcaccacaaccgccgccgcctcaaatgctgccccagtgaggctagcaaaggcggcgaggctgctacagctgcgtctacaccgtcgtcatcgtctaactgcacgctcccctccaaccccaacgacgggggcaagctgctcgtccacgcctactactccaccgcctcctgcctgtacgagtgctgtttcggtttcactacctctccctgtcctcttctaccgccagacgcgtgccaccaagctcacttgccccaggtggagcagcagatgctccgccatgcctgcgcctgcagccggacggtttgtcagcagcaccagcgagctgttgtgtctctggccgcgatagaagagaagccaaggaaccgagaggaaatgggcctgcagaccaagactagaattgaggacgacttaatacgtgctgaatga

SEQ ID NO: 21990 - DNA, 393 bp, Zea mays
  Peptide Sequence Number=SeqID_63769
atgaccagctccgccggctcccacgacgtggtggtggtgcacacgggcgggtgccactgccgtcgcgtgcgctggcgcgtcgaggcccccgcgagcatcgtcgcgtgggtctgcaactgctccgactgctccatgcgcgggaacacgcacttcgtcgtccccgccgccaagttcaggctgcaggccggcgccgacgagtccgtcaccacctacaccttcggcacgcacacggccaggcacaccttctgcaaggtctgcggcatcacctccttctacaccccgaggtccaacccggacggcgtggccgtcaccgtcgcctgcgtggatccggaaagagacgtgtccatctaccactaccggccgttgactatggcttcacgtggctcttggtga

SEQ ID NO: 21991 - DNA, 1953 bp, Zea mays
  Peptide Sequence Number=SeqID_63770
atgacgggtgctgtcatttctagtctgacgattgcgctcgaggagcagtccaggctcctacgcgcgatctgtgaccggttctcggcacaggatctgcgctacgaggagcccgtcactaccgatgactggggtggcatgttcgagcactcggatcccattccctcgcgggcggatctcgagatccaactctcggccaccatcgagcacctcgatgccgtggagcatgctgtggcaactcgtgtcggctcgctggagtcatggcgtccgcgtgtcgaggcccacgcattggtccacctctgtggattcttcgatggcgctgatgccaccaagctacccaccacctgttcgacctcggggttcacagccgaactcgccagggcgcactacagctggcatctacccagtgataagggaggtttcgtcacggcatggcagccggtgcggtcgctagcgctcgcggtccgcgttgagtcacagtgccaacaggcgtccttcgtgcgcggcacatcggccatggccaccatggcgaagatgagtatcggagacctcacggaggccaacctcaaggggatgcgcgtcttcgtgtgcgtcgagctccacgagacacccgacgagaaccagaacaacaccaatgaaatcctccccacctcgtgtgacactgtcatggacgtcgtgaagcgactcgaccagcgcgttcgacgtggccatggcggcgcgggtgacccagatggtcgtgtcatcgccgaccaggaacgccacgcccacaggctcctcacccaagagcacgtcgtgctggttcccgtgcgacaacaagagcagcaagcagctgtagcatggcaggtcgtcgtcggatgggtcgtcgttgggctgaccgtcattcagggccggcatgcagttgaggcgactgtcggggtgctacgagtgccacatggtggtggaaagcctccagctccaccagtccatcaggcaggcagtgtcaaagcttggcacgatggccacgaacgggcgcacgcacgacgccgtgcccgtgccgactgcggagggtggccgcggcggattggtgaggaagtcgagcggcagcagccaagggtgatgttggcgtaccgggcgatcacgggaagggtgaagtggcccaatgaagaggagcaggcagcatcagtgccagaggtggtggccggcgccgacgtcgagggcaaggaggagtacaactcagtggcaaggttggccggggagctcaagctcacagacagcctatgtgcattaaccttgattgatgctcaagtggtgtttgaggaaatgcagcaaagtgctacctcggttgagcagctcatctcggggaaggaggacagagctaacaatttcgcccatggttactacactattggaaagggaatggtgctgctagctaacaactttggtaatggcctcattgctgcccacagtgagatcaaggaatcatggcctccgcctcgggagttggcatgcttggatttgaccatcatggttgtctttatgttccttgctaccagtgacctacatgcaatgacctacatgtcattgttatatgctctctctaggaaaggccaagttcaggaatcagataggttgtttaaagtggctgagaagaatggcatcggaacgggcgttgtcatgtacaatgctctgagcaatcaccactgcacagatggaaatatggaaagagcatatgagatcatggcagagatggagaagaataggattgccccagataatgtgacatacaatatgctgatgcaggagttttgcttgcttgggaaacttgatgaagctcacacactcattgacgagatgacacagaggggtactgctgtcagtcgtgaccaaggcaattgctcagtctttgtttgggatcccagtggtgatgcgaacagtagcttgggggcaagatgcatctcaaggagagggaaatgtcag

SEQ ID NO: 21992 - DNA, 171 bp, Zea mays
  Peptide Sequence Number=SeqID_63771
atggcgcagaaggtcgtcttcttcacagcagacctagatcttgcctcccgggagggaacccgtcggaaagaagagatcctagggtgtcttggggtcggcaggccacacaagacgcctctagtcgacacagagccgaagagaggcgaagatttaaggattattagaatataa

SEQ ID NO: 21993 - DNA, 252 bp, Zea mays
  Peptide Sequence Number=SeqID_63772
atggctggttctaaagatcgcattgatgtctctcaaaacaacatcctcaggccgattcttgagagtttatcggtcaacgagcatcgagttgaagatctcatgaatcgggctcgtgaaacggcgaaggacaaattcctgttacacttcaaagtggaccaacaccagaaaatcaccaatcaaggagagatgaaccttgagcccctccctcatttgcctccgactgtcactataagtaaatctgatgatacctag

SEQ ID NO: 21994 - DNA, 318 bp, Zea mays
  Peptide Sequence Number=SeqID_63773
atggagagactgacgtcgcatctcttctatcttcgcttcaagtccccaaccgagggtgaagaggaggcagcgagggtgaagaagaggaaatctgaagaggaggcggcggcgggtacaagggtggagaggagacaacagcggctgcacgagggagataaggagacggcgatgggaacaccgggaaattggacccgtggatttcaaggccagggaataagccggaatccttccgggatcccagactaccaaaggaggcctcgtgatcgcggagccgcagagtcgttgcctccaacggctgaggaacgtgtgacttcgtaa

SEQ ID NO: 21995 - DNA, 330 bp, Zea mays
  Peptide Sequence Number=SeqID_63774
atgccccgaccagcgaccataacggtcgacttccgaatccggcagagcctaaactatgcggcggtcaacacgacgctaccgatggggggtcataccattgttggtggcgtgaaggtccagcggcgtcgaaggcgattccgtgaccacaagtgcggacggatggggaaagggggtgtagcattcagtatatatgtaggcaccgagaggtctccgaatctcaacaaactgcgccccgaatccaaggatcgcaacaaccatggtgcgaggctgcatcgcgatgaggacgaaactggcacgggggacccacacacgagtgactccgtgaggtag

SEQ ID NO: 21996 - DNA, 1554 bp, Zea mays
  Peptide Sequence Number=SeqID_63775
atggagcttccaacatgggcgtccttcctcggcgtggtgctcgccaccgtgatgcttctgaaggccatcctcggccgccgcagccgccgcgtgtacaacctcccgccgggtcccaagccgtggccgatcatcggcaacctcgatcttgtgggcgcgctcccgcaccgctccatccacgagttgtccaggaagtacggcccgctgatgcagctccggttcgggtcgttccccgtggtggtcggctcgtcggtggacatggccaagttcttcctcaagacccacgacgtggtgttcacggaccggccaaagacggccgccggcaagtacaccacctacaactaccgcgacatcacctggtccccctacggcgcgtactggcggcaggcgcgcaagatgtgcctcaccgagctcttcagcgccaagcggctcgagtcgtacgagtacatccgcgccgccgaggtgcgcgtgctgctgcgcgacctgcactccgcgtccggctccggccgcgccgtcatgctcaaggactacctgtccacggtgagcctgaacgtgatcacgcgcatggtgctcggcaagaagtacctggacagggaggaggcggccgccggggccgtgaccacccccgaggagttcaagtggatgctcgacgagctgttcctgctcaacggcgtgctcaacatcggcgactccatcccctggctcgactggatggacctgcaggggtacatcaagaggatgaagaagctcagcaagatgttcgaccggttcctggagcacgtcgtcgaggagcaccaccagcggcggctgagcgagggcaagggcttcgtcgccaaggacatggtcgacgtgctgctgcagatcgccgacgaccctacacttgaggttgagctggacagggaaagcgtcaaggcttttactcaggacctcatcgccggtggcacggagagctcggcggtcacagtggagtgggccatctcggagctcctgaagaagcccgaggtgatcgctaaggcgacggaggagctggaccgcgtcatcggccgcggccgctgggtgacagagaaggacatccccagcctcccctacgtggacgcaatcgtcaaggagacgatgcgcctgcacccggtggcacccatgctggttccccgcctgtcgcgcgaggacacggccgtggccggctacgacatcccggccggcacgcgcgtgctcgtcagcgtctggtccatcgggcgcgaccccgcgctgtgggacgcgccggaggagttcatgccggagcggttccttggcagcaggctggacgtgaaggggcaggactacgagctgctgccgttcgggtccgggcggcggatgtgccctgggtacagcctcggcctcaaggtcatccaggtgagcctcgctaacctgctgcacggcttcgcgtggagcctccccgacggcgtgaccatggaggagctcagcatggaggagatctttggcctgtccacgccgcgcaagttcccgctcgaggccgtcgttcagcccaagctgccggcgcacctctacgccgagccttga

SEQ ID NO: 21997 - DNA, 213 bp, Zea mays
  Peptide Sequence Number=SeqID_63776
atggacctggacctagaggggatcttccgcgacgacagcgatgaagacgaagacaattgctttctcgggaaccaggagagggaggcgaacaaggagattgttgtctaccttgtcgacgcctcgcccaaaatgttcaccctgccaccacccagggcaatgaaaagcaggagacacatttccataccatttttaactgcatcacagagtatctga

SEQ ID NO: 21998 - DNA, 2019 bp, Zea mays
  Peptide Sequence Number=SeqID_63777
atgcccggcataccgagggaagtcgccaagcactcgctggatatccgagctggagcccgacccgtgaagcagcctctgcgccgattcgacgaagaaaagcacagagccataggcgaggagatccacaagctaatggcggcagggttcatcaaagaggcgaaaggcgtgaagctcaatcccgaaaagtgtgtcttcggggtccctcaaggcatgctcttggggttcatcgtctccgagcggggcatcaaggccaacccggagaagatcgcagccatcaccagcatggggcccatcaaggacttgaaaggcgtacagagggtcatgggatgcctcgcggctctgagccgtttcatctcgcgcctcggcgaaagaggcctgcctctgtaccgcctcttaaggaaagccgagtgcttcgcttggacccctgaggccgaggaagccctcgggaacctgaaggcgctcctcacgaacgtgcccatcttggtgcccctcgctgccggagaagccctcttgatctacgtcgccgctaccactcagaggccagtctacttcatcagtgaggtactgtccgagaccaagatccgctacccacaaattcagaagctgctgtacgcggtgatcttgacgcggcggaagttgcgacactacttcgagtctcatccggtaactgtggtgtcatccttccccctgggggagatcatccagtcccgagaggcctcgggtagaattgcaaagtgggcggtggagatcatgggcgagacgatctcgttcgcccctcggaaggccatcaagtcccaggtcttagcggacttcgtggctgaatgggtcgacacccagctcccaacagctccgatccaaccggagctctggaccatgtttttcgatgggtcgctgatgaagacgggggccggcgcgggcctgctcttcatctcgcccctcgggaagcacctacgctacgtgctacgcctccacttcccggcgtccaacaacgtggctgagtacgaggctctgcccgaggtaccctcagcccccgagggtgaggcactgcgcgtcgaggaggagcggagcggggtcacgcctaaccaaaactggcagacctcgtacctgcaatatctccaccgaggagagctacccctcgaccaagccgaagctcggcggttggcgcggcgcgccaagtcgttcgtcttgctgggagatgggaaagagctctaccaccgcagcccctcgggcatgctccagcgatgcatttccatcgccgaaggccaggagctcttacaagagatacactcgggggcttgtggccatcacgcagcacctcgagcccttgttggaaacgccttccgacaaggtttctactggctgacggcggtggccgacgccactagaattgtccgcatctgcgaagggtgtcagttctacgcgaggcagacccacctgcccgctcaggctctgcagaccatacccatcacctggccatttgctgtgtggggtctggacctagtcagccccttgcagaaggcacccgggggctacacgcacctgttggttgccatcgacaaattctccaagtggatcgaggtccgacccctcaacagcatcaggtccgaacaggcggtggcgttcttcaccaacatcatccatcgctttggggtcccgaactccatcatcaccgacaacggcacccagttcaccggcagaaagttcctggacttctgcgaggatcaccacatccgggtgaactgggccgccgtggctcaccccatgacgaatgggcaggtagaacgtgccaacggcatgattctgcaaggactcaagcctcggatctacaacgacctcaacaagttcggcaagcggtggatgaaggaactcccctcggtggtctggagtctgaggacaacgccgagccgagccacgggcttcacaccgttctttctagtctatggggccgaggccatcttgcccacagacttagaatacgattccccgaggacgagggcctacgccgaccaaagcaattga

SEQ ID NO: 21999 - DNA, 201 bp, Zea mays
  Peptide Sequence Number=SeqID_63778
atgggagtcgactggaaacgtacctactgtcatactgggtgtttcctgaactgcttcggcttccaaatgggaggcgaggtgcctgctgattctgcctctggaattgacctcctcttgactgaatgttctggcgattctgctgatggtgctgggggtactgcctctgaaactactgctgaggcggacactgattctgcttga

SEQ ID NO: 22000 - DNA, 1575 bp, Zea mays
  Peptide Sequence Number=SeqID_63779
atgctatcaggttctattccttctgagatttgtcaggccaattcgctgcagtcgctcatgttgcacaacaacaatctgactgggaatatcatggaggcatttaaggagtgcatgaaccttacggaacttaacctgcaaggaaaccatcttcatggtgagataccacattacttgtctgagctaccactagtaatagtggagttgtcccaaaataacttcacaggaaagctgccagagaaattgtgggaatcatcaactattctggagatcacactcagctacaatcagcttactggccctatacctgaaagcgttggtaggctctccagtttgcagaggctacggatcgatagtaactacttagaagggcctatctcgcggtcaatcggcgctctaaggaacctgacaaatctctctctatggggcaataggctgtctgggaacattccacttgagctcttcaactgcagaaaccttgtcaccctggatctaagctctaataatttgtctggccacatcccaagtgccatatctcagttgacatttctcaacaacttgaatttgtctagtaaccagctctccagtgctatacctgctgagatatgtgttggatttgggagtgcagctcaccctgactcggagtttattcagcatcatggcttgcttgatctttcatacaacagattgactggcaatatcccaacagcgatcaagaattgtgttatggttacagtcctcaacctccaaggaaatatgctaagtggcaccattccaccagagcttgcagaactgccaaatgttacagccatctacctttcttataacacattggttggccccatgcttccttgttatttaaactatcttgacctctcaagcaatgacttccatggtcccgccccgtgtggtatctgcaatgtagttggcctcacatttgccaacttctctggtaatcacattggcatgagcggcttagcggactgtgctgcagaaggcttttgtaccagaaagggttttcatcggaaggcgcttcattcatctgatagagttcgaagagcagcaatcgtttgtgttagtatactcgctgtcaccgttgtcttggttcttctggtgctttatctgagacggaagctattgagaagcagacccttggctcttctacctgtcagcaaggccaaggctaccattgaaccaacctcgagtgacgaactcctagggaagaagtttcaagaacccctgagtatcaatcttgcaacatttgagcattcacttctgagggtcaccgcagacgatattcagaaagccacggagaatttcagtatggtgcacattattggtgatggtgggtttggcactgtctacagggcagcgcttcctgaaggtcggagagtagcggtcaagcggcttcatggtggccatcagttccaaggtgatcgtgaattcctggccgaaatggagacaatcgggaaggtgaagcatcctaaccttgttcctctatttggctactgtgtatgtggcgatgaaaggttcctgatattctatattacaaagccggttcgaaacaacgtcgattaa

SEQ ID NO: 22001 - DNA, 414 bp, Zea mays
  Peptide Sequence Number=SeqID_63780
atgaagtcctccacgaaaggcgacgtctacagcttcggcgtcgtcatgctggagctgctcactggacggccacccacggggcaagaggaaggggaaggggaagagggtggaaaccttgttggctggatgcgatggatgatggcacatggtaaagaggaggaggtgtttgatccttgcttgcctgactcgagtgtgtggcgcgaacagatggcccgtgtgctagccatcgcccgagactgcactgtggacgagccatggaagaggccaactatgctggaggtgatgaagggcctcaagatggccgaaacaatagaatgcggccctattcttgctgcctttggtcgtggccttccaaaagggccccttaggtgtcaatgtcaaccaagcaagaaacgtggcgcactaccggcatag

SEQ ID NO: 22002 - DNA, 207 bp, Zea mays
  Peptide Sequence Number=SeqID_63781
atggccggttccaagaatcacaccaatttctccaccaccaacatcatcaagccgaccctggaggtactcccggctgatgaccagtatccctttgaggaccttgtagggcgcgaggagaaggaggagcagcacaatgtgactatggtgcggctgacaacgtatggatcaggattcaggagacaaccaaacatgcccaaaataatctga

SEQ ID NO: 22003 - DNA, 816 bp, Zea mays
  Peptide Sequence Number=SeqID_63782
atgacgctgtccgagcagctgtccacgcccgacccgctcatccgcgacttcctcaagatcccgcacgacgccgacgccggcgagggtgatagccccctcggccgtcgacgcgcaggggggcggcaggacgaccggctggaagcagctgcgagaccggctccggctccggcgcgcggcgggcgcctggcagaggccaatatcagcagcgctaacaaccgcagcaacaagtacaactacaaccccggcgaggcggaggcggcgttctcccgcaccttctcccgcgcgccgtcgctccgcgcgacgcccacgttctcgcgcgtcgcgtccacccgggtcggccccgcctcctgccgctccagctcaaggcggctctcgacgtacgacttccgcgacgtcgaagagcgacgccacgaggacgaggacgaggacggcgacggggaagaggaagaagacggcgaggacgagggggacgaagaaaagacggcggcgcccgcggcgcagatgtcgctgatggcgctgctggggcagacggacaaccagtgggacgacgatgaggatgaggaggaggagagcggaggcggcgcgtttaagaaaggcggggccggcgccgtgggcgacgaggacgaggacgactgcgacagccgggaggatgagatggtgcacgtgtgctgcgtgtgcatggttcggcacaagggcgccgccttcatcccctgcggccacaccttctgccgcctctgctcccgcgagctctgggtcagccgcggcaactgcccgctctgcaacggcttcatccaggagatcctcgacatcttctga

SEQ ID NO: 22004 - DNA, 264 bp, Zea mays
  Peptide Sequence Number=SeqID_63783
atgacgaagctctcctgcgcacagcttcgggatcaactcgtccttcgtcgcaatcacccttcgtctcgatcaggcttcgtcccgaccatgctctctgtatcgcatatgcttgtgatccgagtccgaaggaccttcgaaggacgaaggcccccaacaggtacgttaattaatcacgtgatgcggaagacaatccaagtcgaccccaagcacgggctaatctgcatggcgatgttgatggacgaacctgaagataggatgatctaa

SEQ ID NO: 22005 - DNA, 399 bp, Zea mays
  Peptide Sequence Number=SeqID_63784
atggaagacgcggcttcttcctccatcgaagtcttcgggatcgaagtcatgctcaaggggggcacgtacaaggatgctgagccccgacatgtgggcctaggagcaaaacggagggaatatattatagaagtaactaatgtgagtacgcctgagcaatctcctggcgccatgatgtccgtagtccctgcagtattgatatcctgcagctgtctccttggtaacgcgcgagtgatgatgagcatagtgcacgcggcagcatgggcgtactgcctaccagtggaatggataggcacgccgcctacagaatggactggtcgccgcctgcccgcggaatggataggtctcattaaatgtggaggcggcacatcgcctgccaatggaatggacagggctcaataa

SEQ ID NO: 22006 - DNA, 249 bp, Zea mays
  Peptide Sequence Number=SeqID_63785
atggcaattgctctgttaatccagcctctcaagatcattgtacggggaaaggctattacaaatcaggcttgtaacacgcttgtccgtgtggggcctgttacaatgggtcgaatcccacgtaggcctccaggtcagcgagttgacgaaaggcctggagtgaagggtagcgtcttcgccttcgccccaacatttgccctccaagggaccagttcgactgagtcatctggtgccgaagacgtcgctagatag

SEQ ID NO: 22007 - DNA, 306 bp, Zea mays
  Peptide Sequence Number=SeqID_63786
atgtcgcagaggcgcgtgtcgcactgcatggacgtggagatggcactgaggccagttcaagctcactttctggcacaccctgttatgctccttgtgttggttggccacgcataccagcgtcacggggagttccaaggcctcgaactccgtcaccagctgctccatggtcagtttggcggggcgtctcacgagagtcacgagccccaccaccacgtatgtcggttaagtatgtcgacattttctctcacgatggttcatctgatgttgaggcccctaatctcgcgggaaatgttggagaacgtctag

SEQ ID NO: 22008 - DNA, 408 bp, Zea mays
  Peptide Sequence Number=SeqID_63787
atggacatcaaagtcctgctctcctgcctctccatcggtggaggcgtcgacaactatgggctatcgtcctcggccaatgcgaggagcatcacgtcgtggcatacccctggaaccactacctcgtccggtgaaccctcgctagcgagaacggagaaaagctggtcgattgggagctcacgtggtgaccttggtaacctctctcagatcatgcaacttgacttgtcctataccaagttcacaggctccatccctgatgtctttggagagatgaggaggctagagtctgtaaacctggccaccaataggctggatggaatagtttcacaacctggcatagacattgcaggtcttgcaacacctgcccaacctgacaagcttggtgctgaccaggaatttccgcggcggtga

SEQ ID NO: 22009 - DNA, 529 bp, Zea mays
  Peptide Sequence Number=SeqID_63788
atggagtgtgaggaggcgccgaggagggggaatgggacaagatcacgggggctgtgtggcatctctgctggcaacacgaggcagcaggtggggatggaaggggactgcgtggagcggggcgaggatgaagcggtggccgtgaaggaggtgccttctatcgacaaagagcggggcacacacgaggatggcaagggcggtcatgcactcggcaaagactttgtcgagtgtcactcggtactcagcaaagaaaagtcatcgtcacgacgactggtaacggagacggcgcctttgccgatgtccgccggcctacactcggcaaaggtgccaccagtggggccctttgtcagtttctttgccgagtgcgctaggaggcactcggcaaagcttgcttctttgccaagtgtcaaggtcacagcactatgcaaagaagctttaccggtgcccaggtgttccttctttgtcgagtgctatgaccctgacactcgacaaagaggttctttgctgagtgttacactcggcaaagtgaccg

SEQ ID NO: 22010 - DNA, 405 bp, Zea mays
  Peptide Sequence Number=SeqID_63789
atgccttcacaatatgtgggtgacctagcagaaggtgaaggtgaagtatttagtgagccatcttctcaaaaggagggcattataaacattgtcaagatgaaggaggtgatttacaaaccttacactccaacaaaggttcctataaatactcacgccaatgagattgcaaaggaagctaacgacctgctatatgtgaagttattggaggattattataagttccctcccattgagtccctctacaaagttcttgcaaagatctataggatggggacaatattttcatcacagcatcatgaggtggagttgatggctcttgaaggtcaagaaagagaagtggatgagctacaccagctcaagataaacaatccaaagatgtgcatgatcatgccacataatttatag

SEQ ID NO: 22011 - DNA, 477 bp, Zea mays
  Peptide Sequence Number=SeqID_63790
atggcggtggcaggcgggcaggagcagcagccacgtcgtcaaccaaactcacgtcccgtccgagggcagcaagagaaccctctcgcacggcgtgaagacaacgcgcccgtgatccgttcttcgaacggctcgcgcacgcgcaacgaccgccccgccaaccactcgccccgtcgcattaactccgcgggaccgggaaaggggaataccccgaaaaggatccttccccatgaaggaactaggctccgagcccccctactgatcagaggttcgaaggctggccccccggaagggtttgacagccgcctcagatcgcgtgggccctacacccactactggtcagaggttcgaaggccggcccctcggaagggttccacggccgcctcaggctactcaggctccgcgcccattactgatcaggggttcgaaggctggccctcgaagggttcacagccgcctcagacgccgagcgagggatga

SEQ ID NO: 22012 - DNA, 405 bp, Zea mays
  Peptide Sequence Number=SeqID_63791
atggggagcgcgatgttgtccacggcgcctggttgtcccacggcagagatctacctccggcatagagcaccaacagaggtgaggatctacggtggcgcaacgcgccgctccctgcgcactgatgacttcgcccttctcctcgcgattctggcgctggcctttggtgtgcgtgagagaaaaaggggaggcaggacccgatgctccatttctatgatcgcccaaaggtcggcatggggtcagctagctaggattccgcacggcggcgaactttttggcaacgaccgttgcgggagggaagactcgaccaacaggtggggccacggggacagtgataggcgcgatcagcggtatgacatgtgggccccaggcgccagcgtaacaaggtttaggtctgagcgtgcgtga

SEQ ID NO: 22013 - DNA, 1206 bp, Zea mays
  Peptide Sequence Number=SeqID_63792
atgtcccctctctctctctctctctctctctctctctctttattattgctccctactgtctctgtctcttggcttattcattcccgcattctggtaggagacgacgaggcgccgatccgtagcggcgccgagggcgatatcgaggagccgctggtctcacgccgcaccgagacaatggcagaccagttagggtcttacacaattagatcccatggaatgatattggcaagattacacatgtatgactggataatacttctcctccttgctgtcatagacgggctgttgaatataattgaaccatttcaccgttttgttggaaaagacatgatgaccgacttgagatatcctatgaagggcaatacagtgccattttgggctgttccactgattggaattatactgccttgggccatctttgttggaatttacttcaagaagaacaatttttatgatctgcaccatggcatactgggtagtttacatatttattgtgattccttcgattcattgattagtacaagagaaaacatatccagtacaagaaaaacgtatctgaaaaatggaaattttgtagggattctatactcagtgctcataactgcagtgattactgatgcaattaaggatggtgttggacggcctcgtccagattttttctggcgctgtttccctgatggaaatgatgtttatgataacatcactactggtgttatatgcaatggagtgaagagcgtaatcaaggaaggccacaagagctttcccagtggacacacttcatggtcttttgctggtctaggcttccttgcatggtacttagctgggaaactcacggcttttgatcgcaaaggacatattcggaagctatgcattgtgtttctgcctcttcttactgctgcgcttgtggctgtttctcgagtggatgactactggcatcattggcaagatgtatttgcagggggtcttataggtcttacagttgcttcattttgctatctacagttttttccatatccttttgatggcgatgctttgtggcctcacgcatacactgtccagttagccgaggaagggagcagcagaaatacaaactcctacagcgtgagaccagccgagatcgaaacagtcaatattcctggtcacggtgggatcaccctaagagatactctaaatgatatggagtctggtagcggcaggagattgtga

SEQ ID NO: 22014 - DNA, 468 bp, Zea mays
  Peptide Sequence Number=SeqID_63793
atggcaactattgagaaattcctccagttccaggacgccgtgccttgtaagatccgtgccaagcgggggtgcgccactcatccacgcagcatcgctgagagggtgaggagaacaaagatcagtgagcgaatccgaaagctgcaagaactcgttccaaatatggacaagcaaaccaacacatctgacatgctggatttggctgtcgactacatcaaggatctccagaagcaggttaagacttatctgaaatacacactcggaacacagaatttgagagttcgtttctgctatctgttcactgaagtagcaccagctgtaaatgtgccgcagataaacagtggagaagcttggaggtgttcagtgcgagcgatagtgtttcaactctatgaacatatcatcgttgggttaatgggcatcatctactggggtctggggatagccctgcttcctctcggacctcaggcctga

SEQ ID NO: 22015 - DNA, 921 bp, Zea mays
  Peptide Sequence Number=SeqID_63794
atgccgtctccatggtccaggagctcttccgttgcacgaatcttggttcaatctgtagacggggggaagacggggggtgcggtttgcttaagtggctgcgatgctatgctaatgtggagagatgggcaaaaatgccttttccggtctccttttgctcttgtgcaggagctgaacctgccgggcgagccgatgtacggctcgccggtgtccaaggacctcaacctcccggtgcagccgcccatggcctcgtccgggctgctgaggtacagatcggcgcccagcacggtgctcggcgacctgtgcgaggacttcctctcttccgcgccccgcgccgccagccctgacgccggcgccgacaacgtcttctccaggttccttgctgaccaccacatccgggacgacaagccgtcgccgcttgcctccgccgccgtccacttcccgactgaaaccgacacggcctcccagcagcagcagcagcagatgatgttccactcccagcagcagcaggagatggtgagcgccaagtccggcctttaccgcaccgtgaactcaggcgtagaaaccgcggccgctgctggtgccggcggggccagctccagtgacaacgctagcaacctgattcgacagagcagctcccccgccggattcctcgatcatttgaacatggagaacggttggcctcttccaaattcaccttcatttagtactaccgtagttaccattccctgcttgtttgcttccttgccatcaattattgacgttattggaggacgtttttcttcgggagacatttctattttctggactgacactgagcgtgtccccacctacgctaacttgctcaattcgagataccggggccatgctgatggcgggtatggccacggaggattccctcgcaggcggcggaagcaggcttaa

SEQ ID NO: 22016 - DNA, 174 bp, Zea mays
  Peptide Sequence Number=SeqID_63795
atggcggtggcagttgttgacccacgtggcacgacggcgtccaacacgggcgacagggccgggtacgacccggtgttcgaggtgatggtgcggaacgcttgccgctgcgccgtccgcgttgtgcgcctccgcttcgagggcttcgccagctcggtgcccgtggacccgcgctga

SEQ ID NO: 22017 - DNA, 1029 bp, Zea mays
  Peptide Sequence Number=SeqID_63796
atggtggacggggagcggagtgcggtcggcgtcggggtgcgggtggggacgggaaggggcggcgggggagtcaagcgcgaggagaaagagaggaggggaggggaacgagcgggttggggtcaggggcggagcgcggttggatcgtgcgtgaaagaacggcttagattcaccgaaggcaaagaacggcttagattcaccgaaggcagaaccaggggaggcagcctaccccttacagcattaatatgtagtaaagatttccaaataactattgcagaagaaccacccaaccagagtcctcacgctgcattcgggatagcagatgcccatgctcaaggtggcatgattggtgacctatccttgatgtgcccagagttcgttcaggtggcttgtttccaacgattttttgatgtattgcgcactgatagaaatatctcagtgcctatagttggctgctcttatgtacccatctccattttggtttgcagtcctacttggcagcctatggaggatccgaaacaacatgtgcgattaagcaccaaacaactgcttctgcagaacatggattacgtgttcgatatctttctgatatgtcttgactatctattttccccggattcccatctgaagacacacggcctggggacttggtatgttcaatgcgtgggatctcataggcagatatatgtgcccttcattgccaagctgagatctcggaagtgtaccacagcagcagctctcgcacgctttattctcgttcctgcattctattttactgcgaagtacggcgaacaaggttatatgatcttcttgacatccttgctggggttgagcaacgggtatctgaccgtatgtgtcctcacagtcacagtcacagaggcacccaaaggatacaaatacaacgggccagagcaaaacgcgctggggaatgttcttgttgttttcgtcatgacagggctgttttctggtgtcgtgctcgattggttatggttgatagggaaaggtacaaaggatgatggggtagactggtag

SEQ ID NO: 22018 - DNA, 1362 bp, Zea mays
  Peptide Sequence Number=SeqID_63797
atggcaggctcttcatcatacagcgttctccctctctggtaccacccgtttaactcttgccactttctgctccttttttttcttcttcttgatttgaaggaccagaccatggacaacgatgatgcacaaattggagttgctaaaactcagggaaagtattggggcattttcatctgctggcttcttggaaatggatgtctatttgggttcaatgggatgcttactattgaagattactacgtgtacctcttcccgaagtaccatccaacaaggattattactctcacctatcagccctttgttctcgccacaaccgccatattcacatatcacgaggccaaggtcaatactagggtgcgcaacctggcaggatacacgttgttcttcttgagctcatttggagtgatcatcctggatgttttgtcttcaggaagtggtggaatcgccccattcgttggtatctgtaccattgctgctgcttttggcatagcagacggtcatgttcaaggcggaatgactggtgatctgtccctgatgtgcccagaattcgtccagtccttctttggcggcgttgctgcatcaggtgcaataaccgcggcgttaaggttcttcacaaaagcggtgtttgagaattccagagatggcctgcggaaaggagctatgctgttctcttcgatctcgtgcttctttgagcttctatgcgttctactttatgctctggtgttcccgaagttgccaatcgtgaaattctaccgttcaaaagctgcctctgaggggtctcagacagtcaccgctgaccttgctgctggaggcatcaaaagcctgccgaatccattggctgaggaagatggtgtggtcgaacggttgaacaacaagcagttgctgcatgagaacatggactacgctctggacatgttcctggtctatgtcctgacactgtcgattttcccagggtttttggcggaagacactggatcgcacagcttgggttcttggtacgtgcttgtgttgatcgcgagctttaacgtgtcggacctgatcggaagatacctgcctctggtcgagcaaatgaagctgacatccaggacggggctactaaccgcagccatctctaggttcctgctcgtcccggcgttctacttcacggcaaagtacggtgaccagggctggatgatcatgttaacgtcgctccttggactgagcaacggccatctcaccgtctccgtcctcaccgaggcgccgaaaggctacaaggggccagaacagaatgctctggggaacctgctggtgcttttcctcttggcaggcatatttgttggcgccgtttctgattggctgtggctcataggcaaagggtggtga

SEQ ID NO: 22019 - DNA, 1275 bp, Zea mays
  Peptide Sequence Number=SeqID_63798
atgacagcattgccgagcttaccacaagtaaagcgagcagctccgacttcctacggtgaaccttccaaaaggcacaccgcaggtgaagccatgagcatggaggtagcaggtgcagaggcacctgtcaaggattatcatccaacaagagtactcacactagtttaccagccttttgcctttggaataaccctcatcatgacatattatgaagcaaagatgaacacaagattgagaaatcttgcaggattttcccttttcttcctcggttcttttgcattgataattctggatgttgcaactaaaggacatggtgggcttggtgttttcgttggtgtatgcataattagcgccatatttgggacagctgatgctaattgtcaaggcgcactggttggcgacctttctttaatgtgcccagagttcattcagagttttcatgacatgtattgtgctttgagttttcagtccttcatggcgggactagctgcatcaggggtcctaacatcagctttgagattagttaccaaggcagcttttgagagctcaaaagatggtcttcgcattggagctatactgttcttttcaatcacatgcctgttcgagctggtgtgcctcctgctatacacattcgtcttcggcaaactacccatcgtgaagtactaccgtgcaaaggcagccgctgaaggcagcaagactgttgccagcgacctcgccgctgcagggatcatctctgaacaacagggacagatggaggaggatccagagaaatacaagcgtctgaccactaaagagctgctgatgcagaacatcgactacgcgctcgatatctacctgatatacgtcctaacgctgtcgatcttcccaggatttttgtctgaagacaccggagcacacaacctgggaacatggtacgcgcttgtgctgatcgcgatgtacaacgtgtgggacctgatcgggaggtacgtgccgctgatcccgtgcttgaaactgacctcccggaagggcacgctggcggctgtcttggcgcggttcctgttcatcccggccttctacttcacggccaaatacggcgaccaggggtacatgatcttcctaacctccttcctggggctcaccaacgggtacctcaccgtgtgtgtgctcatggaggcgcccaaggggtacaagggccccgagcagaacgctctgggcaacgtgctcgtcgtctgcctcctcggcggcctcttctccggcgtcgtgctcgactggctctggctcattggcaagggctggtga

SEQ ID NO: 22020 - DNA, 225 bp, Zea mays
  Peptide Sequence Number=SeqID_63799
atggcggcggcggcggatacctcggaggcgtctgcggccgggatcgcgcttgcggaggccaatatcaactgggagagggcaaggatgaggaatgggcagccagggagcgtgggttacaggaaggcttctagagtcgcgtgctattttggaaatgtcatgctggcaacatggcaacaacaacaacaacaacaacaaagcctttttgtcccaagcacgttggggtag

SEQ ID NO: 22021 - DNA, 264 bp, Zea mays
  Peptide Sequence Number=SeqID_63800
atggggggtagtattaatagatttagtaaatgggtcaggcccattacattgaggggtaagacggttatggacaactatggtaatggtaggccttctgtcatgaaaactaccaggctgctgcttgatgaagatggctggagggggctttatagaggttttggacccaggtttcttaacatgtctctctggggcacatcaatgatcgtgacatatgagctcataagtaggccattttttagcaatcaagttagtttgcctcgctaa

SEQ ID NO: 22022 - DNA, 345 bp, Zea mays
  Peptide Sequence Number=SeqID_63801
atgggtgctaaacaactagccgaagttatgggcttcgttgaacaacttgggtacccttcagggtcgaagatctttgggggagggccagatgattacttgtattactgccaggctaaatggagaccgaatcaaaccgaagttcaacctatttctaaagagaaaaacaaacttaaggagatgataggaaagaagatatcagatcttgaagctttggatgctgaaaaggataagcgtatcacattactcgaagctgagttaaagcaagcaaagaaagagtttgaggctgaaactactagaataaggcaagcatccgccgaagcggttgttaaccttagcgctgcttaa

SEQ ID NO: 22023 - DNA, 579 bp, Zea mays
  Peptide Sequence Number=SeqID_63802
atgggccttcttcacatgcaagtggtgctctgcttctggctcctctcagatgctccccgccatctccactatcgagcttccagccgaaacgccacggggcttgttccctctgaagagggtggtaaccatgaagtagagcacaattttgaagataaaacctgggtcaacagctcaagcttcggagaaaattccggtatagctgcgctcgaagctgagatgccggccacaattgaggaaataccctcttctttagaaacccaagagacgaagatcgaggatgccatcgctctgatagccaaaaaatttactcctccgaaactgctctcagaaagcgaagaagaggaagaacggatagctccagtaacgcgctcattcttcgacattaacgaagacggatccaaggaaaaaaaatactaccaacaccattttggcgccaaagggtgttacttcgcctgctacagatgtgtcgatatcaaggagtccgaatgtttaattgacgcctgcagtggtgacaccttcggcaaccataatggccgaggagaaagtaggttcttcaatgcctatgctgacgaagaataa

SEQ ID NO: 22024 - DNA, 231 bp, Zea mays
  Peptide Sequence Number=SeqID_63803
atggaccaggttgaagatctccctgaccgtgggccccatgagccagtgatagctcttccaggcgcgcacacgcccatgcaacagaaaggggtgaccgacggggtgaccccacgcgtcaacgactcggcaaaagtggtgcacggaagtggaactgggctagctggggaaattcggcccatttggtcgattttgggttttacagtcccaccggtcaggatcatcttcacgtaa

SEQ ID NO: 22025 - DNA, 210 bp, Zea mays
  Peptide Sequence Number=SeqID_63804
atgagtaaatactgttggtccgagagtggaagaggtgttacaaatggtacgaatgactcgacgggtgacccatactcacatgggtatgagtatgatgtaaatttatacctaccagtggatatgagtgatctaacagaatcacaagactatttttttatcgtgagtatatgtacagtggcggagaggccattatggcttagtgtggcatga

SEQ ID NO: 22026 - DNA, 1254 bp, Zea mays
  Peptide Sequence Number=SeqID_63805
atgtttttcgacgggtcactgatgaagacaggagcaggcgcaggcctgctcttcatctcgcccctcgggaagcacgtacgctacgtgctacgcctccatttcccggcgtccaacaatgtggccgagtacgaggctctggtcaacgagttgcgcatcgccatcgagctaggggtccgacgcctcgacgctcgcggtgactcgcagctcgtcatcgaccaagtcatgaagaactcccactgccgcgacccgaagatggaagcctactgcgatgaggttcggcgtctggaagacaagttctacgggctcgagctcaaccacatcgcccgacgctacaacgagactgctgacgagctagctaaaatagcctcggggcgaacaacgtcgttcgtcttgctgggagacgggaaggagctctaccaccgcagcccctcaggcatcctccagcgatgtatttccatcgccgaaggccaggagctcttacaggagatacactcgggggcttgcggccatcacgcagcacctcgagcccttgttggaaacgcctttcgacaaggcttctactggccgaccgcggtggccgacgccactagaattgtctgcacctgccaagggtgtcaattctatgcaaggcagaccaacctgcccgctcaggctctgcagaccatacccatcacctggctgtttgttgtgtggggtctggacctcgtcggccccttacagaaggcacctgggggctacacgcacctgttggtcaccatcgacaaattctccaagtggatcgaggtccgacccctaaatagcatcaggtccgaacaggcggtggcgttcttcaccaacatcatccatcgctttggggtcccgaactccatcatcaccgacaacggcacccagttcaccggcagaaagttcctggacttctgcgaggatcaccacatccgggtggactgggccaccgtggctcaccccatgacgaatgggcaagtagagcgtgccaacggcatgatcctgcaagggctcaagccgtggatctacgacgacctcaacaagtttggcaagcgatggatgaaggagctcccctcggtggtctggagtctgaggacaacgccgagtcgagccacgggcatcacaccgttctttctagtctatggggccgaggccatcttgcccacagacttagaatacggttcccgaggacgagggcctacgccgaccaaagcaatcgatctaatcgagaagactcactggaccagctag

SEQ ID NO: 22027 - DNA, 546 bp, Zea mays
  Peptide Sequence Number=SeqID_63806
atgacgaggatctcctacccacctcgctcaatagatctgcgcgatagtcggcacccgccacccagcttcggcacgatgatcggcacctggcacccccacgcgcaacagatccctccccccggcgatgcccatggaaccctaaaccgtcatcgtcaacgacaaggtgtgatcgtacctccactgcctcccagctacgcgagcctaggcctcagcctcggccttgatggcggcatgactgatcttcgactccatgatggtgcatcactgtgcggttcactggctagcaaactaactctagcaaagttcaggttttcaaaagcgaagtttcctgacagtgagatgtatgcaacacatagtattggtgattatgtccttcaacttgttgttggtcagccatctaagaacttaacattgctagaaactggtgagcctatctattccctgacactgcagcttgttggtccatatctgaaaacaaagtctgatagtgacaagaatatgtctgtcatatttgatctcctaaggaagaagaaaattgcaggctag

SEQ ID NO: 22028 - DNA, 225 bp, Zea mays
  Peptide Sequence Number=SeqID_63807
atgcaggaatcccttgcaggaccgccatcgcagcaaaatgctcccgagggcctccctacactgaccactctcctactgcccttgcccctttcgggtaagatccacggcgcagaacgcttcttcatcccagcggtaccagtccgtggtgccgagctggcggcggcggcggaactcaccggcgtgaacgcttctcagtctctggtgctcgattgtggagtctgctag

SEQ ID NO: 22029 - DNA, 708 bp, Zea mays
  Peptide Sequence Number=SeqID_63808
atggggctgcgggacatcgagctcacgctgccgccggggttccggttctaccccagcgacgaggagctggtgtgccactacctgcacggcaaggtggccaacgagcagctcgcaggcgccggcgcagccatggtggaggtggatctgcacacccacgagccgtgggagctccctgacgtggcgaagctgagcaccaacgactggtacttcttcagcttccgcgaccgcaagtacgcgacggggcagcgcgccaaccgcgccaccaggtcgggctactggaaggccaccggcaaggaccgcgccatccacgaccccaggtccgccatcgtcgtcggcatgcgcaagaccctcgtcttctaccgcggccgcgcgcccaacggcgtcaagaccagctgggtgatgcacgagttccggatggtggaggacccccacgccccgcccaaggaggactgggttctatgcagggttttctacaagacgaaggccgacgacgccacggccgacagcgagcaagacgcccacagcagcggcatgttcgacttccacggcggccagcctcgccctcacgacggcgtcgtcctcgctgggccggctgctgcagcggcggcgccggcgtcaagagacggcggcgatcagtgtggcagcggcgcgctcattgacctaggactggacgagcactacacctacaacagcctgctgcagatgtga

SEQ ID NO: 22030 - DNA, 381 bp, Zea mays
  Peptide Sequence Number=SeqID_63809
atgtcgcctcccgctggtgtgccgcccctcctccagctcgcggcagcactaggcgagctccgccagcgcctgcccctacacgatcgccatacccagaggtggcgagggcgcgacatcgccaacaccgctgggggcggcgggctcggaagcccgtacaccgcgttggtcgcgacaagcttcatcgagggccaatattctgctgtgagatctgatagcagcggctgcgctgagctaggtggatctggatctggcggggttggatcagggagtggccggctcggcggtggcggcgtgggtggaggcaaagccgatgaggcggtcggtgccagggtcgcccacatctgcatccatgctcacgtctcttgcaaccgctgccgctga

SEQ ID NO: 22031 - DNA, 879 bp, Zea mays
  Peptide Sequence Number=SeqID_63810
atggagcaatggatgtcatacagactacttccagagcatatcaaggaacgaatactgcgtcaccatcaatatcggtggcaagaaacacaaggcgtggatgaagagggccttcttgtaaaccttcccaaggacctcaggagggatatcaagcgtcatctttgtctgtcacttctcaagagggttccaatgttcgaaaacatggacgaccaactcctggacgcaatgtgcgaccgtgtgaaacccatgctgtacacagaaggaagccacatcgttcgcgaaggcgacccagtgaacgagatgttcttcatcatgagagggaggctagagagcacgacaacggacggggggcgagcgggcttcttcaactccaacgtcctcgaaggcggcgacttctgcggcgaggagctcctcacgtgggccctggacccagcctcgggctccaaccttccaagctcgacgaggacggcgaggacgctgtcggaggtggaaggcttctccctgagggctcgccacctgaggttcgtggccagccagtacaggcggctccacagcaagcagctccggcacaccttcaggttctactcccaccagtggcggacctgggccgcgtgcttcgtacaggcggcttggcacaggtactgccggaggaggctggaggagggcgtgcgcgagaaggagaggatgttccgggcagcggccgtgaccgacatctccagctcccgcagcctcggcgccgcgctctacgctgcccacttcgctcgcaacatggtaaggacgctgcggaggaacgccgcacggaaggcccgtctgctggatacagtgtcttcgaggctgttgcagaagccagcggaacccaactttttcgctgaagaagactga

SEQ ID NO: 22032 - DNA, 1125 bp, Zea mays
  Peptide Sequence Number=SeqID_63811
atgaaacccaccagcgcaagagtcctcgacccccgggggtctttcctgcagacatggaacaaggtgttcgtgatatcgtgcctcgtttcagtctccgtggactcgctcttcctctacgccccggcgatcgacggcgacatcggctgcctgtacctggacgacaagctggagaagatagcctgcctcctgcgctccctcaccgatgccctgtacctgctccgcatggcgttccagttctccacagcctttgcggctcccactcctcccggagcgtttggccgcggtgtcctggtcgacgacctgctggccatagcgaagcactacctgtcgacgtatttcctggtcgacgtcttggctattctgccactgccccaggttttcgtgtgggtagtgcggccacacctccagagttcagaggttatgaacgcgaaaaacgtgctgatgttcatgatcctacttcagtacgtgcctcggctggtccggataataccactctacctcgaaatcacgagatcagccggcacagtagtggacactgcatggccgggggcagcctttaacctgctagtttacatactcgctagccatgatgtccttggagctctttggtacattctggccatacagcgagaggacacctgttggagagaagcttgcaacagccaggaaggctgtgatctggcaagtctgtactgtgggagtactgcatctggaaacaacagtacgttcttgcaggatgcgtgcccaacagatggcgatggcgccgatgtggacccaatcttcggaatttatctgccagccctgcagaatgtttcgcagtcatcaggtttcttccaaaaactgttctactgcttttggtgggggctacaaaatctatgttcctatggtcagaaccttaaaacaagcacttacatatgggagaatctatttgctgtctttgtctcgatgtcaggcttagttttgttcgctctcctcataggaaatgtgcagggacgaggtaatggaagccctgggcttccattagtactaggaagccccagccagcaaatgaggcctgaattacggcgtgaaaatcgcgtgcggccgattgagcgcgggttctggctcgaatggatttcagcgtaa

SEQ ID NO: 22033 - DNA, 459 bp, Zea mays
  Peptide Sequence Number=SeqID_63812
atgggcccgtgcgcagtcacatgccctcatccctttgtctctgtcgcgcgggtcctgcacgtcaggcttctacgcgcgcgcgtcgcagatcttgcgttctcgctgcgtgtgggccctggctgtcaggcgccacctccctctctcgccagcaaccttgccgagtccggcgacgtcgggagcggagctcgcgtggccgttgtggtcaaccagcggattcccttgcggcgcaactctataaagatcaggtccacgccctgttgcgctatcccgcccatctcgtcagccctcatcgcgaccagaaaatcaccgccgccagtgctacgttcgcaggaggcgagatccgccaccgtcgaccgagcgctgcactgcagccgtggccctgtggttcgactgggaagcttcaccgagtccccacggagctgcggatcaccttggtggaaggagaggaccactaggtga

SEQ ID NO: 22034 - DNA, 234 bp, Zea mays
  Peptide Sequence Number=SeqID_63813
atgacgtgggccttggacgccaagataatgacggctggaccacccatgtcagcctcgcacaacgtggacgccgctcgcctacgcttgctcgaagccaatgacaggtgggccctctgcgtcaccctctactcaccatccgcgctatctcaaccgctgccgtgtgggccacatctatcagcagtgaggtcacaagaatatgaagaccaacttggtacctgggaatctcaagtctaa

SEQ ID NO: 22035 - DNA, 261 bp, Zea mays
  Peptide Sequence Number=SeqID_63814
atgaaggctatagggacagtgctactgcacaagactggcatttctggagcaagacacatgtacgaccccacctacaggttcaccaccatagccaaggtgggcccgggggcctctattggtaccctgaatatggggtacccacttgtgttatgtcaaggtgagacctcggtggccgccattgaggatttcacgggcaaccagcccaacgcggggctaaggcccaccatatggagttgtggccagaccaagctcatctcctag

SEQ ID NO: 22036 - DNA, 309 bp, Zea mays
  Peptide Sequence Number=SeqID_63815
atgacgcttcccgttgatgtggccggcccgcgccctagattgggcgatgtgggggcttctccgaggtcgaggtcgagtccgtcttccgtggccgaggtcgagcccgagcccctaggtcgggcgaggcggaggtcgttggctgaggccagggcggagttggtcgggcgaagcggagtttcgtcgtcttctggggctaagcccaagtccgagccctgggtcgggcggagcagaattcgtcgtcttctggggctgagcccaagtccgagccctgcgtcaggcggagcggaattcgtcgtcttctggggctaa

SEQ ID NO: 22037 - DNA, 750 bp, Zea mays
  Peptide Sequence Number=SeqID_63816
atgggcacaacaagcaggcatcctgatgccatcctttgggatgccgccttcggaacttgcaccgacgcctccaccttcgccacatttccctatgttatcgaaaccacgcctatggtacccgaatatggtcgtgcctggagctcactgttgttgctcctggcaactgtgctcgccaccaccgcggccgaagcccggctcgcaagggccacgtgccgccatgatcccatccctgcggtgcacccattctcatcccttttgggccaggccacacgcgtgcaaatacccacgctcatccaggcccacgcgatacgaccaaaatcctcttccgtcgcgagccaggacgcgctcgcgcagtccgagcgcagtctcgctagggttttctctcgccctcgagctctccgcctctccccccgtctcctctcgcccttgagctctccgcctctccccccgtctcctctcgccgtcgagctctccccccgtctcctctcgccgtcgagctctccccccgtctcctctcgccctcgagctctctgtcccctgtctcctctcgccctcgagctctcccaccccgtctcctatcggcctcgagctctcactcccccgtcgcttgtcgtcctcgagctctcgcaccctccactctcgtcgctggtgaggatctcaatccttcagggtgcgtcaaaagatctgagaatatgggaattttatgtgttgcgaaatgttggctctgagctccatttgcctgctctctag

SEQ ID NO: 22038 - DNA, 408 bp, Zea mays
  Peptide Sequence Number=SeqID_63817
atggccttgttcagccgaagactgctcagtctgggagcaccggactgtccggtggtgcaccggacagtatccggtggtgcaccggacagtgtccggtgcgccaggctggctcgagcgaactggccgctctcaggaattcaccggcgactgcgagtaataacaggagctcttctgaaaggccttcacatgttaatcctatcgaagaataacatatcaattattgaacgccttagagaattgacacgattgcgcttgttggatatcagctgtaataggatatctagaattggccatggattggcctcatgttcctctttgaaggagttatatctagtcggtaacaagatcagtgaggcgcagagtatgctaggaaaatactcaataattatggtacatgtccaattctaa

SEQ ID NO: 22039 - DNA, 321 bp, Zea mays
  Peptide Sequence Number=SeqID_63818
atggccagttctaaagatcacaccgatatctccccagacaatatccttaggccggctatcgaaagcctattggccgatgagcaacaactatatgaagacttgatgagtcaaatgagggaggatgcacgtcgccaaattgccaaggctgaggaggaggcgacggagaaattcttatcatacttcacagtggatcaccaccacaagattaccaagcatggagagatcgagattgcatccctgctaccttcgcttcaaatctcaaatgtaagtaaatctaacgacatccaatctattaagcaacaacaagatgagatgaaataa

SEQ ID NO: 22040 - DNA, 213 bp, Zea mays
  Peptide Sequence Number=SeqID_63819
atggcccttcaaaaaggagagcagtttggtgctgatgtgcctttggcaccttcgttcgaggatagtgacaacattggcattgaagaggatagcactaccatacgtcctacgaagccaagccatatggacttcagcaaatctaagatcaaaggaggacatattgaggtacttaactgctttggctatattgacaatgttgattggtgtggctag

SEQ ID NO: 22041 - DNA, 153 bp, Zea mays
  Peptide Sequence Number=SeqID_63820
atggagggtccacgacctggtcgcaggagcggatcctcctttgcgtatgttcagacggtccacgtttggggctcaaaaaagtccgcgatggcgcagccacccaagacgccactagtcgatgtagagccgaagataggtgaagatttgaggtag

SEQ ID NO: 22042 - DNA, 171 bp, Zea mays
  Peptide Sequence Number=SeqID_63821
atggcgcagtgtgtcgtcttcttcgcagcagacctagatctcacctcccaggagggatcccgtcggggaagagagatcctaggggaggaggtctggatccgttacaagtcggttcctgagttaattccgcaggttttggtaacaaatcccactagaaatccagaaccctaa

SEQ ID NO: 22043 - DNA, 174 bp, Zea mays
  Peptide Sequence Number=SeqID_63822
atggtcgtcgatcaagtcatgaatgtgatggagccccactacccaagcatgtgcacgtactacgacaaggtgaacccttcctctggttctgtgacaacttcaacatctgcattgactgggctgtcgtggcacacccacgaaccaacgaccgggtcgagcgcgctaacggcctaa

SEQ ID NO: 22044 - DNA, 246 bp, Zea mays
  Peptide Sequence Number=SeqID_63823
atggcgctccacgagctctgtgacgacggcggctctcagctctcttacggaagcagggcgacgtcagcaaggactcgaccgctccaacagctgtccctccgccaggctccgtcgctcctccgacagccacgacatcacgccagcaaggtaatttatgcatcaaagggatccagtgagcttgccgtgcttaaccggcgaaagggcgagagctcgtggaatggcttctggctccaccgtctggcgtag

SEQ ID NO: 22045 - DNA, 465 bp, Zea mays
  Peptide Sequence Number=SeqID_63824
atgacgggagcaggcatgaagcttaagatcaacaaggcatgcgacctcagctccatctccgtcctccctccccgtaggaccggagggagtggcggcgcaggttcctcggccgcggccgcggctgtggcggcggggtcgcagcagcggtcccagccgctgtcgcagcaatccttctcgcagggcgctgtggggagcggcggcgcgtcgtcgctcctgcactcgcagtcgcagctatcgcaggcctccctcgacgagaacctcctcacactccacctcgcttcgcccgcgcgcgaccaggtgccgtctgaacccattcctccctctcgtcggcgtcggcgtcatcgctgtacgatcgtgatcggggatgtgagccgttgtgctgttgtcatgtgtgatcagcgggattaccggttttgcttcgtcattcctccttctcgtcgctgtccgaccgtgatcgggatgtga

SEQ ID NO: 22046 - DNA, 532 bp, Zea mays
  Peptide Sequence Number=SeqID_63825
ctcccgccaccacctgcgccacctcctcacctcgctgtcctcccgcgccatcctctccctggcgcccccggtgtccgccttcaccgccttcgccgccgccatcgccacctacaacacgctcctaccggcctacgcgctcaccgcatcctcgctcccctacgagctcactgcgcccgcgctcgcgctcctcctcgtcttccgcaccgaggcttcctacgcgcgcttcgacgagggacgcaaggcgtggatgcgcgtgctcgccagcgcagccgacctcgccgggatgctcatgcgtcatccttttcctaacaatctgcatacgggtggcgctcccaatccgggaccgggaggacgacaggctgacgacgagccgctcaggcgcgcgctcgtcaactacgtcctcgccttccccgtcgcgctcaaggtgtctaaactgtcttgttttcttgaaggaatcggcgtttgcgagcagctcatggggatccctatccctctcgcatacactagacttacttcaaggtgggtgttctaa

SEQ ID NO: 22047 - DNA, 459 bp, Zea mays
  Peptide Sequence Number=SeqID_63826
atggaggaaaaaatagcgaagacaacgccggacaaatctgaagttcatcccttaaacgtgatcaaggtcacgacagaagaccttattgaggcagacatggagattgaagaagaaatcgaggcagacatggagattgaagaagaaatcgctcgagagatggagaaacggaatgagagattggcttgctttcgaaaaaccaagaatggtgtgatcaaatggggcaagcacatccagcaagtattagagctcgcgagcagttcacagtgcacgcatcatccaaggacgcatggagcgggcatgcgagcctgcaggctgcagcacgccgtctcgttgagtagcccgagaggtcacgctgcctcgaccgggatgtgtggcgccatggaccccgtgaccatgaggacagagctaggaccagatgctagggttgatctcttatctgggatggcaatggcttattag

SEQ ID NO: 22048 - DNA, 537 bp, Zea mays
  Peptide Sequence Number=SeqID_63827
atgaacattgcttatgtggaacttggtgtgcataacttggagacaactggtcaagccaaggatggaggctccggcacccccgcccgcccgggctcgcctggggtcgggatgccctgctgcccgccgtcgctgctcggagtcggcccacggctgcgctccttcctccgcgactacgacgcgctccagtccctcgccctcgtactcatctacctccagattggttgtgcactgatcggatcacttggggcattgttcaatggggttcttgtgatcaacctggtgattggtctatttgctgttgttgcaattgagagcagtagccagagacttggtcggacatatgctgtccttctcttctttgctgtcgtccttgacgttgcttggtttatactcttctcacatgctatctggactattaatcctgatgataagtatggtcaactgtttgttttctcactcagacttgcattgtggatgcaaatcattgggtttttcagtcaggtttttgtcttcgttcttatggattcagatgtatag

SEQ ID NO: 22049 - DNA, 612 bp, Zea mays
  Peptide Sequence Number=SeqID_63828
atggcccaagggcacatttccctttcagatgggcgtacccagtgccgtaggcttcccgcactgtgcggggtctggggaagggccgctgatatactggccaaggaaggtatcagtgccgaggtaatcaatcttcgctcaattagaccgctggatagagctactattaatgcatctgtgaggaaaaccaatagattggtaaccgtagaagaaggcttccctcaacatgggattggtgcggaaatatgcatgtctgttgtagaggacagctttgagtatcttgatgcaccagtcgagaggattgctggagctgatgtgcccatgccgtacgctgccaaccttgagaggatggctgttccacagtactcgacatgggagatgcaaatatttctttctaggataggattttggagccttggctgggaaaaggtgaacgtggtagctgtgatattagcctgtggcattgaaagcaggctcaccgctcacgcgattgatcatttatcggtgtccccttttgactctttgctattgccacacctgcaggtcgatgacatcgtccgggcagccaagcgtgcttgctacagggcagcagtaccgatggcagcaaccgcctag

SEQ ID NO: 22050 - DNA, 1089 bp, Zea mays
  Peptide Sequence Number=SeqID_63829
atgctgggcgtcgcgcggaggcggctcggatccggatgcgtcagtgctctcccgccaccgggctccccgccctcgcttcgctctcaccgtgacccgtttctctccccgcaggtgctcgcccagctggcgcaggccctccgccccgccgccgctcccgccaggacctactccgccgcggccaaggagataactgtacgggaagcattgaataccgcattagatgaagaaatgtcggcagacccttctgttttcttgatgggagaagaggttggcgagtaccaaggtgcatacaagatatccaagggtttgcttgacaagtatggccccgatagggttctcgatactccgatcactgaggcgggcttcactggcattggtgttggtgccgcttaccatggtcttcgacctattgtagagttcatgacatttaacttttcgatgcaggcaattgatcacataattaattcagctgccaagtcgaactacatgtctgctgggcagatatctgttcctattgtctttaggggtccaaatggtgctgctgctggagttggtgcccaacactcacagataggtattttgttgtactacgatggaattactaactgccttagtatgcagtgctatgcagcttggtatgcacatgttcccggattgaaagttctagctccatattctgcagaagatgctcgaggtttgctgaaagcagcaatcagggatccagatcctgttgtgttccttgaaaatgaacttctttatggtgaatcatttcctgtatctgctgaggtacttgattctagcttctgccttccgattggaaaggctaagatagagcgacaagggaaagatgtcactatcactgcattctccaaaatggtgggatatgcccttcagcgcagccgaccgttgcagatgcgggagccgttggcgcaccggacatgtccggtgcacaccggacagtccggtgcccccttccgaccgttggcttggccacgtgtcccgcgcagatcgcgcggccgaccgttggccctgccgaccgttggctcaccggacagtccggtgcacaccggacagtctggtgaattttag

SEQ ID NO: 22051 - DNA, 603 bp, Zea mays
  Peptide Sequence Number=SeqID_63830
atgcatggtgatgggctgagtgtgagcctaccggacggtcttcagtcggaagcccagcaacaggaggtcgaaatccagcccgacgcacaggagcaagtggcccaagtggcagacgagcgtcgacgtcgccagctccacgccaaccctcgagtccaaggcctagaatggctaacaattggtatcagaggaacgttccttgctatgtcgtctgccactcccatcgagggaagcctcacgctggccctcgaaaaccagacccgagcccttctgtctgaactggacaaacgtttcctcgcaagggacgaccagtggaactcccgattgggcgatctggagtctcgcttgtccgcaatggagcaatcctggtcggaatttccctcgtctcttcggtccgatgtcgaagcgcatctgacggctgccgattcggcggtcgacgtgcgactgcttcagatcgagacggagactcactctcgtgtcgtcgcgctggaatcatccgtgcagcgcctcgaagcatggcgtccacgcgttgaatcgtcgctcgatgctctgcaatcggaagcgggaggctggcggctcgacgctgcacagcgggactcgtcctga

SEQ ID NO: 22052 - DNA, 116 bp, Zea mays
  Peptide Sequence Number=SeqID_63831
cgaaggagaccctcagacaatgcaaagttgggcactgcggactggtgaacagcaagtttagtgatcatagactgagcctcggcatcctgaagataactggattgtacatcagatag

SEQ ID NO: 22053 - DNA, 267 bp, Zea mays
  Peptide Sequence Number=SeqID_63832
atgggcaagcggatccaccccggaagtcggtccaatacacgcggcgacatcccgcgacgcgcctggaacacccgtcgggccggggagttgcccacggacgagatccatgttggcggccacgctctctgccccgctcgacggaggtgtatcgggtccacggctagagttcgccgccaccaatacacacgtggagcacaagcgagccacccaagaccccgagtaaattgcgccatgactcttatactcaggatcaagtccgatttctag

SEQ ID NO: 22054 - DNA, 267 bp, Zea mays
  Peptide Sequence Number=SeqID_63833
atgggcaagcggatccaccctggaagtcggtccaatacacgcggcggcatcccgcgacgcgcctggaacacccgtcgggccggggagttgcccacggacgagatccatgttggcggccacgctctctgctccgctcggcggaggtgtatcgggtccacagctagagttcgccgccaccaatacacacgtggagcacaagcgagccacccaagaccccgagtaaattgcgccatgactcttatactcaggatcaagtccgatttctag

SEQ ID NO: 22055 - DNA, 396 bp, Zea mays
  Peptide Sequence Number=SeqID_63834
atgggcaagttgaactacttccttggattccaagtgaagcaactcaaggaaggaaccttcatctcccaaacaaagtacactcaagacctactcaaaaggtttgggatgaagcacgcaaagcccgcaaaaacatcaatggggatcgacgggcatttggacctcgacaaaggagaaactactctctatgagctcagagttaaggagaagcaaattggagaaacaaagttgctggggcaggaaggcaaggagcctgactactttgcctctgatactgacttcctcctagttggttgtgttggcggtactactgctgctaatgagggaactgcctctggaattgctattgatgcggacgctgattctggtgttgatatccctgagggtgactctgcttga

SEQ ID NO: 22056 - DNA, 339 bp, Zea mays
  Peptide Sequence Number=SeqID_63835
atgccgagaatccccgagcgtcgtcccaaggtgttccccatccctcacccaaggtcgtgccagccttggcgcacccaattcccgctccccgcggccgggattgcttgccagagtaacttcgactcgcctagagcgccccctctgccatccactcgcttccagtcacgttctcacagccggaacgccgccatcgagttcgctgggctcccctcactggtcctgaccaactctggtgaccccagatcccccggagtccgcgcctacctcatctccggcgacttcaccgccatggacgggagcagcgtcgaccaccgtgttgttaacccccttggcgtctga

SEQ ID NO: 22057 - DNA, 364 bp, Zea mays
  Peptide Sequence Number=SeqID_63836
atgacgggggaaagcgaagtctactccaaccaagcgaagtccttaggacggagggaccgacaaggacaagcgaaggctttgccgaacgtctcctcgttcaagaatctcccttactggtgtgcaccacataccattgcaacggctgagcaggccatggcgaagcaagatgtcttctcatttgatttcgtaggtgccaacttaactacaggcctcaaatctctaccagaagcagaagtgaaagcctccgaacaaacacgaacctgcttcattgctcagagcggtggcgacgagtgcgaggggaactttccgagagaactgcgcatcattttaattagagaagaaaaaaggtccaaaatggaccaag

SEQ ID NO: 22058 - DNA, 1692 bp, Zea mays
  Peptide Sequence Number=SeqID_63837
atgggggaggagctcggtggactcctcagggacgacgacgcagggagcgacgcagtccggctgggagcctggctctggggagttgtccggggaagcagccaagcaggacacgcgccgtgggcatggaggacgcctgcgtctagggcacgagcaggagaggcggcgaccgggtcggggacgagggcggccgccgtgcacgcgcccagagaggaggtactagagagagccatagtggggtctgtcggcagccatgaaggcagcggcgacatatctggtgggggcgccggcagaacggccgtcagaggctacatttttattcttttgcttttctgtaggcaactcttaatgagagaagacggaaagaaacagattgtcaaagaatacattgagaaaggaaatgctgcaagaagcacaggcacaactggagccaatgaagagtcctcacgatctcatgctattctgcaattgtctgtgaaaaagcatatcccagttactgaaacccggagacagagagaccgagatgctattgaagcaaagaatacaaagcatgtggggaaaatgtcatttattgatcttgctggaagtgagcgtggtgctgatacaacagataatgacaaacaaacaagaattgaaggtgcagagatcaacaagagccttttggctctcaaggaatgtattcgggcactggataacgatcaaatacacattcctttcagaggaagcaagctaacagaggtgcttcgggactcctttgttggaaactcccgtacagtgatgatttcttgcgtttcaccaagttcaggttcatgtgaacacacactgaatacgttaagatatgctgacagggttaaaagtctttcaaaaggtggtaacacaaaaaaggagcagtttgctgtgcagtctgtatcatctggcaaggaatctacctacacatcgtaccctttatcatgtgaagctgaagagactatggagcagactcaagaaattaggcctgttgattcttctaggaaaggtgttgacagtttcacttccaattcttccattgagcctgagaaaaactcctattgtatgattccaagctatccacataaaggaaaagaagaaactagtactagatctggtttgaatgatagggagagaggggacttgaaatataaccaggctggttttaatagtaaaacacattcacttcaggaatcaataaattcacaagaagaggtgaaagtgacaaaagtctcaccaccccggagaaaagctaacagggatgagaaatcagaaaggcaggtcaactacatgaaaaaagaaagtgggcctgaaattagtcggactggtgttaagcagcaacagcaacttaaacagctgcaaaggccatcatcaacctcatcgtcgcaggttttatccaagcaatctgagaaggaagatatggaaataaacacaatacttgaggaagaggcgctgatagcagctcacagaaaggaaattgaaagtacaatggagatagtacgagaagagatgaatctattagcagaggtcgatcagccaggtagtcttattgacaactacgtggcacagctaagctttctgttgtcgcggaaggcttctggtttggtaagccttcaggcacgcttggcacggtttcagcagcgcctcaaggaacaggagattcttagccgtcaaaaaccattgagatag

SEQ ID NO: 22059 - DNA, 786 bp, Zea mays
  Peptide Sequence Number=SeqID_63838
atggatgtaaatcacatcactgagatggaggatgttttaaatgatgatgaaatggaatatccatttgagggtgatgctaatgccagtaacaatgatcagatagtagaggaccatgctgatgatgcccctattgctagtggtgagaatgccatcgtccaacagcaagttggtctgagaaagaagaagtacatgtatgtgaatgaccatcgtgttgtgaaacaacggaaactagtaccaacagtgacagttcccgctatgaacaaggataaaggtccaatgccaatgagtatctccaagatgaaaaccaagaagccaatcggtacccctactagaagcaagctaatggcatctgcattcaaggtcacatcaagcaagaatgaacttatggttttaatgaaaaaattagctgaagttgtgcaacctgcaattgcaagtgctaccactagtgcaaacgcaagtgcaagttcaagtgtaagagcaagtgcaagtgcaagcataccagcaagtgtgagcataccagcaagtgcccaagcaagtgtcggcgacgatgaaaaacaagtagatggacagattgggaaaagactcacttcatgtgtctggcaacatttcaaaaggtatgaaatagatgttgagcaaactgatggttccagtgttaagcaaaagtgggcaaaatgtcttcgatgttcacataaagctaaggctgatgcttcaaatggtacaaaggcttttagtaaccacttaaaattgaaacattgtcttgtgaagggtcaacaacagctaagttag

SEQ ID NO: 22060 - DNA, 345 bp, Zea mays
  Peptide Sequence Number=SeqID_63839
atggagaaggcgaagaggtgcaagggcgtgggggcgtgggggcgtggaggaggcacatatgaacaagggcgtggcggcgccccggccaagggcccgcggcggtaccagcagggcctcggtacgaagcttgcgtccggcgctcaggttctgcagattgccaatgggtgggaaatggagaatgaagaagagatctcggatggaaggaagagaggagaggagaacggggagggaaaaaccacagtagcgtctccagtaccaacggcgacagtggctttgacgggagaagacaacggcgcgtggacggatagcgacggaggatggttattcgttctcctcaacggctaa

SEQ ID NO: 22061 - DNA, 267 bp, Zea mays
  Peptide Sequence Number=SeqID_63840
atgaacgacggcgcgaagaagcgggacgtgtcgagcaactccatgaacgtggcatgcaggaacacgagcctccttggaccgacgcgccttggcggtagctatcctactgcggcatggaggggggaaaggtttggcttccggtgggatggcaaaggaggatctcaatcaaagaaaagggaaacctcccgtccgttaaacaccaatcgtgaaacaaacctgacgtggatagcttgggagctcgctgttgctcccggctttaatgtatag

SEQ ID NO: 22062 - DNA, 366 bp, Zea mays
  Peptide Sequence Number=SeqID_63841
atggatggagtccgagcatggattgagggactggccccaaagtcccagcggcgaactcgctgcttctgttacggagctcgagtggaagatgaagctgacaactgggacccactggcagaactcggcgtgccaaaaaactctgtcagcacgcgcgtggggaaggctgggcagtgggcccatggtgtcggcgccatgagcttcctgggcggctgggtgaagggaaatgggtcagccgaggcaaattcggcccacggcgcaggttctctggaggacatggttgctggagtgacttggccgtccatcttgccaccgggttggattgtcgagtgggaccctacctcggctgaggaggagcatgaggagtga

SEQ ID NO: 22063 - DNA, 339 bp, Zea mays
  Peptide Sequence Number=SeqID_63842
atgagggttcagggcagggacagcgacaacagccacaaggtgaccgcaccaccgcagcacctgggatcacttgtgcttagaatgctgctcaagatgtcgttgacacctctgaagaatgtgccagaggcccaagctgaagaaattattctgacaatgggagcagctgctccccagaccgaagttggctcgctgaaccaatccgaagacagtgtggaaatggactttgaagaggacaacacggttatccaccctacgaagcccagccatgtggactttgggaaatccaaaatcaaagaagggcacatcgaggtacttaaccgctttggctacatcgactag

SEQ ID NO: 22064 - DNA, 1038 bp, Zea mays
  Peptide Sequence Number=SeqID_63843
atgaccacggcaggagaggtggattcggcagcaggaggtgaggacctggagccgctcttcgactacaagcgagtgcagcccaggatgacgttctgctttgacgacagcgacttggaggtggccgacatcttcaaatactgcaacaagcgcccaaaggtccacacctccacggaggaggagggtaagcctgacgaggaggtcgccgctgccaaggtggtggtcctcgatgaggaggattggttgcagccaccgccacccaaggccgcattcagggcaacggcagaggaagatagtgcgtttcgggaactgaggttgaagaaacaagagtgggcaaaattcgctgaatcagctgaggatatattgcaaaagctggatgaaatcacgaacaaagaagttggtcccaaggaaccacctgaacagataattctagatgaggagtctgaacctcaagtcgagaaagccagggaaaagatagtcatatcaatccaggacaaggatgggcagcaacagatgcgtgtatacaagtttaaaaatgaattagcgggcgacaaatattcgagaacggatgtagtaattacaggggcatatgcaactttgtttcgacaattcaggctctctgatgacgaaaagttcgacaagcttctcaaggtgtacgccaagaaggcaaagctcaacccatctgatctgtcttttgtgtttgatggtgagaagattaatccatcatctacacctcaggaccttgatctggaggacgaagacatgattgagacaaactcagccttttcgctgtcttcttttgcttccaacaaaggcttatttgtctatatatcatataacaaagacgttgaggccatccttgatatatgcgtgaaaccctcgagatatattgcagctgtaccgtgtacgtgggggtttggttggcaaaagccatctgcagaaatgccagagcagcctctgttattggatgtcagtatacaagacgccagtcagctagcaatgccaacagaagtgactaaggatggcgccaactgtagctaa

SEQ ID NO: 22065 - DNA, 1179 bp, Zea mays
  Peptide Sequence Number=SeqID_63844
atgaagtgggcggtgaccaccagcgtggactactccctggcgcagctgatccaggtgatcatcctgctggccaccggcggcaagaccggcggcggctacgtggcgtccaagtacatggtgctcggcttccacgccgccatcttgctcagccacgccgtcatcaacagcctccccatcagctgcctctccttcctcggccagttcgccgcggcctggaacgtgctaggcgtctttgtcctgatgattgccgtgccgaccgttgccaccgagagggcgagcgccgagttcgtcttcacccacttcaacaccgacaacgacggcgccgggatccggagcagcctgtacatctttgtcctggggctgctcatgagccagtacacgttcacaggatacgacgcctctgcgcatatgactgaggagacgaagaacgcggataagaacggccccatcggcatcatcagcgcgatcggcatctccatcctggtgggctggggctacatcctcggcatcaccttcgcggtgaaggacataccctacctgctgagccccgacaacgacgccggcggctacgccatcgccgaggtgttctacctcgccttcaagagccgctacgggagcggcgtcggcgggatcgtctgcctggggatcgtcgccgtcgccatctacctgtgcggcatgagctcggtcaccagcaactccaggatggcctacgcgttctcgagggacggcgccatgcccttctcctccgtctggcacaaggtcaacaggcaggacgtgcccatcaacgccgtctggctctcggctttcatcgcgctctgcatggcgctcccgtctctgggcagcctggtggcgttccaggcgatggtgtccatcgccacggtggggctgtacatctcgtacgcgctgccggtcctgttccgggtgactctggcgcgcaagtgcttcgtgccggggcccttcagcctgggccgctacggcgtcatggtcggctgggtcgctgtgctctgggtggccaccatctccgtgctcttctcgctgccggtcgcgtacccggtcaccaaggacacgctcaactacacacccgtcgccgtcggcggcctcttcttcctcgtcatcgcgtcctgggtgctcagcgccaggcactggttcacgggccccatcaccaatctggatggatga

SEQ ID NO: 22066 - DNA, 168 bp, Zea mays
  Peptide Sequence Number=SeqID_63845
atggcgccgtcgtcggttgtgattgcccagaacaacccgagagtcatcgacattgggcgacgatcaggagctaggagtgggatgtacatgggaataagaatgagctttgtggaggagaggataatgagaaaggaaacggggaggggggaatcagaaagggaatggtga

SEQ ID NO: 22067 - DNA, 420 bp, Zea mays
  Peptide Sequence Number=SeqID_63846
atgaccccaaacttctatttcttccccaactacgaccctgaccacggcgtgctcgctgttcatcctggacgggaccagtttgggggaaatcggcgttgcggcgtctctgggcgaaattgggagatgggattggggctatacggccgtaaggaactgtgctttcaccgtgcgcaattgatttgggagaaggtggagagatcagtgggaatttctagttgcgctcgagcttacttgaagaacagcgagcgcctcgccgtggaccaccgtgctatttatagccacggcgacccaacagtcgatctccggccccggatagcttcgctagtgcatgcctaccacgtcggtagaagacacagtgagggaggtcgcggcatgggtgacaccgcggcaaagttactgggtcacggtggccgtcggtga

SEQ ID NO: 22068 - DNA, 594 bp, Zea mays
  Peptide Sequence Number=SeqID_63847
atgcaggcggcatgcaaccgcgccaagtgggcgcaccccttcgactccaacgcgcccaacatggaggcccaggcccacacgtcatgcagccggcgcgccggttgctacgtgcgagaaactgcaccgccactcgcgccactaccgtgcctcctcgactgcggaaccagtaccacgactcgaggcaaccctgcgtatgacccaacagtgccagccaggcacatcgatcacgggtcagtcagccgcgggaggaggcgcgacggtcgatacggccaaaaatggacaaagccagaaggacagcgccgcctgcgccactccgactgcagtgccactcgacagagtgagtctgacaggcagtcaggccttgccaaaggcgccataggaaactccgctccgcccgaccccagggctcggactcgggctaagacccggaagacggcgaactccgctccgcccgaccccagggctcggactcgggctaagacccggaagacggcgaactccgctccgcccgacccccagggctcggactcgggctcagccccggaagacggcgaactccgctccgcccgaccccagggctcggactcgggctaa

SEQ ID NO: 22069 - DNA, 1053 bp, Zea mays
  Peptide Sequence Number=SeqID_63848
atggcgtcagcagccaccttccttctgatcatcgctgcagccgcatggacatcgctaaccgacgccgcaccctcaccgcctccattcgtcccaccgccgccgtgcgcaccgccgcaatcggcggtggcgtttctccgcgcgcgctgtgcaaccacgctgtacgccgtggcctgctacgagtccctcctcccgtacgcgtgcatattccagaccagccacgtcaagctcgcccgcgccgccggcgacgtcaacgcggcctggctccgctcgatctccaagcgcgtcaaggagctcgtcgcccgcggcgctgctggtggtggcggcacggccggcggggccaagtcggctgcgctccgcgactgtgccagcacggtctcgtcggccgccggcctggccaagcagtcggcggccgagctggccaagctcgacgtcgcaggaaccaccgccgggagaagccaggtccggtgggcgatttccaacgcccagacgtggctcagcgcgtccatgacgaatgaggcgacgtgcgctgacgggctcgcggatactggcgccgcagcgtcgtcgccggttgcgagggaggtgatggtcgcagtcgttggaaccaaggagctcaccagcaacactctcgcacttgttcgtgggataccgagccgaagtgaccgcagtcacttcgccgctccactgaccggcctgacaagaggacagcgccgcctgcgccgctccgactgttgtgccactcgacagagtgaggctgacagcagccaagtccggcctcgaggccataggaagctccgcctcgcccgaccccagggctcggactcgggctcgggctcagccccggaagacgacgaactccgcctcgccctaccccagggctcggactcagccctggcctcagccgacggtctccgcctcgcccgaccaaggggctcggactcgacctcggcctcggaagacagactcgacctcgacctcggaggagcctccgcctcgcccaacccagggctcggaccgaccacgtcacaggaggggccatcatcaccctacccctag

SEQ ID NO: 22070 - DNA, 202 bp, Zea mays
  Peptide Sequence Number=SeqID_63849
atgggcaagtctgacgtctgcgcgcgctgcgcgcgcattaaatgcaccacagggagccgttggcgccgaagagagccgttgctccgctggtgcaccggacagtccgagacaactgatcaagccaaggatggaagcaagaagtgctttgaggtaccgagtgcacgggagaaggtcgaggaggccaaggaagccaaagccagag

SEQ ID NO: 22071 - DNA, 438 bp, Zea mays
  Peptide Sequence Number=SeqID_63850
atggcatctgcgtggcgtggcgcgaataaggaggtgatgaagccaatgcacggcgagaagagcgaggacgtcgacggggtcaccaacgcaacgcgatcgagtgctctgctccgctgggacggggactggagccactcagatttctgcaggacgttgggaatcattccagaattgttctcttctcttctgcatttttttttgcatatgcaccgccagccacgcggacacgctaccgtggcaaggacttggataggccatgtgaaaatgactcgtggtgccctgcctcccttctttagccagacgacagctaccccaaacttctcccattgttgctccatctctggatcccctgatcccctctcttcagtctacgagctcaagcccaagattgcgcggtggagacatgtcccggtgggccggggaagtcatcggcaataa

SEQ ID NO: 22072 - DNA, 1761 bp, Zea mays
  Peptide Sequence Number=SeqID_63851
atggaaaccccctcgccgggcgccacgctctccgcggtgatcgccgaggaccgccgccgggaggctcgccgccgccaggggggcttcgggcagggcggtctcctcccgtacctcgtcccggcttgcgggcgtccggccggccagaggggcggcaggccgctgcactctgagctcatggtaaaactgcaccgctggggcgccactttcctgcccaagggcggcggcgccgtcgcgcgcgaactcgaggagccgtgccgcgcgccaagcccgccgccacggcctagaccatcattcacaccggctgcatcggcggcggagccggaggtggtgccgcgccacgaggcgcccgccgtgagtgtcgtccccacgacggggccttcgagggagagagaggagccggcggcgggatccgaagccattgccgaagcggacatgtccgccggcgagagcgcggggagcagcgaccaccaggcgacgccggtcgttaccgtcgcgggaggaagtgggggaacctggctcagagcttcgcccaagacgagagcgaggtctccgtcactgcagacggacagcgacgagtcccctcggcccctcgccgactccgccgcattgcccgtggtggccgacgacaagtacgtgtgggcggacaagtaccggcccaatgtcctcaacgagttcatctgcaacaagaccgtcgccgccgagctctaccagctggttgttgcacaccagtgcagacatttcatctttgaaggcccgccggcggttgggaagagaagcatggtactggcacttataagggatgcttttggcccccatgatctcaagatagaggaacagacaaagagatttgagctgaagggagaaattagaaagcacatcgatgtcagagtgaagacctctgagcatcatgtggaggtgagcttggctgatttacatggctacgagaagtacatcataaccactctgttgagtgaatccatcccatcaccaagctcagtttgtgaccatactaactgcagagtgattgttatccatgatgctgataagctctcgtttgatcttcaacattatattggttggtttttggggaggtatgccgggtgcaacaaaatcattttctgctgttctgatgcttctaatcttgaagccattaagcatctctgtaaggttgtgactcttcaaccaccttcatttgacgagataataaatgttctagagtacattgcaacgcaagagagcattgatttgcctcgtgatcttgctagaagaattacagtcggcgcaaacaataatctccgacagacaatacgctcttttgaagctacttggaaggcaaactacccgttcatagacggtcaagttattttgacaggatgggaagaagaaatctctaatgtggccagcaatatcatggaggagccaagtccaaagcaactgtttcttgtccggggaaagatcagaaaaatgattgaacatgatgtgtcacctcatttcattttctctcacctggtcgcggaactgaaaagggacaaggatgaagacttccagcacagcgttgatgaattggcctcggacttgaaccattttcaagattccaaagggcagtgcaaaggaaacaaatcacgggaggcaaactttaaaacgaggtatatgaacatagaaggttttaccgctgaggctcatgaccatgtttcatattctattctgaacttcagtctagtgaagcaactaaaccttgaattctggcagaattcaccgtaa

SEQ ID NO: 22073 - DNA, 573 bp, Zea mays
  Peptide Sequence Number=SeqID_63852
atgctgctgcccgtgttcatcctcttcgtgctcctcctctgcttcctctccatcttcctcctgcgcgacctcctccacttcctctccctctggctgcgccgccggcgccgcctccgcgccgatgcggacgccgcgtccgacgccacgccggacacgcacgcgtcgcacaagccggccggtctggaccccgcggtcctcgccacgttccccacggtgcggtggttcgaggagacgcatcggcccgcgtcggggcaggccgagtgcgcggtctgcctgtcggagttcgccgcgggcgacgcggtccgcctgctcaccgtctgccgccacgcgttccacacggcgtgcatcgactcgtggctcggcgcacacaccacgtgccccgtgtgccgctccgaactggacgcgccggctgccacgccccgctacggcggcggtggacgcatcgcgatcctggtagacgatcagggagacggcagcgcggcggtggcggacaccgaccatgcggcatcatccccggcgaacggcttcacttctgatctcaactacaacttagacatgatgatcaagaactaa

SEQ ID NO: 22074 - DNA, 759 bp, Zea mays
  Peptide Sequence Number=SeqID_63853
atggatcatcctctcggactttcaaaatattctgaacccatttacctgtttggtatattcaatcgacactggattgagtattactatgaggagcaggtggagagccttggagatgaagagttggcgcttgtggctagccagtttgtgcggttccacaacaaccaccaaaatcggtgggggaggttcaataaagaggcactcgagaataagtacctctacgggaaggtcaaggagcgcgccttcctcgcctccctgagcgacctcgaccatgactctaacaagtcagcctcgtccttgagcggcgaggagcccgagaggcgtgttgaggacaagctcaatgagctatgcttcatcaccaacactacaagaggcctttgcaccatggcccttagtcatgagacagtgggcgacgacgacaaggacatcgacgacgactctacttctgaggtatcacatttcattgatgatctcgtcgctgagagacgtcttgcgaggcctaaaggtgctttgcctcatgctgctaggcctcaggcagtgagaccacatggtggttatacccgatggagtgctagtcgtgtgccatatggccaagaaccctgtggtctagatcagataacctttgtggaggaggagcacgacaacgccgactggggtgatctcgagcggactctaccggctgtcccgattgctattgtctacctctgcgagtggggctccatgccacatccagcgcgatcctcctcaccagatgattggtga

SEQ ID NO: 22075 - DNA, 2448 bp, Zea mays
  Peptide Sequence Number=SeqID_63854
cagtaccaggacgccgggtgcgccctccccgcgggcctctgggccgagatcgtcgacggcctgcagtgggtggaggagtacatgggcgccaccctgggcgatccgcagcgcccgctcctgctctccgtccgctccggcgccgccgtgtccatgcccggcatgatggacacggtgctcaacctggggctcaacgacgaagtggccgccgggctggcggccaagagcggggagcgcttcgcctacgactccttccgccgcttcctcgacatgttcggcaacgtcgtcatggacatcccccgctcactgttcgaagagaagcttgagcacatgaaggaatccaaggggctgaagaacgacaccgacctcacggcctctgacctcaaagagctcgtgggtcagtacaaggaggtctacctctcagccaagggagagccattcccctcagaccccaagaagcagctggagctggcagtgctggctgtgttcaactcgtgggagagccccagggccaagaagtacaggagcatcaaccagatcactggcctcaggggcaccgccgtgaacgtgcagtgcatggtgttcggcaacatggggaacacttctggcaccggcgtgctcttcaccaggaaccccaacaccggagagaagaagctgtatggcgagttcctggtgaacgctcagggtgaggatgtggttgccggaataagaaccccagaggaccttgacgccatgaagaacctcatgccacaggcctacgacgagcttgttgagaactgcaacatcctggagagccactataaggaaatgcaggatatcgagttcactgtccaggaaaacaggctgtggatgttgcagtgcaggacagggaaacgtacgggcaaaagtgccgtgaagatcgccgtggacatggttaacgagggccttgttgagccccgctcagcgatcaagatggtagagccaggccacctggaccagcttctccatcctcagtttgagaacccgtcggcgtacaaggatcaagtcattgccactggtctgccagcctcacctggggctgctgtgggccaggttgtgttcactgctgaggatgctgaagcatggcattcccaagggaaagctgctattctggtaagggcggagaccagccctgaggacgttggtggcatgcacgctgctgtggggattcttacagagaggggtggcatgacttcccacgctgctgtggtcgcacgtgggtgggggaaatgctgcgtctcgggatgctcaggcattcgcgtaaacgatgcggagaagctcgtgacgatcggaggccatgtgctgcgcgaaggtgagtggctgtcgctgaatgggtcgactggtgaggtgatccttgggaagcagccgctttccccaccagcccttagtggtgatctgggaactttcatggcctgggtggatgatgttagaaagctcaaggtcctggctaacgccgatacccctgatgatgcattgactgcgcgaaacaatggggcacaaggaattggattatgccggacagagcacatgttctttgcttcagacgagaggattaaggctgtcaggcagatgattatggctcccacgcttgagctgaggcagcaggcgctcgaccgtctcttgccgtatcagaggtctgacttcgaaggcattttccgtgctatggatggactcccggtgaccatccgactcctggaccctcccctccacgagttccttccagaagggaacatcgaggacattgtaagtgaattatgtgctgagacgggagccaaccaggaggatgccctcgcgcgaattgaaaagctttcagaagtaaacccgatgcttggcttccgtgggtgcaggcttggtatatcgtaccctgaattgacagagatgcaagcccgggccatttttgaagctgctatagcaatgaccaaccagggtgttcaagtgttcccagagataatggaactggggcatcaagtgactcttatccgccaagttgctgagaaagtgttcgccaatgtgggcaagactatcgggtacaaagttggaacaatgattgagatccccagggcagctctggtggctgatgagatagcggagcaggctgaattcttctccttcggaacgaacgacctgacgcagatgacctttgggtacagcagggatgatgtgggaaagttcattcccgtctatcttgctcagggcatcctccaacatgaccccttcgaggtcctggaccagaggggagtgggcgagctggtgaagtttgctacagagaggggccgcaaagctaggcctaacttgaaggtgggcatttgtggagaacacggtggagagccttcgtctgtggccttcttcgcgaaggctgggctggattacgtttcttgctcccctttcagggttccgattgctaggctagctgcagctcaggtgcttgtctga

SEQ ID NO: 22076 - DNA, 222 bp, Zea mays
  Peptide Sequence Number=SeqID_63855
atggccgaggagcaaactgtgcctggggtgctgttggcaccttcgacagatgcgccagagacagcggtagaagttacgatctctcaggctgaagctggcgccgtgaatccatccggggatagtgatgatattgacattgaggagaacatcactaccattcgtcctacaaagccaagtcacgtgaacttcggtaaaatcaaagatcaagggaggacatattga

SEQ ID NO: 22077 - DNA, 1530 bp, Zea mays
  Peptide Sequence Number=SeqID_63856
atgacgaggccagcaccaccatcatcgcaggctctagtgcttctcgccgccgtcgccgtctcgctccttctttcccgctccagccatgtcgctgccggcggacaccctgattacgcggacgcgctcgccaaggcgatactcttcttccagggacagaggtcaggccagctgccgccggaccaggctgtcacgtggaggtccaactccggcctctccgacggctccgccgcaaacgtcgacctcaccggcgggtactacgacggcggcgacaacgccaagttcggcttcccgatggccttcacgacgacgatgctgtcgtggagcgtgctggagcacggcgggcggatgaaggcgcgcgtgcgcgacgcgcgcgacgccgtacggtggggcgcggactacctgctcaaggccgccacgcagaccccgggcaggctgtacgtgggcgtgggcgaccccggcgcagaccaccgctgctgggagcggcccgaggacatggacacgccgagggccgtgtactgggtgtccgcgtcggcgcccggctccgacgtcgccgccgagacggcggccgcgctcgccgccgccagcatggtgttcagggccgccgaccgggcctactcccggaggctgctcgccgcggcgcggggcgtgatggagctcgccgtgcagcaccaggggaagtacagcgacttcgttggcggcgacgtcggcgcgtactaccagtcgtactccggctacaaggtccccagatcaatgacctccgggatcagagtggacgagctcctgtgggggtcggcgtggctgctctgggccaccaacagctcctcgtacctcgcctacctctactccttgggggacaacgacggcgtcgacatgttcagctgggacaacaagctcgccggagcgcgcgtgctgctgtcacggagagctctggtgaacggcgacacgaggctggagccgttcaggcagcaggccgaggacttcttctgcaggatcctgcgcgactccccttcctccacgacgcagtacacgccgggcggcctgatgcacaagtcggggtacgccaacctgcagtacgtcacctcggccagcttcctgctcaccacctacgccaagtacatggccgccaccaagcacaccttctcctgccagagcctccccgtcaccgccacctccctcagggctctcgccaagcagcaggtggactacatcttgggcgccaacccccagggcatgtcctacatggtgaacttcggcgcgcggtggccgcagaggatccaccaccgggcgtcgtcgctgccgtcggtggccagccacccggcgcacatcgggtgccaggagggcttccagagctacttctattccagcggcgccaacccgaacgtgcacacgggcgccgtcgtcggcgggcccgacgagcacgacgagttcccggacgatcgcgccgactacgcgcggtcggagccgacgacgtacaccaacgcgcccctcgtcggctgcctcgcctacctcgcgggcacgtacaggacctag

SEQ ID NO: 22078 - DNA, 1638 bp, Zea mays
  Peptide Sequence Number=SeqID_63857
atgacggctgagcccgaacgaaggatgggccggcgcagccgaagccgcggccacagcggcgacggcttctccggctcatcgtcggttaaccaacagtggttgctgacaagtggtatcagactcatcttctggtcctggcggcttctctgcactttacgagaagtgcacggatggcaggcgcgtcagatcctagcatcgcggacgcagtccaagtcaattgaggctcaatcgaagacggtggccaaccagtccaagatcctgcaacatctctgcgatcgcctggagtctcaggatcagaggtggagcggcttagaaaaagcagtcaacgccaacgcggacaacgtcgccaagttgcatgagaaaatggctgaaggggaaatccagatcgggcagtggcaagcagaccagcgcgatcgtctcgacaactttgctgcggacaagacgactcgggtggccgtattggagaatgtcaccaaggtgttcgaatcatggcgaccccgaatcgaaggatgtgtcgacatgatcaagacgtcggtcgatgcagttcgtgtggagcttgccagagtcgcccgtgtattggaccatggtgcttctgacgtttgcacggcgggacctgtccaagatggatcggcgtcggagcgtttcccggctgctggatgttacgttgatggccctgatgggcactgccaggaggaggcaagtgaactggggagaaaacttgactacatgcgatcatattcgagtggtgcgctcattcaagtggctaatggtactcaactttcttgtgattcggaagtggtaaatgcagtatggtctattggaggaaggccatttacctctactctgaaggtgttgccgttatctacttatgatctcataattggtatggactggctggaagctcatagtccaatgttggttaattggtcccataagtggctaactattcccttccagaataatataattactcttcatggtattgcttcttcagtcatgaccaactcagtggtgcaagtgtgcaacttgctggaattgtctgagaagaaacacaatattctctcccaactaccagatgcaattcaggctctagtccaacagttctcttcagtctttgagattcctaaaggcatgcctcctgtgcaggattgtgaccatcagattccattgttgccaagagccaggcctatccaaatgaggccatataggtatgcacctaccctgaaggatgaaattgagaaacaggtctctaaaatgcttcagtcaggcattgtgcaacctagtaaaagtgctttctcttctttggtgatattggttaagaagaaagaccaaacttacagattttgtgtggactatcgtcacctaaatgcactcaccctcaaaacaaaatttccagtacctgtcattgatgagttgcatggagcatcgtggttctctactcttgacttgcgtgctggtttccaccaaattcgtatgagcctggaagatcaacataagatagcttttcaaacccaccatggacactttgaattcagggttatgtcatttggcttatcaggagctccagccacctttcagagtgccatgaacaataccttagctcctatattgcgaaaatttgcattggtatttttttga

SEQ ID NO: 22079 - DNA, 459 bp, Zea mays
  Peptide Sequence Number=SeqID_63858
atgggtagaggtaggagggatcgtggttggcctcgtcgtgttgacggcaagtgcaagcatgccccgagtcccccctcggaggactttggggactcagagtactcggaggaggcatccttcgagtcggaccgttcgcatgctccggcttctccctcggcgtcatccgaggactcagatgactccatgaggctttccaccgtggcccgggtgtactggcgctccatcgagcgcgccgggctcggtgggtcggatgagtcggggatctcctcggatgaggcagactcctccaactcttctgaggagtggagcggcggcgatggcgacgacgagggcgacgacagcggtggcgacgacagcgagggtggcagcgagggcgacaacggcagcggcaacgacgacgacagtggcgacggcggcagtaagggcaacaatggcgacgacagcagtgagagcacctag

SEQ ID NO: 22080 - DNA, 276 bp, Zea mays
  Peptide Sequence Number=SeqID_63859
atgggaattaatgaaaggaaaaagaataatgtgaatcaaggttatcctaggacccttgtaatctgtgcactaaaatgtatcaaggcaataccaatccactatgttattctaaaagaaaacctaagcataaaagactgtaatcttgctgacggagaatacatcctcgtgccggagcaaggagctgctcaggaggtagccccagatccagcacccgagcctgcaccagaggacctgcctgccactgctttggaaggcaagccccggttttatgcataa

SEQ ID NO: 22081 - DNA, 384 bp, Zea mays
  Peptide Sequence Number=SeqID_63860
atgacgccgcgtgtgctgggagcctccctgctcgtccttcttctctccgtgcccataaatagcgcctgccgggcggctcctccgcacagtaccccccagctcggcctcctggattcagcttccgcgcgcctcggggctcctccagcgcagctcgggtccgtttgcgccattgacggggatgtcgcgtcagcactgtccgccctgcccgtgggggcattaaccgccgtagagcccctgttcatgctcttccttgccacccgcatctccggactgcctccaattgctcatcggaccttgagccccgccgtggttccactgcacgccgtgggcggagggtaccttcggcgttctcagtccagctgctggtcggggggaaccgcatga

SEQ ID NO: 22082 - DNA, 273 bp, Zea mays
  Peptide Sequence Number=SeqID_63861
atggagttaaatcagtctggctgcgatgcaccggatcggttcggtggtgcacaggtccgagtatacaaggagcaaggtcaggtggcacactggactggtccagtaacctgcaatggcagtctgacaaggttcagtagcgagcattggcggctttatgagcttcggtgggggtgctccggtgctcagacagcgagctcgcggggcacaacgagagtggtgaggccacaggacgatggcactaggctcgaagaagcaaccagggtggcgtcctag

SEQ ID NO: 22083 - DNA, 180 bp, Zea mays
  Peptide Sequence Number=SeqID_63862
atggcgcagagacttacccggttcacgttcgccagtgagcggaagaagtccggcgaggtgattcgggtcctccgatatgccatggagagcatagtcaaacagggggacgacgaggtcgagtctgtgggtgagcacatcagcctaatggcgtggaggttgggcgccgacgatggaggctaa

SEQ ID NO: 22084 - DNA, 126 bp, Zea mays
  Peptide Sequence Number=SeqID_63863
atggcggcgggttgggattgcgacaggtatggacaccattgcgtcaggctccaaatttggtacctgctttcgagggtactaaggtttagttgggctccatctttgtttgcttctaggatgatgtaa

SEQ ID NO: 22085 - DNA, 3018 bp, Zea mays
  Peptide Sequence Number=SeqID_63864
atggatttgtttacaattgactcggatagtgagtcatatactgggaccagtgacagtgaagaccaagaatgtgaatttacatatagtgaccatgcccaaaacatcttgtccagtctggatgagagcattggcaagattgataattttttgacttttgaaagggggtttctgcatggggatatagtctgccctgtttctgatccctcaggtcagctgggacgtgttgttggtgttgcaatgtttgttgacttggagacaagctcaggtgacataattaaagatgtaaacagcaagaagctatcaagagtgagatcttttgtttccggtgactgcgttgttatggggccatggattggacgagtgataagagcatttgatcttgtcacacttttattcagtgatggagcaaagtgtgaaatcctgttaagggattcggatgtactgaagcccattcctcctgttctttttgaagatgcaccttacttttattatcctggccaacgtgtgaggatagtcgatccgtcagtttccaagtcagcaacatggttatgtggatcatggaggcccagtagagatgatggtattgtctctcatgtcgatgtagggctggtgcatgtgaactggatcacatctgtaaccaatgtttggggagataaatcatcaagtcctccaaacattcaggacccaaagaagctcaccttgctgtcatgtttcccttacgctaattggcaactaggtgattggtgtgctcttatgactgacaacaatggatgcctctggatggattctggcaagtcttgtattcttagtgaagaccagaagtgtgactctcatgcacacatgtattttgaaagttatggttcagattgttctcaaacatttgttgttgccaagacaaagagcactgttgatgttctgtggcagaatggaactgtatctcttggtctagaaccccaggcattactccctgtgagtacccttggtgaccatgatttttggccaggtcaatttgtcctagaaaaactgactgtagaagatgctgcaagatgtccgcgaacggcaatagtgagtgatgtggatgcactggagcgaacagtaaatgtaaaatggattggtccagcacatagtgacattgtcagctatggaagtgaccctgcagtggagactgtaagtgtttatgagctagtagagcacccagatttctccttctgcactggcgaggtcgttatcaggtcagctatgaacatagacaagtctgaagcagatcccacaaatgggtcattggcaagcaaagaatcattggttacctcctctggcttcttatcatgcaccggaaatgtacttgggtacaaggacaatggaattgaagtgcaatgggctaatggtgttatatccaaggtgcaacattttgagataattggattggacaagcttcttgataatagttctgtagaatcaatgaatgaggaacatacaattggtgattcattagacgaggctgagcaggaggaattgaaccatgagattgctctggagtctactgaagactgcactggctccttgtgcaaagccactgcttttctatttcccaagacagcttttgacttcctgacaaatgtggctgctaagtttttaagtgaatatgttatccaggttttggtagatcctcgatatgaaattgtgaagatggcagaaatgcagccatgtgcagaagaaacaccaaaagaagaacagatagtgaagtttgtggcgcagattgacaagccaattctctcttcagaagatgccatctcaaaaagattcgatgtagtcactgactgtttggatcatcattttgtgaaggaaaatggccatgaaagtgttacaagaggttggttgaagaaggtgcgactggaatggaacatcctgcaaaatgacctaccagatggtattcatgtgagagtttatgaggaaaggatggatcttctgagggcttgcatcgttggggcacctggaacaccttaccatgacaatctttttttcttcgatattttctttcctcctgattacccccatgaaccaccttctgttcactatcactctggtggtctccgcctgaatccaaatctgtatgagtcgggaaaagtgtgcctcagcctcctgaagacatggacaggcactggtaacgaagtgtggaatgctgagagctcaactgttcttcagctgctgttatcgcttcaggcccttgttctcaacgaaaaaccttacttcaacgaggcgggatacgacaaatttgtgggcaaggctgatggagagaagaactccatcacgtacaatgagaatgccttccttctgtcatgcaaatccatgatgtatgttttacgcaagcctccaaagcattttgagacgttggtcaaggagcatttcacctgccgtgccccgcacatcctggatgcctgcgaggcttatcttgggggcgatctcgtcggacacgcgcacgacaaagcatacgtagcagaggacggcaacaagaactgctcaaccggtttcaagataatgcttggtaagcttctgccgaagctcgttactgccttctgtgaggccggtatcaccagcgaccggagctcagaaaagtctccgacgccgccgcactcatccccccagacgaccaccctcctcctcctcccccacccacctcgccggaaccctagcgccgaccgcctgccgtgcccatcgacggcgatcgcattgctgcgccccgatggcgacccgcgcctccaaaccaaaggcttatttggccccttatctcctcccgtctcgccccccttcaattctgattctgatgcggacttgccgccccgccgatctggtacccgtcgcaggaattgcctctgcgcgggcagctcttcgttcgatgaccccgacgtggtcgaggtgtctccggcaaccgccgcggctgcagggtgggcctccggccaccacaagaggaagcggagccaggttgcagttgataagttaattcatgtgccatgtatttga

SEQ ID NO: 22086 - DNA, 1683 bp, Zea mays
  Peptide Sequence Number=SeqID_63865
atgcggggctcctcgggcgcgcgcatgaccgcgcaggacgcggcggaggcggcggtgggcgcggtcgggtgcggctacgacctgacgggggacctccgcctgggccgcgccaagcctggtggccggctggtggacctcgacggcgccgggaagggcccggggacgtcccagtccgcgtccccgtcgccgcgggagctggcgttccccggcggggccgccgtggcgggcgtgccggccggggtcgtcgccggcaagggcgagcgcgcgcggttccgctccgacgtgctccccttcgcgcagatggcggaggaggtgaaccggtcgctgtcgctgcccgccagcaagatcccctcgggcgccttcaacgccatgttcgactaccgcgggtgctggcaccgcgacgccgccgccacgcgcagcctctgcttcgacgcccgccttcgtcgagctctacagcgtcgaggccgtgcgcgccaagcctcgccctcagggaccacgtcaggcggggacctcccgcccgtctgggaccccgccgcgctcgccgagttcatcgacaagtacgggactcacgtcatcgtcggggtgaagatgggaggcaaggacgtggtgtgcgtgaagcagctcaagggctccagcctcacgcagagcgacgtgcaggcccggctcaaggagctcgccgacgacaggttctcggaggattccacagcaatctggtctggtggagtcgtctggtgtgtgattgtgttgtgttggatgtgctatctaatcgtcggttgctcatccggttttcctgctcgtaacgtggaggcagacaagccggccatagaggagctgcagcagtttctcgagttccaggtgcctcggctctgggctccagagttcggtcagctcccgctctccctccagaggcggaagaacatcctgccgtctctccagttcaccctcatgggccctaaacttcacgtcaacactgccaaggtcgactcctgcctccgcccggtgaccggcatccggctgttcctggaaggcaagaagagcgaccagctgggcgtccacctgcagcacctgtcggcgacgcccggcgcgatcacggtgctcggcgaggccgcgtcctcggcggacgacgcggccgccgtgaacgagcgcgcctacatcgagcccgtccggtcgccgctgctctcgcacatctgcacggcgcccgtgcagtacaacggcgcgcttatcgacgactgcgccgccatcgtcaccagcgcctggctcgaggtgcgggacgcctgctgcctcaagaaggtgctcttcctgcgcctcggcttctccggcgtcgcggacatgaagatccgccgctccgagtggggcggggccctggtcgcgccgcgcaggtccgggtcgctgtcggcgcgcctcagcgccgcgctgtccggtggcctggcgccggcgccgccggcggtggaggagaaggtggaggtcaactccgccatattccccaagggcccgccggtgccgctcccggttcagaagatggccaggcacatcgacaccaccgaggtgagcaggggccccgacgacctgccgggctactgggtcgtcaccggcgccaagctctgcatggaaggcggcaaggttgcgctcaaggtcaagtactcgttgctcatcgcagtgcaagaggaccctgaaggacactga

SEQ ID NO: 22087 - DNA, 1686 bp, Zea mays
  Peptide Sequence Number=SeqID_63866
atggagccctcgccggcggcgggagagcttggcgcgatgcttcgtgcggccgctgacttcgcgtcctacccaggcaatgcccctttccctacctcgcgtcgaatctgggcggatgaagttaattgctcaccgcaggttgtcttcgccggcgccgggttatgcctgagtccgatcgtgagaaccgggttgcatagtgatgatactgtgaggcagttcctggaacgatgtccgctgcctaagctcttaggtgcattgcagagtgaagaagatgtacctgggatggttgaaactgtcacagagtgtttagacaaaatattttcctcaagatatggagcgtcacttctgccaaactacggtgcatttattcaagctggattgctcacagactcgaagcaaatcagaaaattagcctgcaaagctgtactccatcttcttgacaaggctgaagatggtggtgctgctgtggaaacagttgtgcagcataatctgtatcctcttctgatcaaatgtttgattgagggagatgaagaaatttcagcaatcattttggacactgtaaagcgtttagcccaaattcctaaaggagctgaagtcatattcccaccagatggtcaaggatctgtgcaacttggtaaagtggcagctcagtcatcttcattggcacggattcgtattctatctttgatagccaagctcttcactgtttcaagttatactgctactgctattcgtgattcaaaccttctgagcatatttgaagaggaaataaaagatagaagagatatgcttaaaaccctcagtgcgctagaggtcctatatgagcttgttgaacaccctcacagcaacattttcctgctgaagaccaacttgcttcaactcataattgatatcatcaatgattcctcagctgattctgttatacggtcaagggcagcattagttagtgggaggcttctttcttcagctgatgctttcacagcaatagataaatcctgcgttaccaatctgctcatagccataggcagaattttgaagatggaagaaagcaagaatactgatgaaattgagagtgcattggagaccttgggtctaattggtacaacaagtcaaggagcacatttcttgctgacatcatcaaatgttgccagacatgttgtcgagtcatcctttgatcgtcaaggcaggggtagacagctggctgctttacatgcctttgggaacatctgtggtgttggtagacaagaagatcagatgaaactggatagcgaagccgaggaaaacttgaagcgcttggtctatacgactgcagcaaacagtccaaaattaaccccttcagctcttctactatcagttctgcaacaagacccagacgttaggatagctggctacagagtaataacaggactggtcatccgggaatggtgcttaagggaggtttgcttaaattcagagataatcagatttgttacggatccaacaatggagacaacaaaacttggcatggaaacccggtatggctgctgtgtggcaatcaacaaggccctatcatcatcccatcttctgcatgaagcaagtctttctgaactcgttgggaagttgaatgatgcggtgaaacggggcccttacctttctgataggaagcgtgtggaggcacggccggtggttgatactgcagagaggttttaa

SEQ ID NO: 22088 - DNA, 1443 bp, Zea mays
  Peptide Sequence Number=SeqID_63867
atggcgtcgcgcggccacctgctgctagcgctgctcgtcctggcgtcgtcgtcggcggcggcggcgagcggcgcgcgacaccaggcgcacgggaggcggggaaagccggcgcggccgcggccgcggccgcggctggagctcgttcccgccgcgccgggcgcgtccctgcccgaccgcgcgagggacgacgcgcgccgccacgcgtacatccggtcgcagctgctggcggcgtcccgcacccgcgggcgccgcgccgccgaggtgggcgcgtccgcgtccgcgtccgcgttcgccatgccgctctcgtcgggggcctacaccggcacgggccagtacttcgtgcggttccgcgtgggcacccccgcgcagccgttcgtgctggtggcggacaccggcagcgacctcacctgggtcaagtgcagcggcgccggcgacgggaccggcgatgcgccgcggcgggtgttccgcgccgccgcgtccaggtcgtgggcccccatcgcgtgctcctccgacacgtgcacctcctacgtgcccttctccctcgccaactgctcgtcgccggccagcccctgcgcctacgactaccggtacaacgacggctcggcggcgcgcggcgtggtgggcaccgactccgcgaccatcgcgctgtccgggagcgagagccgggacggcggcggcaggcgcgcgaagctgcagggcgtcgtgctgggctgcaccgcgtcgtacgacggccagagcttccagtcctcggacggcgtgctcagcctgggcaacagcaacatctccttcgcgtcccgcgccgccgcgcgcttcgggggccgcttctcctactgcctcgtcgaccacctggccccgcgcaacgccaccagctacctcaccttcggcccgccggggcccgagggcggcgccgcggcgtccagcagctcctcctccgccgcagcgcggacgccgctgctgctcgaccgccggatgagcccgttctacgccgtggcggtcgacgccgtgcacgtggccggggaggcgctcgacatccccgcggacgtgtgggacgtcgcccggggcggcggcgcgatcctcgactccgggaccagcctcaccgtcctcgccaccccggcgtacagggccgtggtcgccgccctcagcgagcgcctcgccggcctgcccagggtctccatggacccgttcgagtactgctacaactggaccgccgccgcgctggagatccccgggctggaggtgcgcttcgccgggtccgcgcgcctgcagccgccggccaagagctacgtcgtcgacgcggcgcccggggtgaagtgcatcggcgtgcaggagggcgcgtggcccggagtgtcggtcatcggcaacatcctgcagcaggaccacctctgggagttcgacctcagggaccggtggctccggttcaagcacacgcgctgcgccctatga

SEQ ID NO: 22089 - DNA, 1422 bp, Zea mays
  Peptide Sequence Number=SeqID_63868
atgcgcgcgccctcccgtgtggtcggcctcgggcgcgtcaccggtgacgcgttcggagagctcttcctgctgctctgcgacggacggggacggagaggcctttttagcaaccacagtccactttacttcaccaatacgaaacgattcttttcaaaaatgggattggcttgccatattgcgaaaattcatagcgaggcgtcagtggagaagaacgcgtgggaactgaaacagtacattgaggagctctactgggggtctggtaagcaggttctgctccttggtcatagcaaaggtggagttgatgcagctgcagctctttccttgtactggtctgagctcaagggtaaggttgctggcctggcgttggttcagagcccatatggtggcaccccggtcgcctccgatatccttcgagaaggccagatcgctgataaggagacaaggaggatcatggagctcatcggcgacatcagggccttggaggacctcacgtatgccaagagaaaggacttcatctcccagcacaaactccccatcgatgagctgccgatcatctccttccacaccgaagccagcaccgcgcccacagcgctcgcgtcgctgacccgtgtcgcccaagccgagctcctcccatggctacccctgccacggttcttcctgtctgcatccgagtttgtcgagtcaatgctcgcctctctgaaggtccccgtggttgcgcctgtgtctgcagccatggcggtgacagccctccacctgcggctgcgctatggggagaggagcgacgggctggtgacacggcgcgacgccgaggtgcctgggtcagtggtagttagacccgagaggaggctggaccacgcgtggatggtgtactccacgctgaagatgggcagcgctgaggccgatgcgagcgagatccatggcgtcgcggcgctgtctcctccgcttcctctcgatccgcctcgttcctcagagatctcaacctcttgcgccgatctcgactgcgacccggaccctaacctcttttgtccgaggccctcgggctccccagctccccgggccctcgcctccccccggctgtactacccctcgcgctgccacttcgcgacccgctcctccggcgacgaggacgacggagaagacgaagaagagcactacgacgatgaggggagcgatggggaatggggggacgatgaggaggtggtggcggcgaagaaaccgagcgggaagaccgaagaggagaaggtagcggaggcggcggagatcggctacaaggtgttgggaccgctcggggctgacgataaacccttcaagccctacgagcccgtcttcgccgtcgtacagatcggctcgcaccaattcaaggtgagcaatggcgactccatcttcacggagaggttgaagttctgtgatgtgaatgacaag

SEQ ID NO: 22090 - DNA, 1284 bp, Zea mays
  Peptide Sequence Number=SeqID_63869
atgtcgccgccgcagccaccacacccggtgccccgagagacggtggccagcgctgtcgcttccctgacaacgtggatgaagaagcgcgctgcggaggcgcgcccgaacctcctcgccgacgagcgcgacgacatcgtggtcctccagctctcgctacgccgcatccccgcctcgcgcagcaccaagccgcgcctcctcccgatgccacatcccgttgttgggcacgacggcgcctccgtctgcgtcatctcggacgaccgcaccaagtcgcggtccccttccgcctccgacctccacgcgtccatgtcgctccaccgtttccccgtctccgaggtcatcccgctctctacgctccgcacggattaccgcccgtacgagtctcggcgccgtctcgcagcctcccacgacctcttcgtcgccgaccgcgccatcctccccctgctgccgcgcgtcctcgggaaggcgttctactccaccaagaaggctccgattggagtcgatttcacccgcatcggatggccggagcaggtccgcagggttcttggctctgcttttctgtacctgcggtcagggacctgctcggggattaaggtgggtaggctggacatggaggaggaggatatcgtggacaatgtgatggccgcggtggaggaggctgtcgagaaggtgccaaagaagtggggcaatgtcagggcgctgcatctgaaggctgtggattcagttgccctaccaatttaccaggttgtgccggagttgggtatgaaaatcgaggtgcctgagcctgacattgttggatctggggaggtcatcgaaaagaaggcgaatgctggtgccgatggaagagaggtatttgccaatgtgagttccaagaggaagaggaataagaaggagcagattgaggagggtgttgtgatgcaggaagaagttcaggtggatacagagaaaaagaagaagacgaagagcatcatggttgatgatagccaggaggttggcaagaagggtagagtgaagggcaagcgtgctaccgaggagggaaagaagaggaagaagagcataaagggtgatcgtcggatcttagctgagttcattcatgccgtcaatcatttcaagaaaaatcttgaaatcagctttgttgtattaccaatcatcatctctgtcggcatactggatgaaaaaacaggaaccgtgttctgcaaccccattcccccgttacaacacagtacttctctcatggtaaacctgatgaacctttttggtttgaacagaactgacattcgtctttga

SEQ ID NO: 22091 - DNA, 321 bp, Zea mays
  Peptide Sequence Number=SeqID_63870
atgtgtgctgctccaaacattatgaggataaatcctatcaacccatatggcaaggcaaagaaaaatgacagtggacatcattctagattttacaaaatcaaaggagcaaccagacatggctgtcatgatctaaggagaagctccaaggccactttgtcaagggtctctgcaatgcacctactggtgcatgatttactggaggttgtgcgcatgaatgtgccacacattggtatgggggttggagttgaagcaggagacatgattgttattcctatcatgtgcacactgcctcctcgctgtcatttgtcgtcactctcgtag

SEQ ID NO: 22092 - DNA, 1435 bp, Zea mays
  Peptide Sequence Number=SeqID_63871
ggataggctgccgttctgtcgttctaccgttataccatctcagccgtccgttctacggttctgtgatctaagccacgcgatccctccgatctcgcccaccagccccgcagacatcacgctccctccccatgaaacccccttcccccaatctacccctctctgtgcccccgacatccacgctgcctcagcccgccgtccagcgccctctctgcgcctccctccccacaccgcctcagcccgccgttcgccacgctccccacgctgcctccccccgtcgcccctccctcccgcgcggaactccgccatgctccccacgtcgcctccccccatcgcccaccagccgtcgcccaccagcccacactatctcacgccatggatggtggcaacagtccccgcccccgtacctcacacgcatcaggctggggctggccgatcccgccgccgcaaacgccgcgcccagccccgatgtcagcgcgcccgcccgccaacgcactttcggcctccccccgcccctcccttcgcccgcccacccgcaacctccgcgccatccgcaacctccgcccgcttctcacgccaccgacccgacctccgcgccatccgcaaccgtcgtgcgtcttatcccttctctaccgcgcactccgtgtggaacaacctccgcgtaggaagcctcctcccttctccatccccattccccaccacgcgcttcggggacggcgagctccgggcgggagcgaccgccgggcgcttctgctgctggtgcggaggaggaggagcggcgagggtggttcggcgcaggctccacggcggcggtgcccgagccgagttcgactggctggcgctctactgcaacctcacacgcggcgatgggccggacggtaacaatggcaagctggtcctggaggagctgctgtctgttaaccatgagagggattggcctggcactggttcattctacgggaacctcgacttcggtggagaatgtggtgtccctgtccaaactgtgttctacactccaactgaaaaccgtgcaaagttctgtggagatggtagcatggtgaaggataatgcctacgtgcgcagcaattttcatttttcttttagtttcttggagtcgtggaaatctcgctattcacaaggatttcatggcggcgttgttaatttgggtcacagcaattgtccttttgcctacctgtatcattctgtcatactatctgcaattcagctatgcacagaactatcaaaagcaagcaaagatgctctagagtacctgaggaaggctactttgtgctctataaggattgccaggaaagtgccagatttggcagagaacttcatgggcctggatgcatcattgttaaaggagaaacaccatgggtccttatatctgcaattcagctatgcacagaactatgcaaagcaagcaaagatgctctag

SEQ ID NO: 22093 - DNA, 375 bp, Zea mays
  Peptide Sequence Number=SeqID_63872
atggtccaacaaatcatcgaagaagttctgaaagaggaaaaaacagagatgggaaggtggacattagaaactaagccaatacctgctcacgcggccacagatacagcacgagcgaacagcactgaatatcgatggaatcgtgggggcttacctggtcctggtgaactcacggatcaaattgggaggcaggtgaaagtcgcgcgcgtggggcgcatcccacgcttgttcctccccggcggcgcgttcggcaacgccgacgctggcggcagcccgcagggcagcatcggtgggcatctcatggcggcagatggggcaggagttgcggagcgcgagcttgagcaatatgaaggcggcgtggtagatgtgggcgcatag

SEQ ID NO: 22094 - DNA, 543 bp, Zea mays
  Peptide Sequence Number=SeqID_63873
atggcattagcattagccatgtttggctttgctactctgcttttggaaacaatccttccttttattgtactgttagctggagttgctatctggtgctatctttctccttcaagtataatgaggaaccagccacatttgctcgtgattggaactggctttaattttggatatttggtgggaagaatgatacttgctcatttgtgtgatgaacccaaaggtctaaaatctgggatgttcatgtctctggtgtttctttgttttccaattgcaaatgctctcattgcaaagatcaacgatgggagtcctttagttgatgagcttgttctgctgctgctttattgtgcatatacagtgggtctctacctgcacctcgctgtgtcggttgtgcatgaaatcaaggatgcccttggaatctattgcttcaggtgtggaaactggaaacctccgtgtgctcttactgctcagaaaccaccctcccatgtttttaacctctcttccgctgctgctggtattgcatacaggataactagaaaggaggcttga

SEQ ID NO: 22095 - DNA, 307 bp, Zea mays
  Peptide Sequence Number=SeqID_63874
atgggcggtggccacgaatttggacgagacacgcggcggtcggaggtgaagaagaagcactggccgcgtgagttcgtggccaacggcgtggcagtaactccggtgagtcacggagagttcagagaaggtcacggcgacacggtgaaagagtggagccacgcggcacacggccgagaggcggcagtcgacggcgagccctttacagcgggcggtgagccaaggggaggggtgtcgtggccgatcggggtagcttccagtccagcggtgacgacgatctttttaccccacggcgctatccacaagtccg

SEQ ID NO: 22096 - DNA, 1617 bp, Zea mays
  Peptide Sequence Number=SeqID_63875
atgacgacgacggccgcccgtgctctcgccgccctcgtgctcgtcaccgccgccgccgccgccgccgccgtcgccgacgatggggcggcgctggtggagatcaagaagtccttccgcaacgtcggcaacgtactgtacgattgggccggcgacgactactgctcctggcgcggcgtcctgtgcgacaacgtcacgttcgccgtcgccgcgctcgacctcaagtcaaatggcctatccgggcagatccctgatgagattggcgattgttcatcacttaggacgctgatattgaagaacaaccagctgattggtgcgatcccctcaacattgtcacagctcccaaatttgaagattctatccttgcaagggaacaagttcactggcccaattccttcagtaattggccttatgcaggctctcgctgtcctagatctgagttacaaccaattatctggtcctataccatctatactaggcaacttgacatacactgagaagctagaactgaatgataatcaacttactgggtcaattccaccagagcttggaaggctaacaggcttgtttgacctcaatgcttatggcaacaagttaaatggaaccattcctcgttcgctgcggaaacttgaaagcatgacctattttaacttgagcaagaatgatctagttggattcatccctgcggagtttggtaatttgagaagtgtcatggagatgccacaccatccacctgcttttaaagatgccactgtaagcaagccagtgagcaatggtccacccaagctggtgatccttcatatgaacatggctcttcatgtctttgatgatataatgaggatgactgagaacttgaaaggctcatccaagaagaacaaacttgactgggtgactcgcctacggatcgctcttggtgcagctcaaggcctcgcttaccttcaccatgactgcagcccacgaataattcaccgggacgtaaaatcaaagaatatactcctcgacaaagattatgaggcccatcttacagacttcggcatcgctaagagcttatgtgtctcgaagactcacacgtcaacctacgtcatgggcactattggttacattgatcccgagtacgcccgcacctcccgcctcaacgagaagtctgatgtctacagctacggcatcgttctgctggagctgctgaccggcaagaagccagtggacaacgagtgcaatctccatcacttgatcctatcgaagacggcgagcaacgaggtcatggagacggtggaccccgacgtgggagacacctgcaaggacctgggcgaggtgaagaagctgttccagctggcgctcctctgcaccaagcggcagccctcggaccggccgacgatgcacgaggtggtgcgcgtccttgactgcctggtgaacccggagccgccgccgcagccgcagcagcagcagcagaaggcgcacgcgcaccaccagctgccgccgcagccgtcgccgccggcctacgtcgacgagtacgtcagcctgcggggcaccggcgccctctcctgcgccaactcgtccagcacctcggacgccgagctgttcctcaagttcggcgaggccatctcgcagaacatggtgtag

SEQ ID NO: 22097 - DNA, 1626 bp, Zea mays
  Peptide Sequence Number=SeqID_63876
atgtacaccaatagctccccaacttccttacttctaggcatactcagcatactcttatcaacgcatccccatgtcatcgcgtcgcagtctccgcgcgacaatggcgtgcgcgccaggtccttgtcgacctgcctactggcctccggcgtccgtaacttctccatggccgggtctccgggctacgccaccatcttcgacttctccatccagaacctccgcttcgcagccccggggatccgcaagccggaggctgtcgtgctgcccacctccaggcgcggcctccagcgcgcggttctctgcgcgcgtagtgcgtcgctggccatccgcgtgcgcagcggcgggcacagctacgagggccagtcctacaccgtctccggcggcgtgctggacggtaaagccccctttgttgtgatcgacctcatgaacctgaacaaggtccgtgtccacgccgcgtcagccacggcgtgggcggagtccggcgcgacgctaggcgaggtctatcacgcggtggcgcactcgtcgccgtcgaaccggtcgtccctggcgctcaccgccgcgtcgtgctccacgatcggtttgggcggacacatctccggcggcggcttcggaccggtgtcccggaagttcatgctcgcggccgacaacgtgctagacgcgctgctcgtcgacgcggtgggcagagtcctggaccgcagagccatgggcgaggacgtgttctgggccatccgcggcggcggagggcggcagctggggagtcgtctacgcctggaagctccggctcgtccctgttcccgacaccgtgacggtgttcacgccgagaaagggaagttcgtggggcctgctctgccggacgagttttacctctcggcctcgctcacgatcggtagctcgtcgtcgtcatcacaggaagaccgagatcttcgcaacgtggcattcacggggctggtgcttgggccaaaggagatggccatgtcggtgctgaacgagaggttcccagagctgggcctcgccgaggcggaggtgtcggagatgagctgggtcgagtcggcagcacggctcgccgggctgagctcggtggacgagctcaccagcagggtatccaagaccaagtactacggcaagaacaagtccgactacgtgcagcggcccatctcgagggattccctagccgccatcctacggtacctctccgacgggccgccggcggggtacgtgaccatggacccctacggtggcgccatggcacgcttgagcgccacggcgacgccgttcccgcaccgcgcgggcaacctgtacgcccttcagtacggcgtcacgtgggactcggacgccggcgaggccagcgtgagtgcacgcatacaatggctccggtcactgtacgcgtacatgacgccgcacgtgtcgtccaacccacgcgccgcgtacgtaaactacattgacatcgacctcatgggctttgacgagagcctcggcccggtcagattggcatcgtcggtgagccatgcgcgggcgacctggggcgcggcgtacttcaccgtggagaacttcgaccggctcgtccgggccaagacgcgaatagatcctgccaatgtcttttacaatgcccaaagcataccattgcattag

SEQ ID NO: 22098 - DNA, 186 bp, Zea mays
  Peptide Sequence Number=SeqID_63877
atgggggacactgcagcatttcagcaggtgcgggaactcagggaaggtgacagtgggagaatggtgggatgggggcctgggagcttttcatcccacttgcatacaaggtcggagacaaaactaagtggaattaccacaagatcagtaaataaagagtttgttcaaaggaaatgcaattcgtattga

SEQ ID NO: 22099 - DNA, 552 bp, Zea mays
  Peptide Sequence Number=SeqID_63878
atggctcgccctcctcccgccggtgccatatcgtcgcgttggcgccccatcatcctatctggcctgtggcgttccagacaggtgcttccccctctccctccgggctccgggtcttcttcttcgccgatcttgctctccttctctcctcttgttcctttggcgttcatgctcgtcgctcttttggccgccgtgttcttcctaggcgcgagaggaattttcggggagggtttgtgggcgtcgtgttcttgcctcgcgaactgcggttggcgtcgtccggctgttcttgtccttgccctgcttgctcgcggaattaaagagaaagagggagggattggcgcgaacgaactgctgtctgttcgtattgttttggccgtcgtgttcttgaccaaactgctgctggctttggcttctggtgttgttgttcttgccattctgtttggccccggcctcgtgttgctgttggttcttggtgttgttcttgcccctgctcgggtgaaaaagaaaggaaggaagaagatgatgatgatgatgatgatgatgaattcgtggtga

SEQ ID NO: 22100 - DNA, 528 bp, Zea mays
  Peptide Sequence Number=SeqID_63879
atgccgcaccgccaccatgacgccgccgccggcgacgaagccccgtccccgcgcccctcggcggccggctgctacgcgttcctgacgcgctcccaccgcagcgcgggcgcgtaccgccgcctggactccgcgcgggcgctcgaggccgaggccgacgccgccgtggcggcggtgagggtggaggtcgggacggcggcgaaggggagggcgaggagcgtgttccacgtcgaccccgccgtgctggaggccgggccggtgcgccggctgctggcggccgcggggaggcgggcccccggcggaggcgtcgccgtcgacgtcgacgccctgctgttcgagcacctgatgtggctggcaaccaaggcccgcgacggtggcggggtgggcggcgacggcgacggcgacgaagacgaaggctccgcccccgccgctgatgacgacctttccgagatcgtcgagttctactcgcaggacgacgaggatgacgaggaggagggccgcgaccacgggttgagcagcttaagcttctag

SEQ ID NO: 22101 - DNA, 378 bp, Zea mays
  Peptide Sequence Number=SeqID_63880
atggcgagcgccggcaacagcggcggtggggacgacgacgatgcgggagagaactcagagaagcttctagcggatcgctaccatgaggcccctaagccttgccgtcaacgcacttgcgccgctgcaagcgtcccacggtggtggtcgttccccgttgcgcgcgcggtccgccttgccggctcttcaacatcctctagcatcgcatccacgatggcgagctacttcggcgtctacgaatccaacgtctgctcccggttccgcctccagccgccgccaagcaatctgtattcaccaatgttatatggcaaactggatgttgggtctatgcttcggcgccgaaggtcttcaagggagaagcggcttaaaatgtgtgagcag

SEQ ID NO: 22102 - DNA, 1566 bp, Zea mays
  Peptide Sequence Number=SeqID_63881
atggctcgccctcctcccgccggtgccatatcgtcgcgttggcgccccatcatcctatctggcctgtggcgttccagacagaagaaaggtcgggccttcagctacatgaggaatctaattgcagttcttcatgccatggaaccacaagtgttggaggatccccacttcctggagagatgcctgattctcgacggcgtcccagccagtgtcagttcgttggacttgtttcagagtatcgtgggtgtgcagacggccgttttggtgcgagacatccagactggcttcagggttgctctcctcgtcttcgatgcccttgacagtacgatccagacaccgcgggaaggcctctttgccacctgcactccggctacttggcacggcaaggaggtctcagtacgcacgtccatcctagacggcgttgcagaaggttccgcgagaagatgcacggcactggtgcttcggtcgcttgtaccgccacagtacatccttgctgaccaagaccgggacttccacctgagatgcattctcatcggagctcgcagtggaagcacaatcagccaaggagcccacggattgtgtgacatggcctggaaagtactatttgttcgggcctacgtggttgccgcaatcgtccgcagtgaccgagaagctggcgtcctcgtgtacgacgacaccgagagcacagagctggtggcccggagggcgcctccgttgatgtacaagttggggctgaagctgtacgattcgtccctgtttccgatgcgtgctgatcctacagatcgagatgcctgcatgctccggcggctgctgccaccgtgtgtcgcagatggcgaggagagttaccggcatcgcgtgttgctgttggttgggatggatactcagaagctcgacgctgcagagcttgcacacttcctgcagtttgaagcggatctcgtccacgccgccgaggcagtgatcatccaccggtcagagggacttgttgtcgtggtgctgggaagctcggaggacacgacgcgtctgcggcagacgcctgaggagacatggatacggttctttggacagaaacccagctgtgccaatgtctatggatttggaggaccagatatctcatctgagcagaagaagaaggagcagcagcaccagcctgtgatgacgatgggggacactgcagcatttcagcaggtgcgggaactcagggaaggtgacagtgacactatcgcgctcgtccactgtctcatcaggttttgtgctttggcaacccctgaatgtgttctcagaagtggcttcccggagagatgtttgcttctatcaggtgttgtccatggcactacattatttgatctctcggctaggctttctgcctttggtgaccatcatgtgtcactacacgatctggagcggaaggcgttggtcgtcttcgtgtgttgggatggtgcagccaggctgttaagggagccgcaggatacctggaaaggtttggggttcctcgagtgcacccgggtgcctggtgctgctgagcacgctggggtcatcgtccaagaggtcatggaccagttgctgcagtaa

SEQ ID NO: 22103 - DNA, 1584 bp, Zea mays
  Peptide Sequence Number=SeqID_63882
atgtacaccaatagctccccaacttccttacttctaggcatactcagcatactcttatcaacgcatccccatgtcatcgcgtcgcagtctccgcgcgacaatggcgtgcgcgccaggtccttgtcgacctgcctactggcctccggcgtccgtaacttctccatggccgggtctccgggctacgccaccatcttcgacttctccatccagaacctccgcttcgcagccccggggatccgcaagccggaggctgtcgtgctgcccacctccaggcgcggcctccagcgcgcggttctctgcgcgcgtagtgcgtcgctggccatccgcgtgcgcagcggcgggcacagctacgagggccagtcctacaccgtctccggcggcgtgctggacggtaaagccccctttgttgtgatcgacctcatgaacctgaacaaggtccgtgtccacgccgcgtcagccacggcgtgggcggagtccggcgcgacgctaggcgaggtctatcacgcggtggcgcactcgtcgccgtcgaaccggtcgtccctggcgctcaccgccgcgtcgtgctccacgatcggtttgggcggacacatctccggcggcggcttcggaccggtgtcccggaagttcatgctcgcggccgacaacgtgctagacgcgctgctcgtcgacgcggtgggcagagtcctggaccgcagagccatgggcgaggacgtgttctgggccatccgcggcggcggaggcggcagctggggagtcgtctacgcctggaagctccggctcgtccctgttcccgacaccgtgacggtgttcacgccgagaagggaaggttcggtggacgccatggcgggcctcgtgtacaggtggcagttcgtggggcctgctctgccggacgagttttacctctcggcctcgctcacgatcggtagctcgtcgtcgtcatcacaggaagaccgagatcttcgcaacgtggcattcacggggctggtgcttgggccaaaggagatggccatgtcggtgctgaacgagaggttcccagagctgggcctcgccgaggcggaggtgtcggagatgagctgggtcgagtcggcagcacggctcgccgggctgagctcggtggacgagctcaccagcagggtatccaagaccaagtactacggcaagaacaagtccgactacgtgcagcggcccatctcgagggattccctagccgccatcctacggtacctctccgacgggccgccggcggggtacgtgaccatggacccctacggtggcgccatggcacgcttgagcgccacggcgacgccgttcccgcaccgcgcgggcaacctgtacgcccttcagtacggcgtcacgtgggactcggacgccggcgaggccagcgtaaactacattgacatcgacctcatgggctttgacgagagcctcggcccggtcagattggcatcgtcggtgagccatgcgcgggcgacctggggcgcggcgtacttcaccgtggagaacttcgaccggctcgtccgggccaagacactgccaatgtcttttacaatgcccaaagcataccattgcattagcggaagatag

SEQ ID NO: 22104 - DNA, 1488 bp, Zea mays
  Peptide Sequence Number=SeqID_63883
atggggatgtccctgcccccgtcattcgccccctttccccagagccagacgccccgctcactcgagatccgccaggacagatggcgtctcccccatgcgcttacccatccccgcgtggaccccgttgagttgctgcgcaagctggacgagctgagggaccagatcattccgtgcaagatcgtcgggcagccgcggagcaccgacactaccgccagtaccttgggagacagtgggagaatggtgggatggggcctgggagctttcatcccacttgcatacaaggtcggagacaaaactaagtggaattaccacaagtccgtgttctgcctgccgcgtccgcagctctgcccagtgcccaccgcgcgtccgcgcctccgccgccgcaaaccgcgcccgcagtccccttcctccgagcagcgcccgtccatcctcgcctcgctccccgccccggccagccccgcgcgtggaaatccattgtaccccgccagccaaaccagtccgccccagcttcttccaaccccacgccatcaccgccgggaaatccgcatctgccctccaaccccacaccacatttgggagccgccagccccgcgacgccgccgcctgcgccccgcgacgcccctaccaaccccgcgccgtcaccttgccatgccctcgtcgcgcccccgcttgcgcccacactctcgcccgacccatccccgcaccctcgcctacgcccggacacgcgcccacacccgcggatttcgcctgccccagctcccttgctcgcgattgccccctggcccgcgagatgccgccgcccaccgtgcctgcgattgcgcccgctgcgcgcatcgtcctcctcctattccggcccaatcacctctggttctcaagtatggggaggaagggaaggtggtggagcgagtgaacctcgccactcggcagctgcgcctactgccgaagcccgttgtccagatctacggtctcctcgcactcgacgtctcccgcgaccagctcaaggttagatactccatcccgcgcaggcaacaccggcaagatccgcggactacggtccctgtggcgtcggcaccgagtccgacgcggaagacgccgccgaagggggaggaggcagagggaagcccgcggaacaaagctccctgcatggacgacgctgctcagactacggttcctgtggcgtcggcaccgagtccgacgcagaagacgacgctgaagggggggaggagacagagggaagcctgcggaagaaatctccacggcccgcggaggctctgcctgtggctacgtgatccagaaagaggatactgcttcaagtgtaacgctgaggtgctaatgttgggcaaatgtggagaagacagcaacgagggtagtcttgaactgatctgcgatattgtcagtcagttgctggatcaaccatctgttggtaagctttcctctgacattgctctttgtggtcccatggctttgcttcttgaatccccggtgtaa

SEQ ID NO: 22105 - DNA, 177 bp, Zea mays
  Peptide Sequence Number=SeqID_63884
atgggggacactgcagcatttcagcaggtgcgggaactcagggaaggtgacagtgggagaatggtgggatggggcctgggagctttcatcccacttgcatacaaggtcggagacaaaactaagtggaattaccacaagtgcaccaatataataacttttggtgaccttatttactag

SEQ ID NO: 22106 - DNA, 666 bp, Zea mays
  Peptide Sequence Number=SeqID_63885
gagatggccatgtcggtgctgaacgagaggttcccagagctgggcctcgccgaggcggaggtgtcggagatgagctgggtcgagtcggcagcacggctcgccgggctgagctcggtggacgagctcaccagcagggtatccaagaccaagtactacggcaagaacaagtccgactacgtgcagcggcccatctcgagggattccctagccgccatcctacggtacctctccgacgggccgccggcggggtacgtgaccatggacccctacggtggcgccatggcacgcttgagcgccacggcgacgccgttcccgcaccgcgcgggcaacctgtacgcccttcagtacggcgtcacgtgggactcggacgccggcgaggccagcgtgagtgcacgcatacaatggctccggtcactgtacgcgtacatgacgccgcacgtgtcgtccaacccacgcgccgcgtacgtaaactacattgacatcgacctcatgggctttgacgagagcctcggcccggtcagattggcatcgtcggtgagccatgcgcgggcgacctggggcgcggcgtacttcaccgtggagaacttcgaccggctcgtccgggccaagacgcgaatagatcctgccaatgtcttttacaatgcccaaagcataccattgcattag

SEQ ID NO: 22107 - DNA, 1659 bp, Zea mays
  Peptide Sequence Number=SeqID_63886
atgctaccgcggaagccgctgacggcgctgctcaagtcggcgacgcggccagggcacttgctccagctccacgccctgatgctgaaatgctcccacttcccgcaccacgcgttccccaccgctaggctcatcgcctccccgctcgcgccgctcccctacgcgctctccctcttcgccgccgtgccgcggcccacgctcttccaccacaccgccatcctccgcgcgctctcgtcgtgcccctccgcgacctccctcgccgcatccctctcggtcctcgcctccgcgcgggcgcgcctccccgagctcaacgagttcgcgttccagccgctgctcgcgctctgcgcgaaaatccccaatgacgccgaggcagcttcgattggcaagcaggtgcacgcgctcgtgctgcagtacgggttcctggacattgtgagcctacggaatgtgctgtgccacttctactgcagcagcgggagcatggcggacgcgcggaggatgttcgcggaaatgcctgagaaggacgctgtgtcgtggaacacgatgatcggaggctacgtcaatgtaggggatgtgggcacagcggttcagatgttcacggcaatgaggtggtctggagtggatgtcaacgtgaccgtggtgatcaccttgattgggtgtggctggcaaggggagtcagtgcatggcttctgcgctaaggcagggttatgcgacgatgtgaaggttgcggcagcaatggtgaggatgtatgtgagggagggcagcattgagtgtgcaagcaaggtgtttcatgagacagctagaagagacttggtgctgtgtaattgtatggcggatggctatgcaaaggctgggcagatccaggaggcgatggacttgattggtggaatgagacagcttgggatgagacctagttctgggacgcttgtgggcgttctctctgcgtgtggagcgtctggggcattggcagccggtcgctctgtccatgagcttgctgaagaggcacggctcgagcttgacagcacgctcgggacagcgatcatggacatgtacttcaagtgcgggtgccccagtgaggcagctgcagtcttcgatgcaatacgagatagggacgtgaaggcatggacagcgatggtcatgggatttggagttaatgggcagccaggctccgccgtctccttgttctacaggatgatggaagacggtgtggctcctaacggggtcaccttcctagccctgctaactgcttgtagccatggcgggttggtgcaggaagggaaggaattcctcgagacaatggtgcagcgatacggcatatctcccagccctgagcactacagctgcgtcatcgatctcctgggacgagcagggcgtctacatgaagcctatgaactcatacagagagtgtcatcccatggtgatgctacggcgtggagagcgttgcttgccgcctgcagagtgtatggcaatgcgaagctggggaggatggtgcaggcacagttggacgccattggccactaccatccttcagatgccattctgctgtcgaacacatacgcatcagaaggccggtgggatgagatagctcaagtgagggattcagaaacacagaaaatctctgtgaagaaggaagcaggctgcagctccgttattgttgcttgctga

SEQ ID NO: 22108 - DNA, 792 bp, Zea mays
  Peptide Sequence Number=SeqID_63887
atggtgcccagggataggggcgcacagcgccgctgctgccaccgcgcccccgacggagaagcccgttcaaggaacaacaagtgcgaaaagaaggctccaaagaaggtgcataaatctgagagagagaaacgtaagcgggacaagcagaatgatctctttggtgagctgggaaacatgctagaacctgatagacagaacaatggaaaggcatgcatattaagtgacactacacgaatacttaaagatctactttcacaagtagaatctcttcgaaaggagaacaacacgctgaagaatgagtctcattatgtcgctttggagagaaatgaactactggatgaaaccaatatgatccgtggcgaaatatcagaccttcaaaacgagatgaggatgcggctagaagacaactctatctggagtcatgacacttctagaccaaatcttacagcaccccatccagcgaccacagtatttacattgcagcattcaccacatccacaagtcattgcaacaatgacacttcctctgcaacagccagcagtcgttgagcaatcttacgctgccccacggcgggagctacagctattccctgaagctgcacccactgaagatactgagccaccacaaaacgaggggacctctaatcatgtgatgcggccgcaggcgaggtacccaccagcaatgaccactttgcctgggcatgtatatccagtccttccaagagtggaagatgagcaacgcagcagcggcactactggtagcagagaggaaggcggggtaggcaaccgttaa

SEQ ID NO: 22109 - DNA, 2271 bp, Zea mays
  Peptide Sequence Number=SeqID_63888
atggagcaacttcacgaggctgctctcagatccttgatgaagagatggaaaaatgtgcctgctagctggggaaagtccagtccttgcgacatgccgtgggatggtattttgtgtgatgaaaatggaagggtcacatcactgaatctgtttgggatgggcatgggaggcactctgagtgatgatataggaagtctgactgagctaacgatcttagatctgtcctcaaacagagatcttggtgggccattgccagctgccattgggaagttgtttaagcttgaatctttagcattgattggttgcagtttcagtggtcctgttccgagcgaactaggaaacttgtcacaactcacattctttgctctgaactcaaacaaactaacgggtagcatcccgccctcattaggcaagctctccaatgtcacctggctggaccttgccgataaccagctgaccggacctctcccaacctccagagataatagaactggattggaccagcttcttaacgcacaacacttcctttttgacctaaacagatttactggacagattccagcttctattggtgcaattccatcactcacagtacttcgtctaaataacaatggtttcatgggaccagttcctgctctcaacaacctgactaatctccaagttttggatatcagtaataacagctttgatccttctaacgtcccaagctggttctcagatttaaagagcataatgaccctagtactaagtgataatgaactgaatggcacgcttgacatgggaaacaatatgagcaagcatcttgatcttgtcgatattcaaaacaacaaaatcacctcagttacagtgtacaacagcttcaaaaacctcaagcttgaaggaaacccactctgcaatgattctcttctgtcagacacaagtccatgcatgggcctgcaaactgaagccccacctcagccttatcaatttgatgttcaatgtgcatatccttttatagaaaccatcgtattcagagctccttcctttgccaacgtattcgagtaccttcccgagctacagaagaacctgtctaaacaattgaacagctgtaccccgaactggctaggcttggtaccttacttcgacgaagatgcatacctaaatgtgaatattaaggcatgcccagtaaagcagaaaaggttcaactactctcaagtgttaaactgcttcaacctgacccgtcagacttacaagccacccgagatgtatgggccttactatgtgaatgcacatccttacgcattccacgataaaacatctcgcgctgtgttgattggcattgtgactggatctgttctcctggtcgtggggctcactctgcgtcttggggatcattgggagaaagatattggtgcagcaccacaactgaagagtgctaaattcttctcattggaagaactcaagttatgcaccaatgatttccgagaaattaatgcgattggagctggaggctatggaacggtttaccgaggaaaacttccagatgggcagttagtggcaatcaagagatccaaggaagggtccatgcagggtggccttgagttcaagacagaaatagaactcctttccagggttcatcacaataacttggttggactggttggtttctgctttgagaagggcgaaaagatgttagtttacgagttcatacctaatggaacactaagcgaggctttatatggtatgaaaggaatacaattagactggagcaggaggctcaagatagctttggattcagctaaagggctagcatacctccatgaccatgccaatcctcctatcattcacagagatgtgaagtccactaacattctccttaatgagaagatgaccgcaaaggtttcagactttggcctgtcgttgctggtaacagacagtgaggaagggcaactatgcacaaacgtcaaggggacactgggctacctggacccagagtactacatgacccaacaactcacagcaaagagcgatgtctacagcttcggcgtagtgctcctagaactcatagtgggtaagccaccaatacacaacaacaagtacattgtccgtgaggtgaaaatggcactagacgaagacgatggcacgcactatgggctcaaggatgtgatggaccctgttcttcagaaaattgggggcctctttggcttcccacggtttctaaaactagcactgcaatgcgttgaagaggtggcaacccgcccggccctcgatgaacagcattgtgagggagattga

SEQ ID NO: 22110 - DNA, 138 bp, Zea mays
  Peptide Sequence Number=SeqID_63889
atggggccccgaggtggcggcactttcaaggccggcgagcaagcggcgcccctcaacgtgcgagtagtgacggcgacgcacgaggcgcgaggttcgagcggcgtcacggaaggcgcgagatttttacgtttgtcataa

SEQ ID NO: 22111 - DNA, 930 bp, Zea mays
  Peptide Sequence Number=SeqID_63890
atgcaagcagcggaggcgctcggagtccctctcctcccgccgttcctgtcgtcgaggcagccgccccaggacatgagccgcggcgccaacttcgccatcgtgggcgggacggcgctggacgtggggttcttcctccggcgcaacgccgccagcgtgccgccgttccggagctccctgcgcgtgcagatcgggtggttccgccggctgaagaagcggttgctctgcaacgccaacgccaccgcgccgacaaggtcgctgttcgtcgtgggcgagctgggcagcaacgactacgcctacatcctcgccggcggtaagagcctacgggaggccaagtccttcgtcccggaggtcgtgaaagccatctgcacaggcatcgagcatctgcacatgcagaggctggtggaagagggggcgagatacgtagtggtgtcggggacgctgccggcggggtgcctaccgatggcgctgaccaagtacggagcggaagagaagcagctgcaggcgggcacgagagggaagaacgcgacggagtactacgaccggcggacggggtgcttgcggcggctcaacgggctggcggagtaccacaactggatgctgcgggaggccgtcggccgcttgcgccgaaagtacccgaccaccaagctcgtcttcgccgacttctaccggccggtggcgcggctcctccggcggcccgccaagttcgggttcaccgaggagcccatccgggcgtgctgcggcggaggcgggccatacaactacaacccaggggcagcctgtggctcacctggcgcgaccgtttgccgtgacccgtctgcgcatgtgcactgggacggcatccacctgaccgaggccgcctacaagtacatcgccgacggctggctgagtgggctctacgcctatcctcccgtcctggaccttctgcaatag

SEQ ID NO: 22112 - DNA, 1569 bp, Zea mays
  Peptide Sequence Number=SeqID_63891
atggagatgactgacatgaaaccagaggagatgagccaccctcccatggaccagctgctcggaatggagtactgcatagactccaacccgtcctggggaggagctgttttgctgggcttccagcatttcatcctttgcttggggacggcagtgatgatccccaccttgttggttcccctcatgggaggaaatgctcatgacaaggcaaaggtagtacagacagtgctattcgtgactggaataaatacaatgctccaaactctgtttggaactcgtctaccgaccgtcatcggtgggtcttatgcattcctagtcccagtcatgtcagtaatcagtgaccactcactgatacaaattgctgataaccatacaaggttcaaaatgaccatgagagccatacagggggccctgataatatcatcctgcattcagataatacttggcttcagccaattgtggggggtatgctccaggttcttcagcccacttgggatggttccagttattgcattggttgggcttggccttttcgagagagggttcccagtgattggaacatgcgtggagatcggtgttcctatgcttgtcttgtttgtggcactttcccagtatctgaagcatgtacaagtgcatccttttccgatattggagaggttctcagtgctcatcaccattgcagttgtctggttatatgcccacatcctcaccgtgagtggggcatacaaacatagttcgcaggtcacccagctcaactgccgaaccgaccgtgccagcctcatcacaaccatgccatggtttgatattccatacccactgcaatggggtcccccgagtttcagtgcagatcattcattcggcatgatggctgctgtgttggtgtcattggtagagtctaccggagcgtttaaggctgctgcccggttggcaagtgcgacgccgcccccaccatttgtcctaagcaggggaattggatggcagggaatcgggctgctattagatggcctatttggtactgccagcggctctactgtctctgtggagaacgtgggtctcctaggatcaaccaggattggtagcagaagagtcattcagatctccgctggtttcatgatcttcttctctatcctagggaaattcggagggctgttcgcctcaattccattcacggtgtttgctgctatatactgtgtattgtttggctacgtcggtgctgtggggctctcctttatgcagttcaccaacatgaactcgatgcgcaacctcttcattatcggcacgtcactgttcctcggtatctccatcccggagtacttcttccactatgatcatggaccgtcacatactagagctggatggttcaatgacctcatcaacaccatcttctcctcacccccgaccgttggtttcatcatctcggtggtcctagataacacgctggacgtgaggaacagagccaaggaccgtgggatgccttggtgggctaggttcaggacatttcgtggggatagtcggaacgaggagttctacaatctgccgttcaacctcaaccggtttttcccaccatcgtaa

SEQ ID NO: 22113 - DNA, 660 bp, Zea mays
  Peptide Sequence Number=SeqID_63892
atggcgtccaacggcagcgacgtggtgatgatgtatgggacacggcgctgctggagccgtccaagcagcccaagtcagcgagtttctccgtcaaggtatcataattcctggattccaaatctgagacgaatgttgatgttgactataatagcttgtactcaaagcagggctttctacaggattcatgctattagagattcatacctcaggtttgcaagatctcacacgaggattttcactaagatgtatgtcctaagatttttatggctttcataccttcatacatttgcctggtccaaggagatgcttatggcgtcgatgtcagatatcaagacaacaaaatggggcagcatgtgggaactggatcagaaccttgatcagcccaaggacaaggatgtcagtcaactgaaagacatgaatagttttcagattcttacaacttcttctattttaggtacatcgccattgtccatgcaccgtgtcactgtctatcttagaaaaagaaggtgttgttttcagtgtgaggcctacaaagaaaagttggaaaaacatttccaatatcttggggtgagaagaaattatgggaaaaatgaatacagtgaagacatgggcacacgcacaagaacaatttgctttaaagttcttatccatccgttttaa

SEQ ID NO: 22114 - DNA, 165 bp, Zea mays
  Peptide Sequence Number=SeqID_63893
atgtcacgcacgttcgacgactactatatcaaagactgtggcgtcatcttagcgacagaggtgacgcagaggaggaccgacaacaatgaccacttgccatcgccgaggttcaagaaaggaagcttagatatccaaagcaatgatgacgatgtccaggagaactaa

SEQ ID NO: 22115 - DNA, 393 bp, Zea mays
  Peptide Sequence Number=SeqID_63894
atggcaaacaccacctcccagacgcggcagacggtagcagatacggaactggatcgcccgcctgacagaaaatattttattttgtccatggacgagtcgctgttggacggcaagagcagccttgaccttgatgaggttgaggatggaggagacagccagctcccttttgatcatcctaggaatctactggaattaatgatgtgcaagtgcgcaagcgagatctggtactacctgcttcttctttgtttcaacatgcatgcacagatgacagacctgctgcagtatacgtgggactgtgtggaaaaaagtgccagctgggaagccgatgacgacgcttctttctccatcgcactgccgaccgtcagcatcgtcatacagtatgaacgagcctga

SEQ ID NO: 22116 - DNA, 1047 bp, Zea mays
  Peptide Sequence Number=SeqID_63895
atgggctcggtgctgccgcggcagcggtcgtcgtcggaccaacacgccggcggcggccaccaccagagcttggcgcccgacgacttccgggacgtgtacggtgggccaccgcgcaccgtgctcctccgcagcttcgccggcgaggcggccgactaccactccccgacgggacaccggcacacgggctacggcggcgccgaggccttctgtcgccgcccgcacgccgacgggcgcgcggcggcggcggcggcggcggccgtgcccacggagcagggcttctttgacgacatcttcggcgcccgtcgtcacatgaggtccaggtccaggtccaagtccaagtcatcgtcggcggtcagctccgacgagttcccctccgccgccggcttctgccggccggtggccaccggcggcagccgcgctgacgccacgctctcctcgttcacgtctaggctcaggccggtcacgatcccttcgcggcggtacgactcgtcgccgcagtcatcgacgtcgacgagagggacggagtaccagagcagcttcacgtgctcgacggccgcgtacccggcggcagctcgctactactacggcggcgtcgccaagaacgccggcagcaggtcgacgtcgaaccacagcagagccgtcggcggtgggtcgccgtcgccggcggcaacgcgcaaccaccgcgggggcagcagcttctgttgcttcaagtcgaacccggagaccagcagcgacgcgccgagcttccggcaggcggccgcacgcggggcggcgtggtcaccggccgccgagaccaccgtcaccgacggcgattacggttacgggtactaccactcgccgccatcagccacgtcgtcgtcgtcgctcttcaccaacccgctggccaggacgccgcggcgcctggaggatgtggtgagggaggtgcgggagcgggcgccgctgctgctgatggacgacgacgacggcgacatcgacagcgtcggcgccgccgcggtggacgaggcgattgcttgggccaaagagagattctggagcgaggcccgttaa

SEQ ID NO: 22117 - DNA, 558 bp, Zea mays
  Peptide Sequence Number=SeqID_63896
atgaagcttctatataacaattatcgctttaacaactacaaggctgctaaatgttggcaaagatattctagttcctcaaaagaaaaggtaagggaagcaaaagttccaagcctggaaagctttgcgatttgcaggcacggtttggtctcgtctgttggttggtggtccacatgcatgcttgcgattgcgacacagaaactagctcgagaacaaaagccccagcagcagccctgctgcggcgctgctcctcctctgctcgcacagaatgttgctcttgccgccggcgagggggacacaggcgaaccatgcgcatcgcaccctcgctgcctgtgcctggcctgctcgcgccgtgtgggacaccgaatcattcccgtcctcgagcgttgtctgcgtctgctctccccctgcagccgcagctgcaagaagctgcctgctggtgctgggccgctggcagagctacggatccagtctggagcgagctccgtagacgaagaactccgggaagcgcatgcatgcgcatggagtcagtcaagctcgacatttgactgggatccatga

SEQ ID NO: 22118 - DNA, 477 bp, Zea mays
  Peptide Sequence Number=SeqID_63897
atggacgacagcgatggcggactgagcttcgatttcgagggcggcctcgactctgccccagcttctgggggcgggggccccgtgccgtcctccaccgaccccggcgcgggtgtcgggggaggcggcgacgggctgggtatgcacgggcgcggccgaggtcgcgggagctaccgccaaacggtgtgccggcactggcttcgcggcctctgcatgaagggcgaggcctgcggattcctgcaccagttcgacaaggcccgcatgcccgtctgccgcttcttccgcgacttcggcgagtgccgcgagccccgactgcgcgtacaagcactcgtacgacgacgtcaaggagtgcaacatgtgagatctctgatgccacacgaaagtgttgatgtaaacgtctgggtgggaaagacggctttttataagcttggtggcggctgtggtcgaagaaatttgctaacttgtccgaaaaatttctaa

SEQ ID NO: 22119 - DNA, 219 bp, Zea mays
  Peptide Sequence Number=SeqID_63898
atgggcacgggtacgggtacagtttctcgcccgattggcttggatttgagtagtggcgtccgggctgtatttcgggctcggatggcgagcactgaccagcatgctgccgcggctatggcgctcggccgcggagggttggctggggagaaaatagcgacggaaccagtggaggaagatgatgtgtgcgccgtccatccctggttgaacggtggagattag

SEQ ID NO: 22120 - DNA, 1260 bp, Zea mays
  Peptide Sequence Number=SeqID_63899
atggcaggctccgccgtcctgaggagccccctgtccgtcctcctctacatcctcgccgccgtgcccgccaccgccgcggcgacgccgaccgacgccgccatcgacgaggcgtacgcgcatctcgtcaacctcaccgctaaccaggagtactgggcggagcgcgcggaggcggcgcacgcgtacaaccgcgcggcgtaccagaccgaccccgtggccgtcgtgcagcgcttcaacgacggcgtgcacagggcgacggcgacgcggtcgcggtccctggcgcacagggcgcggggcccctgcacggcgaccaaccccatcgaccagtgctggcggtgccgccgcgactgggcccgcgaccgcaagcgcctggccaggaagggcacgctccggcacgccgtgacccgggcccgggcgctgtggatcaccttcgcgcgcgacatggtgatcgagctctgccaggagctcatcgtgagcagcgacaagaccatcgacgggcgcggagcgcaggtgcacatcgtgggcgcgcagatcacgctgcagaacgtgcgcaacgtgatcctccacaacctgcacgtccacgacgccgcggcgcacggcggcggcgcgatccgggactcgcagcaccactggggcgtgcgcggggagagcgacggcgacggcgtctccgtgatggggtccagcgatatctggatcgaccacctgtccatgagcagctgcgcggacgggctggtggacgcggtggacggctccaccgccatcaccgtctccaacggccacttcacgaggcacgaccacgttatgctgttcggggccagcgacgccgcgtccaaggacagggagatgcaggtcaccgtcgccttcaaccacttcggcaaggggctggtgcagcggatgccgcgctgccgtcacggcttcttccacgtggtgaacaacgactacacgcactggctcatgtacgccatcggcggcagccggaaccccaccatcatcagccagggcaaccgcttccgcgccgtcgacgacagcaggttcaaggaggtgaccaagcgggagtacacgcagtacagcgagtacaagaactgggtgtggaagtcgcaggacgacctgttcctcaacggcgccttcttcaaccagtccggcggccagaacgagcgcaagtacgacaggctcgacctcatccaggccaagggcggccagtacgccgagtcgctcaccaggtacgccggcgcgctcaactgccgcgtcggcaggaagtgctag

SEQ ID NO: 22121 - DNA, 594 bp, Zea mays
  Peptide Sequence Number=SeqID_63900
atggcgagagtagcgtgtaccctccgtggcaagaggctagacggtggagtatctgtgctcttggttggcgtgaatccattctggtggtccccaagcgggaggatgaaaactaagaatgatttggggaagggtgttttaccttcctgtgatgcaactctcgacgccaccagacttttgtttggtttctactgcccggctcctgaggacacaactccagcttctgctacattcgatcctttggcacctgagctcagagatgaggatgaggcgattcaccagtttgaggatcagggcgctgttgtagatacttccttagattcagatgatgaggaccttgggatcctgccaccgccctcaccgcctcctgtgccacctcattcgcatgatgacgagcaacaggctcacttggaagctaagcaggctcatcaggcactgatccaacaacaaatgttcaaatggatgctctccatggttcagaccattcgggatcgtcaagacactcttcaacaacagcttttagcagatagggcagagcaccggatcttcatgactcatatccttcaacatattggtgttcctgttcctctagtgtag

SEQ ID NO: 22122 - DNA, 333 bp, Zea mays
  Peptide Sequence Number=SeqID_63901
atgttcatcgctcaacaagttgtggggaataatgtgcatgaactcaccaaagaaagatactcagactcagtgaatccaggactggaccgcgggttattactagaaagtgtgaggtctcttaagcaaaatgttccatcgaagggttatctcgcgctcacagtcgtccgattagaagccgctgatccagatcacgtctacgttctccccgaaccggcactgcttaccgaaagtagtggcgatggcaaggctctcggcgccgcgatgcggactggcagtggcaccaatctccagcgaacgattaaggccgctgtagaccgattacttgcgcgctga

SEQ ID NO: 22123 - DNA, 270 bp, Zea mays
  Peptide Sequence Number=SeqID_63902
atggcgaaggcttggcacagcgggatcggtgaggcttggacggggttcgggcacgtctccggtgaggccgatgcgcagaacagaaaccagcagggcgcgtgggcgacgagcggcaatggcactacaatacgctatcgcgaggattttcatttaagaagaaatgctattaagtattcaaaaatcagttataagcaatcaaaaatcattccaaagtgttacaaatctacccctcttaaaaagaatctcgtcctcgagattaagaaaggctag

SEQ ID NO: 22124 - DNA, 327 bp, Zea mays
  Peptide Sequence Number=SeqID_63903
atggctgctttaggggaagaaggggctcgactggagcttgaggggaacaggggggagcggccctggcgtggccgagcgcgcgaggagagagggctgagggtaggagaatggcatggaggagaaggagagggaggtgggctgtcatttatggaggcgaagctccagagcacggctgccacgtttctccattgcagcaaattcgtcgaacacgtgggaacgcgagacgtcgacccgaacgacactgatttcagacttagaagaattcgaatcttgaaatcagatttttattctgtcttgatggcactgtttgagatacttagagattga

SEQ ID NO: 22125 - DNA, 153 bp, Zea mays
  Peptide Sequence Number=SeqID_63904
atgaacatctgtgagctcactcttgctatgaaacccccacaggtgaagagcggagatgagttcatccagctgtacagatatgctcctgaggaagttgcggaagatgaaaagaagcaggaattgttcctggatggacttatcgaggcactctaa

SEQ ID NO: 22126 - DNA, 402 bp, Zea mays
  Peptide Sequence Number=SeqID_63905
atgactgcggaggcacaggggctcgacagggcgacggtggtggactctggctgcgcaagaaaacgctctggtgagtgcggaccggatgagacagagagggagagggcacatcgaagggtgtctcgagtagctgatggtaaggcgaagctcactgtggcactggacagggcacgggcgcaacagcggccacggaacaggcggtgggcgttggcgggcggtggcggagctctcggttcatgcgggcagagcgaaagagagggcgagggagctaggcagagggcacaaatgagagaggggaggtgggcgagcagggcgcgggggctcggacgtggtcggagaacatgtggtcatgggcgcgtccacggcgaggagatcgtgggcgagaggttagagatggactga

SEQ ID NO: 22127 - DNA, 225 bp, Zea mays
  Peptide Sequence Number=SeqID_63906
atgccgtcgtggcgggagcagctgacggtttatgccttcgttgtcaggttcttcctatccgtgatgtacaacaccgttgtgatgaagctcaacctcatgttggttagagaaataatcaactggaattattgcagtggatcagcatcctggtttatattgagtgatcctatccggtctcctcaagaaggtcctgaaggttctcttgatggaggactagcttattaa

SEQ ID NO: 22128 - DNA, 444 bp, Zea mays
  Peptide Sequence Number=SeqID_63907
atgacacgctccaggattgtgcgcacggagctagaccgcgtcgggtccgtgccatcaggggcaagccatgccggggcaaagtgtcgcgcgcgccgtggggcaggggtcgcacgcgccgcggggcaggggccacgttgccggggcagggggccacgcgccgccggagcaaagggccgcaccgccgggggacaggggccacgccgccggaagggcatgggccgcacgcgcaccgaaggcaggggtcgtgccaccgggagggcaggggtcacgcgcgtcaatgggcaggggcaggggccacacatgccggggaggcaaggggccggcaaggggctgcgcgcgccagggagagggggctcggccatgggggagagagaggtggtaggatatgggaactcaccacgagctcaacagacggcagcaactgctcacctggatcatccctag

SEQ ID NO: 22129 - DNA, 1302 bp, Zea mays
  Peptide Sequence Number=SeqID_63908
atgccaatggtgcctcacgaagggatgtcgaggacggccggaccgtcttccactcccaccgcgctagcagggcgcgacatcgcgttgcctcctccggtgccaactgatctagcgatgtgccacgaggagcgtgtccgtttcgggaaagacggtgaagatcgtggccctcgcggcgaagggggcgcatcggcctctcaagtcctcatccatgtggcatctgctagggtgattcctccagtcgtcccagtcggctcacccacggttgcggcgtccgctactcttgacacaggcacatcattgacgcccgccacccaggaggcgccaagggcgcttgttgctgatgtccttgtcctagaggtgcacgcgtccttgctcgacctcgaggtggtccctgtggccatagtttccgctaccggtgcccctcccatggtggatacggcggttgcctccatgctgcccccactgccactgccattgctgccggccttgctgcctccgggtgctgcagtggcggccgatgcagctggggtgatggcaactgcagcgagcgccgagcatcgggatctattatcgctgccacttgttgtctcctcctctcatgtgcctttgacgcctctccttcccgattctgaaggggggcttcaggaccttcccccattcatccttgaaggctcaaagggggaggaaatggaggcggaggagtcacacttgatcgaggcagcttctaaccgggctgacaggagcctagaggcggtggagcgtttcctcctcaattttggagagacgattttgatcacctgttcgtcgatgacacgagacatcatcccggaggcgctgcaggccacacaacgagaggtggaaatgttgcgggtggaagtggcctgcatagaggagaaggatcacgagctctccaaccttcgagctaaggccgagagtttcgagagcgaggctacgcgcctccggtcagggcatgatgaggcatgcggcaacactaaatgcctccatggggagaggacccagctccagcaagacctgagcgaagcgacttcgcgggccgaagaagtcgagtcgaccttgcgagtggtgaacgctcgtctagaggaggcgaactcggaacttcgacgtgagctggaggttgttggaggcgtgatcgtggaggggtttgccgccgacctgagtgatgaatatttggacactattgaagagcaagtatgtcctcacgctcaattgctcgccagccaggttgacgtcaagatgcttctaaggggaccctcgagctcagagatgcctccaagcgcctag

SEQ ID NO: 22130 - DNA, 825 bp, Zea mays
  Peptide Sequence Number=SeqID_63909
atggcctctcggcacttgatggagcagtacatccttcttggagcaaaggggtcgaaataccagataattcttggattgtcttccgccgtgctgtaccttcaccaagagtgggaccagtgtgtcgtccatggcgacatcaaaccgagcaacatcatgctggacgagtccttcaacgccaagctcggcgacttcgggctggcacggctcatcgaccacggaatgagcctgcagaccatgactgccgtcgctggcacgccagggtacctggacccggagtgcgtcatcaccggcaaggcctcccccgagtccgacgtgtacagcttcggcatcgtgctgcttgaggtcgcctgcgggcgccggccgatggcgccgccagcgagcacgggcgagggcaaggacggccaggtgttccggttggtggagtgggcttgggacatgcgcggccggggcgccgctctagacgccgcggacgagcggcttggtggagccttcgacccgtgggagatggaacgcgtggtctccgtcgggctctggtgcgcgcacccggacccaaagatgcgaccgcggatccgccaggctgccgaggcactgcggtcgagaagcttcaggatgccgctcctgccgcccaagatgccggtcgccgtgtacctgcagccgttcggtccctccaccctgcacttcagcgacaccaccacctccgtcgggtcttctgttaccgtgccgtacacttcgaccacgagccgtgcgacgacggcgacggggacggggatgtctaactccagctcgccgccggcggtcactcaacacttgagcccaagagcatag

SEQ ID NO: 22131 - DNA, 369 bp, Zea mays
  Peptide Sequence Number=SeqID_63910
atggcgtcgtacctgcctattccccttccttcctcgctgtgcggctacgagggcaagtggttctatgtccggaatctggaggggagtgcgcttgtgttcaccagttgcatcccggatgatgtcacagttcaccggcgtgggcgactccgatcgccattccgctgcgatcttgacgaaggaggaggtggtggccctcatcctcgacgtcacaccgaatgtgacgttggaattcatggacgagagtggtcccctactttcaaccaggcaaggttgagtgacctatgtttcattatcatgcgcctccgcatgggcttgggaatgtcatggtttctctgccccatcttcatgaacacgtcggtatcaagctag

SEQ ID NO: 22132 - DNA, 589 bp, Zea mays
  Peptide Sequence Number=SeqID_63911
gatcctctcccatggcgagctgctggcgctgttccctgtgcgtccgtcgctctgccctctgctcagattccatcggaccgcgcccctctgctctgttgccgcgagcagccgcgcccagctctactcctctctcccttgccacggagctcctgtgtgcgcgctgttcctgctcgccgagcggttatttgccctgcgcaccgtgctccctgctctctctgtgcggctccccaagtccggtgcccagctgtgctcgcgagtttctcctccgcgcgtcctgcttgctctctgcctgtttccatggcgtcctgttttctgcgcgcgtttctcggcgcccgacttcctctgctcggactgcggcatccctgctcggagctccctgatgccgagcccatctcccagtccatggccgcgcgcagctgcttgtgctttgtgcgcgcgccgtgcttctctgccgggttctgttgttcctgcgcgtgctgccgcgaagctccctgttcagttcgccttcgtcgcgtttgtcgtcgagttgttgaacccgtcatctccggctcgattcccacctcaccagctcgctccagacttcaattga

SEQ ID NO: 22133 - DNA, 165 bp, Zea mays
  Peptide Sequence Number=SeqID_63912
atggcaatcttaggttccaccacagacaccacagatgactccacagatgaagccaaaggtgccaccattgatgtcgccttcccaaatgccttgggatatcctcctatggggcagctgggcgtggggcgggagcgcaccagtcaaggcacgtgggggcggacctag

SEQ ID NO: 22134 - DNA, 519 bp, Zea mays
  Peptide Sequence Number=SeqID_63913
atgcaggcggcatgcaaccacgccaagtgggctcgcttctccgactcccaacacgcccagcatggaggcccaggcccacgtgtcatgcaaccggcgcgccgaacgcttcgtacatgcaaccgcaccgccacttgcgccaccaccgcgcctcctcgattgcggaaccaataccgcgactcgaggcgacccagtgcacgacccagcagcgccagcctggcgcggcggtcaggaccgggaaagggggataccccaaaaaagaaccttccccgtgaaggaaccaggctccgagccaccctactgatcagaggttcgaaggctggccccccggaagggttcgacagccgcctcagatcgcgtgggccctacacccactactggtcagaggttcgaaggtcggcccctcggaagggttccacggccgcctcaggctactcgggctccgcgcccattactgatcaggggttcgaaggctggcccccgaagggttcacagccgcctcagacgccgagcgagggatga

SEQ ID NO: 22135 - DNA, 207 bp, Zea mays
  Peptide Sequence Number=SeqID_63914
atgtatgacaaaaactctggaaggtcaagaggctttggatttgttcatttctcaaatgataatgaagctaagtgtgccaaggatgctatggatgggaaggtaatgctagggcggccattgcgaataagttttgcccttggaagagttcgtggcgcatcagttattgttcctcgactttctacgaaacagaagcacgcctgctattag

SEQ ID NO: 22136 - DNA, 2109 bp, Zea mays
  Peptide Sequence Number=SeqID_63915
gaacaaggccataatgttgttctgcctgatgcagaaagtacatttcatgccattaaggcacttagccaaagtgacgggagatggcgttatggcactaacagcgctgaatctagcacatttgctgctggtatcgcactagaagcattggcgggcgttgtttcactggcagatgcagaggttgatccatccatgatggtagtggttagaaatgacatcgttaagctgtttgacaccatcaagagttacgatgatgggaccttctactttgatgaaaagcatgttgatgctaccgaatacaagggtcctataatgacttctgcttcggtggtacgtggtgtcacctcttttgcagctgttgcttctggaaaattggatatccctggtgacaagatacttggcttggcaaaattcttccttggtattgggctcccaggtagctcaaaggattgctttaatcagattgactctttgtcagtcctggaggacaataggcaagtctactttattgttcttggctcgactactgctattggaggattggtcttcgttcctttgatactctcacttcctaccaaagtattctcattgtctttgaaagatcagcttaaggttgaagttaccacagtgtttggatctgcagcacctttactcaaagagcttcaatatgacctgacaaaaaatgtccattacttggacattgctccattggaaatagatgttgggaaatactcggtagtttttgagcctggacagaagcagaggcagtccgacaggcgtgcactgctctggacagcagcagagggtccaggaggcctgccgagggcgtcctggaccatgtatcctagcaggaaccagcctgtcggagaatcagcaacagattcgggcagaggcggcggatacgacggtggagcaggggttcctagcgggcggggcaacgaatctggacaggagcggcagagcaggaccgcctggcgggggttcttggcgggcggggcgacaaatccagacaggagtggcggagcaggaccgcctggcgggcaggggcgaccgacgacggctggcgagctggacgacggcgtggatctgggccacctggcgccagatccagacagggcggggctgcggcagccgagccgtgaagacaatgcggggcggcggcggccggtggaagaagccgcgacgacggcgaatccagacgacggggatggggccaaggaaaggccagataaaaaaatgggattagaccctaacctgctttggtaccatgaacaagagcgtgagactgtttatgctactggagggaggaacactgaaagtgtatttgtcacaggactgatcaaagttgataaggcagaaataggaatatccgacaatgatgctgggaccgtggagtctgtccaaaagttagatcttctgaaagatacaaaggtgtctctttctgcaaaccacctacagaagctgcgtttatcttttcaattaactactccgcttgggctcacatttaaacctcaccaggtgttcttgaagttgaagcatgagagtaaggttgaacacttatttgtggacttcctagggttggtggagaaattttactacctctctggaagatatgaccttgagcttgccgttggtgatgctgcaatggaaaattcatttctacgacctcttggccatttggagttggacctaccagaggccccagaaaaagccccacgtcctcctgcacaagctgttgacccattctcaaaatttgggccgaaggcagagatattgcatatattccgtgccccagagaagaggccacccaaggaactctcgctcgcattcacgggtctcacgcttctgccttttatcggattcttgattgggctcgtgcgtcttggagtgaacgtgaagaacttcccgtccttgccgggaccggccgcatttgcctcagttttccatgctggaataggagcagtcttgctgctctacgttctcttctggctcaagttggaccttttcacaactctgaagtaccttggcttcctcggcatcttcctcgtgtttgtgggccataggaccctgtcctacctttcctcggcgtcagcaaaacagaagacggcatga

SEQ ID NO: 22137 - DNA, 1558 bp, Zea mays
  Peptide Sequence Number=SeqID_63916
atggcgtcggcgcaggcgccgtcctccgccgctgcgccgtcgcgcaaggaccatctcgaggccgggaagaagcggctcgagcagttccgcaagaagaaagcggcgaagaaggccactgcagctagtgcagagcaggcaaaagcgcctgcgcctgatgtagtggagaacccacctccaattgtcaatgctggtagcttgggagatggactggtgtctgatgtagacccaaaccaagcgagcacgtcttcggtaccattgtccgtatatgagaatggcccagccagtgcatccaggggtgcagaattcatgtcaaatggtcatcagcaagatgctgttagtgatggaggacgtaagttctatgggaacttgagcttctctgaccttgttaatggtcatcatgagaattggagaggcgacggagcccgtaaaaaggacgagcacagcccttacaaggatgtggaatcaaaatcaaaattaagtgcctttgggaatggcagcagtttaaatttaccttctactgaaaacatgccgagttggggaagaaattctttatcaagtcaagtacatgatactgaacaatctagttcatattcatccagcaccctttttggaaagtccaaaaatgcctatgctcaggattactccacaaacagtgatatctttggtcgtttgagagctacctccgaagactcttccaaagtggagcaatctatgtatgccagcactcgagattatggcaatgccttcaatagttcaatgattgccggtactgtagatcatgatacaaatgttggaataactcggacatctgcagattccacacctgttaattctgaaagacaggatccttttctgtcatctggttatccaactacatacactcgatcaaggccatcatttcttgatatgattggagtgcaaagagcccccctaacaactgaagcctcatatagggagcctgcaaaggctaatcaactatccagctattcaaattatcagagttcatttttgcagcaatcaaatcaacaatccactggaagtaatgctgcagatattccttttgcatcagaaagtcaggaatatagtcatgaaaaggggtcatatggcagctccactcctcctgatttcttacttcccaaagaagaaagaagtaaacaccatggtaatcaaacattccaaaacttcacaactcatgggaaggatgatgattttgcagcactagagcagttatcaaacatccagggagttcttaggatcaatatctcgtacatgctggcgctggagtctatcaggaccgaatatgctaatgcacaactagaatgcagtgctgcagatgagagggcaaaagtacttgcagctgaagtcattctactagaagataagggtttgaggctgaggtcaagtgagctaaaacttgaaaaggaagttgaaggtttacattctgagatttcttcttacaggttaaatttactaagcctcatgctgcaatcgcgcaaagtttctagtctagaaaaggagcgtcggcatcttcaatctactgtcaaagctcttcaagaag

SEQ ID NO: 22138 - DNA, 477 bp, Zea mays
  Peptide Sequence Number=SeqID_63917
atggagtgtttattttcttttcaaacaagcacgtatgtgtcatacattcacacactgtctttcttgcttccaagactggcttccaagctttcaccagagtccagaggagcgcaagacgactgcaagtggcgccaagtcccggcgttcggcgactggaacctgtgggacgacatgcccgtcacccagtactttcaggcagggaccttcttcttcgccgcgccgacgacagagaaggacgacgacgaggatctcttcaaggtgccccagttccctgccacgccctacagctacaagaagtgcgttgttcgagtgaagggggagaaaggaactgctgtgcctccggcggcgaggaagggaggaaggaggcgccgcgtgaacgagcaacagaagtggaagcccaagggagctgtggacgaggacctctacaagatatccccgcagcttctctgcaaggtgaagaaggcaaggatcctgtaa

SEQ ID NO: 22139 - DNA, 1446 bp, Zea mays
  Peptide Sequence Number=SeqID_63918
atgtctccctccccgtttcgccgtcgccctgccgccgctcgtctcccgcctcccctctgcgcctctccaaccttctcctcgccgtcgcgtccgttccggtgccgccgagcacgcggacgcgtcttcgcgcgcctcccggagcccgccgcccgcgaccagaagcaagggcaaatgggcgccacaccggtgcggtggccgcgggtgctgaccccggcgcagctagccggagccatacgccagcagaaggacccgctcgaagccgcccacctgtactgggacgcacctcgccgctacccacactcctaccgccacaacgacgacgtccgcttcaccctccttggcaccgccgccggctcccccgtcctcccgtccctcctccgccgggttctcccatcctccccatccgccgactccctccttgccgcttcgatacccaaactctctcctccagacgccgtgtccatcttccgctcgtcgctcccctcctccccgtccccgtcttggtccctctccttcaccgccctcctccggcacctcgtctcccaagcactactccccgaggctgcccgcctcttcgctgacttcgccaggcggccggaagtgtcaatagcatccgcggatctgactcttctcataattggtctctgccgcgtgcgccgccctgaccttgcgctgcaggtgctcgacgaaatgcccaacctatgcctcgctccggaaagggacgcgtaccgcgcgattgtgcctgctctctgtgatgctggcatgcttgatgaggccacacacgtcgtctattccatgatgtggcgggtgtcgcagaggggctgtgatgcagatgttatggtgtaccggacattgctggccgcactctgtgcggctggccggggtgaacaggctgagctggttctggataaggtgctcaggaagggtctgagatcaccaagtagtcgtcggtctcttcgtgtgccaatgcttgctgtgcttagtgtcgaggatgctcgggaagccattgaccaggcgttggctgttcgaactggacgtactgtatgcagctttgagtccatgatttttgagctctatgaagagggtcggtttgatcaggctgacagattgttccaggacatggccaagaaggggttcaggccaaccatctgcatgtatgaggcaaagatcggtgctttatgcagggaacggaatgtggatgatgctgtggaagtgctggaagaggagctgccaaagaatgaccttgttccaacagtgacaacatataacttgctcatgaagggtctatgtgacacgatgcaatcaatgagggcactagaatacctcaaaaagatggataagcagctcggttgtgttgctcaaaaggacactttctcaatcttggttcacgcagtatgtttgccccagtttgaagctttaggagctggactgctggagacagcatag

SEQ ID NO: 22140 - DNA, 1521 bp, Zea mays
  Peptide Sequence Number=SeqID_63919
atgacacttcgggtgatcctctcccgcctgcgcctcacccctctcatccacgacggccaccacctgcgacgctctctatccgccgccgctgccaaactacctgacgagttgcctcctggcgcgccggcgccaacctccgactccaggctcttcgtcgcagggctgtcgtggtccgtggacgagcgctccctcacggacgccttctcctccttcggcaccgtcaccgaagatggtgcacagtgtaggtcttcggctaaatgccgtggaggccgtgagccactccatcgcccccaggcctgcagcctgttcgacgaaattcctgttagggacgtggtcacctgctcagctgcaatttaccgacatgcgaggagcgggctgttccatgagtcagctgagctgtttgttggcatgatgagggcaggtgtgtgcccaaactcgttcaccttggtcggtgtgttgcttgcggctgctggtctgggtgacgttgtgcttgcccagtgcattcatgggtgggctgcgaagagtcggttggaatccaatcattttgtttcaagcgcactagtggatgcatatgcgaaatgtgggcgccccatgaatgcattggcattttttaatgatttgagggatcctaatgtagtttcctggaatgcgatgatctccggattagtgcacaatgttttgtttgttgaagcagtattcgtgttcaagaggttgtgttgttgctttgggtcagttcctaataatgctgtgaccatgattaatgtcgctcaagcgtatgctggttgtggtgaccttggaatgtgcaagagtgtacatgcttatgcagttaaggccggttttgatttggatgtcttggtgacaaactcaatacttggcatgtacttgagttttggagatattgagattggaagagagattttcaggaaaaatattgttcggaatgtggttacttggacaatgatgatgggtttccttcttaagcaggtgcatgctggtgaagttataatgctctttgttcagatgaggtcaaatggcatagttcctgacagggtagcaatggtcagtttggtgcaagcttgtgcacttctgggtgatgcaaggagaggaaaaatggttcacaaccaaatgatcaccggtgggtttagtagtgagcttcctgcagttaattcattaatcactatgtattccaaatgcaaggatttaagttctgctagagtgttgtttgatggaatgaggaagaaaagtttagtttcttggactgcaatggtgtctgggtatataggaagtggaagagccctagaggggatgcttctatttggtaagatgagacatgagaataattttgtgattgattctgtggcattagtcagcttattgactggatgctacgagactgctaagtttgatctatgtgttcaacttcatgggtatagctacaagacacgtctatatctttatagacttgtccttaccacattcatagtagactatgttaagagtgtcatgtcattttctgcataa

SEQ ID NO: 22141 - DNA, 222 bp, Zea mays
  Peptide Sequence Number=SeqID_63920
atggcgtgtctcatgccccagcaaacaacacctcctatgctctctaggcctggagcagaagctcgtcttctcagcacaaagccgacagtgatagatgttatcgatattgatctaggcacaataatctgtagtagatttcgtgcttttgtatatattgagaaaaaagatactaggggtgttcttggcccaggaaatccaagagtaataccaaaggttacatga

SEQ ID NO: 22142 - DNA, 267 bp, Zea mays
  Peptide Sequence Number=SeqID_63921
atgcggcctcttcgtcccgccttcgccctgcctgcggacgcccctctcctcctccgcgcctgcaggtccacctcccacgcgttcctgtgccacgcgcccacgcccacctcctcaattcgggccaccgcgccgcctccccgctgccgcgctgcggctctccaacctcatcggcctcgcgtccctcccggcgccgccgcgctcgcttgcgccgtcttcgcgcgcctcccggagcccaccgcccgcgacccattcccctggaacacgtag

SEQ ID NO: 22143 - DNA, 1710 bp, Zea mays
  Peptide Sequence Number=SeqID_63922
atgacgggcgacggagagggagtcgagagctctgccgccggcgaacggcagggcgtgcccttcgctctaggcggcccgctgttcgtccccttcatggtgggccccatcaccaccataccagagttcatgtcctcagccctccacgagctccaggccttggaagacgaattaggagacaccagagacgaattcagcaatgagctttgtgtcgatgagctcaaggtgctctctgaggaggagctggtggagcgcgccctgcaggaggctatggaggactcggattctggcactcaaccacaaccagaggatcaaacacttgatggaggcatgtcagcgaatccaacacctacaattcaggcccccacattaagcccattggctgaaagagagagctctggattgcaagatatggcggacgtattaaatgaaccacaaagcagcaatggcaagcctagaggcaaagaggcaaacagcagatgcaggaagggggaaactggaaccttcacactagattctccggttgtaggagagagccatggatcagctattgacatgtcaattgtaccatttgaaccggaaggtagtgagggaaatggaacgatgccttcaaatccatcagctgaaaatggtgcatctgaatcacctgttgatggtatgtcaattgttccacatgatccagagggaattaatggacaaacaacatgtaggaagggcaaaaagagaggcaggcattttgatagagaggttcgagcagagattttacagggaagctatcttactaaagcagataagtgggtacaaatcaaggccaagcaagacgaagacaaatttgcagcaaggctgcattctttcagtggcaattctgtgaagcccaaaggttcaaagtcatcatgtgagaaaattgaaatggcgagatctcttaatctaatcggtgcaccttggaagaacaaagctttaagatctgatgagcacagacctgtggtccgtccagaagtaattctctgtgttgaaatttatcagaagacatatgcctctgttaagtcccaggaacttcttttgctgggaagccaattccttactgatctgagggacaacatttattgtttgactgataaggtgatgaaggtggctgggcaacacgatcattctgggtattttcttattgaggacacgttctacaatgatacgagacatcgttctgccactgattacagtaagcctatactggattggcttgagaattccagtgatgaggtaacagagaagtgggatgccataacatctggtgttctgaagaagcgacaaaaggacttgctgcgcggtctgagtatttctaacgtgcctgaatttaaatctgaaaagatgcaaacgactcgtatctctgacctgcacttccggcccggtgctgggtacctctactgccaccaggggaactgcaagcacacgatcgtgataagggacatgaggttgattcacccagatgacacacagaaccaagcggagtaccctctccagacgttccagctgcagaggcgcttgcagaagtgctcggtgtgccagatctatcttgcgacgaaggtaacggtcgacgataagtgggctctgaacaacccctgctacttctgcatcaaatgctactacctcctccactacaaggaggacagcacactgctatatcctcacactgtatatgatttcatccaagagtga

SEQ ID NO: 22144 - DNA, 852 bp, Zea mays
  Peptide Sequence Number=SeqID_63923
atgggtgcacctgcaaatggactctatgctggggccaacccttatgtgaagcattttaatatctcctgtggactggagcattggaatggttacctggatataacagaaactgatgggagcctatatgtaactggccaatggttttatagaccagaagaggctgacaaaaaggagggtggattctgggtagcacgagatacacgagagctattttacagttttcatactgatgatgtgcctgcagaatcagttatgcacaaatgtgtggtccatttcattcctcagcaaaaacagattcccagtcgaaagcagcatccgggatttattgtccagaaggtctatgatgcagttgagaagaaactgtggaacctaacagacaaggactatgaggataacaagcagcaagagattgatcttctggttaagaaaacaatagaccgtattgggcagcttcctgatctcgaacctgaagagacacctcttgagaacaattatttgtcaaataaacgaggcctgcgtaagaaacctgttaaccctatagatgtaacaagagaacctccagttggcaaatccgagcagtttgcaaaagcagagacacctggaagtgataagatacggaattatgatacccttgttaagtataaagtacttactggacattctcatcgtgataggtggctcgataaattgatagaaagtattccgcttgcatcaaaggagaatgctggaacatctgctgatgctaattctacagccaaaagttcaatcagtggttcacctgcaaaggatgttggttctgctttaagctctgcttcagctgggttaattctggattactggagggacgattag

SEQ ID NO: 22145 - DNA, 348 bp, Zea mays
  Peptide Sequence Number=SeqID_63924
atgcagggtgagaaggcggacaagacatggcggctcctggtgaagaaggtgaggagggctagagcgatggccagcttggtcgagaggcaggtgccggaggttgtggctatgtcgtggcctcgtgggcgaagtacaacagcggcagcaaatgggcgcgaaactgagacaaagatacactactcgtccggcatgtatggtgaagtcttctgcagtttttttgcgcttatgaatgcaatccgacgctgccatgcaaacaagggtgctggacaggcggtacacatcagtggcgaacagttccttccgcgcacacaagtctgtcctgggcgagttggtggcaatgatgggtaa

SEQ ID NO: 22146 - DNA, 684 bp, Zea mays
  Peptide Sequence Number=SeqID_63925
atgagttattttcttcctaacgagcttagattgcaaaataaaaaagacagggaggccttgcgccgaatatccgaaaaacaccttctcgaagctcgttatgaatcagtatcctatgatcaccctgactggtggggtccagatttaatgtgccagagaccaggggttgagaacttggctacaacagtagaggttaccgccctctcaggccgaagctggcgccgtggatcccatccgaggatatcgacgatattgacattaaagaagacatcattacccattcatcatatgaagccaagtcacgtgaacttcagcaaatcaaagcgcaagggaggaaccattgagcttcggaaatcaaacaccaaactcgccattgtgttagcttcggatgttgctagcaagggagaagaggtcccagtcattgaaagtgtctctctagttggtgcagctggggcctctgctcacattgacaaaggtgagcctgaagatgttttggctaattttggagaggagtccgacaaagggagtttgagtttgaagaggataacaacaacgttcggccatgcatgcttcgacaaatcaataattatgaaagatcatattgaagtgttggaaatacatattatattagtgacattgatatggttaggcttggggagaagatactacctctttgctagagaataa

SEQ ID NO: 22147 - DNA, 270 bp, Zea mays
  Peptide Sequence Number=SeqID_63926
atggctcaccggagttggtccggcccgcccgaggctttctcaccgccgttcccccctctctgcccgtggattcatggccccctccctgccattgagttcgccgtggcgccctcttcctctcttcccaactccggcgagcctggagccaccctagctcgcgccagcctcaactccggcgacctcaccgccgcggagaggagcggcgccgcccgcagccgtctgttttccccaggcccctgtaatcttgcagatttagccctggacttttaa

SEQ ID NO: 22148 - DNA, 435 bp, Zea mays
  Peptide Sequence Number=SeqID_63927
atggccaaacttgggctagtctcagtctcacctgacagtcacttgagacgtgctcgagcgaatcggagatgcgctcgtgcgaggactgtgctcaggcgagtcgtgattacgctctggcgaaacgcgactgtctcctgtccgaggatggtctcgtacgtactgggactatgtatcccaccgagtttggcctcgggtgcatcaagtcgtgactacctcgggcgagtcctgactgcatcgggcgaattatggtttcgggctggctatggcctcaagcgcgctgttgcctcgagcgtgttgctgcctcgggcgcgttatggcctcgggcgaattgtgttcggtgtgccatgcgaccaaaggcgcacaacggttggcttggctgatgaaggaaatagattgctgattgacaatccgatgcaagctgacagggaaggctaa

SEQ ID NO: 22149 - DNA, 1167 bp, Zea mays
  Peptide Sequence Number=SeqID_63928
atggaggactcgagcctgttcctgcagtgggcgatgagcacgctgcggcatgagcaacaacccgcggcagccgtcaacgacgactgcagcagcgaggcaacgttcccctcactccaagcgctccgcgaggcctcgcatgcggccgagatggtccaggagctgatcggagaagccccagcgaacagctggagctcgggcgacaccaccgacggcagcataggaggcaacagcaactcggtccctggccctgctgcggcggccatggagcacgatgtctggcctgctgcgtcgtcgaagacctctccggccaggcgcgccttgagcaggagcagcagcgacaccaaccctcccgtgagctggaacttcagcgccgcagcctcggcacagctggccggcagcgccgacggcatgctgccggaattcgcccccaagagcgccctaccgccggaccaagcgtacggatcaccgcgggcaaggagagccggcttgaagagcctggcgggatccatgtcgtcggcggcgtacgctcaagaccacatcatcgcggagcggaagcggagggagaagatcaaccagcggttcatcgagctctccaccatggacaaggcaacgatcctttcagacgcgaccaagtatgtgaaagaactccatggaaagctcaaggacctggaggctggcggcagcaaccggcgcaagagcatcgagacggtggtgctcgtcaaaaggccgtgcctccatgctgcgcccgcgccggacgacgatgcctccccattgtcagcgtcgtcaggcacgccggctgagacgaagacgcagctgccggagatcgaggcccggttcgctgagaatagcgtcatggtgaggatccactgcgaggacggcaagggggtggccgtgaaggtgctcgccgaggtcgaggagctccatctaagcataatccatgccaacgtcctgcccttcgtagagggcactctcatcataaccatcacggcaaaggcaatcacactcggcaaaggctattttacactcggcaaaggctttgccgagtgtaacactcggcaaagaacactcggcaaagatttcatcggcaaagggttctttgccgagtgcttttttcggacactcggcaaagactttgccgagtgtcaaaaagcacactcggcaaattaa

SEQ ID NO: 22150 - DNA, 147 bp, Zea mays
  Peptide Sequence Number=SeqID_63929
atggagagcaggctctccatctcccgcgtccacatcgccttcctcgtcgtcgcgagcggctctagcctcatgatcatgttggtcggcgagcctaacatgtggctctacagcctcaagggacttgactcccttactaaacaaatttag

SEQ ID NO: 22151 - DNA, 631 bp, Zea mays
  Peptide Sequence Number=SeqID_63930
atggcggattttgctgagtttgggcctcaaaactccgtggcgacagttcggaagggaaccagtggtgacatgtggcgtcacaacgaaagggtttgggaggtgaaagtctcggcgatcttcgagtcgcccaactgcgagactctcactgtggatgagcttttcagcaagctcaagtccatcaagattgatcaccagacactgttcaagattgagaaccgtggtgcacccaccatggccctggagcaagtggagagactcagggatgaggagctgccgcttgtggctagtcagttcacgtggttccagaacaaccgccagaatcaccgcaacctcaaccatgactttgatgagtcgacctcttattcgagcgacgaggagctcgagaggcacattgatgagaagcacaacagactatgtttcctcgctgacacaacaggcggccttttcaccatggcccttggagatgatgtggtgggtggtgacggcaaggatctcgatgacgactccacatctgaggtactaccttccaccgatgatctcgtctttgaggtagaagagctaacagctgctttggctagtcaggataagctgcttaggcttgatgctcatgagaggaaagattttaattcaa

SEQ ID NO: 22152 - DNA, 513 bp, Zea mays
  Peptide Sequence Number=SeqID_63931
atgtgcgaacggcgcgaatgcatgcacgtgcagggggtagacgaggtagacggggatagacagacttcgtctatgggtagacgaacgtcatctaaaccttatctgcacgctgtgcacacgcggatgtgggtacgtccgcggcacgagcacgacgacaagcgcggagctacgacgatgcagtttgggactgggttcgacgacttgtgcaggttgcgcgatggcgacaaggcttctgcgtgcgtagggagaggtgggggtactgctggctggcgacgcgcgacgaataacaatgacatccatagcgaatgcgcggtgacgacagtgcttgcggctagggattcacaccgcaaacgcgcacagaccgaggtgccaggacatgctgcacaacgatcacgagcagcgcaggcgaacacgaatggccacccggccgtgggcacccgggtcgcgggctgcgcgctacgccatgagtgctggggccatgccaggccgtgtcgagcgggcagcgagcactag

SEQ ID NO: 22153 - DNA, 168 bp, Zea mays
  Peptide Sequence Number=SeqID_63932
atgtcgccacccgtcgccaccacgccgttagccgtgccagctacccctaccccacccaacgcttgtgccgccacgccccgcgaagcgccagtgaccccaacccctcactgcgccggctaccacgaagctcccaaccgcacgacgctgctcccacgctactcggtttaa

SEQ ID NO: 22154 - DNA, 108 bp, Zea mays
  Peptide Sequence Number=SeqID_63933
atgaccgccgtgacctcctcgacgtccctgaccaccccattggagctctactgccgctgttactatttcagccagccatggatcgcagaaaacttaaaaaatgcataa

SEQ ID NO: 22155 - DNA, 330 bp, Zea mays
  Peptide Sequence Number=SeqID_63934
atgcagttgggctgcctgatgaaaatccttgaagccgagcgatggctgaagggtgccaacctccatgaggttgcgctcctccaacaacaagacgaaggcaacgcgggcgctccccatccgggggctcggaaggcgaagcgggcgtcgtttcatctccgccatgatgaccgcgtcaaaaaagggaccgggaaaggggatattttgaaaggaatccttctccgcgaaggaagcgggccccgagccctcctactgatcaggggttcgaaggctagcctctcggaagggttcgacagctgccccagagcactcgggcttcaggctcattactaa

SEQ ID NO: 22156 - DNA, 684 bp, Zea mays
  Peptide Sequence Number=SeqID_63935
atgcccctgttggattgctgttgccatttcgttaaagttgttgccaccaccttgcccaacccggggggaatttcggcttgggcccggggtccggcttggaatggcgccgttcccccagagttccttctttttttttgccagtggggcgttgtttggggccaggccatgttgaacctgggttccgggccccggcccccccttggtttccgaaaccaggcccgtgggcgggcccccagtttcccgctcccagaacggattcatgggaggagtggggggggcaagggaaaagaaaaggattttgttctggcttccgcgacccacttggggctcctcgtggagaagcaggccgtggagctcgccgcgcgcgagctcaacagcgtgctcgaggagatcgccgaggaggaagaggaggaggacgacgacgagtggcggcggcaggggatcgtggacgaggagcgcgtgagggacgtgacagagcgcgccgaggagctggcggcggcgtgccggacgctcgaggagaccggcagcgtgctgtggagaccgacgccgtgtggcccctactggacctcatggccgacccggagtccggcatggtggacaaagccgcgtacgtcctccactccctggatccctccaacagccatgcaactaaacgcattagaactagtttatgatgtatactga

SEQ ID NO: 22157 - DNA, 288 bp, Zea mays
  Peptide Sequence Number=SeqID_63936
atggcgggcggcggcggggagcgagacgcggacgaggagacgtggaaccagatgatgcagaacctattcggagaccagtcggaggaagaggacgatgcggacgacgacgtcgtcgatgaggacgacggccagcagcaacagctgcagtcacccccgcaccaccaccacgagatagaggacgacgccgatgaagacggcgacgacgcccgcagcgacgcgcctgcccgccacggcggataccactcgagagaggttgatgaatccatgaatttgtttgccttatattga

SEQ ID NO: 22158 - DNA, 1683 bp, Zea mays
  Peptide Sequence Number=SeqID_63937
atgagcggtgtcggtgtcgtccttaaggtggacgtcaacggcgaggagctcttcttcgttgataaggtgcggatcaggaggctggtggtcgccggcgcagcgtctgcgaggcggcatccgaggccgagggtaccactgcacggattccccggtggccccgaggcgttcgagctcgtcgcgaggttctgctacgctgacggcggacgcggcggggcggtgaccgcggccaacgcgtgcgcgctgcggtgcgcggcggagttcctggacatggcggcggccgcagacgcgcccgcgcccgaggccgcgtccacggccgcgccgagcctggtgcggatgacggagaaggcgctcgaggagatgccgcactggccgtggcacgccgtcgtggacgccgtgaagcagtgccagcgccgcctgctcccgctcgcggactccaccggcgcgttcgacgcggccgtggccgcgctggtgtcccagatggccgtgcccccgccggccggggacgccacgcccacgggctcctcgccggagagcacggcgttccgcttctcgtgcgacaccaagagcagcggcctaagcctgcgcggcgggtcctgcgtcagccgcacctggtggttcgaggacctcgtcgcgctcgcccccgccacggtggagcgcgtcgcctcggcgctcgtggccaggggcaccgaccacggcgtcgtcgcccggttcctcttctactacctcaagtgccgcatcgccggcgcgagcgccgacgacaagaaggcgatgctggaggcgtcggtcgccgtcatggccagcctcgaccggagcgcggtctccttcaagggcctcttcggcatcctgagggtggccgcgccgctgaggctagccgacgcgtgccaggaccggctcgtcgccatgatcggccgcaagctggaccacgcgacgctcgataacctgctcgtcccagcgccgccagggacggccagcctgtacgacgtgagtctggtgctcaggttcttggccgcgttcctccgcggcggcgccagcgacgagccggcgaagctgaagaaggtgggcgggctcacggacctgtacctggccgaggtcgctccggacccgtcccttcgcccggccaagttcctggatctcgctaccgcgctaccggctccggcgagggactgccacgacgcgctgtatcgcgccatcgacgtttatttccaggttcacgggcgactgacggacgaggagaagatgaacatctgcagggggctcagctacgagaagctatcgccggaatgctgcaagcacatgttgcggaacggcgagttcccgaccacggcggcggtgcaagcgctggcatcgcagcacacggtgttgaagagcgtcgtgctgcgcgaaccgggccaactgaagtccgtgtcgccatcccctaccgcttccacgggaaagcgccgcgacggctatgacgacgacaatggcggcggcgagaacgacgggcaggtgatcctgtacgcgagacggctggacctgtcggtggagaaccagaacctgcggtcgctccttgacgggatgcactggcgggtggtggagctggagaaggtgtgcagccggatgaagacgcggatgagcaagatgaagcaggccaggagaggcggcggcggccgcaccgccaggtcgctccctaggatgtgttcttga

SEQ ID NO: 22159 - DNA, 567 bp, Zea mays
  Peptide Sequence Number=SeqID_63938
atggttgaaaccgaatttcattactggaagcaacgaaattgcaagtctgatagtacatattacatgaagcctaaaggcgaatttgcaaaggttgagcagaaggttgaagctatgtccattaacccttctgttgaaagacatgagagttttgcagctggtcatagaggcccaaggaatggtgataagaaagatcataagtggaatactgacagggctgatgcatataggcttactcgtcgagaggacaacaggagggttgctagagatatggagaagccacaggagcaaccacgcccagagcctgagacctggcgtaagccggtggagcctccaaagctagaggttgcaacacctcgttttgggaaagcagcaaccgcgttggagctcgcccaggccttctcaacgtctatgtctgatactgcaccacagagccggttgaccagtgctcccagtccaagagttcctcctagcccaggggctagtagggatcagtctggcttttcaaggctcactgacagcaggacgttacactcgggcccttcccagcgaaagataaatggctactga

SEQ ID NO: 22160 - DNA, 477 bp, Zea mays
  Peptide Sequence Number=SeqID_63939
atgacaattgaggacgagaaagacatgtcaatttcatattttgatccaaacaaagcttcagggatatcagttgttctaccaccgaccatcaatgatggaattgctgatttcttcacaagtccgaagcagatccacgagatcaaggacttcctgctgactgcgcggcggaaggacgcacggtcggtgcggatcaagcgggccaaggacgccgtcaagttcaaggtgcgctgctccaggtacctctacaccctctgcgtccacgacgccgacaaggccaacaagctcaagcagtcgctcccgccaggtccgtgctccatagtccctaccccctacatgctacatccatcgactactgctcttttttatttgatctattggaccttccggatcccggtcccgcattgggcggttcgcaattgctgtgtggtgattggttactggttactgaaggttgtagaccgtgttgctgttgtgtga

SEQ ID NO: 22161 - DNA, 189 bp, Zea mays
  Peptide Sequence Number=SeqID_63940
atggcaccaagtggtagcaagagttatcaacgtccaacttaccactcaaagagatatgttcttttggtccttacagaaacatgggagattcacagtagtcttcagaggaacccactggacaagacaatggtccgtgttgcaaaaagaggaaaacatgatacaaatcaagtggggatgtcgtgcgcttga

SEQ ID NO: 22162 - DNA, 735 bp, Zea mays
  Peptide Sequence Number=SeqID_63941
atgaagatggagcagcagaacaccaacagcaaggagggcgtggaggtgctgcagcaggccccgttccacgaggatgccaagcttggcaagggccacttcacttccaaagtttatcatctgcaaagggctttgcacctgccagcgccctcgcggtgcacgaggactcgtggtgtgcgtttccaaagagcagaacagtgcccgctcttcagcaagtgctcactcaccattgacactgtcaccaggcccgacaacggttgctctgaaaatgcgcacggtttgagcggcgagcagttagccgcgagagaagtcgagatcatcgacatcgcttccgtgtcgcgggactactggagcaaggcgatcggcgctccgagcgtcgacctgactgccttcaagtcacagcggacagaacgaggccctcttctcaagggatggatggactcgtgccatccggtgatgaccacgtacaagctggtgaccatggacgctcccatatggggcctcggcgaacgcctggaagactgcatcattgcgggggagagggcgttgttcttggcatgccaccggctgtgcttcgcgtggatcgacgagtggtacggcatgaccgtggagcagatccgcgagatggagcggcagacggacatgctgctcaagaagacgctgaagaaggccgggagcaataagcacgagggcaacacgaagacgctcaaagacgagctagtggccgtggggagctag

SEQ ID NO: 22163 - DNA, 888 bp, Zea mays
  Peptide Sequence Number=SeqID_63942
aatccttactatttttcaattggtggttccgacgagtatgcacgtttgtatgacatgaggaaattccagttggatggttcaagaaacacaaaccagcctgtagataccttctgccctaagcaccttattaagggtgcgagtgcgagggtccacatcaccagtattgcatattcctatgcaagggagatacttgtatcctacaatgatgagcttatctatttgttccaacacaatataggtcttggtccaaatcctgtgtcggcagagccagagtttttcaacatgcttgatcagccacaagcatacagagggcacaggaattttcgaactgttaagggagtcagtttctttggacaacatgatgaatatgttgtgagtggatcagattgcgggaatgtattcatatggaggaagaagggaggtgaattgatcaggatgatgaatggtgacaaaagtgtagttaactgcattgaaccccacccgcatttcccatttatggctactagtgggattgataacactgttaagctttggactcctgcagctaaaaaattgattatgccgctgcctaaaaatgcaaagcaaattgcctccgagggtttaaagtatagagtatttaggtctcattggctgatcttcagagtgatgaagactaggcatacaggagatcagactgcgtgcagaagatgtccaagggttgaggagcaagtcgtggtcgtcgccagacatgaggagcgagccatggtcattgagcgcgacattgagcgcgaggcaggatatggcgtcgccgccgtgtgggcatggatggagcagtgcaagtcgctggaggggatcacgagggcaagcacgtacccaaacacactcctgaccaggaggttggtgatgtag

SEQ ID NO: 22164 - DNA, 765 bp, Zea mays
  Peptide Sequence Number=SeqID_63943
atggacctattccccgacggagccttcgtgcggctacagaaccgcgttcagcagaagtacctctacgccgacgacgacggggagggggtctccgttcgcccgtacggccacgtcttctccctgaacgcggtgtggcgggtgcaccgcgtcctggtcgccgggaacaacatcgtcctcctccagggcgtcgcctacggccgctacctcgcgatctcgcccggcatggcgccgcccggctaccgcggccgccgcgccgtccagcgagactacgcgggggacaacgtgggcgccctcatgtggaaccccttgcggatagtcgacggcgagagatacgtccgcctgcgcaacgagttcaaccgcaacctcctccgcgccaacggcagagtgttacgtctttgccagtatcttggaggtcgccgtggcctgttcgggcggcgcatgcccgaggcggatgaacggcggacgatccggcacgtgcgggcgaacaacgaaggggacttcgaccaggactctaacaactggcccacattcaatttcttcggccggtccgtgttcaacctgaggatccaggtggggatgcgtcagcccggcggggaagtctgggccatcacaatggccgtgcggcccggctcgcaagggcggctaacccctctggtcaccgacctgcctaacagcgtagataacatggacatcgttgtcttcgacaccggatcacaaggatttcatttctcaggtgctcagaatttagtgtacccagctatatga

SEQ ID NO: 22165 - DNA, 1035 bp, Zea mays
  Peptide Sequence Number=SeqID_63944
atgcaccccaagctgccgcgggccgcgcgcaggctcctctgctgcggcggggccgccgcgtccccggaggaggacctgtctgacgaaggaaggcgatcgttgaggtgggtgttctcgttgagagaacttcgatcagcaacaaacagcttcaattacgataacaagatcggagaagggccacttgggagcgtgtattgggggcaagtctgggatggttctcagattgctgtcaagaggttaaataacgcaaagaacggcacagaagccgaatttgcttcagaagtcgagatactgggaagaataagacacaaaaacctcctgagcttccgtggatactgtgcggacggacccgagcgcgttctggtgtacgacttcatggcaaactcaagcctgtaccttcatcgccacgcaacgcctaagataatccacggaagcgtcaaggccaccaacgtgctgctggattcagacttccgggcgcacgctggcgatttcggtctggcaaggcttattcccgacgacggaacggaccacgaaaagatagccagcagcgagagccagcgaggctaccttgctcccgagtacgccgccatgtccggcaaaccaactgcaggctgcgatgtatacagcttcgggatcatactgctggagcttgcgagcggcagaaggccagtcgagaagtcgggttctggcaaggcttgtggaatccgaagctgggtgctcccgctcgcaaggcagggcaggtacgacgagattgcggactcaaagctgggcgacaagttctctggacctgagctgagaaggatggtgttggtcggtctagcgtgtacacgttcagaacctgaaaagagacccacgatgcttcaagtcgtgccgttgctgaaaggcgagtcgaaagaaacgcttgttaagcttgaaagggaggagttgttcagcccagactcgacgacggtgagttcgcagggaacaccgaccccagatgggagcacggactctgcgccgccgctgaagaaagataaagaactggttggggcgtga

SEQ ID NO: 22166 - DNA, 3442 bp, Zea mays
  Peptide Sequence Number=SeqID_63945
atggagttgccgaggaaacggtcatatttgaatctgctcgactacttcatggttgttttgccgtctgcggccgcaccgccgcctcaggctggcgctgctccgccggcgcagccgcagcagccgtccggtgcggcctttaccaaccagaagctgacgacaaatgatgcgctcgtctaccttaaggcagttaaggataagtttcaggacaaacgggagaagtacgaggagttcctcgaggtcatgcgcgacttcaagagcgagaggattgacaccaatggagtgattgtccgtgtcaaaacgctgttcaacgggtaccctgaactgatccttgggttcaacgccttcttgcctaagggctatgcgatcaagctacaagaagagaagaaacctgtcgattttgtggaagctatcaatttcgtgaacaagataaagaatcggtttcagcatgatgaacaagtttacaaggcattcttggacatcctcaacatgtaccgcaaggataataagtctatccaagatgtttaccatgaggttgctatgctgttcaaagaccataaagatttgcttgaagagttccagcacttcctgcctgatacttcagtggctccacaagcagtggcctcaaagggtggtttggttaagcgggaggacaggagctctttagtgcctcctgcaaataagatccttcacaatgataagagggacagagtttacctgtcacatgctgaccgtgattttagtgttgaccgtcctgatgtggagcatgatcgccagagaagacgtcttgataaagacaaagaacggaaggtggaaagggacagaagggattatgagagagaagacaaggatggtgaacatgacagcagagacctggagctaggacagcgtaagcgaaagcctttttcaaggaatatcgaggataatgtaggtgctgagacacaccaaggaggccccagtgagaatcatggaatccacagtgtatctgcttcatcatatgacgataaggatgcgctgaagaggccaagcacgagggctgttaaaactgaggataaagaaaaggatagagatcgggacagggaggacaaggatagagatcgggaaaaggaaagagaaaaggaacgagaaaggctcgataaaggatcaacattcaattcaaaggaaggttctagtcacaaaccttctatgttctctggcaaagagaagtacaacctatccaaaccaatatcagagcttgatctctcaaactgtcaacgctgcactccgagttaccggcttctacctaaaaattatcccatgcccccagccagcaacaggactgatcttggagcttctgttctgaatgatcactgggtatcagtgacatcaggaagtgaagattattcatttaaacacatgcggaagaatcagtacgaggaaagcttatttagatgcgaggatgacaggtttgagttggatatgctgttggaatcagttaatgcagcgactaagcgtgttgaagagctgatagagaagatgcaggacaactcagtcaaacctgagagcccaatacgcatcgatgaacatttgactccgttgaacctgaggtgcattgagcgactgtacggtgatcatggtctggatgtgatggatgttctacgcaaaaatgctagtgttgcattgccagttattctaactaggctcaaacagaagcaggaggagtggtcaaggtgtcgatcagatttcaacaaagtttgggccgaaatatatgccaaaaattatcacaagtcacttgaccatcgtagtttctatttcaagcagcaagatacgaagaacctgagcacaaagtctctcctgacagagataaaagaaattaatgagaagaaaaggaaggaagatgatgtgctccttgccattgctgctggaaataggcggcctatagttcccaatatgtcattcgagtatatagactcggaaatccatgaagatctacataaaatcattaagtactcctgtgctgaagtctgcaactcttcagatcaattagataaagtgatgagagtatggacaacttttctggagccagttttgggtgttcagcaaaaacatgggtctgaggatcctgatctagttaagaccaagagccgaacaacaaaattgggtcttgcaaatgtgagagaaagcaataccatagctgggattgtctccaagcaaagcaatggcgatgaaagtgaacaaggtccgtcatctcgggctagattagcaaatggagttgcagcgggcactcaaaatggtttccatgatgcagatcgaattgcccgtaaaggtgaagaaccatcaaacgctatactaaatggaagagtgcatggtgctgtctctgcagatgaaacactttccctgatcacacaaaacattgcttctaccgagcgaccagcagaaaatgctgctgctgttaggactgagcaacataaggcgaacttggtacttacgccaggcatgaatgcttctagaagttctcatgatgcagttgaggtggctggtgaaggcaagactggcaatgaaacattgctttctgccgagggaggggagaggttgggaccatctttaaatggcaccagcgagggaattaaagggcgcctaaataatgatggttctgtgccccacacttcaaaagttgaaagagaagagggtgaattgtcgcctaacggagattttgaagaggaccattttgttcctttcgaagatggaacatctaaaggaaaggaagattctacaagcagaccattccatggtaggcctggggaagtggtaccctcttctgccgaggcagctggtgagaatgatgctgatgctgatgacgagggtgaggaaagtgctcagaggtctactgaggacagtgaaaatgcttcagaggcgggtgaagatgcatcgggtagtgaatctggtgatggtgaggaatgctctcgtgaagatcatgatgaggaagaagaggatatggatcacgatgatcaggatgcaaaagctgaaagtgagggtgaggcagaaggaacaactgaaacacatgatgtggaagggggaatatcactaccactttcagaacgctttctgtactcagttaaaccacttgccaagcatctgatggaatatggtcacgaaaagccagaagtgactgcagtatcaattgaaccaaatttttcttcgtatctttttagcgagtacttgtgtagtacgccagacaagaaattatctgaaggcgtctaccttggaaggaataagcggaaatattcaaataatgatgaaccttcagattctttgaaggcaatggatggtatcaatgttgtgaatggtcttgaatgcaagatatcctgcaagacctcgaaagtttcatatgtccttgatactgaagatttcttgttccggcttcggaagagaaggaaaattttgcggggcgggaatgtgcccgacc

SEQ ID NO: 22167 - DNA, 1920 bp, Zea mays
  Peptide Sequence Number=SeqID_63946
atgacgtcagcatcagacacggacgcgctgcagctgagcgagcaagaagaacaagccacgccgctgccgaccgacggccccggcgtcacggctcaggaggaccaccagcagcagcaggatctagaaggctccggaaccttcgcggtgaggccgcccttgagcgggtgcgggaggaagagcctgaagatcaccatcccactgaccaccccctccaggacgatctccgcgctgacggacatcctgtgggacgagctcgccatcagccacttctcctcctcctccaagaaatgcatcccggacgggaagcagagcgtcagcaagaccaagctccggcacgcggagaagatgatcaagcgcgccttcgtcgagctctacaaggggctgggctacctcgccacctaccggagcctgaacatgatggcattcgtgaagattctgaagaagttcgagaagatcaccgggaaggaggtcctgtccatatatctcaaggcgctgaagctgatggacgaggtcgaggacatcttcgtccggcacttcgccggcgacaaccggcgcaaggccatgaagtacctgaggcccgcgcagcgcagggactcgcacgccgccaccttcttcacggggctcatggccggctgcttcgccgcgctgttcgtgggctactgcgtcatggcgcacatggcggggatgtactactactactccaccccggcgccgccttctcgcgcccgcggtaccggcggcggctcggtatctgtgtcggtgtcggtgtccgtgtacatggagaccgcgtacccggtgctgagcatgttcgcgctgctgttcctgcacctgctcctctacgggtgcaacatggtggcgtggcgcaggtgccgcgtcaactacggcttcatcttcgagtcgtcgccgtcgcccgccggcggggagctcgggccccgggacgtgttcctcgtctgcgccgcgtccatggccgccgtcgccggcgtcatgttcgcgcacctcgccctcgtgctcaggtggggctaccacgcgtcgccgcacgtggaagccatccccgcgttcttgctcctggtgttcctgctgctgctgttctgcccgatcaacgtcgtgtaccggtccagtcggtttcagttcctcaggatactgaggaacattgtactgtcaccgctctacaaggttgtaatggtagacttcttcatggccgatcagctttgcagccaggtgcctatgctacggagcctggagtacctggcgtgctattacatcagtgggagctactggacgcaggagtacggctactgcaccaacaccaagcacatcagagacctggcctacgccgtctccttcctgccgtactactggagagccatgcagtgcgcacggaggtggttcgacgagggggacacgagccacctggtgaacctgggcaagtacgtctccgccatgctcgccgccggcgccaaagtggcgtacgagaaggacaggagcctggcgtcgctgtcgctcctcgtcgccgtgtccagcggcgcgacggtgtaccagctgtactgggacttcgtcaaggactggggcctgctccagcccaactccaagaacccctggctcaggaacgacctcatcctcaggaggaaatccatatactacctgtcaatgggactgaaccttgtgctgaggctcgcttggctgcagaccatcatccatccaaattttgggagcttggattctagggtcacttccttcttcctagcggccctcgaggtgatccggcgagggcattggaacttctatagcaaacccatcgagccagagactgaaccaagcactgaaaatttcaggctggagaatgagcatctgaacaacgctggcaagttccgtgcggtgaagacggttccactgccttttcatgaagtggacgacgactaa

SEQ ID NO: 22168 - DNA, 513 bp, Zea mays
  Peptide Sequence Number=SeqID_63947
atgaccctcgtcatcaagcgcttcaagagcacactgaatgggcgcaagagctacaacgacaacaaatcaaaggggaactcagatctcagaggcaggggaggtaaaatgccaagagcaaatgagatgttcagggcagattctagaatgatggtggtttttggtgccttgacatcgaaaccagagcagctgacattcgaagaaaccctcagatttgtcaagaaagtgaaggcccgcgattacatgctatacctgtcattgttcgacattcttggcagaatggaactatcccagctcgatgcctaccgagagctgctgtttggaaaccacccggatctgtgcgaagagctcgagaagttcaggccaccggtgcctacaaagcaggcagcaaacaacatctggccctgggtcattgtttgcgccgtcccgttggttgcggtcagcctgatcccggcgctcggaaacccagtgctgtggttcgttcagcaaactgtcggcgagaaaatggccgcctga

SEQ ID NO: 22169 - DNA, 267 bp, Zea mays
  Peptide Sequence Number=SeqID_63948
atggcgtcccgcatgctctgtgacgacggcagctctcagcccccttacggaagcaagaggacgtcagcaaggacccaaccgctccgacagctgtccctccgccaggctccatcgctcctccgacggccacgacatcacaccagctgggtgccaaaacctctccggctgccacgacgattatctggcgtgtttctgttgggcggcgggcttctccgatccgataggcgcaaaaacgattcggtagattataatggcaatggtgggtaa

SEQ ID NO: 22170 - DNA, 210 bp, Zea mays
  Peptide Sequence Number=SeqID_63949
atggagtcgaaggtggtggagggcctgtctaggattattgatggcatgatgagccttgaggcattggcatgcgaaagctgcgatgagttgttgcaatggatgtgggcgacatttggcctcgaggtagcccacactcggtcttttgcaaagctagacaaggaaggtgtcatggagtcagagctagagactgctgacgtggagacaacatag

SEQ ID NO: 22171 - DNA, 1632 bp, Zea mays
  Peptide Sequence Number=SeqID_63950
atggacggatccatgtggtgcgctgccaactacgtgcctctgacgccgctcagcttcctggagcgcgccgcggtcgtgtacggcgaccgcgcggccgtcgtttgcggcgataggcggttctcgtggcgcgagacgagggagcggtgcctcgccggggcagccgcgctcgctcgtctcggcgttggccgccgcgacgtgcgtgccgatgaccggcgccgtcctgtgcacgctcaacacccgccacgacgcggccatggtgtccgtcctgctgaaacactcggaagccaaggtcttcctcgtggagtcgcagttccacgccgtgggcccgcgacgcgctcaggctcctcgccgacgccaaagacaggcttcctctcgtcatcacggtctctgaccccagcagcagcagcagcaccggcgacggcccgcggcagcaacgacggcagcgtcgcggtcgcggagtacgaagcgcttctgcggagcgcgccgcgcgacttcgaaatccggtggccggcagacgagcgcgacccgatatcgctgaactacacgtcgggcaccacgtcgaggcccaagggcgtcatctacagccaccgcggcgcgttcctcaacacgctggccacggtgctcgtcaacgagatggcgaccatgcccgtgtacctctggaccgtgcctatgttccactgcaacgggtggtgcatggtgtgggccaccgcggcgcagggcggcacgagcgtctgcatcggcagcgtgtcccccggggtggtcttcgaccacatcgtgcgccacggcgtcaccaacatgggcggcgcgcccacggtgctcagcatgctcgcgaacgcgccggcggcggatcggaagccgctgccgaggagggtccgcatctccacgggcggcgcgccgccgccgccgcaggtgctggccaagatggacgagctcggcttcgacgtcgcgcacgggtacgggctcaccgagacgtacggcccggcgacgacgtgcgtgtggaagcccgagtgggacgcgctgccgcccgcggagcgcgcccggatgaaggcgctgcagggcgtcgctcacgccatggtccaggaggtcgccatcaaggacccggcgagcatggagacgttgccctccgacgggcgcgccgtgggcgaggtgatgctccgggggaacacggtcatgggcgggtactacaaggacgcgggggccacggaggaggccatgcgcggcgggtggctgcgcacgggcgacctcggcgtgcgccacccgaacgggtacatccagctcaaggaccggtccaaggacatcatcatctcgggcggcgagaacatcagctccatcgaggtggagtcggtgctgttcgggcaccccgcggtgctcgacgccgcggtggtcgcgcggcccgacgaccactggggcgaggcgccgtgcgcgttcgtcacgctcagggacggcgcgagagccaccgcggacgacatcatccgcttctgccgggctcggctgccgcactacatggcgcccaggacggtggtgttcagcgacctccccaagacttcgaccggcaagacgcagaagtatctgctccgggagaaggcgagggccatgggaggcctgcgcaagccagatcgaagcaggctctag

SEQ ID NO: 22172 - DNA, 1911 bp, Zea mays
  Peptide Sequence Number=SeqID_63951
atgagagccgccgcggcctctgcaatccgcaggctactcccccgctacagcatcagcagcggcggcgggttgcaccggcactcccaatcgcagaatcagtccggctactgctttaatccacattgggattacactaatcgcctcgcgcgacctcgtgcgctgcttgatttctcgccatgccacccgcgctggtcgtcgccttcttcccctcgttccgtggcgtctccgcaattcttctgcagcctctcgggaacagaggaggaggaagcggtggtgctggacatggacgccggcacggtgcggtgcgcggccaaccacgcgccactgtcccccatcagcttcatcgagcgcgccgccgccgtctacggggcccgccccgcggtggtgtacggggaccggcgccacacgtgggcggagacgcggggacgctgcctccgcgtggcggccgcgctcgccacacgcttcggcatcgcgcgcggtgatgtggtcgctgtcctcagccccaacgtgccggcgatgtacgagctgcacttcgccgtgcccatggctggcgcggtgctctgcacattgaacacgaggcatgacgcggccatggtgtccgtcctgctgaagcactccggcgctaaggtgttcctcgtcgagtcgaacctcctcgacgtcgggagagccgcgatgaagcgcctcgccgagtccaactccgccgccgctcttccggtcctgctcaccatctcagacgacaccgactccgacgactacgaggatctcgtcaggaacggccccgcccggttcgacatccggtggccggcggacgagctggacccgatcgcgctcaactacacgtccggcacgacgtcgcggcccaagggcgtggtgtacagccaccgcggcgcgtacctcaacaccatcgcgacggtgctcgcgtacgacatcaccgccatgccgacgtacctgtggactgtgcccatgttccactgcaacggctggaacctgccgtggggcgtcgccatgcagggcggcaccaacgtgtgcctccgccacttcaccggcgaggtcatcttcgacagcatcacgcggcacggcgtgacgcacatgggcggcgcgcccacggtgctgaacatgatggccaacgcgcgtaccgcgaccgcggagcggaagccgctgccatggcccgtgcgcgtcatgacggggggcgcgccgccgccgccgcgcgtcctgttcgcggtggaggagctcggcttcgtggtgtaccagatctacggcctcacggagacgtacggcccggcgaccgtgtgcacgtggatgcccgagtgggacgcgctgccggcggaggagcgcgcgcggctcaaggcccgccaggggttccaccacgtcgcgatgcaggacgtggacgtcatgaacccgagcaccatggagagcgtgccgcacgacggccagacggtgggcgaggtgatgttccggggaaacaccgtgatgagcggctactacaaggacctcaaggcgaccaaggaatccatggccggcgggtggctgcacaccggggacctcgccgtgcggcatcccgacgggtacatccagatcaaggacagggccaaggacatcatcatctcgggcggcgagaacatcagctccatcgaggtggagtctgtgatcttcagccacccagccgtcctcgaggcggcggtcgtggcgaggccagaccaccactggggcgagacgccgtgcgcgttcgtcaagctcaaggacggcgccagcgccacggaagcggagatcataaacttttgccgggagaagctgccccactacatggcgcctaagacggtggtgttcgaggatttgcccaagacttcgacggggaagacgcagaagtttgttctccgtgacaaggctcgcgccatgggcagcctcacaaag

SEQ ID NO: 22173 - DNA, 285 bp, Zea mays
  Peptide Sequence Number=SeqID_63952
atggctactgcccgggagaacgacccctttttaaaggtaggtctccccactcgcgcccctgaagcgtcacgggtgaagtctcccccgggcaaccagcggtcaggaaggcgaaccgccgcgcaagaggcatgcggccgccccacgattaagcgccccttcatctttgccgtatccagcgatgttgatcctagggcaatagatcttgccatgagaatcgccgaaaggatgttcctcaaaatgaaggaagatgaggcgaagaacaaaattgaagaagaaaatgattga

SEQ ID NO: 22174 - DNA, 253 bp, Zea mays
  Peptide Sequence Number=SeqID_63953
atgagcacgcatccgccgtgccgagtcaccgaccccgcggtcggcgtcagctgggattgtgggaaaaaaaaaggtgcggcggccccggcggccggcaccgtcacgccgggggaggatagtgtcctcgggcgcctcggcgaagctgagccacgagggcgccttgtccacatgttccgcgtcgcgtggagccacgtcggaggtgacgccgccaagtactccaacttgcaagcgccttttgtactggcgtgtcggg

SEQ ID NO: 22175 - DNA, 147 bp, Zea mays
  Peptide Sequence Number=SeqID_63954
atggaggctgttgttggggtctccttctctgccgaaggccctcaggatgaaagaactatttgcaatcaaaactcgttcttcatgaccttcgtccaagactcattatccctgaaagaggataatgctttgaaggatgaaggtccttaa

SEQ ID NO: 22176 - DNA, 822 bp, Zea mays
  Peptide Sequence Number=SeqID_63955
atggcgcttcctgttgacgtggctggcctgtgccctaggtcgggcgacgtggaggctcctccgaagccgaggtcgagtctgtcttccatggccgaggccgagcccgagcccctgggtcgggcgaggcggaggttgttcagcagaggccagggcggagtggacccgagtccgagccctgggtcgggcgaagcggagttcgccgtcttccggggcttagcccgagtccgagccctgggtcgggcggagcggagttcgccgtcttccgggcctgagtccgagccctgggtcgggcggagcggagttcgccgtcttccggggcttagcccgagtccgagccctgggtcgggcggagcggagttcgccgtcttctggggcttagcccgagttcgagccctgggtcgggcgaagcggatcggagtggcgcaggcggcgctgtccttctgtcagaccggtcagtggagcggcgaagtgacggcggtcacttcggctctgccggggggcgcgcgtcaggataaaggcctctgcagctttatgctgatgggggttaccagctcagaattaggcgtcttgagggtacccctaattatggtccccgacaataggcgaagacctagcaagagtcctggtggcgagattcggctcaataaggtgtgcctcaatgacccttcccctctcccgcgtattgatcaggttgtagactcgaacatcgggtgtgagctcctttccttcctggacgcatactcaggctatcaccaaatcgccatgaaggagactgaccagcatgcgaccaccttcattaccccgttcgacacattctgctaa

SEQ ID NO: 22177 - DNA, 1444 bp, Zea mays
  Peptide Sequence Number=SeqID_63956
cgccatagcatcgtcaactccatcaagccgttaccatcaacaacgattgcttgctgccgactgccaagcggggccggtcaatccagaagttggcagcctccaatcgcagcatccctccgagatcgctgccccgtccccctcccccggcttatcccctatcccctcctcccccgctccttccacacaaacctccatgccccttcttcctctcctccccgtcatggcttccaccttctcccccacttccgccgcgagggccctcctcccgggctccacctcccgcccactcttcctcgccgcttcagcttcctcaggaagggactggacttccgccgcggccgattcaccgtctgcaatgtcgccgctcccaccgccgccgaacaggaggcgacggcgtcggccgcgaaggagacccagcgccccgtgtaccccgttcgcggccatcgtggggcaggacgagatgaagctctgcctgctgctcaacgtcatcgaccccaagatcggcggcgtcatgatcatgggcgacaggggcacggggaagtccaccaccgtccgctccctcgtcgacctgctcccggacatccgcgtcgtcgtcggcgaccccttcaactccgacccggacgaccccgaggtcatgggccccgaggtccgccagcgggtcctgcagggggacaccggcctccccgtcaccaccgccaagatcaccatggtcgacctgcccctcggcgccaccgaggaccgcgtctgcggcaccattgacatcgagaaggcgctcaccgagggcgtcaaggcgttcgagcccggcctgctcgccaaggccaacaggggcatactgtacgtcgacgaggtcaacctgctggacgaccacctcgtcgacgtgctgctggattccgctgcgtcggggtggaacacggtggagagggagggtatctccatatcccaccctgctcgcttcatcctcatcggctctggtaacccggaggaaggggagctcaggccccagctgctggaccggttcgggatgcacgcgcaggttggtaccgtcagggacgccgagctcagggtgaagatcgtggaggagagggctcgtttcgacagggatccgaagacgttccgtgagtcgtatcatgacgagcaggagaagctccagcagcagatatcatctgcacggagtaaccttggcgctgtgcagattgaccatgacctccgtgtcaagatatccaaggtgtgctctgagttgaacgttgatggactcagaggtgacattgtgactaacagggctgccaaggcgctggctgcgttgaaaggaagggacagcgtcaccgtggaggacattgctactgtcattccaaactgcttgaggcatcggctccgcaaggatccgcttgaatccattgactcgggtttacttgtcattgagaagttttatgaagtctttagctag

SEQ ID NO: 22178 - DNA, 219 bp, Zea mays
  Peptide Sequence Number=SeqID_63957
atgccgagaaatatggtaaatcgtggactttacccctcacgcgacctgagacgtggtctcccattccggttatggtggatacaagtgcggtcactgcacgacggcagtcggggttctctagaggacatggttgctggagtgacttggccgtccatcttgccaccgggttggactgtcaagtgggaccccgcctcggctgaggaggagcatgaggagtga

SEQ ID NO: 22179 - DNA, 477 bp, Zea mays
  Peptide Sequence Number=SeqID_63958
atggtgcggcgtccccggcgtgatcccgcccgccacgacgtcccggcacggccccgccctcccccgatgtccccgaccccgtccccgtcctcgccgtggcaccccctcccccggcgaccccgcgcagcccccctgcccgccctcggtgcgtggtcccgcgcggtccggccccagtggctcgccgacgcggcggtccgcgacctcgatgtggcggcccagcctcgccccgctcggcgcggcgccctccccgcgcaactcgcccggccgtggcgcggtccggttcgccggccatggcggctcggccccgcccgccttggcgtgccccgcccctgcgcaacgcggccccggcccggcgcggcttcagctcgcgcggccgtggtgcccctgcgtagcgcggcgcgtgcgctgctcggcaccggcgtgtgcgcgactcgttcgcgacacgtcagcgcggccttgcgcgtaaaggctcgcgtg

SEQ ID NO: 22180 - DNA, 381 bp, Zea mays
  Peptide Sequence Number=SeqID_63959
atggcgaagagggttgtcttcttcgcagtagacctggatctcgcctcccgggagggaccccgtcaggaaggagagatcataggtgtcaagctacgaatgaagaagaaatatttgaagttcaggacaaaggctcccttttatctcttggttggattcatggtagttcacatgaaaataatacatttagatgtatttgttactaacattgagtatgatgactcctttagtggagatgactgtagctctgatcagaagtgctggctgcaacaaagctgcttcagcttcagcaatcctattgcacttctcacaccactgtataaactgagaagccacagctgcagccactgttgtagaagtgtagccgatgaggtctatatatag

SEQ ID NO: 22181 - DNA, 195 bp, Zea mays
  Peptide Sequence Number=SeqID_63960
atgtgggccctggacgcactgaagatcttcttcccagccatcgcaacgaccggccgattcctccgccactgcggcgcgaatctctccaagtccgcgcgaggttacgagtcacctgaagatcatcctggtacctggaagctcaagtgccaggcaagttgtgcccttgatcacttcttttacccactcatgttctaa

SEQ ID NO: 22182 - DNA, 327 bp, Zea mays
  Peptide Sequence Number=SeqID_63961
atgttggtagaccacacaacggtactcaatgggccagtgtgtcggtcaaaggcccgacgcagcaagctcctgctcctccaaaagctctgtgctgtggctcgaactgccaccgtcgtcgtcgtcttcgtctgcatcatgatctcctccagcagtcgggatgcccagtggtggtgcaagggggcatctctggctgaggcacaggggagggctgcctcccagactccacctcctgctgaggcgagggggaagagtcctgctgctcctactcctggcattggcgctcctgctcctcgtgcaggcggcgatgcagtctctcctggtggctag

SEQ ID NO: 22183 - DNA, 285 bp, Zea mays
  Peptide Sequence Number=SeqID_63962
atggcgagtgggcgatgtgggggagaggaggctgacaggtgggcccagggtgacgtgggtgagcgcaccgcgcggggaacaattcgggccgagacacggggcgagccgttgataagcggggcccaccgaacgtcatcttcgcaatatcaaccactaacaggtaacagcagcaagcaacatgctaatagcacacaacaacaagcaaaggatttacatgccaaattgccaacacccaatagcaatcacaatagcctagagttcacaaatagttctatgaacaactag

SEQ ID NO: 22184 - DNA, 453 bp, Zea mays
  Peptide Sequence Number=SeqID_63963
atgtcgcgtgcgagcagccccttcaatgcaggacatggatggcccaggtatgggtctgtgctgctcacccgctgccccgagtgcgaacgtccagagccactagtgaggctcatatcgaaaaggtcagagaatggcaactttggtagggaattcgttaagtgtgaaagcaagccacgcccagggaaggttcaggaaaaatgcaaatttttcatgtggatggatgattacattaagatggtcgaagggacagggtttactagcggcctgggggagatgatggcgcataattatggggacgaacgagtggcggcgaactgggacatgtttactgcagaactgaagaaattgaataacaacttgagcgacttgaagaagatgtttggagttttgtatgcttccatgatttttattgccttgcttttctttgttatgaattatggttgcaagcgttaa

SEQ ID NO: 22185 - DNA, 993 bp, Zea mays
  Peptide Sequence Number=SeqID_63964
atggcgggcggaagcggcgaggcggctatgtctccgccgtcctctagtgccagcgggaagcgcgggcgggacccggaggaggacgtgtacgtggacaatctccattcccacaaacggtatctcagcgagataatggcatccagtctgaatggactgtctgttggggattcactgcctgacaacatcatggagtcccctgcaaggtcagagactgcttcctgctacagaacatgtatgcatggttttgcactatacatggttacagaaattagtgttagtaaatctggagattctggagatagtttgatcgcacataattactacagtggttgcactcacatggatgagatattatcccaatactcaccgatgtcagaagactcggatgattaccggtgctatgacactcaattaaaccccagtgggaatcatcctgatgcgatgatcagcccttcaactagcccaatgtcatctcctcatcgacaccagagaccacaatcttctttgttaccttcaaacccataccctctcccaagctgctccctttcgtcagtagtctgctctcatgctcggcgtggctccgataatgaaggccggttcccgtcctcgccaaatgacatgtgccatgtagcagatttgaggcgaacagcactactgaggtcagtgcaaatgagggtgcagggaccccattcgtatgacctatcattcggcatcagacaaggacaagatcatgcacatgagcatgaaggggaacatgaccatgagcatgaacatctagaggacttggaagggacagaaggatcatcttgcaataagtcaatcgttaacgaagtcacgtacaaccagagacgtgaccatgattttggtcggtcagagcacgagatagattacatcaacaacagcacatcagatgattgtgtaagtgatctaaaatttaagcaagaagataagagccatagtaaatttgatatccctatgcacaaaaattcatag

SEQ ID NO: 22186 - DNA, 124 bp, Zea mays
  Peptide Sequence Number=SeqID_63965
atgacttcatcttcttttgagcagtggttgcaatgtgaacaacctggggggtttggtgttgtaaagcaaggtggactagctgtatgtggggtgaagctcagagcgattgcttttagttggtcag

SEQ ID NO: 22187 - DNA, 273 bp, Zea mays
  Peptide Sequence Number=SeqID_63966
atggagattcactggatgatagggtgtgtgtgtgtgcaaggaatcgaagaatggatcgctggattacttggaccacacacgtgcggcgggcgggtgaagtccgacaagggtgatctagcttatccaatgaggctctatatgcttaaagcgccgcctcaggccattgagaaaaatggccggagacagtcacccgatctccgtcgtccatctctgatcggacagtctatttttataaaaactgcacctaatcctaaccgttcgcacgagatctga

SEQ ID NO: 22188 - DNA, 522 bp, Zea mays
  Peptide Sequence Number=SeqID_63967
atggcgcccaagcggaaagcccagagttcgtctgccgcaatcattcctcctatcgatcccaacagtcagttgcccttcacagccgccttctcgtcttcatccgagaagctgctgcccaggtcggccggggtcggccggcgcctggtggtgctggcagacgtcaaggtcatatcgacgggcgaggcctgccgccgcgggctcgccgccggcatcgatctatttggaaggcggctctgtggggtatccgcccacctccgagcccagtttccacgaggaaacccgcccgatctccagacgtctggcggctatcccgacttgtcttctcctactcgtgtggtcggcgatgctagtgtacccatcatgtccattcctccattcgtgattcacacagctcagtccaccgtcttgaaaacttgtaaaatttgcattgtggagaaattccattccctctggagtggattggattgcatgcatacaacgagtcaattcaataatgcatctattgtcgtagccagaaactga

SEQ ID NO: 22189 - DNA, 210 bp, Zea mays
  Peptide Sequence Number=SeqID_63968
atggacaagaagcggcctacgggggagcagaacctggttgcatgggcaaggccttacctaaatgatcggcgaaggctctatcagcttgtagatcctcgcttggggctgaactactctgtcaaaggggtgcaaaaggtcgctcagatctgccactactgccttacccgtgacacaaaattaggtgttgcctgccgatacctggagatgtga

SEQ ID NO: 22190 - DNA, 591 bp, Zea mays
  Peptide Sequence Number=SeqID_63969
atgatgactgcgtcaaaaaaggcttcgagccccctactgatcagaggttcgaaggctggcccctcggaagagttcaacagccgcctgagagcactcggtctccgcgcccactactggctggcccccgaagggttcgacagccacctcagacgcagagcgagggatgaccctgggtacgttcgatacataaccaaggctcgggctgcgctcccgagggctaggactcagccttggccccggaagacgacgaactccgcctcgctcgaccccagggctcggactcggcctcggctccggaagacgacgaactccgcctcgcccgaccccagggctcggactcggcctcggctccggaagacgacgaactccgcctcgcccgaccctagggctcggactcggcctcggctccggaagacgacgaactccgcctcgcccgaccccagggctcggactctgccttggccttggacgatggtctccgcctcgcccgacctggggctcggactcgacctcgacctcggaggagcctccgccccgcccagggctcggaccgaccacgtcacaggggggccatcattaccctacccctag

SEQ ID NO: 22191 - DNA, 966 bp, Zea mays
  Peptide Sequence Number=SeqID_63970
atgagagagtggagaagggaatggcgaatggtgcggcagagggatgggctgcacacaagtcacagtgagacaactagacgagcagacgagatgccaagacgtgcggccaagcaggaaacagcgacaggcggcagccgtgcgtccgtgcgggtcggcgcctcgacgggaccaagcggcaagcagaacagcggagcgccggaccgggcggctggagcgcggagcgacggagcgtgccgagtccgaggctccgagtggctggagcgtcggcaggagcgactggcggccgagcgggcagctgacagccttcgggcagcgggcgacctccaggcgcttggaggcgtcgcagggtggcgagggaggccggcgtcggagcccgggaggacctcgtgcaccagcaccctagggagccgcgcctgtgcgggcacgcctgcgtgtagacgacgagcagggcagcgctgctgcagggaggggaccgggcgcgggcggaccgtcggttggcgtggggcagcggcacaaacggccagagcgacacgatgggagcggcggctccgggagaggcgctggacggggatccgccggtcgctcgccttcttcctcaacccgccgctggactgcgtcgcctgcccgccgggcgcgctcctccaggagaacaagcaggtcggcggcccgcgcgcgttcggaggaagacgagcgcccgaggaagacgacgagcagggccaggggacgacaggccggtcgacggacggagcgctgcgcagcgcaccaaagcagccgccacccgccaggcaagaggccacagccaagcagggtctgggcgcggccccggcagccctggcggcgctcggcagtgggggaggagagagccggcggctgggagggagagacgccgtcggttgggggccggcagctgggagaggagggtgggaaaaacctaatctgataccatattggaatgtgaacccctaa

SEQ ID NO: 22192 - DNA, 444 bp, Zea mays
  Peptide Sequence Number=SeqID_63971
atggcaacctccacctcagttcccgtcctcctgctcctcgccgccgccgccggcctcctcctgctccccggctcgctggcgtggcagagcagcaactgtgcaccgggcgcgcccggcagtggctcgccgacgtggccttcacccggctccggctccggcggcggccacagcaagccgcccaagcaccaccatggcaagccgcccaagtgcccgccgtgcaaccctcccgggctgatccacctggtgatcgggcaggaggccaggtccaagtgctgcccgctggtgcagggggtggcggacctggacgcggcgctgtgcctctgcaccaccatccgcgcgcgcctgctcaacatcaacatctacctccccatcgcgctcaacctgctcatcacctgcggcaagcacgcgccgtcgggcttccagtgcccgccgctctacgactga

SEQ ID NO: 22193 - DNA, 882 bp, Zea mays
  Peptide Sequence Number=SeqID_63972
atggcatcggcggcggccgtggagtgggaggcggcggcgcggaaggtgctggtggcgcgcaagccctgcttcgggctacctacggcctgcccaacctgcctccccgtgctcctctacctccgcatggcgcaggttcccttcgacatccacgtcgacacctccttccccgatgccgatcacataccatatgttgaatttggggattgcgtggctttcaacaacgagaaaggaggcgtaattgagtatctcaaggatgagaaaattgctgacttgaactcaaatcacccaaatatttcatccaccactgtgctagatacaaaggccatggtttcgtcctggcttgctaatgctttgctgtatgaactctgggtggttagtgctggaagcattgcaaatgatatctacttctctgatctcccttggcccattggaaagatactccattggaataaaactagacatgtgaagcagctacttggtataacaaagctcaatgctgcagaaaaagaagaggagatatacctgaaggcaagtgctgcttatgactcattgtctttcagattaggggatcaagtctttctatttgataatagccctacagatgttgatgctcttttccttggacatgctctttttgtcctcagtgcgttgcctgatacatctgtgctgaggggcacattgcagaagcatgacaacttggttagctttgctgagcatcacaaggtccagttgctggaaacctcatcatcgtcatcgtcagggttaggatcatcacctagcccgtcatcatccacccccaggagaagaccatctgctgaccacagtaaatgtcaaggaactacaacttctgtgaaactggtctcaaaagctgtagttccttga

SEQ ID NO: 22194 - DNA, 2151 bp, Zea mays
  Peptide Sequence Number=SeqID_63973
atgctcctgctgctgctgctgctcctcttcagcctcacggcgacgctgcagttccaaggcaagacgacggcgctggctctgccaggacccggctgcctcaggtactgcggcgacgttgagatccagtacccgttcggggtcggccatggctgcgctatggaagggttcgagctccgctgcaacaggagtgctgtcgacggccacagcttcttgacgatcttcggcataatcccggtgcggaacatatcgctggtcgacggccagtcgaccaagaagatcgactgcgatatctggggcaaggatctctccggcacgccgtttaggtattcagggaagtccaacatgttcacggttatcggcatcaacgctctcgcatacatggcggacaatactagcaaaccctacggcgacctcgaggcacaagatggcaagtgtgacggcgacagtgccggctgctgccaggctgcactcgccgacgacatgaactttgacgacataggtttcagtccggatcacaatacgacggattactacgaacacagaaacgccacagacaggcgggcagattaccgaggctacgctgtggttatggagaccgacaaattccagttcaagacaacatatctgaacacaacagcatttcttgatgagaatgctggcggccgtgtcccggccatcctgatctgggaagtgggcaacgagacctgcgatgttgcgacgaagaaagaggattcctatgcttgcctcagcgctaacagcgtgtgcgtcaattccagcagtggaggctacctctgcaactgcagccaagggttcgagggcaatccttaccttcctgatggatgcaaagatattgatgagtgtgttgctaaaccacctccatgcgctagatgcaagaacaaacctggaggttacgattgtccgacacccttgaacattacggcgctactatcagtgggttcaagcatcggtgtggctgttgtggcctcggccgtcgtctgtacgtacttgacccatgagaggaagaagctgaccaaaatcaagcggaagtatttccaacagcacggcgggatgcttctgctgcacgagataagcctaaagcaaggaactgccttcaccgtcttcacagaagcagagctcatcgaggcgaccggcaacttcgctgacaagaacatccttggccgcggtggcttcggcaccgtctacaggggcctgctcaaggacggcggtgtcgtcgcggttaaacggtgcgtctcgtcgatggccagcgagcagcagcagaaggagttcggcaaggagatgctcatcctctcccagatcaaccacaagaacatcgtcaagctcctgggctgctgcctcgaagtggaggtcccgatgctagtctacgagttcatccccaatggcacgctgttccagttcatccatggtgacggtggctctcgcagcgcccccttctcggttcggatacgcatcgccctcgagtccgcgctggcgctgtcctacctccactcgtgggcgtcgccaccgatcctccacggcgacgtcaagtcgtccaacatactcctggaccagaactacgaggcgaaggtgtcggacttcggggcctcgatcctggcgccggcggacaagagccagttcatgaccctggtgcaggggacctgcgggtacctggaccccgagtacatgcagacctgccagctgacggacaagagcgacgtgtacagcttcggcgtcgtcctcctggagctgctcaccggcagcacggcgttcaacctggaaggccccgagagcgagcggagcctctcgctgcgcttcctgaacgccatgaaggagcgcaggctcggggatatcatcgacggccgcatcaaggccgacagcgacgccgcgctgctcgaggaggtcgcggagctcgcgctgcagtgcctggacatggtcggcgagaggcggccgaccatgagagatgtcgccgagaggctggacgtgctggccaaggccatgcagcagcagcacccgtgggtgccagcgcagcatagaccggaggagatggagagccttcttggggagtcgccggtggccagcgcggagatgaccagcaccggaaacttcagcatggaggagaggatcgtgcatgggctgctggattctgggcgttag

SEQ ID NO: 22195 - DNA, 1041 bp, Zea mays
  Peptide Sequence Number=SeqID_63974
atgggccacaacaggtcgtgcttgctatgctgggctggtgcctacttttccagctccaacctctccaagaaacaacctttagttactaaggttgcacaatacttcgtgggtgcttttggcattctgccggcgccgtgggtgctgcgtagcgtaggctcccactcgcccgcccaccattccgtttcaaccgctcatcccacgccggagaaacggaatcgaatcgacccggcgagccagacggtaaaaatccggccgcctcatcccacattcccaccggccaccgctggtcctggtcgtttggctgtctggctggccgtgcgcgccccctattccgctgcccacgccgcgcgagatgctgacgcgagggccgagggagggataaagcgcggccagggttcagggagccagccacaggccacagcgcacagccagtgcggcaggccgcgccgcagccggagcaaaaggcagcaccgaaaagcccctttccccctcggccgcatgcccgcatcccacatcatgacgatggcgacgccgacccgtcgctgcggcactagtgccagcgccagtgccagtgctcacgcagtgtcgctgaacgggcggtggagtgccagtgctcgcgcagtcgcgctgaacgggcggcccaccgccactgagtctgagactcggcaactccactcccgcctcgcccccgcttgcttctccgacttgtgcacccccaccgcgcgcgccacctttcgctttcgctttcccttttgcgccccgcatcgcacttatctgcttccttgggcgatttggactggacggggtcgagtggggcgagaaaagggaagcaagctgggagagaagaatcacaccgggccgtgccgatgggtgtttacgagtagcagttgtatctcgttgacctcaccgcctgcagggcaccaaggaggagatgacttccccgaagcgggcagcagggcgggaagggtgcggatgcttggccgccgtcgcgcggggcctccgcggggcgtgcttccggccggcggtgacggcggacggtga

SEQ ID NO: 22196 - DNA, 10791 bp, Zea mays
  Peptide Sequence Number=SeqID_63975
atggttgctgcttttctagctttaaggagtttcagactcctttctcactgtgggttatggcccgcaaatgtcaaagcatttattgatcaagtaatcaatattccactacatgacattgccataccgctatcaggcttccgttgggagttcaataagggaaatttccaccactggaagcctttatttattcattttgacacatatttcaagacatacatttcttctcggaaggatcttcttttatctgatgatatgactgaggctgaacctatgccaaagaatgccatcttgaaaattttaatagttatgcagattattttggagaactgtcagaatagaagttcttttactggtcttgagcatcttaagcttctcctggcatcgtcagaccctgagatagttgtagcagcattggaaactcttgttgccttggtcaaaataaatccttcaaagttgcatatgaatggaaagctaattagctgcggatccataaacacccatcttctatcattggcccaaggatggggcagcaaggaggaaggcctaggcatatattcttgtgttgtggcaaatgaaggaaaccagcaggggggcctgtccttgttcccagtagacttggagagcaaatatcagcatcgtcttggttcaactcttcattttgagtataatttgggttctgcacagtaccctgaccaaactagtgacaagggcaagtcatctaatttgtgtgtgatacatattccagacatgcatcttcagaaagaggatgacttgagcatactgaagcaatgcgtggacaaattcaatgtgcctccagagcacaggtttgcattgcttacaaggataagatatgcccgcgccttcaactccacacggacttgtagtatctatagccgcataagtcttctttcgttcattgtacttgtgcaatcaagtgatgctcacgatgagctcacatatttctttacaaatgaaccagaatacataaacgagttaatcaggcttgttcggtcagaagattctgtccctgggcccattcgtgcacttgctatgctagcactgggagcacagctggcagcatatgcatcatctcatgagcgtgctaggatattgagtggctcaagtatcatttctgctggtggaaatcgtatggtgttgctcagtgtcttgcagaaagcaatattctcactcaatagcccaaatgatgcctcatctcctctaattgttgatgctcttcttcagttttttctgctccatgtattgtcctcatcaagttcagggactacggttagaggctcaggcatggttcctcctctcttgcccctgctgcgagataatgattcttctcatatgcatcttgtctgcttggcagtgaagactcttcaaaagcttatggagtacagcagccctgctgtttctctgttcaaagacttgggtggtgtagaccttttgtctcggaggttacatgtagaagtgcagcgtgttattggtactgctgatggtcataattcaatggttactgatgcagttaaatcaaaagaggaccacctgtactcccagaagcgattgattaaagctttgcttaaggctttggggtcttctacttattcccctgggattcctgctcgttctcaaagctcccaagataattcattgcctgtgtcactttcccttatatttcagaatgtagaaaagtttgggggcgacatttatttttcagcagttacagttatgagcgaaataatccataaagatcctacatgctttcctgctttgaaagaacttggtcttccagatgcttttctctcatcagtgactgctggggtaataccatcttgtaaagccctgatctgtgttcctaatggcctgggtgcaatatgcctcaataaccaaggacttgaggctgtcagggaaacttcagcactacgatttcttgtatataccttcactagcaggaaatacttgataccactgaatgagggcgttgttcttctagctaatgcagcagaagagcttcttcgtcatgtgcaatccctgagaagtattggtgttgacatcattattgaaataatcaataaactaagttcatctctgaaagatagaaacaatgaaacagccatcttggaagaaaaaacagatatggaaactgatgttgaaggtcgtgatttggtaggtggtatggattccagtgtggagggcagtaatgatgaacagttttctcatttgagcattttccatgtgatggtattggttcaccggacaatggaaaactctgaaacctgccggttatttgtcgaaaagggaggtctaaatgctcttttgacactcttgttgaggcctagcattacactgtcatctggagggatgcctattgctttgcatagcacaatggtgttcaagggatttactcagcatcactctactccacttgcacgtgcattttgctcgtctttaagggagcatttgaagagtgcattaggggaacttgataaagtttctaactcatttgagatgaccaagattgaaaaaggagcgataccttctttgtttgttgttgaatttctgctatttttagctgcctcaaaagacaatcgttggatgaatgctttgctctcagaatttggcgatgctagcagggaggtcctggaagatattgggcgagtccaccgggaagtgctttggaaaatttcgctttttgaagaaaacaagattgacgctgaaattagtttatcttcttccacatctgaagcccagcagcctgacttgtctgccagcgacattggtgatagcagatacacttctttcaggcaatatcttgatccaattttaaggcgaaggggttctgggtggaacatagagtctcaagtgtctgacctcattaatatgtatcgagacattggcagtgcagctagtgactctcagagagttggttctgatagatattctagtctgggtttgccctcaagttcccaggaccagtcttccagttcatctgatgcaaatgtcagcacaagatcagaagaggaaaagaaaaattctgagcattcctcctgctttgacatgatgagatctctctcctaccatatcaaccatctttttatggagcttggtaaagcaatgcttcttacatctcgtcgggagaacagtcctgtaaacctatccccatccgttatatctgttgctaacaacattgcttctattatgttggaacacctcaactttgaaggacattcggtaagttctgagagggagatgactgttaccacaaaatgccaatatcttggaaaggtagctgaatttattgatgggatattattagatcggccagaatcctgtaatccaattatggtaaattcattctattgctgtggtgtcattcaggccatcctgaccacatttcaggccaccagtgagttgctcttcacaatgagcaggccaccatcttcacctatggagacagatagtaaaactggaaaggatggaaaggatatgaattcttcatggatctatggtcccctcatcagctatggcgcaattatggatcatcttgtgacctcgtcttttattctctcttcatcaactagacaattacttgagcagcctatttttaatggatctgtaaggtttcctcaagatgctgagaggttcatgaagttacttcagtctaaggtgttgaagacagttcttcccatctgggctcatcctgagtttccagaatgcaacattgagttgattagttcagtcatgtccatcatgaggcatgtttgctctggggtggaagtgaaaaacactgttggcaatgatggtgctcgtttaactggtccacctcctgatgagagtgcaatttcattgattgtagagatggggttttctcgtgcaagagctgaagaagcattaagacaagttggaaccaacagtgttgaaatagcaactgattggttattctcacacccagaggatgaacttgctcgggcgctcgcaatgtctcttgggaattctgatacacctgcacaagagggaaatggtaggtccaatgaccttgagctggaggaagtaacagtccagctgcctcctatagatgaaatgttacactcatgttttcagctacttcagacaaaggaagcattagctttccctgtcagggatatgcttgttactatcagctcacagaaggatggccaaaaccgagtaaaggtgcttacatatttgattgaaaatctgaaacaatgtgtggtggcatctgagccttcaaatgatactgcactgtctgctcttttacatgttcttgctttgattctccatggagatactgctgctcgtgaagttgcctcaaaggcaggaattgtgaaggttgctttagatctgctttccagctgggagttggaacttagggaaagtggcatgattgaggttcctaattgggtaagttcctgtttcctttctgttgatcagatgctccagttggaaccaaagttgccagatgttacagagctagatgttctgaaaagggataattcaaatataaaaacatcacttgtgattgatgagagcaagaaaaaagattcagaatccttgtcaagtgttggattactagacatggaggaccagtatcaacttttgaagatctgttgcaagtgcatagaaaaacagttgccttcggcttccatgcatgctattcttcagctctctgcaacactgacaaaagttcatgcagctgctatttgtttccttgagtctggtggtctgaatgcattgctatcattgccaacaagtagtttgttttctgggttcaacagtgtggcttctacaataattcgtcatattttggaggaccctcacacccttcagcaagcaatggaattagagatacgtcacagtcttgtcacagctgctaatcgacatacaaatcccagggttaccccacgcaattttgtccagaatttggcatttgtcatatatagggacccagtgatatttatgaaagctgtccagtctgtgtgccagattgagatggttggagatagaccgtatgttgttctgttaaaggatcgtgagaaagaaaggagcaaggagaaggataaggacaaatcagttgataaggataaagcaacaggtgcagtcgctaaggtagtgtccggggacacagctgcaggatctcctgcaaatgctcaggggaaacagtctgatttgaattcaagaaacgtgaaatctcaccgcaagccaccccaaagttttgtcactgttatagagcatctcttagatctggtgatgtcctttgttccgccaccccgtccagaggatcaagctgatgttgtctctggtactgccttatcttctgacatggacattgactgcagttctgcaaaagggaaagggaaagctgtgtctgtcccacctgaagagagcaagcatgctatccaagagtctactgcatcccttgccaaagcttcatttttccttaagttgatgacagatgtgttgttaacttacacatcatccattcaagttgttcttcgtcatgatgctgatctgagcaacatgcacggtccaaatcgaacaaattctggtctaattagtggtggaatctttaaccatatcctgcagcatttccttcctcatgccacaaagcaaaagaaagagagaaaaagtgatggagattggatgtataaattggcaacaagggctaatcagttcttggtggcttcatctattcgttctgcagaggcccgaaaaaaagttttttctgaaatctgcaatatacttcttgatttcaccgactcgtctgcagcttacaaagccccagtagcaaggatgaatgtgtatgttgatttactgaatgatattctgtcagcccgatcaccaactggctcctcattgtcagcagaatctgcagttacatttgttgaagttggtcttgctccttcattattgaaaatgcttcaaaatcttgatttggatcaccctgattctgcaaagatcgttactgccattgttaaggccctggaactcgtcagtaaggaacatgttcattcagcagataatgcaaaaggagagaactcatcaaagattgcttccgacagcaacaatgtgaattcatcacctaataggttccaggctcttgacatgacttctcagcccacagagatgattactgatcacagggaaacatttaatgctgaccaaacttcacaaagttcagattcagtggcagatgagatggatcatgatcgtgatatggatggtggctttgctcgtgatggtgaagatgattttatgcatgagatggctggcgatggaactggtaatgaatctacaatggaaatcagatttgaaatttcacgcaatagagacgatatggctgatgatgatgatgatgatgacaacactgatgaagatatgtctgcagaggatgatgaggaggttaatgaagatgatgaagacgaagatgaggagaataacaatttggaggaagatgatgcccatcagatgtctcatcctgacacagaccaggaagaccgtgaaatggatgaagaagaatttgacgaggatctactagaagatgatgacgatgaggatgaggagggagtcatccttcgcctggaggaggggattaatggcattaatgtgtttgaccatattgaagtatttggtggtagcaacaatttgtctggggatacactgcgtgtgatgcctctggacatttttggtacaagaaggcaaggccgaagtacctccatatacaatcttcttggcagggctagtgatcatggtgttcttgatcacccacttcttgaagagccttcctcgacattgaatttttcacatcaagaacaaccagagaatcttgttgagatggctttctctgatcgaaatcacgaaggtagctcctcccgtttggatgctatattccgcagcttgcgaagtgggcgtaatggacatcgctttaatatgtggctagatgacggtccacaacgcaatggatctgctgcccctgcagtacctgaaggcattgaagaattgctgatctctcatttgagtcggcccactcaacaacctggtgcccagactgttggtggtactcaagaaaatgaccaacccaaacatggctcagctgctgaggcaagggaaggatcgccagctcagcaaaatgagaacagtgaaaatacaacgaatcctgtagatctgtcagaaagtgctggccctgcacctcctgatagtgatgcacttcaaagagttgtgtccaatgcaagtattgagcatgctacggagatgcagtatgaacgcagcgacactataacacgtgatgttgaagcagtgagccaagcaagcagtggcagtggtgctactttaggggagagcctcagaagtttagaggttgaaataggaagtgttgaagggcatgatgatggtgaccggcatggaacttcaggggcctcagaacgattacctttgggtgatattcaagctgctgctcgatcacgcaggccatctggaaatgctgtggctgtaagcagtagagatatgtctctggagagtgttagtgaggttcctcaaaatccagatcaagaacctgatcataatgctagtgaggggaatcaggagcctagaggggttggtgctgacacaattgatcctacatttttggaggctcttcctgaggacttgcgagctgaagttctttcttcacgtcaaaatcaagtgactcagacttctaatgaccaacctcagaatgatggtgatattgatcctgaattccttgctgcactcccccttgatataagagaggaggtgctagctcaacaacgtagtcaaaggatacaacaacaatcacaagaattagaaggacaaccagttgaaatggatgctgtttcaattattgcaacattcccttcagaaattcgggaagaggtccttttgacatctcctgacaccctcctagctacactcacacctgcactagttgctgaggccaacatgttaagggagagatttgctcatcggtatcacagtagttctctttttggtatgaactccaggaacaggagaggtgagtcctcccgacgtgacataatggcagcaggacttgataggaacacaggtgatccctccagatcaactagcaaaccaattgagattgaaggtgctcctcttgttgatgaagatggccttaaagctcttattcggttacttcgagttgttcagcccctatacaagggtcagctgcagaggcttcttgtgaacctttgcacgcatcgggataacagacaggccttggttcaaattctggtggacatgcttatgcttgatctgcaggggttttcaaagaaatcagtagatgcatctgagccaccatttaggttgtatggatgccatgcaaatatcacatattcacgtcctcaatcttcaaatggtgttcctccattggtttcacgtcgtgtgctcgaaacactgacaaacttggcaagaagccatccaaatgttgctaaactcttgctctttcttgagttcccttgcccatcaagatgtcgctctgaagcacatgatcataggcatggcaaggctgttctagaagatggtgaagaacggaaagcctttgcggttgttcttttgttaactctgttgaatcagccactttatatgagaagtgtagctcatcttgaacagttactaaacctccttgaagttgtcatgcataacgctgagaatgaaattaatcaagctaagctagaagcgtcatctgagaagccatctgagaatgcagtgaaagatgtcaaagataacaccagcatttctgattcatatggatcaaagtcgaatcctgaggatggtagcaaagcccttgctgttgacaataaaagtaacttgcgagctgttctgcgaagtcttccccaatcagagcttagattgctatgttcattgcttgcgcatgatggattgtcggacagcgcttatctccttgtaggtgaagtgttgaaaaagattgtggctctggcccctttcttctgttgccatttcataaatgagcttgcacgatcaatgcaaagcttgacattttgtgcaatgaaggagcttcgtttgtacgagaattctgaaaaggctcttcttagttctacatcagccaatggaactgcgattcttagagttgtgcaggctttgagttctcttgtcagtactcttcaagatagaaaggatccagaacagcctgctgagaaggaccattcagatgcagtttcccagatttctgaaattaacacagcattggatgctttgtggttggaattgagcaactgcataagcaaaatagaaagctcttcagagtatgcatcaaatctaactcctgcttctgcaagtgcagctacattaacagcaggagtagcacctccattgcctgcaggaactcaaaacatattaccatatatagagtcattttttgtgacatgtgagaagttgcgtcctgggcaacctgatgctgtacaagaggcttcgacttctgatatggaagatgcttcaacatctagtggtgggcagagatcatattcctgtcaagctagtcttgacgagaagcaaaatgcttttgtgaaattctcagagaagcacagaagattgctgaatgcattcatccatcaaaaccctggattactggagaagtcattctcgctgatgttaaaaattcctcgcctgattgattttgacaacaaacgtgcatatttccggtctaaaatcaagcatcagtatgatcatcatcatcataatcctgttagaatttctgtgcgtcgttcatatattcttgaggactcctacaatcagcttaggatgcgctctcctcaggacttgaagggtagactcactgttcattttcaaggagaagaaggaattgatgctggtgggctgacaagggaatggtaccaatcgctttcacgagtcatttttgacaagagtgcccttctatttacaacagtcgggaatgatttgacgtttcaaccgaatcctaattctgtatatcaaactgagcacctctcatactttaaatttgctggacgagtggttggcaaagctctcttcgatggtcagcttttagatgctcattttactagatctttctacaaacacatacttggtgtcagggttacataccatgacattgaagctatcgatcctgcatactacaagaatttgaaatggatgctcgagaatgacataagtgatgttttggatctcaccttcagcatggatgcggacgaagagaaactgatattgtacgagaaggcagaggtcactgattgtgagttgattccaggagggcgtaacatcagggttactgaggagaataaacatcaatatgtagatcgggtagcagagcatcgactgacgactgcaatcaggcctcaaattaatgccttcctggaagggtttaatgaactcattccacgggagctgatatctatcttcaacgacaaagagcttgaacttctgattagcggtcttccagatattgacttggacgatttgaaagcaaatacagaatattctggctacagcatagcctctccagtcatccagtggttctgggaaatcgttcaggggttcagcaaggaagacaaagcccggttcctccagttcgtcactggcacttcaaaggtaccgttggaaggttttagtgcacttcaagggatctctgggccacaaagctttaaccaactagacttgcctgagtacacatccaaagagcagctccaggagcggttactattggcaatccacgaagcaaatgaaggtttcggatttggctaa

SEQ ID NO: 22197 - DNA, 178 bp, Zea mays
  Peptide Sequence Number=SeqID_63976
caccgtcagggatgccgccctgctgatgttggccgtcgtggggctatgccgcttcccgcccgatggcgcggacgccggccaccagcaccagcagcctggcgaggtgaagacccagctccccgccgtggagtacggccagctcctggcggctggctggtggagctcggggggttgctaa

SEQ ID NO: 22198 - DNA, 234 bp, Zea mays
  Peptide Sequence Number=SeqID_63977
atggccgattcaaaggatagtttcgacgtctctcccagcaacattattgagctgactatggagactctatcggctgaggatcagcaagagtttggagagcacaaggagcaactgatcaaggaggcccaagtgaagtttatagccaacttcaagcgggcgactgatctggcttcgctccgacctactacaactaaccccaaaatgagaaatgagaacaaatgcaacgaatactag

SEQ ID NO: 22199 - DNA, 384 bp, Zea mays
  Peptide Sequence Number=SeqID_63978
atgtccggagatcacgccaagagggagatcgtgatcgtcgacaagcccgcggggaagactctatcaagggagtccgataataagtacaaggaggaatcctcttcctccatcaagtcacatcggaggggtgacaagaagaagaaaatgaagaaggcacctcaagtgggggacgaggactacgactcggacgaggccgctcaaattaggcacttcaactcccaagcaacttctatactcctcgcctccttgtgtcgagaggagtataataaggtgcaagggttgaagaacgccaaagaaatttgggatgtcctcaaaaccgcacatgaaggggacgaggtgaccaagatcaccaagcgtgaaacgatcgagggagagctcggttga

SEQ ID NO: 22200 - DNA, 360 bp, Zea mays
  Peptide Sequence Number=SeqID_63979
atggcctccaggtcatccgccgtgacggtggagaaaggccacgggtcgcgcggcggaacaatggtcacccggagaagcgggcgacgcttcgccttcgccataatgaccgcgtcaaaaaagggactgggaaagggggataccccgaaaggcatccttctccgcgaaggaaacgggccccgagcccccctactgatcagaggttcgaaggctggcccctcggaggggttcaacagccgcctcagagcgctcgggctccacgcccactactgttcagaggttcgaaggccgccccccggaagggttcaacggccgcctcaggccactcgggcttcgcgcccactactgatcaggggttcgtag

SEQ ID NO: 22201 - DNA, 549 bp, Zea mays
  Peptide Sequence Number=SeqID_63980
atgacctacgccgtggcagtcactccggcgatcaacggggagcgagagcaggtcacggcgatgcagtggaagtgcctggacatgcggcgcaaggccggaaggcggcggtcaccggcgagctcaaccgattccaccgtgagccgaagtgaccgccgtcactccaccgctccactgaccagtctgacagaaggacagcgccgcctgcgccactccgactgcggtgccactcgacagagtgagtctgacaggcagtcaggccttgccaaaggcgccacggcgaactccgctccgcccgaccccagggctcggactcgggctaagacccggaagacggcgaactccgctccgcccgaccccagggctcggactcgggctaagacccggaagacggcgaactccgctccgcccgaccccagggctcggactcgggctaagacccggaagacggcgaactccgctccgcccgaccccagggctcggactcgggctaaagacacggaagacggcgaactccgctccgcccgaccccagggctcggactcgggctaa

SEQ ID NO: 22202 - DNA, 528 bp, Zea mays
  Peptide Sequence Number=SeqID_63981
atggctccggcaccggtggccgctcccgtggcttcggtctcccgcgcggcagctgcgctcgcccccgccggcgccgtccgctccgccagggcgccgttcgggtacacgaggaaagacgtgctgctgatcggcctcggcgtcaccgccttcggcgtcggcctcaagtacgggctcgagctcctgggagttgaccccttgcaggccggcaacgtcgtgcagctgctggtggtgctcgggatgacggtggggtggatctccacctacatgttccgggtggccaacaaggacatgacctacgcgcaccagctcagggactacgagaagcaagtcatggaggtgcgcttcgcggcctctgaatttatcgcgtccaagttccaacttccaagcaccgtagagatagaattgatcgccatggtcatgggcctggtgtggagcacagggatggtggtcgacaacgaatgtgaaggtcatgcaggtttgtgccgatggaccgggagcgataaaggacgagcgctgagacttgactga

SEQ ID NO: 22203 - DNA, 483 bp, Zea mays
  Peptide Sequence Number=SeqID_63982
atgggagggtcattaccggcgttaggaaggttggtgaagctgctcccgcgcgcagtgcttccgcggcgacaacaccgcgacggtgagcaatcgccgccgccagggtcgacgaaatccgaggtcaccggccgcccttctcccgtagcgaggccccggtcctatccccgaagcacggcgaggcacccgagtactaaatcgtggacgcggcgccgatggcgatggtgcgggttgcgctgcggtggtggatcctcccgatggcggagcagagcaatacggggcgagcgggggtttgcggaggtcccagagggtcttatcccccacaacgccgcgagctcggacccacagttccgcttttcccgcggggtggcgagcgacccggtcgtaacggcagccgaagcccccgcgcgatttctgttacgcgaaggggacgatcccgacaagtgggaccgaagaaccagtgactcaagcagcgggcgcgggtga

SEQ ID NO: 22204 - DNA, 1551 bp, Zea mays
  Peptide Sequence Number=SeqID_63983
atggcttacaccttttggtggctctgcagatcgctctcgctggcccaggtgaccaagacacctgatgaagtgatcatgcgtgttttgacagagacactgtacataatcaggagggggacggtgcttcttgcggggaattcttaccctctggagcaaacgttccttggctccaatggtgcaaaagattggatctttatcctcctcctcctcctcctcattcttacgacgaacatctcgtgccatgctgacctcctcctgtctctcgtgcgatggtcagccggtgttcccgctcttggaaagaccaaggccgtgcccgcccgacctgacgctctgaaccggcgaccccctctcggcgatatcggcaacctcgtcagcgtccgcccagccacagggaacccgcaggagcaggtcaaccgccccatcactagaagcttcggcgctcaactcgtcaagaaagcgcaggcgaaggccgcaatcaagaatgccgcaatcctgcctgcgaggcatgcgccgaggcaggagaggaaggctcctgtcaagcagcacccgccgccggaggatatcatagtactcagctccgattctgaacagagcagggcgcagtccgagagcagcgctagctccgtccgctccaggaggaaggccatcaacaccctttcttccgtgctctcggctcgctcaaaggctgcctgtggaatcgctggtaagcctagacaagtggtcgatgacatcgacaagctggacgtcaacaatgagctcgcggtggtggaatacattgaggacatctacacgttctacaagattgctcagcacgagagacggccatgtgactacatcgacgcccaactcgagatcaactctaagatgagggctatcctggctgattggataatcgaagtacaccacaagtttgaactgatgcccgaaactctctacctgaccatgtacatcatcgatcagtacctctcgctgcaaccagtcctgcgtaaggagctgcagcttgtcggcgtttcatctatgctgatcgcctgcaagtacgaggagatttgggccccagaggtgaacgacttcatcctcatatcagacagtgcatacagtagagaacagattctttcgatggagaagggaattctgaataggctggagtggaacctgactgtccctacagtgtatatgttccttgtccgttttctgaaggccgcaacattgggcggcaaagttgagaaagagatggagaatatggtgttcttcttcgctgaattggcgctgatgcaatacgatttggtgacgcgcctgccatcgctggtcgctgcttctgctgtctacgcagccagactcactctcaagagggctcccctttggaccgacaccctcaagcaccacacgggcttcagggagtcagaggcagagctcattgaatgcacgaagatgctggtgatcgcgcactcgactgcccctgagagcaagctgagggttgtatacaagaagtattccagcgagcagttcggaggggtcgcgctgcgtccacccgcagaggagatctgcaagtga

SEQ ID NO: 22205 - DNA, 1359 bp, Zea mays
  Peptide Sequence Number=SeqID_63984
atggccaaatgggtcgtccggttcggcccaggcccggtgaagctcggcccgctaggcacggttagaaaatcgggccagcccgggggcgcggcggtcaccttcgtcgtcaccgaggagtggctcggactcatccgctcctcctccgccgccgccgctgccgagccggccggcatccgcatccgcaccatccccaacgtcatcccttccgagcacggccgcgccgccaaccactcaggcttcctcgacgccgtcgccacagagatggaggcgcccttcgaccgccttcttgacgggctcgaaggcccgccgcccgcggcgctcgtggccgacgcctacgttccctgggtggtcggcgtcggcaaccggagggggcgtccccgtctggtcgctcttccccataccatcgataagaaagcttgcaacatcgacatttctcacctgtttattttacgatatgcaggaaactctgatcagagacttgggcactatatcgctgggcaggcttcaagttcaatacggttgtcagatctcgagcccttaattcacaacaagagaacagtgaagcatatcctaacaactatctctagcatcagaaatgctcagtctctccttttcaccaccatgtatgagcttgaggccagtgtcattgactcgctaaggtcagtactctcttgtccagtgtacccaataggcccctgcgttccatacatgatgcttgaagaccataccgtgtccagtggcaaagttgccaggcaaggagattatttcacatggttggattctcaacctgtgaactcagttttgtatgtctcccttggcagttttgtttcagtctcagcctctcaacttgaagagatcgcattgggcctaatagccagtgaggtcaggttcttgtggattcttcgagaacaatcccctcgggtgcaagaactcttctctggcatcaataatgggatgatactgccatggtgtgagcagcttgaggtgttgtgccatcattcagttgggggcttcatgacccattgcgggatgaactcgacacttgaaggcgtcttcgctggtgtgcctatgcttgccttaccactgttttttgatcaaccgattgatgggcgattaattgtggaagagtggaagattggccttgccgttagggattgggctagcaagggtggtctgatcgggagagaggatattgcacgggctgtgaagaagctgatgtcttctgatgaaactgggacaaaggcgctgagggaacgtgctcttgagttgaaggaggcttctcgcagagcagtcaatgagggtggatcttcatactgcaatctgagttcattgatggagacggtatgcactccaaaataa

SEQ ID NO: 22206 - DNA, 498 bp, Zea mays
  Peptide Sequence Number=SeqID_63985
atgaggagtccagggctgggaagacactcgcattctctcacccttctcggactgacgtctggtgcggatgcccaggtcttcatcgtgtccttctccgacaacgaagagctaagtccagcctcgggcgccataggaagctccgcctcgcccgaccccagggctcgggctcaacctcgacgctggacgacggaccccgcctcgcccgaccctagggctcggacacagcctcggcctcggaagacggtctccgcctcgcccgacccagggctcggactcaacctcgaccttggaagacggactccgcctcgcccgacccagggctcggactcaacctcgaccacggaagacggactccgcctcgcccgaccccaggggtcggactcagcctcgatctcggaagacggactcgacctcgacctcggaggagcctccgcctcgcccgacctagggctcgaaccgaccacgtcacagggggggccatcattaccctacccctag

SEQ ID NO: 22207 - DNA, 969 bp, Zea mays
  Peptide Sequence Number=SeqID_63986
atggcgtcgacctccatccagcgcgagcaggcgagggagcaagcgttgcgcgcaaacgaggaggaactaccactgccgctgtcctccgcagcgatctgcatcggcgcggtcagccgcagtggtggacccatcggcgagagtgacttgctgcggcacggcggaaaggagaggctggatttggaatgcgaggagagagagtggcccatgctatggaaccccagggcgggcggaggaagaagtggccatcctggacgcgcgcgaggtgaaggaggccttggcgatgctcaagtcggcggtgttgtggcgcaagcgcttcggcatcgacgagctcctgggcgtcgacctcggcctgccggagctggagaaggtggtgttctaccgcggcaccgaccgcgagggccaccccgtctactacaacgtgtacggcgagttccaggaaaggagctctacgagaaggccttcggcaatgaggggaagcgggagcgcttcctcaggtggcgcatccagctcctggagcgcagcatctgggagcagctcgacttctcgcccagcggcatatgctccatggtgcagatcaccgacctcaagtactcgccgcccatgctcggcaaggaccacggcgtcacgcaccaggctctcgcgctgctccaggacaactacctcgagttcgtggccaagaaggtgttcatcaatgtgccgtggtggtacctcgcaacaaacaaggtgatgagcctgttcctgacccagcgcaccaagagcaagatcatcttctacagccccgacagatacgtcgcgccagagcaagtccccgtccggttcggcggcctgtacaaagaggacgacaccgagttctctgcctctaacgccgtcaccgagctcaccgtgaaaccatcctccaaagaaaccgtcgaggtccccgccaccgagggctccacggtggtgtggccatgtgggagctccgcgtgctag

SEQ ID NO: 22208 - DNA, 459 bp, Zea mays
  Peptide Sequence Number=SeqID_63987
atgccgggtctggtcgcctactcgggcctcggtctaggcctcctggccctcgccgcgcttgagtctctgcccctccgcgtcccgccgctctggtcccagcacgcggtggcacaaacccgtgttcccctgcgcggggcggccacggcgagcggccccggcgcgggcccgccaaggaccgagcccgacgcgcccagggcgctctctcgtcggtgctctcctctctcactcctcttctctctccctgccttcccttgctcccgcgcacagccgccagggaccaagcccgacgcgcctagggcgcagccacgccaggacgccgccccttccctgcagcctggcgtcgtggccgcccctcccctctgcccaccaccgcctgctccctctccgctgcgtcctccgccggcaccctcgcacgtgacgcctctcatcgcgcggcctcctcctaactgctcgcgttga

SEQ ID NO: 22209 - DNA, 138 bp, Zea mays
  Peptide Sequence Number=SeqID_63988
atgtccgaagacaaggccaaaggtgcaaagaccaaagtaaagggattgcttactgccaaggccataagggaagttgcatacccagaatggtttggccaacacagttatggtcaagaaatccaatggcaagaggaggat

SEQ ID NO: 22210 - DNA, 495 bp, Zea mays
  Peptide Sequence Number=SeqID_63989
atggcgtggctgccccgccccaccgtcgacttgccggctgacatcgacgctttggcctgctccaccctgcctctaccgtccacgagccaccctctcagtgctcgcccggctcgccccaccacactgtcggtgtccaccccgcccacggccgtcatcaaccaccaccacgattcgacgagacttacagagcaggcacaacaacaaccattcatttttttctctcaatttcagtcgtcgatgcctcggtggggattacatgctccgacacatcctccagttcagggatcggaggttatgggccataacacgccaccactggtaataccagcactaggaggagcttctcgaggggagggagctactgtagaggagactccaaaccagatagatgactttgccaacaacttcttcgcttctagagctccgaaattgcttatttttggcggcctgggccatgccaccaaaaatagatattatttttggtacccagagtaa

SEQ ID NO: 22211 - DNA, 264 bp, Zea mays
  Peptide Sequence Number=SeqID_63990
atgaccaagctctccacagttgtagcaatccatctcagaaatgggctttcttttgctggaaaagaatttcttctttctttaatcaaatttgatgccttctctgttgagtttctaaaacatcttggtggtcttcctcaccatcaaggcaatgttagcatcaagtcgggactagttgtgccagagggtgctgctgacgaaggtgcacctgctgacgaagccgagcaggcagatattgaagaaggtgatggggtgaagaagagatag

SEQ ID NO: 22212 - DNA, 216 bp, Zea mays
  Peptide Sequence Number=SeqID_63991
atgcggtctgctgctggtgaccgcgcgactgtgcctagccggcccatgcggagacgttatatgcacactcgggacatagtttacgagcataatgcctatcgtctgttcctagtgaaggatggacgggagaagtcagagattgaagaaatagaagatatgaagaagactcaatccaactttattggagtgccaaaacatctcaagtttgacttctaa

SEQ ID NO: 22213 - DNA, 619 bp, Zea mays
  Peptide Sequence Number=SeqID_63992
gcacagtgctgttaactgtgtgagcttcggacttctcccggaagtcgcactgctgttgagcgtgctggtgtccttctggctgctggcttcagcccctggccctaatgacttcttcggcagcatgacgaaggtcaaagcttgccgaaggtggtcgagtgagttcaccggaggcacaggacgcagcctgggcaaaattacatttatgtccctgacatttactgatagccaaaaggaaggtcgcgccacatcactagggtctatgggccaagctagacaacatcccatggttgctataaaacaaactgagaagcagggcgccaaatcctgggtggccgattgttgttttggtggaagtggaacagcaacaggtgctagcctgaaacggaagaagcaaacaagagctagcttggaaaaaaaaattacagttacatctaccacatccttgcctatgccgagtgatagtgtaatgcctactcgcaagagcaagaggaatgctagctcaaggctccatagggcagcaaagctcaaggctcgcctgcacaacaaggtgatcgtggtaacagttcctccgaccgaccacaatgcgaaatatgggcacatggcaaaaaggtgttggtag

SEQ ID NO: 22214 - DNA, 1383 bp, Zea mays
  Peptide Sequence Number=SeqID_63993
atgaagcggcaacgtgttggtggagttggtgatgacgaagtgcatctggaggaggaggaggaggaggtggagacggagattctcccactgcaccaccaccacgccgccgccgccgccgttgagaccgtcggtggccaacccgttgtcagcattctgggcctcggcgacgtggaatcggtgctgtaccacgaggaccactacgtagacgtcacgcacctcgccgtgctgcgtctccgcctcaacgacgccggcgagatggtgcgccgtttggttgcgatcaacgccagacgaccggtgcggatcagcaacgcgtcctctctcctccaggcgagcgctctccgttctggcctcctccaactctccgcggagctctcggacctgcaccaagcgcttcgcaacgactgtatcgtctgggagctggtcgaccacgtccggtccatgccaggccttggcctccccgtcgacctccaaccagggatccttcgcgatggcgttgaacatctcgtagtcgccattcgtaccacgctcgcggcgttcccagcggagccagctggccgccacagtgggcccaacaccactccggctacctcgcatgccgcagaggtatacacaaacctggccgagcgtatgagagcgcatctggacgccatggacgagctcctcacgagttcagtcgactaccccagcgtgccgctcgcatcgtttgtttcactggacgtggagcagtcgcaggagacggagacggagacggtgtacaaacgcatcaggggcctggatcacctccggctgctgttgacattgccgaaccagggactgctaactgagttctgtatatcacagctccacctcggtgatgccgatgacatgctacatgcgatcgaagctgcaatgcagcatcctttctattactgctttgctaatttcgatcgcgttgcaagtgcctgcgagatgaagaagatggtgctcaatatatcccacgcgctacagaacataggcagtggcctgatcgatcgccagaggcttggcgtgctcgaggacgtcgagaggaagtttacgcaggcagctctccgccacaccggggccttccgtgaggccgccttgggactcagtgccggtctattggagctgcttcaggaagttgatgatctgttggatgctcctgctgatatggctgcgattgtacaacgtgttgctgatgatcctgtacaagttcgtcgtatgccagatgcacaccaggctcctgttcataatcctgcaggccttgttgccctcactcctctcttggagcagctgctacaacgggttacctccatctggagcgttagtattgagtatgcagatgagagcttacctgacatcctcctggcaaagaccgtcctatga

SEQ ID NO: 22215 - DNA, 423 bp, Zea mays
  Peptide Sequence Number=SeqID_63994
atgtcatggcgaagtctgtccacgatgaggagcgggtccgctgcgacccgcgactttgtcgaggaatccccggcgcgacgcatgctaaccgagcccggcgaggccgcgagcatcatcccggggacgagctggagttcccagacccgactccggaaccccgccgatggtgtacgcacttgtccactgcggcagcattcagcgcgagtccttggaaggcgacggcgctcttactctctctccagcgaggatctctgctccccaaggtatctgcggcggcttctagttggcgcggacggaggtgggggtatcgggacccgattccagagcgaggcacaggccgcggtcaagcttggttcggctggcggcggtgatgagaattcatggcgtaagctcgtgcgggcgacagacaagcttaggttctag

SEQ ID NO: 22216 - DNA, 1746 bp, Zea mays
  Peptide Sequence Number=SeqID_63995
atgtcagcgccgcggcagccgctgtgcaagctcgccaccgccgtccaccacctcctcctctgctcgctggcggcgctttcggtctccgcggatgccaaggtgcaccaccacacctgggacatcgcgtaccactacaagtctctcgactgcgtcaacaagctggcggtgaccatcaacggcgagtccccggggccgaccatccgcgccacgcagggcgacaccgtggtggtcaccgtgcgcaacagtctggagacagagaacaccggcattcactggcacggcatccgccaggtcggctcgccgtgggccgacggcaccgtcggcgtcacgcagtgtcccatcctccccggcgacaccttcacctacaggttcgtcgtcgaccgaccgggcacctacttctaccacgcccactatgggatgcagcgcgtggccgggctcgacggcatgctcgtcgtgtcggtgcccgacggcgtcgcggagcccttcgcctacgacgaggaccgcaccgtgcttctcatggactggtggcacaagagcgtgtacgagcaggccgtcgggctcgcgtccgacccgctcgtcttcgtcggcgagccacagtccctgctcatcaacggccggggggtgttcgagccgttccactgctcgcgtgctcccagcgccagcggctgcagcagcgccccccgccctgcagcaggctgcgctccgccggcgctcttcaccgccgtcccggggaagacgtaccgcctccgcgtcggcagcctcacgtcgctgtcggcgctcaacttcgcgattgagggccactccatgacggtggtggaggccgacggccactacgtgaggcccgtcgtcgtggacagcctctacatctactccggcgagtcctactccgtgctgctcacggccgaccaggacccgtcccggaactactgggccgcgtcccacgtcgtggcccgggagcgcaacacgacgagcgccatggccatcctcagctacgccggcaacgacccgcgggcgccgccgcccacgccgcggccggagggacccgcatgggacgacgcgaggccccggctggagcagagcaggtccctcgccgtcgcgcacccggaccacgtggtgcctgtgccgcccaggcccgaccgcgcgctcctcctcctcaacacgcagaaccggatcgggggtcacatcaggtgggccatcaacggcgtctccctcgcgttcccggcgacgccgtacctcgtgtccatcaagagaggcctgcggggcgcgtacgacgaccagcgtcccccgccggacacgtacgactacaggagctacgacatcgcgtcgccgccgacggcgaacgggacggtggccagcaaggtgtaccgcctggcgctggggtccgtggtggacgtggtgctgcagaacacggtggcgctgaacaacaagagcgagacgcacccgtggcacctccacggccacgacttctgggtgctggcctacggcgacgacggcaagaagttcgacccggagagggacacgaacaagttcaacctgagagaccccgtcatgaagaacacggtggcgctgcacccgcgggggtggacggcggtgaggttcgtggcggacaaccccggggtgtggctgttccactgccacatcgaggcgcacgtgtacatgggcatggggttggtgttcgaggagggtgttgacaaggtcggccgtctgcccaagtccatcatgggctgcggacgatccaggacctag

SEQ ID NO: 22217 - DNA, 423 bp, Zea mays
  Peptide Sequence Number=SeqID_63996
atgtcgtggcgaagtctgtccacgatgaggagcgggtccgcggcgacccgcgactttgtcaaggaatccccggcgcgacgcatgctaaccgagcccggcgaggccgcgagcatcatcccggggacgagctggagttcccagacccgactccggaaccccgccgatggtgtacgcacttgtccaccgcggcagcattcagcgcgagtccttggaaggcgacggcgctcttactctctctccagcgaggatctctgctccccaaggtatctgcggcggcttctagttggcgcggacggaggtgggggtatcgggacccgattccagagcgaggcacaggccgcggtcaagcttggttcggctagcggcggtgatgagaattcatggcgtaagctcgtgcgggcgacagacaagcttaggttctag

SEQ ID NO: 22218 - DNA, 537 bp, Zea mays
  Peptide Sequence Number=SeqID_63997
atggcggagaagctgacgccggagcaggtggacgagtgcaaggaaatcttcgacctgttcgacgccgacgaggacggcaagtcgccatcccatcgaactcctatccaccggccaccgcgcgcgcacctagctccgagcctcactcaactcatatgtcgcatcgccacgggtgagctcgtgacggcgctgcgctccctgggccagaacgtggacgaggcggaggcgcggcgcttcctggaggacgcgggcgtcgccgcgggcgccggcgacatcgacctcgcggcgttcctggccgtggcggcgcgcaagatgggcgccaggcagtcggaggcgcgcctcgccgagtgcttcgacgtgttcgacgacgcctgcagcgggtccatccccgcggagcagctgcggcaggtgatggtgagccacggcgaccggctcacggaggaggaggccgacgcgatgctccgcgaggccgacccgcgcggcgagggccgcgtcgagtacaaacactacgtcaaagtactgctcagggacaagaagtga

SEQ ID NO: 22219 - DNA, 369 bp, Zea mays
  Peptide Sequence Number=SeqID_63998
atggcgatccctgccgatgcggcagcccatccattccaccctaggttggtcaaggcctcgaagtttaaaaggcgaaaggaggtcaaggccaaccgtacgaagaaggcagtcgctgccgcagctattgacgaggtctccccgttaggctatgcgcagcgcatcccgccgcacgccctctccccttcgtttagcttttaccgcatccatcctatgtttttcgaggcagtaactatggtgcaaacacaaagtttagcacttttgctaaggcatcacctgtggcacagatgcagaagccagctagccactgatactgaaggatctgtgccaccaatgccaaccattgctgaagccaaaaccagctcaggctaa

SEQ ID NO: 22220 - DNA, 478 bp, Zea mays
  Peptide Sequence Number=SeqID_63999
atggaagaacatgtaacacccggacctgggttcccagcaagaagcagcacgtggagggacgactctttggactttatctcgagcagttccgtcgcaaagccgcagggaatcgccgcgagcagccagcagccaaattggaagaggatgggtggggatgaaaccattgatataggagaggggcagatccgggggcggttgggtcggggtgacccgcggcatgcacggaggtcgtcgggagtccggcggcacaagggttcgcacccccgacccggatggctcgggttcggggacggttccggggacggcacgcgcgggtttcggatcggtctccgggaacagcgcgcggagtcggcggggacggcggcttcggctcgcggggtcagcggggattcggcggatttcgacggatgttacgggaatagcgcgcggagtcggcgggattggcggcttccgtggagtcggcggattgtttgtgaag

SEQ ID NO: 22221 - DNA, 909 bp, Zea mays
  Peptide Sequence Number=SeqID_64000
atgggcattggagtcgttacgaggtcgaagaggaggagattggacgaggaacagcgcctcgccgacaggatcagcagcctccccgacgacgtcctcggtgaaatcgtgtccctccttcccaccagagccggcgcccgcacgcaggtgctctcctcccgctggcgccacatctggcgctccgctcctctcaacatggacctccatcccgacggccctgaatggcggcacatgcccgtcgagcagatcaggcgcgtgctctcggcgcacccgggccccggacgccgcctctcggtccccagcagattcggctacctccactggatggacggctggcttcggtccgcagccgccctagggcctagacaacctccaggtgctcgaactgaactcacacagccgtcgtcctcatcactggtcggccttgcccacgcggccgcttctgccgccatcggtgcaccgcttctcgtccaccctccgcgtcgcctgcttccgcggcttcgggtttccgaccagtgccaaggcccaaggccctcccctcagccagtccgcctgccgcgtctccagcagctgactctctcgggcgtcaccatctccgagggctccctgcatgccatgctcgctggcgcccctgccctgcggagcctgctcctgctcgacagcaacgggtttgcccgactgcagatagcgtcctgtagcatagaaaacatcggcgtgcgttcccggtgcagaggtgctaagctacaacacctcgttctggaggacacgccgtctctgaagagattgctactgttcgaaggaaccaatcacatggatatctcggtggtctccgcgccaagattggatgtttttgggaaactctgtgacgacgccaccaaacttaagtatagcagcgccacgacggatcttcag

SEQ ID NO: 22222 - DNA, 273 bp, Zea mays
  Peptide Sequence Number=SeqID_64001
atggcggctgcgcgtggagtcggcggatgttgtgaggtcggtggctgcgagaacggggatggcggccgcggggtcagcggatcggtggatcggcggatgctgcgggatcgtgacgacgactgggcggcggccgctgccgccgacctacgtgcgcaggtctccatcttccggaccttcgctggagacgagcacccaccaccagactggttcaaccatcagaaaattattcattgggctgaactaggagcaaatgcatgtgggccatatctatga

SEQ ID NO: 22223 - DNA, 429 bp, Zea mays
  Peptide Sequence Number=SeqID_64002
atggcggtcgcggcctcaggcgtagatgtggcggcgtgcggccctcggcctagaagcggcggcgcggggcacgacaccctggcggcccgggcgcgcggctcccccggcggcacgagcgcacaggccctggcggcgccggccccgacgcggttgcagcgcgggggtccagacccggcggcacctgcaccggcgcgtgggcgggcacggcagcccggcctcgtgcggctccgtccccgacgcaggcgcggcaccggcgtgtgtgggccccgcggtcccgtcgaggacgcagacttggcagccccatcggcggtgctggtagccccagcgtggggcgcgacgatcagccacgacacaggattcggcgccacggccaccagcgccttgacttccaactgccccggtgcatcaatcgagcacaagaaattttaa

SEQ ID NO: 22224 - DNA, 390 bp, Zea mays
  Peptide Sequence Number=SeqID_64003
atggaatcgctgacgcttcacgcttcgacggccgcctcgccgctgcagcgacgccggctgcttcccgggcggcagcgcgcgatgtacgtccgcgccacggcctccgccgctcctgataacgtggaggacaccctaacagtcatcacttcaacctcagtgtcattggatgctgaaaaagttatcaacgttactcctcgttatgcaaagcttcgggcagaaccaaatggggctgccatggggcgcatcattggctggcagaacattgaactcatcagtgacaagcctctggagaccatgttgaatgagttcaagcagttgaagaaagagtatcctgacaggatacttatcggttcaattatggaggagtacaacaaagctaatgcaagataa

SEQ ID NO: 22225 - DNA, 498 bp, Zea mays
  Peptide Sequence Number=SeqID_64004
atggccacgaaggccgcggaggcgccatctcccccgccgccgaccgcggaggcggaggctcctgcgacgcctgggaagcgcgtgccagcggaccgggccgacaaggggcgtgagggagtggagcggccggagccgaagcgtcggcgcgcccgcgcgcgcatcgcggtgctcgacagcgtgccccgagcgtcggaggtcgcggccgcggccgcggctgccgctgcggcgagcagggaggaggacgagtccgtgggcggctgcgacggagtggactcgtccttctcgttccacgcgcggaacttctccagtgcgcaaaccacgcccaagttcgggtccttcgaccccgccgccgcggagcttgtggccttccacctgatgaaggccactaggcgtcgcctggatgcttcggcgacggatgagccgggggatcacggaacggttgccggcggcggcggcgaggaagcggcggccgagggcagcgatgagaattcacgctag

SEQ ID NO: 22226 - DNA, 510 bp, Zea mays
  Peptide Sequence Number=SeqID_64005
atgggtcgccgtttcctcatggtgttcacggtcgcgctcatcgctcgcagcgcggaggcgtcgatctgcatctatgatcaggagcccttctgcgaggtggacaatgcctcctcctctctggccaatacttctctgccagtcgcctgctcccaaggggaggggcgctggaatacgggcccgcagatggcgtcggctgtgcaggcggccatgatcgacgaagcctcctcagatctgtgctcatcgccaccagggtacaataagccggcgaagtttcgtggtggaatcagcagggtgcccaccggccggcgaggccccggctgcccgaccggccagccagtcggagtcgggccgggtggtctccgtcgcaggagtggtgtgatacgtaatgctcgagtagagttgttgagacgtacctgggatgttgggggtaatttcttgagatttagaactaggaggaaactgaaagtcgccaacttgcctatgaagtttgagttcccaggttgcctatga

SEQ ID NO: 22227 - DNA, 267 bp, Zea mays
  Peptide Sequence Number=SeqID_64006
atgggagagtgccggacccctgtatatacggtccaaacctccaagtttggaccaggacccccacgtgtacagattggacccctagaatgggatccagatccccctgtgtggggttcgagctgcccacaacgaggccccaaggttccaggcgacgtgctcagtccacgatacgtgggccgcgcagttactcaccattactcccgcattactcatacggtaactgcccatcaatgcagcatggattacagacgtcatgactcccgctga

SEQ ID NO: 22228 - DNA, 342 bp, Zea mays
  Peptide Sequence Number=SeqID_64007
atgaactgcacagtaggtgttgtcaagaaccgtatagaaacaccaaaggacatccagattcatgttccacgatcagacatgggccgctgcttcaaggagctcctcagccgctgcattggatgtgacataacattcgaagtgcgagatgagaaagtcagggcacacaagtggattcttgctgctcgctccccagtatttaaagcccagttctttggtcctattggaaagcctgacctgcacacggttgttgtggaggatgtggaacctgttgtcttcaagaagcagaagttagatgctgttgtgagatatacgaggatgctgtttaataggaatgtgatatag

SEQ ID NO: 22229 - DNA, 363 bp, Zea mays
  Peptide Sequence Number=SeqID_64008
atgtccgcctccccggcgtccaaaaggacggccttcgccaccataaccaggatggaacaccggttgggatccaccacgtccaaataccaagaagactggcagcttctgtttgcagccggaatcaagactgttctgcttgtaccagtggttcctcacgggattcttcagctagggtctttagacatgatattgtgcgaggactacgaggtctttcttgtgttgaagggcctcaaggtgagcatactgaaaggagtgctggagcatcatcgttctgacaagctttgggctcgctttgtcatcgagggttcggatggtttcaaccagacgcagattctgtacatggctttgagtttgtatcgttaa

SEQ ID NO: 22230 - DNA, 432 bp, Zea mays
  Peptide Sequence Number=SeqID_64009
atggtgcagccaaaagagaatggggaaataaaaaggagccacattgaggactaccactgttgtcggatgtgggccacgtgcggagaggaggagaaggtgagggcgcggtcgaacgaggtggggaaatggggaggagccagatcaggggtggagcgatgtgccaccattgattggatttgggcgaaatgtagggctgatacggtgacgaggagggtggagcgacgggccaccgctagtcaaaatgcggagaggaaaagacatgggagtgggaggatgtgtgaaccgagcggtgttggtgtgctcggagagggaggacataatacagagcagaaggagagcgagcagacagatgcaggactagcggtgctagtggtgtcgctgctaatggacctcgaaagggagtacatgtcaactactccctctttaaagtag

SEQ ID NO: 22231 - DNA, 384 bp, Zea mays
  Peptide Sequence Number=SeqID_64010
atggccacagcaggcagtcgttgggcagtggtcatgtcccggaattctggcttttcggcgcaggttgtggagcttgacttcttgtatccaagtgagggtatccatcgacgatgggataatggatttcgcatcacggctactgcagctacatgggatcaggcagcgtttatcttgagcatccccaaaaggaaacctgctgatgaaacacaggagactctaagaacgtctgctttccccagccagcatgtgaagatcgaacatccatttgcacttgctaatgatatgtttacaggacaaatgggggaaaaatctctacttagcttccatttgctatggaagaacggtgtcatgaggtctgcccagtttggctggggcacactgtag

SEQ ID NO: 22232 - DNA, 714 bp, Zea mays
  Peptide Sequence Number=SeqID_64011
atggagcctggcgtggcgcgtcgtgtgtggcacgtggtgctggccgtgtgccacatgctgcggcggggcctctccccgaagcgcatcatgatggacgtccacctcctcctcggccgtggcaagctggccgggaggacgctgcgcggccacctcgcgcacccgtcgagccaccaccgccacggccacggccacggccacctcaccacctacggcggcggcgcgtcccgcgcgtcgtcgtcgtcgtcgtcatccacgctggcctcgttctacggccacccgcgggaggtggagttcagctgcaccaccacgccgtcctacccgcagcagcactacgggctgttccccttcaagggcctccgcggccggggcggggcgcgatgcggcggcgagtacggcgggctcgacgcggccgccgtggcgcgcgcgttcgagatgctgagcgccgaggtggacaccgggggcggcggcacgcccgccgtcgcggcgacgaccgccaccccgtcgcccatgctggcctggatcctgggccgcagccccgccggggtccgcccgctgcgcgtcaccgactcgccgttcccggccgtgcccgaggacgggtgctgcaacgaccgcgtggacgccgacgccgacgacttcatccgcaagttctacgagcagctcaggctgcagcctaccgccgccacgccggacgcctacctgcgccgccgcggttag

SEQ ID NO: 22233 - DNA, 678 bp, Zea mays
  Peptide Sequence Number=SeqID_64012
atgttggacaagtgggagccgtcgtcgttgcaaatgctagagtacagccccaacgacaaggacatgtgggagccggatctgaggggtggcagcggcgggggtgagagacgagcgcgcgccgcaacaggtgctgtggaacgtgacgtagaggaagaggactccgactcgccgtcgtcggagatgtcagtggatgagcccaacagcggggttctcggtttcttgatttgcagcacccagtttcttggggatcaccaggtgcggccacacgcggccaacagtggcgctgggtcaccacgagcaggtggtccacgaccatggttatcgatgacggcgcagggtaactgtgagcagcagctggccagccacacagtgcccacaacttgcaagatgttgaacgcgtcaacaatgtttagaagactccatgacaaatctattgagaagacagaaaaaggctatctagaaatattagtggaaggtgctcagaattgtattaagaaaggagaaaaatatagctacaaaaccagttgtttggagggaaataaatatgtggaatacaactacatgaactctcaagggaacctagcccgcgcccactcgagtcgatcaactgagctgtgtagcttgggttggggtacacttgttttgcactttgttagctgtgggtaccctttgagctga

SEQ ID NO: 22234 - DNA, 582 bp, Zea mays
  Peptide Sequence Number=SeqID_64013
atggcaggccgaaatcgacagtgccgcgcacccggtgtggccacggtggctgcacataacctgatcagcggcggtgcctgcgccccttggcccggcggtggcgcggcctgctccaaatccaagcgctcatcggtggcggcggatggaaccatcggccatcgtcgccgcggtggctggcagcggctacctcgcacctgcgtggaaggcttgcggaggcagggcacgcacgcggcatgcccgaccggccgtccagacctcgctcgccaggccagggcggtgcccggtctaccgaccagcgcggcggcggttgctcctgtgcggcaggccctagcgcggcagaccgccgaccgcccgctagccacaaggtcagcagtgctcgcgcggcaggccaacagcggcgcccgcccgctagccacgaggctgcctggcagtgctcgcgcgaatgccgacgcccgacggagaggctcccgcggcaagcaggggcaaacgcaccctatgccagcaaccgtgcgcgaacaggctgcctcctcctccctgccgctgccatcggcccatggcggtggaccggtggtcctcctttag

SEQ ID NO: 22235 - DNA, 693 bp, Zea mays
  Peptide Sequence Number=SeqID_64014
atgaggctcggctcggctcgatataggctcgtgagccggctcggctcggctcgcgagcctctgtgctggttctggactgcttttggcagtttggttcatgcagccctagcgacaaccgatgtctccctaaacctggtgcccaggtatctctgccggcgacgagcacctgctaggggtatgggaatggaggtcgttggtgctgaaacagcaccagcagaggtcaaaataactaccaatgtcaccgatctggcacctccaaaggatgtgaaggatgggtggcctgaatctaagcagacttatgccttctatttcatcaaggtccgttcatttgaggatcttaaactgagggcaaaactcgagcagtctaacaaagaattccaaaagaagatccaagctcgttctaaacttatcgagacagtaatagccaatgagatgggacgccggtctggttccctacggcccgagtcagctcggggtagggcgatgatggcgcctcctgttgacgtggctggcctgcgccctaggttgggcgatgcggaggctcctccggagccgaggtcgagtctgtcttccgtggccgaggccgagtccgagcccctgggtcgggcgaggcggaggtcgtcggctgaggccagggcggagtccgagccctggggtcgggcgaagcggagtccgtcgtcttctgggacttag

SEQ ID NO: 22236 - DNA, 393 bp, Zea mays
  Peptide Sequence Number=SeqID_64015
atgggacaattccggcggcgatcgggcgacgacgcggcgcggcgacgcaagaaggcgcactccgagccggtccacttcaccgaggaccacgaggccaaggacgacggggcccgcatagtggaggcaacagcggcgttcaactgcaagcgagagtttccgtctgctccatctagccgtcctagctgttggccggttgatccgttaccccccccccactccgtaaaaggagtttccgcagcaacatggggaatggttgttgtaagggctcggactcgggctcagccccggaagacggcgaactccgctccgcccgacctagggctcggactcgggctaagtcccggaagacggcgaactccgctccgcccgacccagggctcggactcgggctaa

SEQ ID NO: 22237 - DNA, 239 bp, Zea mays
  Peptide Sequence Number=SeqID_64016
acacggagtcgcgggcagcgtcgtgtcatgcgacggtgttcttcgacgtaggtgaggcgctctcgcacctcaggtccaccctgtccccatgccggctcggccgcctccttgtccgacagttcggccgactgcccaaaggtggttatgagactgttgaatctggttatgattatggtgctggcgaagatgaagctgtggaaggagacttccaggagttccaagattacgacgagttctag

SEQ ID NO: 22238 - DNA, 168 bp, Zea mays
  Peptide Sequence Number=SeqID_64017
atggcggccgccgatgccgctcgtgccggcggggtggcgacagccggcaaggtggagctagggcggccgaacggcgcggcgggcggcgaggtggagctagggagaccgacggcgacgacattacacaaccttttcaagtcaacatataccgagtgttgtcctcggtaa

SEQ ID NO: 22239 - DNA, 1599 bp, Zea mays
  Peptide Sequence Number=SeqID_64018
atgaggagtggtccctgcgggctcgccacggacgcacaagggctgttcaacggaatgcctccaccgaaactgccaagccacgcgctgtttggccatgcctgccaggtgctcggccgaacacacgtttcacagttttgtaccgtggctcggcagtccacggatgagcgcgctagtgcagagccactgcgattcacagtcacaccgggtgacgcctttggggatggcccgcctgtgggcatgtcagaggctgctaagatggtgtgtcgtattgtatccacgcagccagaaccaaagatcgcgtcgacacttgatgcgcttggggtggccgtgtccccagagctggtagctgaagtgctcaagaacttgagcaatgctgggatgttagcacttgccttcttccgctgggcagagaggcaggagggcttcagttacacggctgagggcttccacaacctgattgaggcgctgggaaagatcaagcagttcaggctggtgtggagcttggtggagaccatgcggtgccggggcttgctatctaaggacacattcaagctcatagtccgaaggtacgctcgggctagaaaggtcaaagaggctgttgagacattcgagaagatgagcatttttgggcttaaaactgagttatcagattacaactggctgattgacacgctaagcaaatccaaacaagtgaagaaggcgcaagccatctataaggagatgaagaggaagggtaagtttgtacctgatttgaaaacctacactgtcctcatggaaggttggggccatgagaaagatctgttgatggtgaaaacaatgtaccaagaaatgattgatgctggcatcaggcctgatgttgttgcctacgggatgctgattagcgccttctgcaagtctggcaaatgtgatgaggccatcaaggtgttctacgagatggaagcaagtggttgcatgccaagtcctcatgtctactgcatgcttatcaatggccttggctcggaggagaggcttgatgaagctttgaagtactttgagcattacaagaaaagtgggttccccatggaggtgcctacttgcaatgcggtagttggagcttactgcagagcctcgaagtttcagcatgctttcaagatggttgatgagatgaggaagtgtaaagttggcccaaattcccgtacttatgatgtgattcttcattatctgataaaatcacagaaatttgaggaggcttataatatattccagaggatgggaatcgacggctgtgagcctcagctcaatacatatacaatgatggttggcatgttctgtagtaacggacgagttgatatggcattaaaggtgtggaagcaaatgggggagaaaggtgtcctcccatgtatgcatatgttttcggcattgatcaatgggttatgcttcgagaaccggctcgaagaggcttgtgtatattttcaggagatgctggacaaaggaattaggccacctggtcagcttttcagtaatttgaaggaagctcttgttcaaggtgggagaataagtttggcacaagaggtggctttgaagttggacgcgataaggaaaacaccttttcgtggttaa

SEQ ID NO: 22240 - DNA, 240 bp, Zea mays
  Peptide Sequence Number=SeqID_64019
atggcgccgtcgtcggttgcggtgcccagaacaacccgagagtcgtcggcattggtgatgaccatgaggcacctactgattgcatttggtggacttgctggtttggaagaaagcattgaagaagatacaaacttgaagggtaaacgtgcagatgatgtattcacatcttatttcaatacatgccccaaccaagggagcagaacaataagaacagaggtatccgcctactataagttttaa

SEQ ID NO: 22241 - DNA, 402 bp, Zea mays
  Peptide Sequence Number=SeqID_64020
atggtgatgttgctatattgggcctctgaaagtagcccagacggcctgccaggcgagccaggcagcggccagaaggtctgcacgccggcccaggcggcccaccagggagccagacgtccatatcaaattggagcggctagggtttccaaccctaaccgcccctgtatccgccgccaggaggattcctggccaccccgtcgtcgcccagggagccagtcgccgtcgcccagggagccgaagctctcagccgctaggtcttggccggctagagcctccgcacacgaggccgaccaggagctccagccgccgccattgctcgtcgagctaggccgaggaggccacgccgagcgcgccacggagggcctcgccgagcgcctcgtgccacgcgcgcccacgccgtga

SEQ ID NO: 22242 - DNA, 861 bp, Zea mays
  Peptide Sequence Number=SeqID_64021
atgcagacggcatgcaaccgcaccaagtgggcgcacccttttgactccaacgcgcccagcatgggggcccaggcccacacatcatggaccgggaaaggggatgccccgaaagggatccttctccgcgaaggaaacgggccccgagcccccctactgatcagaggttcgaaggttggcccctcggaggggttcaaccgccgcctcagagcactcgggctccgcgcccactactggtcagaggctggcccccaaagggttcacagccgcctcagacgcagagcgagggatgacccggggtacgttcgatacataaccaaggctcgggctacgctcccgagctcactggaagacaccatgttcggcgccctccaagggcaacatggcgcttttcccccctcctccttgcagaaaggcgacacaggggccgccgcccgtgtcgctccgactgttgtgccactcgacagagtgaggctgacagcggccaagtccggcctcgggcgccataggaagcttcgcctcgcccgacctagggctcggactcgggcttggccccggaagacgacgaactccgcctcgcctgacccagggtcgagctcgggctcgaccccgggaagacgacgaactccgccttgcccgacccagggctcggactcgggctcggccccggaagatgacgaactccgactcgcccgacctagggctcggactcggcctcggcctcagtcgacgatctccgtctcgcccgacccaagggatcggactcaacctcgacctcgaaagacagactcgacctcgacctcggaggagcctccgctcgtaccgaccacgtcacaggaggggccatcattaccctacccttag

SEQ ID NO: 22243 - DNA, 216 bp, Zea mays
  Peptide Sequence Number=SeqID_64022
atggcggcccatggcaaaggagcaggtcggctgttgcgcatggtctctttctttgtcgaagttgcagatgcggcgtcccctccatctcaactccgtcggctaccgctcttcttgctctgtgccggaagcctccttctaggtaaaatcagcctgttctcgttggttcgatttgcccactactggtgtcctgatgggatgggggtggatcgcttttaa

SEQ ID NO: 22244 - DNA, 153 bp, Zea mays
  Peptide Sequence Number=SeqID_64023
atggttaaaaattttggcaggaaaacagtgcaaatagcaatgaatgctgtggtaacttcacacctactcgtctatttatatagtgctgcagagatagaggagtttgcactcgtcatcatcgacatcaagggaaggatcaacaggcccttatga

SEQ ID NO: 22245 - DNA, 231 bp, Zea mays
  Peptide Sequence Number=SeqID_64024
atgcctcatgctaagaagcagaagttcagtacttcagtgcatccgtgtgttcattatatgctcaccaatcaattttatgagctctatgaggctcttggccttgagcctataagctgcaaccatttctttttcattacaatgccacttgttttcacattacaaggtgaaactgtgatgcaagttgatgctgccactaacccctacccttggcgtgtactacgtctgtattag

SEQ ID NO: 22246 - DNA, 243 bp, Zea mays
  Peptide Sequence Number=SeqID_64025
atgttcaacgttggcatcggcgtcaaggagtgtgtcgtgaccagcggtgtcggtagcagggttgtggcactcaggtttcatgggtgcagccggttcggcgcctactgctcgcaggagccggcgaggtgcctgctggactcgacgaaagtggagtttagttatgacgctgacaccggcctcgtgtccgtcgccctgcctatgctggagcaggagctgtatcagtggacgctggagattttgtag

SEQ ID NO: 22247 - DNA, 753 bp, Zea mays
  Peptide Sequence Number=SeqID_64026
atggcggacaacggtggacggctggagcgggcggcgctgcaggagagggaggcggttggcggcgctaggaggagctggagaggagggaggcggggggcggctagcaggagctggagaagaggcgggaggcagcgctaccaggagctggagaggagggaggcgggcagcgggcagcgcagcacagcatgtcttttattttgtattttgatcttccaagttatatttgctatcaacaagtctatgacttcaatttcaggggatgcaaacatcatacaaattggatctgggaccaatatacaagacaattctcttatacatgtggctaaatctaatctaagtgggaaggtctttccaacaaccattggtaataacgtcacagtaggtcatagtgctgtgttacaaggatgcacggttgaggatgaggcttttgttggcattggggcaaccctattagatggtgttgttgttgaaaagcacggaatggtggctgctggagccctcgtatggggagggaaccctgccaaatttctgaggaagctcacagatgacgagatcagtttcattgcggaatcagctgccaactattccaatctgtccaaggtccatgctgctgagaatgccaaacctcttgaaaagatcgagtttgagaaggtgttgggcaagaagtttgctcaccaggatgagtatgattcctcgattggcgtcgctgaaggggcaccaccagagctcacgtccccaaatccagcccaatga

SEQ ID NO: 22248 - DNA, 273 bp, Zea mays
  Peptide Sequence Number=SeqID_64027
atgcccacgttttgggcccaacaagcagatgcggcccaacatcagaagcgtgcacgccgctctcacacccactcgacgactgacaagtccgagccatgggcagacaccgcaccatcactcacgggcacgctctgtggccgacatctggggcagttcgtcagcgtcgtcttccccaccacgtcgtgcctgtatgcaaacataattgcatcagccaccgcgaaatctggctggaccgttgcaactgccttcgcccaggttaggatcgaagcttaa

SEQ ID NO: 22249 - DNA, 303 bp, Zea mays
  Peptide Sequence Number=SeqID_64028
atgggaatcacaaggtcttgtactgtaattattgagttatctcacatttttgtattccatggccagattgaacaacatgaatctctagagaacatctttagctctattcttgaaactactgctcaggcttatggtgaagatgacaacattcaaccttcttcgggatgtacggatgctggccagctctgtcatcacccagtccaggagctcgacaccgagcgggcctccgcggagacggcagccagatccggctcgaccctcttcgccttattcgagctcctcgcgctcccgaccttctccaag

SEQ ID NO: 22250 - DNA, 285 bp, Zea mays
  Peptide Sequence Number=SeqID_64029
atgggtgagattttgggtttagttcaggttgatcagtcaactgtagccatcaaagaaaattttggcaaattcagcgaggtcctggagcctggttgccacttcctgccctggtgcatagggcagcagattgctggttacctctccttgcgtgtgcgccagctggatgtccgctgtgaaacaaagacaaaggacaatgtctttgtcactgttgttgcatctgtcccatttcgccctcttgctgataaggcatctgacgccttctacaagctaaacgaatcaagctga

SEQ ID NO: 22251 - DNA, 420 bp, Zea mays
  Peptide Sequence Number=SeqID_64030
atgggcaggctaggggagggaatcacgacgttgtccctctctcacggcgggggcggggtgggagcggtgggcgggggctggcaacgcgagggtggcggcggcggggcttgctcctccttcttccaggcggcgacggggcttgcgcttggcggggtcggatggccaacgctatacggtgggcacgacaggcagcggatggggcgggtatgggaggatgaggccggtggaggtggccgtgaggaggtgccggatggtggccgccaccgcggtggtagaggtggtggtggcgcggcagaagaggtacgcaaggaaggcggctgccatggtggtggtggtcgtcggtggtggagaggtgtggagaggagatcggagcaccacggtgtcgaagaagttttgaattatgtcaaaatttacatgtag

SEQ ID NO: 22252 - DNA, 180 bp, Zea mays
  Peptide Sequence Number=SeqID_64031
atggccgaagctctggcggcaatggcgggcggaattgagctcgccggagctaagggaaagtggttggccggtgaggagaacgcagatgatctttgggaagaggtctgcaattcagaaattcagaaatctgaattcctccaagggttcatagatcaagggctgatttggggatttatttga

SEQ ID NO: 22253 - DNA, 501 bp, Zea mays
  Peptide Sequence Number=SeqID_64032
atgaaaccggaacagcgtgggaacgacgctgtggggtcgggcccacatgccagagggggaggggatgacgatgttggatgggctgaaccggtcgaggccgaggggaaacccaccaccagcgagttcaacaactgggagaagaggaagacggcggcgtcggccccaattgagctcgagagatggaggagagtggttggtggccagtgcaggttggagaggggctccgggggctggaaggcgggccaagctctcagcgagaggggaagcgtgctggcgcgagcgctggtgggtggggcctggctggcagtggcagagtgggagcacgggcgcgggctggcgagcttgcgagacatggaccagaggtgggctgtgggcacgcgcgcaagaggaagtgggcacgcttgcgaggcatcagtcatctgcgctgcgcataggattgctattgagacagaagcaggattggtggttattatggacatccacagtgaagcagaaccataa

SEQ ID NO: 22254 - DNA, 765 bp, Zea mays
  Peptide Sequence Number=SeqID_64033
atggccgagccccaagacaaccactgccctaagatcattggcctaggactcccaggggaggttggtgaagtagatgctggcgatgcagacgaacttctcgagcacggggctgcagtcaagcaggtggtcgatgtccctagcatggatgatggtagcacaaagtccaatctcctagaggcaggggaacatggcggcgcagccccgcgagagtgcgatggtgtctgggaagcgccagaagtcgaggtagagggtgcagagggaggcaaggtggaggacgtctacgaggaggctgacggagagacacatttttttgggtttcagatggtggacatactgtacatgttatgtccgcagttgagactgaatcccctaacggtgataatggagacgttactggagaaagagagtatcttcggactcaagtcaggcatcacagtagaccagaataatacgaagctattgaagcaatctttacaagagaaagagttgaggacattgtatctatctccaaggattcagttcttatccttggtcaaggcaacatgtttctatatggaacttcttgaatttggttctttatcaagcatggtgctaaaggttcaacacaaaccaataaaaagatctaagttagggttcaaaagaaaggagcaaaataaaccgaagagaaccctcgtctggcgcaccggactatccggtgtgccaccggacagtgtccggtgcccccagggcccgtacaggctgaactcttcaccttcgggtttctag

SEQ ID NO: 22255 - DNA, 423 bp, Zea mays
  Peptide Sequence Number=SeqID_64034
atggccatagttggcctcgtcgaggatgataggtacatgtgctcgaatgttgatatagtttggagaacggggcaacagtggcttgatcgagcaaaagagctagtaatgccagtggtggcgctagctggccaaactgtctccgttgttgctcttctgaacatggccatgacctttgtctacatgctccttggcttcggatcaagtcgtccaccttgcacggctgttagctctctggacgattctgtcaaaacaggcctgaactccctcattctcctggacgtgtgggtcatttggaaacacagaagcgattgtgtcttcaatagaaaacttccacacctcacttctaccttggtcatgactggagaagagattgttgcttggagcatggccggagccaagggtcttttcctactctcagcttag

SEQ ID NO: 22256 - DNA, 621 bp, Zea mays
  Peptide Sequence Number=SeqID_64035
atggctccattcacgcggacggcgcgggtggcggcttcggtcgggcgctgcgcgcaagggcttcgaggcgtcgcagctgggcacggtcgcgggcggctcgggtgcacgcgggctgctcggcgagtcgaggcagttgcagtgcgcagtgcgcagggcagtgtgcgcggctggggcttcgtggcgtcaggcgctcctggtgcgtcgtcctcggctgcaggggcgggtctctgggcgcggcggcctggcacggacgggatggcgcctggcgagctgggcgtcgggtcctgcggggcgctgcctgggagagagaagcgaggagagagagagagagacagccgggtgggagagaggagagaggaaggtggcggctgggagagggaaccaggggtagcggcggctagggcgttcacaaaccgtggtgcacgttctgccgccgctggtgcaaccccgccccgcgtcgcgcccgcctcgccctcccccgcggcaatctcggcgcttgccctccccagctgcaatctcggcgtcctccacggcaatctcgtgccccatccccagatcggcgtccgtgcccctgtcccgctctcctacctccatgccccacccactacgcccgcctcctaa

SEQ ID NO: 22257 - DNA, 195 bp, Zea mays
  Peptide Sequence Number=SeqID_64036
atggcgatgtgcggatggcacggcgaggatggcaccccggtgaggaattcaccgcgctccgaagacgtccaagccagcacaaggtccccgaaagcttcccggcgcctcggcgatcccgataggtggcaccctgagacatttcttcagctgagatacatgaaagacatcatgcacatccgcgagatgatccggtaa

SEQ ID NO: 22258 - DNA, 192 bp, Zea mays
  Peptide Sequence Number=SeqID_64037
atgaggactataacaaggcagataggattagacatgatccaacagatgaacactttttgccctgaatgtagtgggtcagcaaaagttgttcaggagaggacggatcttgaggttcatattgagaaaggaatgcactatggccaaaagactgtgttccagggtgaagttgcgagctcaattaactacctgtga

SEQ ID NO: 22259 - DNA, 357 bp, Zea mays
  Peptide Sequence Number=SeqID_64038
atggccccggaatgccttggcgaaaacgatggcacacggaatggcggcgctagtcgagatcgacgcggcggatccggggacgagcgaggtggcggcatgcttggctttcagtctttgggtcggagacggcgacgagggcgtactcggaggccgccacacacacagatctcgacgacacggaggagggcgaggagggcggagcacggggaggagacggtgccgccgcaggaggggcgggtcaacgaaggaggaggaaaaggtctgggagagggtgaaagtggtaacgcgcgtggagtggtggcggtggcagaggtggaggagaagagggggtcaaaggtggaggcgacagaggcatag

SEQ ID NO: 22260 - DNA, 252 bp, Zea mays
  Peptide Sequence Number=SeqID_64039
atggcgatctcggtgttgggcggcgccgagaccgggcgtgaggcagaggttgtcgcaggcgagatttgtggaggtgggggcatggtcatggaagatgcttctgatcatgacattctgacactcgagattgataccaagcaacaagcaagatgcgcatgtactcctggaaacagtcatgacgacatggaactatccatctgtgataactctagtcaggtcatttccaaaaatgctgagaagatatctgtctaa

SEQ ID NO: 22261 - DNA, 354 bp, Zea mays
  Peptide Sequence Number=SeqID_64040
atggctgcttttagtcccaagaattcttatggtgattttaagttggagagcctagtggaattagctaagctttatccagatgactttacttcagaagaactaaaggatcctgctcatgatcttgagatctacattgataatgtacaagctgatgacagattttccaacctgaacaccttaaccgaacttgctaagctgatggttgatacaaagaagcaccttgctttcggtttggtctatcgacttttaaagttagttcttgttctaccagttgccactgcatccgcggagaggttgcttttatatcctaattttgatgtttgcttggaagctggagcttttgagtcatggtaa

SEQ ID NO: 22262 - DNA, 1317 bp, Zea mays
  Peptide Sequence Number=SeqID_64041
atggcgatctgcagcgcgcacactaccacctccctgcgctccccatgcacgaccgtctcgaacgcaggtctgaggcagaagcaagtcatcttcgtcaccagcaacaggaggagcggcggcggcaggaggcacggaggggcaaggagcttccaggtctcgtgctccgtcgacaagccggtggtgattggcctggcggcagactcagggtgcggcaagagcaccttcatgcgccggctcaccagcgtcttcggtggcgccgcggagccgcccaagggcgggaacccggactccaacacgctcatcagtgacaccacgacagtgatatgcctcgacgactaccattccctggacaggaacggcaggaaggagaaaggtgtgaccgccctcgaccctagggccaacaactttgatctcatgtatgagcaggtgaaggcgatcaaggaaggccaggcagtcgagaagcccatctacaaccatgtcactggcctcctcgaccctccggagcttatcgcgccaccaaagattttcgtcattgaaggtctgcacccaatgttcgatgagcgagtgagggacctcttagatttcagtatctacttggacatcagtgatgaagttaagtttgcatggaaaatccagcgggacatggcagagcgtgggcacagccttgaaagcatcaaggccagtatcgaggccaggaaaccagattttgatgcctttattgatccgcagaagcagtatgctgatgctgtgattgaagttctgccgacccagttgattcccgacgacaacgaaggaaaggtgctgcgtgttaagctcatcatgaaagaaggggtgaagaacttcaacccggtttatctctttgacgaaggatcgaccatcagctgggtgccttgtggaagaaagctcacatgctcttaccctggcatcaaattttcctatggcccggacacttacttcggaaacgaggtatctgttctggagatggatgggcaattcgacagactagatgagctcatctacgtggagagccatctaagcaacctttcaaccaagttctacggagaggtgacacaacaaatgctaaagcatgcagacttcccaggtagcaacaacgggacaggtctcttccagaccatcattggactgaagattagagacctctatgaacagattgttgctgagagggctgatgtcctaaaactacagctctccgaactcaatgggagtaacaaccttcgcatctgttgggatatatggcgagctaggaggatgagctatgcatactggcgagcgttggcagtctgcggcgtagcgtga

SEQ ID NO: 22263 - DNA, 456 bp, Zea mays
  Peptide Sequence Number=SeqID_64042
atgcacgccgcggcccccgagcgcccaaccgcggagccgccgtcgccgcgggcgactggacagcgccgcgccgcctggaagcacgcgctcgcgcctgccagggctggtgccgcgcccgcgtcggtctccttggccgcctgtgtcgcgcgcgcgaggtcgcccgcgctttggccgggaaccgcggccgtggggcacgtccgccttggggtcgcgcctccaaccagcgcaggagccgcgacaagggccgtccggccgcctctgcctgaagcgcgtgagctcctcgttgttttgcgcgttcgtccattctcgctggcgactgctctgtctctcttcctccttcccgttgagctatcgcacacagtcctcggtggccgcgagatcaaatttggtttactcacgccaggtgccgtctacaggagattgtctagctttgttctcatgccattcgtgaactag

SEQ ID NO: 22264 - DNA, 477 bp, Zea mays
  Peptide Sequence Number=SeqID_64043
atgcagatgctgttcctcgccatgatgtgcatcccggcgtcagcgacattgctgtccgtgcacgacagcggcagcgacaggaagaggagcggcgctggagaagcagaacgcaaggatgggacggagaagaagagaagactgtcgctgaacagcatgctgctgtcgccgctggcctgcaacgccgcagcggtgatgctcgcctgcgtcaccgagaggcgatcgatcgccggcgacccgctcaacttctccacgttcaacgtgatcttcgaggtggtcagtgcttatggcaacgtggggctgtccactggctacgcctgctcgaggctgctgcccgcggcggcggaggcgaccaccgcttgccatgacaagccgtacagcttctctgggtggtggagcgaccaggggaagctgctcctggttctcctcatgctctacgggaggctcaaatgctttcacggacagcgacgcagggggtga

SEQ ID NO: 22265 - DNA, 300 bp, Zea mays
  Peptide Sequence Number=SeqID_64044
atgcatgggaagacagagctaggaaggattgctgttgagaagttgtttgaacttgatcctcaggattcaggcaatcatgttttgctctcaaacatgcttgcatctgctggcaggtgggcagaagcaaccgatgtgagaaaggagatgaagaatgttgggatcaagaaggacccagggcacagttggatcacttggaaaaatgttgtccatgttttccaggctaaggatacaacacatgatatgaatagggagatccaggcattgttggccaagctcaaagggcaaatttgtgtgatatag

SEQ ID NO: 22266 - DNA, 747 bp, Zea mays
  Peptide Sequence Number=SeqID_64045
atgatggtgatgggctacttccgctcgtcgacgaccaagtccgcgacggcggcggccaagcagaaggcgaggacgacgcgcgaggagctgggcctccgggaggcgctgctggaccagccggcggcggcggaggaggagggcggcgtgcccaagggctacttcgcggtgtacgccggggaggagtcgcggcgccggttcgtcgtgcccaccgggtacctccgggagccggcgttccgggacctcatggagcgcgccgccgacgagttcggcttcgcgcaggcgggcggcctgcgcgtgccgtgcgccgaggaggacctggaggacctcctgcgccgcctccagcgcaagaacgccgccgggaaggggaagaagaaagccaccgtctgccgcagtggcaaatgctggatgcaggatttcaggtacgatgctccaaggcaggcaggtccatttcagagcagtcctccatttcataaagatgtatggccattacctacagtttgtgttggaactatgtccagtagtatcctagaagtagatgggggcaagttaggaaagcttgctggccacctggaccatgtttgtaggatgctcgagaagacttcgattgtttgcgaacaagatctggagaataagtgtcttggttgggacctttatgatcccccttcagatgttgctggcgacacttctggtgttgaggacctagaggatggatacgtctcagcagttgacccctcttttagccattag

SEQ ID NO: 22267 - DNA, 426 bp, Zea mays
  Peptide Sequence Number=SeqID_64046
atgactctcatgcttcagcacaccggcgtgccgattccccccagttcagtcagcaccgcctccacctcttcaggctcctgttgtgccagctatttagccaggacccctcttcctgcagttggtccttcctcctctccgctccggccggtcaccctagttttcacgtcgccggttattggctccgtcagctctcagccgccagtgccaccagctcctgctgttatcactgctgttgtggcggtgtctgtgacttcttcggctccggcagctcctgcagcgcagcctccgtctgagtcagtaccagctccagcttctacagcagatcctgaatccgagactgactctgacccacagctgtcgtttgctctactgcctcgaccgcgaccggatgcgcccccgcctcctcctccctcttctgatgtgtag

SEQ ID NO: 22268 - DNA, 795 bp, Zea mays
  Peptide Sequence Number=SeqID_64047
atgaagaagaacaaatcaggggcatccaactacctgtgccttgcacccatcttcaactcctgcgtttcctccggcaagcagcagccgtccaacgccgacgctgccgccaggaaccgcctgagcttctccttcccggaacggcagcagcagccggcgccggcggaggaggagcagaactcggagagcatcatcgacccggccgcctcggtcatcgccaggaaggagaaggagaaggacggcggcaagcactgcgccgtcatcgtgggcaccatcttcgggcggcgcgccgggcgcgtcaccttctgcgtgcagcgcgacgcggcggtgccgccgccgttcctcttcgagctgtccgtgcccacgcagtccctggccaccgagatgggctccggcctcctccgcatcgcgctcgagtgccaccgcggcgccggcgacgaccaccggagcagcgtgtggagggcgtcctgcaacgggcgcgacgtggggcacgccgtgcgccggcggccgacggagtgggaccgccaggtgctggacagcatgcggaccatgacgaccggcgtcggcgcgctcccgcccgcggtggcgatgggacggcccaacgacggtgatgatggagacgcgcagcaggacggcgacggcggcgccgcaggggaggtgctgtacatgcgggccacgtacgagagggtcgtgggctccagggacgccgtgtcattccacctcatcaaccccggcggcggcggcgccagcccacctcaggagctaagcgtcttcttgctgcggaccaggggtgactga

SEQ ID NO: 22269 - DNA, 282 bp, Zea mays
  Peptide Sequence Number=SeqID_64048
atggcctcgtcctctctcctcagcgcggcacgctgcctgttccgtgcgatgtgcatgcctgtcgcggcgacagcttgggttgctatgctactactgcaacaacatcgcggaggaggagccaccgagcctcctgcggtcaacgctgtggccgacgcgggtgctccaaggattggcggcgcggcccggcccggaaaccgcctccgagacactgacccccaacgcgtcgtcaagaagctgcgcacgcgccggcgcgccgcttccaccgccaggctctcgaggtag

SEQ ID NO: 22270 - DNA, 192 bp, Zea mays
  Peptide Sequence Number=SeqID_64049
atggccgcgctcgccaccgtcgtgcagcggctcttcgaggcgtgccgcgaggtcttcaccggagctggtccaggcgcggttccaccgccggccgacgtcgagaggatcaagcgggaaagcgagagattggggacgtatgccgccaccgtcaagggatcatcggaccacggcgacttgaacctcgatgagtag

SEQ ID NO: 22271 - DNA, 438 bp, Zea mays
  Peptide Sequence Number=SeqID_64050
atgggcaagagcaagaagggtgggagttcttcacaccattctggcgataagcggaaacgtgagccgactcctccctcggaggacttcggcgactcagagtactcggaggaggagttctcctccaagtcagagggttcgccggtccctgcctctcctccggcgtcgtctgatgattcagacgacttccaggggatcgccgcagaggtatggacctacatccgggccgtcgagcgtgccgggctcgagggctcggatgagtcggggggctcctcggacgaggaggactcctcggactcgtccgaggagggcggcggtgacggcgatggcgagggcgacgacgacggtgatggcaagggtggcagcggcgacggtggcggcaagggtggcagcggcgacggcggggacggcagcaagggcagcaacaaggccagtggctag

SEQ ID NO: 22272 - DNA, 1632 bp, Zea mays
  Peptide Sequence Number=SeqID_64051
atggcggagaaggctgctgctgctgactgctcacgtctaaaatggcttttggcctcccagacagcatttaaaggactgctgactgctcacgctgaaactagacataccattttggtgagatgggatgttgacctcactgataaagttgatgctacagtagagatgcagtggcagaggaacgtttgcaaacctggtgatgtactacctattctgattactgttttgggcaccagggctcttattggttgggcactaggtttcttgttgcgtgctattgcgaaggagggtgaggaatcgattagcatcttctgtgtcactgtagcacacaacaagctaacaacaaaatggattcgtgctgctccaccaatcacttgtgcccaaccaaacatacagatttcgcaaccactagtgaaacaaagcactgtggataatatgttgtccacgcatgaggcaaatgctgatcagtttgatcttctttcttatgctttatatgatggattggttgagatcaaacaaccaaatgacattcctgcaattaatggtgccacaacctgcagtggtagttcagtgatcccttgccgtaatcatgatcaatcaattttagtggaaaacttagacatacctgattgggcgacttccttccctggttattttgaagactgtgggccagttgttacatatagccatgttgatgacattggttcgcctagaaagggtgtgccaattggacctgagcaccaggctgacattccagaatggaggcccctaaactctatgattgtacctggtgcttcagagttttgtgctaatctggattgtagttctgcttccacttcagagtctgttcccagaggtgatgactatgtaagtgacaagtggatcaggtactgtgttgttccggtgacatgctgctcatctcctgttgactgggctggagacagcaaaatagattgcaactgcagtgacgagggttctatgaggtgttccagacagcatattattgaagcaagggataaccttaaaatgatcttgggacaggacaggtttcgtgagttaggtctttgtgaaatgggagaggatgttgctctgagatggactgatgaggaggagaagctattccaaagagttgttttcttaaatcctgtctccttgggcaagaacttttgggaccaccttccggatgcatttcctaataaaactagccaggagtttgttagctactattttaacgttttcatgctcaggaaaagggctcagcagaacaggtctgacgtgttggctgtggacagtgatgatgatgaactgcatggtgaacctctagctgagcgggtggaaggggatcctgcagttgagtcctctacacatgaacattctgtcagcaattctctgcccatggatgatgaccataaagagtttgaaggagcacagtttgatggatctttgtgtgagaagtcagtatacaatgcagtcgagtgcagacatctaccaaatcagatgcctgcagattcaaatacggtgaacactgcactagatgtttgtgaccaagataatggagctcagtgttcagagtttcacatgtcactgccgagcgatacttcaaacagtcttggggatcaaagtgcatctgtatag

SEQ ID NO: 22273 - DNA, 1095 bp, Zea mays
  Peptide Sequence Number=SeqID_64052
atgacgatgacagagtgggctcattggaaaatcggcccgccggtggcaaagaagcccagttggcggcccggccagacacggcacgccactcggcacagctgcaaggtgtgccggaagggcttcccctgcggccgctcgctcggcggccacatgcgttcgcattccctggccgacgagctggacgacgaggaggagcaccaacagcggcaaggccttgattgcgcgacggctccgggagcaggaggtcacgggctgagggacaagccgaagaagacacggcgcctctcgagcctcagcgactgcggtggccgcggtgacgtgttttcaccgtgtgagtcgaacgtcgattaccgccgcgcgcgaggcggtggcaaagcgatggaactggagcgtgattggaagcaggagggcttgatgccgccgccgaggcgtaggcgctctatgcgtgtgccggctcgcacgccgccgccgactgccttcgacaaggagccggaggatgtcgcactctccctcatcatgctgtcgtgcgacatcgtggaccgtcgcggttgctccacggccgtgggcgccaagtactcgccgggagaggacagcacgaggcgagattatcagtacgagtaccaccaccatgacgccgactccaacgacggcaccaaaatcaacaagaggaagctccatcacagcgacgttggtgacgagaagcggggccggtacgagtgccctgtatgcgggaggacgttccggtcgtaccaagcactcggcggtcaccgcgctagctacaagcggatcaatagtaactgtagcatcgccaaacctatccttgactaccaaccggagcccaagcccagcgtcgagaccaacactacctccatggttagtaataataggacgattaaattcgagtgtcgcatctgctttagggtgtttagctcgggacagtcgctcggtggacacaagcggtcacactcgatcgccggtgagctctatgagcacgtacattctgtcgatgacgatgacgttggtgacgatgagcaaccactgatctctgatgagtttcttgatctcaatctgccagctccaggagttgaggattga

SEQ ID NO: 22274 - DNA, 459 bp, Zea mays
  Peptide Sequence Number=SeqID_64053
atggctaagtcttggcttggtggcggggcttcgacttcctggtcattgtcagtgctcctcctcctgttcgtccttgtgggccgaaagaggggttggctgtcgatggcttccttaggaaagagtcataaggtgagggtgcataaaggttcaacacaaaccaataaaagattaaagttagggatcaaattcaaaggagcaaagaaaccgagtgtgctctggcctggcgcaccggactgtctggtgtgccaccggacagtgttcggtgcaccaggaccatacagagtccaacgagccactctcgggcttcagcaggtgcactctgctaaaaatcaccggactgtccggtgtgccagcggagcaatgactacttcgcacaatggtcgactgcaaaagttcctgaagcaaggaacagtgcgcgacagagttagagcgcagagtcaaaggcgcaccggacagtga

SEQ ID NO: 22275 - DNA, 234 bp, Zea mays
  Peptide Sequence Number=SeqID_64054
atggcgagagtggcacgtaccctcctggcaaaggaccgcctaaaaggggtgcatacccttgagagtcttttctttagtcgggtgtcggggctggtgtcggacgaatacagggaggaggcacctgcccctacgccctctgtcgagaatggggttgcgtggaggtggaggcatgaggggagagagaaaagaagtggaatggcgaacgagaaaaagatgacgcaggacgaccgttga

SEQ ID NO: 22276 - DNA, 138 bp, Zea mays
  Peptide Sequence Number=SeqID_64055
atgcagcccgacgaggttgaagaagaggggcacgatctggagcggctgggaagattgcgggtggccgagcggatgagagcgagggaaacggcggcggctacgaaaaatcagaggaagggtgagaacgatgacgcgtag

SEQ ID NO: 22277 - DNA, 1377 bp, Zea mays
  Peptide Sequence Number=SeqID_64056
atgactctattagaaagtagaatgatcaacttttacacaaatttgaaagtggatgagatcggtcgagtggtctcagttggagatgggattgcacgagtttacggattgaacgagattcaagcaggagaaatggtggaatttgccagcggtgtgaaaggaatagccttgaatcttgagaatgagaatgtaggtattgttgtctttggtagtgataccgctattaaagaaggagatcttgtcaagcgcactggatcgattgtggatgttcctgcaggaaaggccatgttaggccgtgtggtcgacgccttgggagtacctattgatggaaaaggggctctaagcgatcacgaacgaagacgtgtcgaagtgaaagccccagggattattgaaccgaaggtgcagtaccgcagccacaagggggccagcccaattagttcaggggacgccaacgccagccccacaagaggcccccctaccctcaattgtgccaccttcttgttactcgctgaccggggctctttagttcactcctctggctttccagcagcttcaggtagtgggccctcccttaaccctgatgtggcctctaccccctcctcgtcgtttttccaaggggttggttctgctttggaggccgccacggcaccggcggaacccggggaggaagttcagcagggggccattgaggctctaaatgtcgctgcgcttcccggtgttcctcaggatgagctgtttggagccatttcgcaaaacctcgggatagcccttccacaggttccagcggccccgcctgcagctccaattcatcaagatattgagcctatgattcaaagtgcaaaaagctcaatatacaacaacttaacaactttacatgggtccatggacccaaaggaagcaacagaattaatggaaacaattttttataagaagagccaaatcctgcaggagctggagcgtttaaatggcctgattaatggcccaatactttggaaagatggctgggataccatccgaaacccccaaagcggtaaggagtatcagccgaatacgttagatatgatctggcgcagtttgcaaagatatggcctaaatagtgactactataaaaatttcttaaatgagagggttcataccatggaaaatgaaaaatccactaagttgaaacttgaggatcttacaatagccaaattggattcattgaatcaagccaagctaattgtgggtcgattggaattggaaaatgaaatacgaataataaaaaaagaactacgttaccttgatttttcttctatgaagaaagtgggtaagtgtatcgctatgattggctataagtctcagaactcaagttacactatgctggaaaacaagctaatataa

SEQ ID NO: 22278 - DNA, 516 bp, Zea mays
  Peptide Sequence Number=SeqID_64057
atggcgagcccagcaaactccatagtgagctgggaacagctcccgatgacctggtgggacaggattttatcgaccaagcgacaacagagagacgcgcaggggagccactcggcggagcgccatggagagaagaggccgagaaggggcgcggccagcttccacgctggttgccggaaaggaaccgaaccgagcaggacgctggacagggcgcaaggaggtgctgacgaactgcagcaggaagccaaggcaaggtcggggagcgcgaccatcgtcgcctgcgagctcctagccggcgcgcgcgcgatggcaaccatgggaggtgggagctcggctgcaagggcgctggggtgggacgaccgagcagaggagcgcagcagggaagaagcgcgtgagaaactccacggcaagacgcggcggtcatgggagatgacggctggagaggaggaaatgaagttgggcacaccagaggctacggccagcgaccaaagaagcaagctccagggcgcaattggatag

SEQ ID NO: 22279 - DNA, 147 bp, Zea mays
  Peptide Sequence Number=SeqID_64058
atgaggaacatgcttgcaaatgagggtgtccgttcattctacaagggtttgtccgctggtttgctaaggcaagcaacgcacatagactgctcatcttggatccttcagccattacctccacctgatggtcctcgtttacaacagtaa

SEQ ID NO: 22280 - DNA, 258 bp, Zea mays
  Peptide Sequence Number=SeqID_64059
atgaccagctcgtcgaagttcgagttcctccccaagtctagcaacaactccagcaagaaatttctctctgtctgtttatcttccggaataaccctgaacatcgttgtgaccagcttgacgagaacttcgtcaccacgttttcggttcgtcgaccggatctgcagttcactgtcaatctacgaaaaaaccgagatgtccagcagcaacgcgagatcgaagggttttgattggaaagacgttaaagtactatgttgctaa

SEQ ID NO: 22281 - DNA, 879 bp, Zea mays
  Peptide Sequence Number=SeqID_64060
atgatgagccctagtaagctcgccgtcctcactgtgttcgccctgctcggctccgtgtcaagccagggcggaagctactactacactcctccggctccggccaccccgcaaccaccgccatgtcctcctcctgtcactccggtgcccccgccaacgtcaccacccacttatcctccaccgaccccgacgagcccacccgcgcctacgcccacacccccacccccacccccacccccacccagcagccctgggacgcaactcacggtcggacactacaagaacaagtgtggcgcttacgtggatgtcgaagctattgtcaagaagcacgtcagtgccactgatgctggtatgcaggccgggcttgtccgtctcttcttccacgactgcttcgtccgtggatgcgacggctccgtcctcctcgacacgttcagcaacgacaccagcctgaccccggagaagttcggcgtgcccaacttccccagcctgcggggcttcgaggtgatcgacgcggcgaaagacgagatcgaggcggcgtgccccggcacggtctcgtgcgcggacatcgtcgccttcgccgcccgcgacgcgtcctacttcctcagcggcggcggcatcagcttcgccatgcccgcgggccgctacgacgggaccgtctccctcgccagcgagaccctccccaacctgcccccgccgttcgccggcttcgaccagctcgtcaagatgttcgacgacaaggggctcgacgccttcgacatgatcacgctctccggcgcgcacagcatcggccgctcccactgctcctccttcaccagggaccgcctgccgccccagcaacacctccgacatggacccggcgttcgccgccacgctgcaggctag

SEQ ID NO: 22282 - DNA, 468 bp, Zea mays
  Peptide Sequence Number=SeqID_64061
atgcttccaccccctcacgccacgcctgccattccaggaccatccccgcatccgcccccgcagccggcgccgacgccgatccgcacggcgcgcggcgcgcgcaccgtggccaccgatgagcgggtcctcgccgagttcctcgaggcctccctccgcgtgccggacctctccctgcccccgcggaagtgcttcatcttcccgccgccagcaccggaacgggacggggtcccttctcacgccctcatttcgggcgacgtggacgcggagcagcgggcgattgcggcggcagcggagttcggcgcgttccgcatgaccggcgcggtcgaagctcgcgaagtgcgtgaagctgtggaggcggcgtcagggctcgtgttcgcggcaccggaggaggtgaagcgcggcctggagagatggttccgaaggagagatcaggagccccagaggagttcttttggttccggccgatga

SEQ ID NO: 22283 - DNA, 1971 bp, Zea mays
  Peptide Sequence Number=SeqID_64062
atggtggcaagcagcataggaatcaagggttctacaacaaatgtcagcatggatgtgagaagatacaactcgatgccattccattatacgggggaagaagaagagatcggtacctcccgagcgaaaaaaattggactggggaagtgcggaggaggcccgatttcatttgatttgaggcggcgcaggcacagaggagagcgctgcgccatgcgccgactggggaggaaaacaacaggttacgcgaacagaataagaaagcgaattaatggaatacgccttttctggggtcaaatacattacaagacaaacaatatggggaagaacatggctaaatctacagtgagtttgcttaaccgcagtgctaattttgcatcaaggacttcacaagatgccgtggatgggttaagcgatgaaagtgacggtgaaacctcaacaaaaaagaagagaaccccaagacgtggaagaaagaaagccaccgttgaaacatcgagagatgtaggagaagaaatcgaagtcatcactgaacaaacggccgctgaagagactaaggaagttaagaggagaggccgcaagaaagctgctacttctgcaagctcagaagaggagaaggataaggccaaggaaccgaagaagaggggacgtagaaaagttaagactgtagaggaacctattgataatgctggagagcatctgagcaaagatttgatgctctataatgaaagagaagatcagactcgtctacagaattctgccagtgttctggaaagtaaaatagcgtcagtgctacatgaggatattggagaggttgacgatttaattccgctcgtgtgctgctttggacctgccaaatactcctttattccttctggaagaccagcaaataggttgatagaccatgagattcatgatagaatgaaggacatgttttggtctccagacaaatttgtgagggcaccaggagggtcttcatccaatgttgctctagctttagcagcgattggtggaagggttgcattcatgggaaaattaggtgatgatgactacggtcaaagtttgctgtatcacttaaacatcaatggagttcaaactcgagcagtttatatggacccttcagcaccaactgctgtgtctttgatgaaggtcagaaccgaaggaagtctgaagacaaactgtgttaaaccttgtgctgaggattgtttcctgccgtctgatatcaacccggcagttctaaaagaggctaagatgttttactataattcttcagctttgcttgagcccactacagagtcatcattgttgaaagctattgatgtttcaaagaaatttggtggtacaatattctttgaccttaatcttccacttccactatggtcatccagcaaggaaaccaagtcactcattaaggaggcatgggaagctgccaatatcattgaagtcacaaaacaagaacttgagttcctttgcagcatcaaaccttctgagaaatttgacacaaatgataatgataaatccaaattcacacactatagttcagaagttattatgaaattgtggcacagtaatctcaaggtcctctttgtgacaaatggtacctccaagattcactattacacagaaacacacaatggctgggtccgtggtacagaagatgcaccgatcactcctttcaccggtgatatgtcacaatctggcgatgccattgttgcagccctcatgaggatgctggtaattaaccctcacctgatcacagacaaggtttacttgcacaaggcagtcaaacatgctattaaatgtggtgtcatcgaccagtgggtgctcgcgcgagaacggggcttccttcccaaagagagagcagatccaaccagcgagcagtacgaagtgaagtccatcacagagagggaataccgcacacttcctgatgccatgcaatcagaaaacacgtcaaccagtgaacttgcttatgtggagtga

SEQ ID NO: 22284 - DNA, 228 bp, Zea mays
  Peptide Sequence Number=SeqID_64063
atggcacttcatgtacaggtccttggagcacttgtgctggtccctatggtatctatccgccccttgggcaactcctcatctggctctcgaggaaactcttctgagtttcgacccctagggaaccttagctttggggacttctcgaggcgtgaggaagccgaaatagccaagaatcttaatctccagcggtaccatgttctcatgggcgatgagcagctgacaacctag

SEQ ID NO: 22285 - DNA, 348 bp, Zea mays
  Peptide Sequence Number=SeqID_64064
atggactgctccagtgctgccgccaccgtcgaacgcgacgtcgagccatcgtcctcgatctggacggcgaaggaggccgtgagggcgagcgtcggctcgccgtggccgtggcaccgtaggaacgatgcgcagcgctgcgccgagaggcagagacgacatggtcgtcaccgtgtagctgagcacgcactgcgcagcatggagggtgctcacgggcgcggaggcaggctacgtgacgcgcggcaggtgcaagtcgacggctttccgctgcaccacaggcttgtggaggagcgggagggcaacgccggagatgtgaggggaggtcaggcggggccggaacggaggcagtag

SEQ ID NO: 22286 - DNA, 204 bp, Zea mays
  Peptide Sequence Number=SeqID_64065
atggcggcgtcgtcggcggtggagaagctcaaggtcctctgggactcgcaggtcaacgacgaggagcagtgggcgctcaattatgtccgtaccccctttccctcactccgcattctctacctcttcaagctgctgaaggctgctggtctgtttgcgggatccatcttcctgatgcggaacttcggtgatctgatggccatttag

SEQ ID NO: 22287 - DNA, 228 bp, Zea mays
  Peptide Sequence Number=SeqID_64066
atggccggtggccgctggctgctgggaccgctggagtcgctggacgccgcgcctgggagtgggcgcgtggccgcaggaccgctggacgccgcgcctgggagtgggcgtgcgcggtgcatggccgctggtggcggctggcggagaagacgagcggcggccgacgcctggggagtcgaggcgagaattggagacaggctgacgcgtgggaaaacgagtaaacctaattaa

SEQ ID NO: 22288 - DNA, 1374 bp, Zea mays
  Peptide Sequence Number=SeqID_64067
atggggtgccatcttctcggacttgcctggcacggccatgatgggcgtctttggttgaccgctgctgctgaattacgactcgcgacgccgtgccttgaagaggacgctgacacagcacagagtagacgagccacggtcgctgctgccaagaggacgctggccgtgggggtggggttaccatcgcgcgtggtcctcgcgctcctcctcctcatcggggtatccggttccggagccacccaggcagcgtctccccacacccaccacagtcggcagctggatgtgaaccacaagaagccagtgcagacgtttcggcccatcaacattgcccaccgagggtcaaatggcgaactgcccgaagagacagcggccgcctacctgagggcgatcgaagaaggcgcggacttcatcgagacggacgtactcgcgtccaaggacgggcatctcgtctgcttccacgatgtgacgctggacgcgaccaccgacgtcgcggaccacgcggagttcgctggcaggaagaggacctacgaggtccaaggagaagatgtcaccggatggttcatcgtggacttcactcttgaagagctcagatcactgagggtgaagcagcggttcagtttcagggaccagcggtacaacggcaagtaccagatcattacgttcgaagagtacatcctgatcgcgctctacgctgacaggaccgtcgggatctacccggagatcaagaaccccgtgttcatcaaccagcacgtgaagtggtcggacggaaagcgattcgaggacaagttcgtggagacgctgctcaggtacggctacggaggcgagtacatgtccgatggctggctccggcagccgctgttcatccagtccttcgcgccgacctcgctcatctacgtctccaacatgacggactcccccaagctgctcctgatcgacgacacgacggtcccgacgcaggacaccaaccagtcgtaccacgagataacctcggacgcctacctcgcgttcatcgggagctacgtggtggggatcgggccgtggaaggacacgctggtgcctccggacccgacagacaaccgcctgggacgccccgccgacctcgtcgcgcgagcgcacgctctgcgtctccaggtgcacccgtacaccttcaggaacgagaaccagtacctgcacttcgacttccggcaggacccctacgccgagtacgcgtactggctcgacgaggtcgccgtcgacgggctgttcaccgatttcactggtagtctgcacaagtaccaggagtggactaggccgtaccggaaggagcaggagaagacgagcccggaggcactcttgcgcgagatcgcgggcatgctcaagaacgacggctatgactga

SEQ ID NO: 22289 - DNA, 177 bp, Zea mays
  Peptide Sequence Number=SeqID_64068
atggtgcacctcctactcaaggaaaggaataggtacctcaagaatatggcattgatcaaggaggatcaaatgaagaagaagtcaaggaggaagaagaagagttttctggatccaaagatgctttttaaggatccagactatgttggtgatgcaaagaaagagcccaacaacttttaa

SEQ ID NO: 22290 - DNA, 909 bp, Zea mays
  Peptide Sequence Number=SeqID_64069
atgaagtttcgcttcgagcatgagtacgtcactatccatactactcaaatcttagagctctttggattccctaagtcgtcgacgaggctccacagtctttgttatggtaactcagaccctcctcatcgccctcacggtggagttgctcctaataccgctcacgtcgcaacactcttcaggccacccttcatagataactcacggtgctctcctgtagacttcaccttagcggtgaagttcctctatgagttgatgagacgcaccctgttaccatggatgggatacagagaggctaccactcacattcagctttggctcctaggtgctctggtatctcactctatgttcgacgttgtagacttcctgatctacgagatagaagacacattgttggatagcctccgtgctcggcgtcagctgccctatgcgcactacctctgccacatcttcgcgcagctgatccggccacctcagttccaggccgaacttgactccaccagactgaagtttggtttctaccgcccggcacccgaggatacgattcccgtgaatgctcctttggatcctttggcccctgagcatcgaaatgaggacaaggtgatccgccagcttgaggaccaggccacggttgttgatacttctttggactctgatgacgaggacctaggaattccaccacctcctttgccacctcgcacccatgatcacgaggccggtggttccagtgctgctcctccctctacacctcctgccatatatccagccctaacagctataatacagtccttgacccagcagcaagctcacttggcagttgagcagacacgtcaggaagccattcagcagcagatgtccgagcggatgctctcaatgtttcagacgattcaagaccgccaggacactctttag

SEQ ID NO: 22291 - DNA, 435 bp, Zea mays
  Peptide Sequence Number=SeqID_64070
atgggcaaagaacaaacaaggcgcaagcggcgagccaacttcttccatcgggaggagtttggggacttgggagtattcagagggaggagttttccctctgagtctgaggggtccctggctccccatccccctgcgggctcgcggcggagggtctggacgtacatccgggccgtcgagcgctccgggctcgagggctcggatgagtcggagtactcctcggatgaggaggactcggacggcggcggcgaggacgaggacgacgacgacgacgaagacggtggcggcggtgacggtgacggcagcggcaggggcggcggcagcggcagcaaggacggtgacggtggcggcagcaggggcggcagcggcggtggcggcagcagcagaggcagcaccaggggcggcagcggcggcggcagcaacagggccagtggctag

SEQ ID NO: 22292 - DNA, 441 bp, Zea mays
  Peptide Sequence Number=SeqID_64071
atggcttgtgagattggtgctcgcgattatggcggtttgagctcagatttgggcagggggcgcagcctgcagaacggtgctcgcaagttgttcggtgaaatgcccaggagtgactggaggtcaccaagccgcgtcctcgaagtcactatacgccaggtccgttaccccatcactgagagtgtggtccgtgcagtttttgctccatatggaaaggttgagcatgtccacatgtttggggactcagaccatgtgttggctcatgtggtatttgaaacaaaacatgaggcagcaggagcttttggagacttacatggtcgaaacatctatgatggttgctgtgagctaaacattcagtggggtgcatctcaagatcacatcaatgctaatacagataagagctgctacgatcatgtgagctcatattcattgatagtcgcctag

SEQ ID NO: 22293 - DNA, 798 bp, Zea mays
  Peptide Sequence Number=SeqID_64072
atggagctctgcctcgccgcgcgcgccgggacgacggcggccgcgtgccggaggagggcaccgacgactacaggcgtgccgaagaagaagaggcacggcggcggcaccgtgcgcgtacggtgcgcggcgacggcgcccatgggggagaagacggagtaccgggacggcccgctggagcgcgcgttcatggggctgttcgcgcgcaagatggagaagtacgcggcgaagaagccggcggcgcaggcgaaggaggagagggcggtgtgggagtgggactacgagagcttcgtggacgtgtcgcggcgggtgatgctggggcgcacgcgcgcgcagcagcagcaggcggtgcgcgaggtgctgctgtccatgctgccccccggcgcgccggcgcagttccggcggctgttcccgccgacgcggtgggcctgcgagttcaacgcggcgctgaccgtgcccttcttccgctggctcgtcggcccctcggaggtggtggaggtggaggtcggcggcgtccggcagcgcagcggggtgcgcatcgagaagtgccggtacctggagagcagcggctgcgtggggatgtgcgtcaacatgtgcaaggtccccacgcaggacttcttcaccaacgagttcgggctccccctcaccatgaacccaaatttcgaagacatgagctgcgagatgatatacggccaggtgccgcctccgttggaagaggacccggcgtcgaagcaagcttgctacccgagcctctgttccatgtcgacgccatctgccccggcctgtccgaagcttcagtag

SEQ ID NO: 22294 - DNA, 441 bp, Zea mays
  Peptide Sequence Number=SeqID_64073
atgcgccagatgcagccgactgaccaccagcacccgagcagcagcgagagagcgccgccgctcgcggccgccgtcggcaaagatgatggcgcgtcgtcgtcgtcgtcgtcggtggtggtcaagatcgacgacctccgctgccacggagactggggggcggccgctgggtccgccgccgtggacgtgtgcctcgccgcggccgccgtggccggcgccgcgctgctggcgtggtgggccgtcgcgttccacccgtcgtacgcgcagctgtggatggtgccgctcggactcgtgctcgccggcaccccgcccgtcgtctgcctcgcgctccgcttcagccccgacgcccgcgcgccgccgccgccgggaaaagacggacccgcgggtgcgcgtgcgccgccgccgccgccgccgttggtcgccgttgtcatcgacaagcagtag

SEQ ID NO: 22295 - DNA, 921 bp, Zea mays
  Peptide Sequence Number=SeqID_64074
atgacaggaggccaggaggttcatgcacgcacgcaccgcccccaaaagcccgcgctagatggggacgccaaaagcaaaaccgggtgcggccggctgctggttttagctccggtgggtttcggttttgccctggacccccggcgggcggacgaggaggctctctcgtcgtctcgtcctgccgttggatctcctccacgcaatcgcaaccccaccgtctgtactgtagcatgtgcagttgtgtgcatcggcggcatcacacactcgttgcttgccatcgcccatcgctactacggcccatgtgtcaccggcaccgctcatgcggatgcactgcacgcgccactgccccctccctgcttcctcgctcggctctcctataaaactgtccccggccggacccgcaggcgcgcaaacccactcacacactgtgacgctgctgatgcgcctcatcgtccccgtccccccggcagagcccacccaccctccactccaacccacgccggcgaacccagccagccgcccacgtcgcctcccggtcccggcttagaccagactcagattcagatgcacctgctcgacgacctccgccaagaccgcggcggcgcggccgcccacaccggcagccgcagtcgcaagccgcccccgccccttgccgccgccgccgccgccgccgcgggggtcccggcgggctcctccaccgccgccaccgccacccacctgggcccggaggcggcggcgctgctggcgtgcgtcacggccacgctgctgctgcttccgctggtcctgccgcccctgccgccgccgccgccgctcctcctcctcgtgcccgtcgccatcttcgccgtcctgctactcctcgtgctcctcccctccgacgcccgcgccgccgtcgccacgcccacctcctccgcctcctacttgtag

SEQ ID NO: 22296 - DNA, 1122 bp, Zea mays
  Peptide Sequence Number=SeqID_64075
atggggggagcatccggaggcgaccagcagccgcagcagcacggcggcgccgacgacgcagacgatgggcacctgcagcaagcaagcggaggcgacatggtgatgcccgggttccggttccaccccacggaggaagagctcatcgacttctacctccgccgtagggtggagggcaagcgcttcaacatcgagctcatcaacctcgtcgacctctaccgttacgacccatgggatctccctgctctggcctccattggggacaaggagtggtacttctacgtgccgagagaccgcaagtaccgcaacggcgaccgccccaaccgggtgacgccgtcgggctactggaaggccacgggggccgaccggacggtgtacgtcgaggtcaagcggccgatcgggctcaagaagacgctggtattctacgtggggaaggcgcccaagggacttaggagcagctggatcatgaacgagtatcgccttccttccggcgaggctgaccgctaccaaaaggaaatttctctttgcaaagtgtacaaacgaccagggatcgaggacaactttcacctcagcaccaccacggcaagatcatctggctcaaaggcagcagcaaacatggacaagaagcaccaccggacgtcggcgtcgccccgcctggcgccgatgttcgacggtggccactcatcagctcacatgaacaagccatacggtggagcaaacaccgccatagccataacatcatcagctgcagctcgagcagtaacaatggtgcctcagacgtcaatgttcctatcaacaccctcacttagctccaccacgtcgacggaggaggacggtacatcactctacctcatgaagggtgctaataactcaccgatgttgcattcttccacacatgccctgcttaatgcaaactcggctacaatggcaacaattccaatagatgagctgagtagggcaatcggatcatatagtagccaaggaaaccctaaccatcccttgccatcacaaggtccattgcttccttttcctagtatggaaaagatttgggattggaatccactcctagaatctcccaaggtgtgtgtatatgtgcaggcgccacaaaattattatttgggctag

SEQ ID NO: 22297 - DNA, 165 bp, Zea mays
  Peptide Sequence Number=SeqID_64076
atgaaggagattccgacaaacgggccccacctgtctgtcccacggtacctgggtgttggggtcttcctctccgccgaaggtcctcaagacgaaggtgtcattgacaaagatatgttgaggatcctctttcctgccagaggtcctcaagatgaagatgtcatctaa

SEQ ID NO: 22298 - DNA, 261 bp, Zea mays
  Peptide Sequence Number=SeqID_64077
atgggcataccgcatacctccggattcggacggctggctgctgcgcccgccgtcgtgtgctgccactgtgctgtgcaccatgtatcatggcactggcccgcgctggctgctacaaaggcctatttattagtggtcgctcggagaaccaattctgaaggtcaggcatttgaggaatcctatctcatacatgttcccctaattgtggcagtcttgggtgtagaggaagctgaaggtgctgatgtcaaggacgaaggcatttag

SEQ ID NO: 22299 - DNA, 117 bp, Zea mays
  Peptide Sequence Number=SeqID_64078
atggagcaagctatgagcgattgcgaagaaatgttttgtgaagagatcatgcaacatcaactgtcatggtttctagagcaggcacaacaacaaccttctgttttccctcaattttag

SEQ ID NO: 22300 - DNA, 231 bp, Zea mays
  Peptide Sequence Number=SeqID_64079
atggtgggttttgctgatcatgggcctcaaaactcgacggtggtggttctggagggaaccggtggaggcacgcggcgtgatcgcggagggtgtgtcaaggcgaaggaactccgtgtgaaggatgtggccgtcggatcgaaaaccaatgagttggtgcattttgcccccggtggagtggataggctctatgtaaataatggtagtttaggaagtgagaataaccctctataa

SEQ ID NO: 22301 - DNA, 813 bp, Zea mays
  Peptide Sequence Number=SeqID_64080
atggcggggaagtcgcgaccgcccaagcggatcctcgagtcctataccatcaagggttcggacagagtcatcaagcctggcgattgcgtgctaatgagggcatctgatgcttcaaagccaccttatgtggcaagagttgaggcaattgaagcagcaggatctcgaggcaccaatgtgagagtacgagtgcggtggtattatcgaccagaggagtccataggtggtcggcggccatttcatggttccaaggaggttttcctctctgaccactatgatgtacaaagtgctgacaccattgaggggaaatgcaatgtccacagcttccgtagctatacaaagcttgattctgtcaatgctgaggatttcttctgccgcttcgagtataaatcagctactggcagctttgtaccagatcgtatagcagtattgcttattggtactcgggttggacaaggattaataggagtaaaccatgtcaaaaaccaaaggaatgacttgttttgtgttgatagtgctaaaattataactttcatgagtttctttaagaatcccaacatagtcatagtcatagaaaatggggtcaaaggcataggtgacctgggaatgtcatctccatttcccaacctgggcctctcagccatttccgatgctgctggtgtgtcatcccatgatgcgctgccttcactgaggctcccatctcttattgcatcgtccactgtgctccttgctgccgctgcctcaccgctcactcatgctgctgcctcctcgcaattgggctgcggcgctgcgccgatgctcgctgctggtgtatga

SEQ ID NO: 22302 - DNA, 1287 bp, Zea mays
  Peptide Sequence Number=SeqID_64081
atgccgcggcgcgaggcggcgaggcttctccgccgcctgggcccgatcgctgtccagtcgccgaagcgaggcttttcaggcatgcctcataatcaatatgaatccacaaaccacgctgtgaattcttatagaagattccactggattcccagtgtacagcaccctctgtgtggacctacaagtagtgggggaatatatgaaggtcaacgcagtgctaacaaggcttgtgaagttcagaagcgcacatttggttctgctgcaacacagtttcagaggaatccagcctattcagtgctgaactctgatgacattgcttacttcaagagcatcttgggagaaaatggtgtagttcaggatgaagacagagttgcagttgcaaatgtagattggatgggtaaatacagaggtgcaagtcagctagtacttttaccaaaaactactactgaggtatctaagattctttcatattgcaacaccaaacgattggctgtggttccacaaggtggcaacacaggtcttgtaggtggaagtgtgcctgttttcgatgaggtgattgttggccttgcaggcatgaataaaattatttcctttgataacttgcttcttcaaatgcatccaagggctatggtaaatggaattcttacttgtgaagctggttgtgtgttggagaatttaagtaccttcgtggaaaatgaaggaggcctagttgaccttgatttgcttctcaggtttattatgccacttgacttgggagcgaaaggtagttgccacatcggtggaaacatttcaactaatgctggcggcctgcgttttatacgctatggttcacttcatggaaatgttcttggtcttgaagttgtcctggctgatgggactatccttgatatgcttactactttaaggaaagacaatactgggtatgatctgaagcacttatttataggaagtgaaggctcgctaggagtagtcaccaaaatatcagtacttacacctgcaaagctatcttcaaccaatgttgcatttctttcctgcaatgattacacaagctgccagaaattactactggcagctaggaggagcttgggtgagatcttgtctgcatttgaattcatggatcatcactgtattgatctggctatgcaacatttggaaggagttcaaaatcctttacctgcatcaccgtacaaattttacgttctagttgaaacaacaggaagtgatgaatcatctgacaagttgtaccacttttctctatttgaaactaatttggtgctaaatagcaactga

SEQ ID NO: 22303 - DNA, 363 bp, Zea mays
  Peptide Sequence Number=SeqID_64082
atggcggaggaaaaagtggggcggatcttcgtcggcgggctgtcgtggaacaccacggagcgcacgctcgagcgcacattcggtcagtacggcaaggtcatcgaggctcagtcttacaatttcattctaatagcagctgctgattcacagagactgcagtcagttcaatttctgcatgttaggaagttagcaaagttgcaggaaaagaaattcactaatcatttgagctcactggttgtagtggaaagggagacaggccgctctaggggatttggatttgtcacattttcagtacctcgggctgtggatgctgccattcggggaatgcatttcctcgtctggatggccgcaatatttctgtga

SEQ ID NO: 22304 - DNA, 510 bp, Zea mays
  Peptide Sequence Number=SeqID_64083
atggcgtcggcggcgaagacccttgcacgggttggatcatccctcttcggccgcattctcgcgtctccgtcctcgtccataccccgcgccgggctgccgctagccaggctgcagccacacgtcccgccgccggcaccggcgggggtggacgcttacgaggcggagaccatcgccaggctgagctcgctccccggcgagatatccttcccctgcggacttccctcgctccgcttcttcatcgacgacgtcgaccgttggcacgaagtagccgttgctccgctggcacaccagacagtccgcgtcaagttccctggtgcaccggacactgtccggtggtgcaccggacagtctggggtcgtacagtctgaactcttcaacttcgggtttctcaggcgccgctccgctataattcacgggaccgtccggtgtaccatcggagcaatggctatccagcgcaatggtcatatgcaaaagtgtgaacagtgcgcgcagaagtcagagcaggcgtaa

SEQ ID NO: 22305 - DNA, 312 bp, Zea mays
  Peptide Sequence Number=SeqID_64084
atgaagctgtggaaggagacttccaggagttccaagattacgacgagttctaggtgtgggttagcggcaacccccagtcggctgcctgtgaaggccgcagttatctacgtttcttttccgcactttgatttattaggatcttcggctttaacaaatagcagaggacaggtttcagaaaagtccagaaagcgggtattatcggtggtcgcattgaccaaggcagcgatggcctcggtcaatgttggcggtacatgtggtggattgggcgtgtcttcccgacaatgggacgttcccgcaccgtcatgtgcatga

SEQ ID NO: 22306 - DNA, 279 bp, Zea mays
  Peptide Sequence Number=SeqID_64085
atggttgtagcgtgtctgaccgtgattatctgctccctgctgagtggccctactcgccacagtggaagcatcctctgccacctccttgcactgagactgcctgattgctctgattggtggctgggacaggaagacagtgtgcctgattatcctgtctctggaactaactccttcctgattgactgttctgacgatacggctgctaatgctgagggtactacctctggaactgctgctgatgtgaacgctggttctgctgctgagggtgactctgcttga

SEQ ID NO: 22307 - DNA, 597 bp, Zea mays
  Peptide Sequence Number=SeqID_64086
atgatgagcaggggtggtgggatatcttccgccgcacgcaaacagtctgcttgtgctagtgttcaacgatccgtgaagcaactccaccgttgtcgccatcatcgtctccacacgatcctcctggcttcctcagccactatatgggacgagccttgggccagcatagctcagcagcacgacccggcactacagcccggcacgacccagataagggtcacagtgtcgtgcttgggctcattctcaggcccacgtgccggcctggtatggcccgaaaatactggcggcgatatttttgcgagggcgagaaccgatcgggaagttgatgatcatatgctcgccgcgctgggctgcatggctgttatcgtcttccagagtatctggcgcaccagcaacatacaccaccggttcatcgtgcacgacaggcgcatcttccgccattgcttcgtcgatcgacattaccggcttaagcacttcatattcaacgtcgatgagcttcagtgcttcgagcgcaatttcttcactttctgcgacgaccgcagcaacacgatcgccgacgtgacgcattttcttgccgaacatacggcggtcaagcggtga

SEQ ID NO: 22308 - DNA, 1116 bp, Zea mays
  Peptide Sequence Number=SeqID_64087
atggccggggttgaggaagaaggcgaggtggcggccctgcgggaggccctgaggcagcaggtgcaggccgtggaggagctgcgggcggagctggaggaggagcggcaggcggcggcgtcaggagccgatgaggcactggctatgatcctgcgtctgcaggcggagaaggcggcggagcgtatggaggcggagcagtttccaccgggtggccaaggagcggatccagagatggagatcagctcgctcaaccgcaggctgctcgccgtccacgccaccggggacgatcccctttcgccggcagtcgatctcccctggctgaggaagctggccaagagcggcgtggcgtccaggaggaacgcgtccctcccggcggcacacctggaggagctctgctcggagctcgacgtcgtcgtcgacacggacgccgacaagaagagggtgggcgaccggaggccagcaaggacggtctcggacatcggcgaggtgatcagcagggagaaggagtgggcgacgagacccaatcagacggcgccaacgcccaggctgtaccggtcggcctcacactcccacggcctcccccggcgcgcgacgtgctgctccgcgcagtgtggcgtgcgctccgcaggccgggcctcgccagagatcatcgccgaggaagacgagaaatcgtgcaagagcaacgccgcactggaagccgacatcgagcagatcaaggccaccgtgctgtctctccacaccgacctcacaaagctaagagaatccaccttgtccatggcagacgcacattcccagatactagccgagatccacgcaaagctcgacggcgtcacgccgcggcgacagacgaacttcgaaccaaggtctgagctgctgctgaagaaggccaccagaggaggcagcagcaacagttcttcgtcttccaaggagcagagctaccaataccagtggcaggctgacgtgctgatgaaccatttcattgaggtacgtggtctcaccttctctgctactaccgttgttagacctctgatgaaggccgctgcatccatgtcactgtttaggtgcctcttgattttgggcttggccgtcgcgattagaaaagttttgattaactcctaa

SEQ ID NO: 22309 - DNA, 165 bp, Zea mays
  Peptide Sequence Number=SeqID_64088
atggcgcgctcgactgctgtgaactccgacgaagaaaggctggcagtggtcgtggagggagaggccgagggcgcactgatacttataggtgcgagcgtaggagcatcattggggtttttgtcactcccttcccttgatgaccccgaggagttagcgcaaatctaa

SEQ ID NO: 22310 - DNA, 153 bp, Zea mays
  Peptide Sequence Number=SeqID_64089
atggcgagcaacagggtgggcactggaatgatggaggggctggcacggggccagaggatgttcaaggaaattgggcaccacttgatatttggaaataaaggttttgagttttggaaaacagggaacacatttgatcttgaaaaagggttctga

SEQ ID NO: 22311 - DNA, 267 bp, Zea mays
  Peptide Sequence Number=SeqID_64090
atgtggcgcacgtcatcgaatcttaagatgggttccatcgcgaccttaggcgaacctccgcctcatctgagctcagttcgaccctcgatatctgtgatagaagacgtcctcaacgccatcaaatacagtggagctaatgcatcccttaagaagctttgtcccatactaagcactatgtcaaccgctacggtatgggtagcccctcgccatgggggctcagagtttgaaagtactaagaacatgctaagaaatatgataaatcagtaa

SEQ ID NO: 22312 - DNA, 138 bp, Zea mays
  Peptide Sequence Number=SeqID_64091
atggccactgagggtgacccctatttcgtccttgacggcgtgaaggagaagggacttatcgtgaagtccgcggccaagtcgattttcattcgtcgcgagcgcgacatctgggcacgctgcagcgccatcaggccatga

SEQ ID NO: 22313 - DNA, 231 bp, Zea mays
  Peptide Sequence Number=SeqID_64092
atggctagggacggacagtggcagacggtccagcgaacggtggcggacggtcctacgaggttggacaacgcgggtgcggctgggtcggcggtgctccggcgaacaacgagacgcagctgggacggggcagcggataacagcggatggttcgggcggcgttcggcgcgtcctgggcactgcgcgggcgtgactgtggcagacagcggcatcgcgaggggaagagagaggtga

SEQ ID NO: 22314 - DNA, 327 bp, Zea mays
  Peptide Sequence Number=SeqID_64093
atgctcgagacctcggtacacctcactggagctcatcgatcctccttcaacgtggctagtgagactctaggtggtttgaggttgattaacttaggggaaataggagagcacctagaagaagaatttgaagtggaaggggagcctgttcctagatctgaaacttctccaaccgaagttgtctctgaaggtcctccagaaggtgccctagtagggtttgttgctaactgcaacatcctagtagaagagcctaactctcctcctcatgaaggcaagctccagtgcatttgccccttccttattattaaaatgctttatcaccttatatga

SEQ ID NO: 22315 - DNA, 189 bp, Zea mays
  Peptide Sequence Number=SeqID_64094
atggaggaaagggcggaggggcttaccggtggcgagattgctccggcaaggtggtcgagtgacataaaggcagtacacggaaagaattggaaaatggcgcagagacttactcggtccatgttcgccggtgagcggaagaagtccggcgagggggatttggggtctccggtgaagctctgccggttctaa

SEQ ID NO: 22316 - DNA, 276 bp, Zea mays
  Peptide Sequence Number=SeqID_64095
atggcaacacgagtgcttcaagtggtaggttttgttagagtttattggacttggcccatttacttcacaataaaacccaaaacaaatcttaaagaccctctcatacatgatgggagtgagagtgatgaagataaagagtgcaagagagctcatggagctatcgaatataaatacggtgcatccaatgttggatatgagttgtatgtcattgagcattgttatgactataagatgattggcaactactctaaggttgaccaatcttatgagatataa

SEQ ID NO: 22317 - DNA, 2733 bp, Zea mays
  Peptide Sequence Number=SeqID_64096
atggcgcgctggctgcagtccgcggggcttcagcacctcgcaacgtcctccgccgccggcgctggcggcgcggactaccgtggtgggatgcctgggtttgggggcgctggcgccggaagcatgctgtcgagcctgctcatgcagggctatgggccagaatcaattgaagaaaagcagaggctttatacgcttctgagaggtctaaattttagcggagagtctgtacccacatcaatctctgagccttacacaccaacagctcagagctttggtggtgggaaccctgtagaggggttttattcgcctgaacttagaggggatcttggtgctggacttctagaccttcatgctatggatgatactgggcttctgtctgaggatgtagcatcggaaccatttgagccatcaccttttatgccgaaggatattgatgatgatgatgaggatgtgatagcagggagtcagcaagcctcagtagataattatggtgtggtgaccagtgaaaaagagaccactgctagagaaaataatgtagcaaagattaaagtagtggtaaggaaaagacctttgaacagaaaggagctatctcgaaaggaagaagacatcataactgtggaggattcatcatttttgacagtttatgagcctaagctgaagaggggaggtagtggcaggaccaccgaggtagctcttatcctccgcaagttggcgcgcgagggtgtcggcggcggtgcactcttgctcccaggcaagggcagctgcttgctctgctttctggcagcagctgtcgtggccttggtagcgtcgagggtggatggagccacaaccacgtcatgggaaggaggggcggtggcagtgccaccaaacgccaaagctgaagttggcggcgcgcctaggtcaacgggtgacaacattgcagcgccggcggcgccaccggagaggagggtggcgaggcgacagatgagatgcggatggcgctgcaaccccgatgagggtttgggtgccttcggcgacgccagtccacatgcagctctggtgagggaggacggggaaagaggattgaaagaggccggcgacgtgcccatcctggcgggggtgggctggcggcagcgggaggtgggtcaacgatttctggaggcggtgcatgatgagggcgcagcaatggatggccaccgccgctggtggccaggagaggtggatctgacagcctatgtggagaagcatgaattttgttttgatgctgttttggacgaacatgtttccaatgatgaggtttaccgtgaaacagttgagcccataattccaattatatttcagagaacgaaagcaacatgttttgcttatggccaaacaggtagtggcaagacgtacacaatgcaacctttgcctctgagagctgcacaagacatggttcgtctattgcaccaacctgtctatcggaatcagaattttaagttgtggcttagctattttgaaatatatggtgggaaactatttgatcttctatctgacagaaggcaactactgatgagggaagatggcaagaaacaagtttgcattgttggtctacaggaatttgaggtgtctgatgtacagatcgtaaaggaatatattgaaagaggaaatgcagctagaagcacagggtcaacaggggccaatgaggaatcatcaaggtcacatgctattctacaactggctgtgaagaagcatatcattgtaaaagataccaggagacagagagatcgtgatgctaatgaagctaaaaatacaaaggctgtggggaaaatatcatttattgaccttgctggaagtgagcgtggtgctgatactaccgataatgatagacaaacaaggattgagggagcagagataaataaaagtctgttagctctcaaggaatgcattcgagcacttgataatgatcagatacacattcctttcagaggaagcaagcttactgaggtccttcgtgactcatttgttggttcatgtgaacacacactaaatacattgagatacgctgatagggtcaaaagtctttccaagggcggaaatacaagaaaagagcagtccacaggaccaactaccacttctagccgggattctttgtcagctttatcatattcattgcctgctgaagctgaagaaattcctaatcaagttcaagagaagagaccagtcgatacttataggaagggcactgaaaaatttttatctccaacccttctgtggagtctgaccgaaattcctttagtacgattccaaattattccaatagagggagagaagaaaatggtgcagcatctggaggaggagaaagtcacaaaagtctcacctcctcggagaaaggcttatagagaagacaaatctgataggcagagcaactatatgaaaaaggataatggtcctgagacaagtcgggttgggtataagatgcagcaggcaaagcagctgcaacagcaacaaagaccagcatctgcttcagcctcatcaaggcaatctgaaaaggaaagttcttgtgatgatgtagaaattgatgcaattcttgaggaagaggaggccctcattgcagttcacaggaaggagatcgagaatactatggagattgtgcgggaatggagcctggccgctccaaagaggctagccagggcctggctcccaagatacagaaatgaaacccgtttctccacaacctggatcgtggcgagatgctgcatcccgcagtgcaggtga

SEQ ID NO: 22318 - DNA, 246 bp, Zea mays
  Peptide Sequence Number=SeqID_64097
atggcatctccgagtggacgtcgaactgtgcacatcctgcaacaggccatggccctcgctcgagcatacgagcaccgccagcaaggctcggacagtcgcgtgcctccgccctctacacgctacgccatcctcgacgccggcatcaccagccgggccagcggctgctgcctccaccctggcagcaccgacattcaagcgcctcaccccagcagagatgacggagcgacgccgccagtggctgtgtga

SEQ ID NO: 22319 - DNA, 972 bp, Zea mays
  Peptide Sequence Number=SeqID_64098
atggggtccggcggcgaggggtcgtcccgggacagcgggcggcgggaggagtggatggccgacctgtcgcagctcttcatcggcaacaagttcgcgtcgggcgccaacagccgcatctaccgcggcatctacaagcagcgcgccgtggccgtgaagatggtgcgcatcccggagcgcgacgaggcccggcgcgccgagctcgaggagcagttcaactccgaggtcgccttcctctcccgcctctaccaccccaacattgtgcagttcatcgcggcgtgcaagaagccgccggtgtactgcatcatcacggagtacatgtcccaggggacgctgcggatgtacctgaacaagaaggacccctactcgctgtcggcggagacgatcctgaagctggcgctggacatctcgcgcggcatggagtacctgcacgcgcagggcgtgatccaccgggacctcaagtcccagaacctgctgctcaacgacgagatgcgcgtcaaggtggccgacttcggcacctcctgcctggagaccaagtgccaggccaccaagggcaacaagggcacctaccggtggatggcgccggagatgaccaaggagaagccctacacgcgcaaggtggacgtgtacagcttcggcatcgtgctctgggagctcaccacctgcctcctcccgttccagggcatgacgccggtgcaggccgcgtacgccgcgtcggagaagaacctgcgcccgccgctgtcgagctcgtgcccgccggtgctcaacaacctgatcaagaagtgctggtcggcgaacccggcgcggcggccggagttcagctacattgtgtcggtgctggagaagtacgaccactgcgtgaaggaggggatgccggtgacggcgcaccaggagctcaggctctggcgctccttcgccaagatcttcaggacgggctgcatcaccaacaacctgtccataccggtgcatgcgtga

SEQ ID NO: 22320 - DNA, 681 bp, Zea mays
  Peptide Sequence Number=SeqID_64099
atgggcgcggaggcggcggagcgcgacagaatcaggggcccgtggagccccgaggaggacgaggcgctgcggcggctggtggagcggcacggcgcgcgcaactggacggcgatcgggcgcggcgtcccgggccggtcgggcaagtcgtgccgcctgcggtggtgcaaccagctgtcgccaagggtggcgcgccgccccttcacggccgacgaggacgcggccatcgcccgcgcccacgcccgcctcggcaaccgctgggccgccatcgcgcgcctgctccccggccgcaccgacaacgccgtcaagaaccactggaactgctccctcaagcgcaagctcggcgccgccgcccgccgcgtccggagggaggacccgctcaccgccctcagcctctcgcttcccggcacggaccagcggtttcaccaccacagcgccgccgccgacagccacttccaggagctcccgccgtcgccctcctcacccgcgccctcggcctacccgttcagccccgagttcgcggcggcgatgcagcagctgatccgcaccgaggtgcagcggtacatggcgagcgcgggcctgcgcgccggctgcggcgccgttggcgcgaccgacctctgcatgccgcagctggtggacggcgtcatgcgcgctgccgccgaacaggtcggccggatgcagtag

SEQ ID NO: 22321 - DNA, 576 bp, Zea mays
  Peptide Sequence Number=SeqID_64100
atgcgtaacggccaacggacggatttgaatcggacggtgaaaaggattcgaagcgagcccggtaatctaacggcgtctgctctgctcctcgacagactgggctttttccagttgttcaacaccgcaagcggcggtgacgacgtgacccggtgggcccacccgccggtcgagatgaacaagcaggagggacgctgctggagtgctggtgttcggtgttccgtgttgccctcatccgtccgtccacgtacccggtaccagaaccgcccacagccggccccacgcccccacgctccacagaacggtcggtccatcatccatccccccctgcgggccgacgcgcaggtgcacgcacgccagttcatcgcgcccgccaccccacgtggggtaggccctgcccccgactgtgtaccgtacaggcgtgtaccacccggtactacgggtttgcggtggtcgtgggcgatggacgcccccacgtctgcccgtcaccggctcaccgcccactgcgcccctgctgctgcttgcccgcggaatcgtggtacggtacgggaccctgaccccacgcctgcgtggagctga

SEQ ID NO: 22322 - DNA, 312 bp, Zea mays
  Peptide Sequence Number=SeqID_64101
atggagccctggatcggcgacgtgggcctggaccggctggtgtcgggtgaggcggcgccgcactcccgcgcgggcgcgtcggcgcggctgttcgggagcaagcggtcgatgcactcgacgcgtagcttgcagccaccggcatgtgtctccgggggcggccgtgaccaggctgagtgccgccgccgccgcatcgtcggtgtcctgcgcggccgacgggaggttgatgctttctctttcaacttccaaacggtgccgctgagtgaagttgctccactgcagcggaagagagatgagcgcactaggatctactga

SEQ ID NO: 22323 - DNA, 360 bp, Zea mays
  Peptide Sequence Number=SeqID_64102
atgccccagcagcaagcgtcccccacgcccgcgacgctggtgacggtcgatggcgacggcgagctcaagatggagacgctgctcaaggcgtcggcctacatcctcggcgccacgagttcgagcatgtacaaggccgtgctcgccgacggcaccgcgctggcggtccggcgcatcggcgacagcggcggcaccgaaaagctcaaggacttcgaggtgcaggtgcgcgccatcgcccggttccgccaccccaacatcctccggctgcgcggcttctactggggcgtcgacgagaagctcctcatccacgactacgcccccaatggcagctttgccaacatcgcattcagcaacttttactag

SEQ ID NO: 22324 - DNA, 3258 bp, Zea mays
  Peptide Sequence Number=SeqID_64103
atggcggagatcgccgaacgggccgtcgcgggcgaggtgccggaggagccgcggccgccgcacggggaggaggacgacgaaggggaggaggagggggacgtgtgccggatctgccgtaaccatggcgacgaggatcacccactgcggtacccgtgcgcctgcagcggcagcatcaagttcgtgcaccaggactgcctcctccagtggctcgaccatagcaactcgcgccagtgcgaggtctgtaaacatgcattctccttctcacccgtgtacgctgataatgctccgacaagacttcctttccaggaactgatggttggtgttggaatgaaagcatgccatgtgtttcagttcatccttcggcttgcctttgttctctcagtttggctcatgattatcccattcataacctattggatatggcggttaacatttgtgagaagtctcagtgaagctcaaaggctgttcctcagtcacatcagcgctcagttgatccttagtgattgccttcatgggttccttctctcagctatcattgtccttatatttcttggagccacctcattacgagactacataaggcatttgcgtgaacttggtggacacgatgctgagagggatgatggtgggcgtgaaaggcatggtgctcgggctgttaggaggctagctggtcctaataatagggttcctgcagatggaaatgttgatgaattagcagaagcccaaggaatcggtgctggtgaacttctgaggagaaatgctgaaaatgttgctgctcgattagaacgacttgaggctcaggttgagcagatgcttgatggtctagatgatgcagatggtgcagaggacgttccttttgatgaacttgttggtatgcaaggccctgtcttccacttggttgagaacgcaataacagttttggccagcaatgctatattcctcattgttgtgatctttgttccattctcattgggaaggattatcctgtactatctatcctggtttttctcttcggcttctactcctatgctggcaaaagtgatgcccttcacagaaacagctatttctatagctaatgatacattaaagagcgcacttaatgttgtgaagaatttttcttctgacagtaataatgaaggtgttatcgggcatgtgattgaggttgttactcaatccttgaagataaatgccactggacttagtgtaattcaaggcactgggaagaacagtctgatgaaaggaacaacaattgcctcatcttatctttcagatctgacaactcttgctgttggatacatgttcatcttctgtcttgtgtttttgtatattggatcactggctttacttcgatatgccaggggagaacgttttaccattggaagactctacggtatagctactatattagaggccatcccttctctatgcagacagttctttgctggaatgaagcaccttatgactatggtcaaagttgcattccttctggtcattgagcttggtgtatttcctcttatgtgtggttggtggcttgatgtttgcactctaaagatgctgggcacaacaattgcgcagagagttgaattctttacaatgtcacccttggcgagctcatctatccattggctagttggtattgtgtatatgcttcaaataagcatatttgtgagccttcttcgaggggtgctgcgcaatggagttctttattttctgcgggaccctgctgatccaaattacaatccatttagggatttgattgatgaccctgtgcataaacatgcccgacgagttcttttgtcagttgcagtgtatggaagtttgattgtgatgttagtcttcttacctgtaaaagtggccatgagagtagctccttcaatgtttcctctggacataaccatatttgacccattcactgagattccagttgatgttcttctgttccaaatatgcatcccattcgctattgaacatttcaagcctcgtgcaaccattaaagctcttttacatcattggttttctgtggttggttggggccttggcttaaccgatttcttactgccaaaatctgaagaaaacggtgggcaggaaaatttgaatgcaagggcagaaagaagagacagaggacatggtgggagggaaatggtcgccccacaggttgaacaactcatgatacaacatgttgccgcagaagataatggcaggggggattcaaatgaagccaatgatgtaactgaggactctgatgtagatgaccagggagactctgagtatggctttgtgcttcggatcgtgctcttgcttgtactggcatggatgacattactaatattcaatgctggaatgatagtttttcctatctcacttggccgtctggtttttgaggctgttccccgcctgccaatcacacatggcatcaagtgcaatgatctgttctcctttagcattgggtgctatattctctggagtgtggcagctgggaccagatatgcgattgattacatcacatcacgacagctggggtttttggtacaacagatctgcaagtggtgctcaattgttttgaagagctctgttctcttgtcgatatggatctttgttattcctgtgctgattggactcctttttgagctgctggtcatcgtacccatgagggtgcctattgatgagagccctgtcttcctattgtatcaggattgggctctggggttaatattcttgaaaatatggactagactggttatgttggatcagatggcacctttggttgatgaaagctggaggtcaaagtttgagagagttagagacgatggcttctcccgtttaaagggtctgtgggtcctccatgaaattataatgccgatcgtgaccaagctccttactgctctctgtgtcccatacgtccttgcaaggggcatcttcccgttgctgggttacccactcatcgtgaactcagcggtgtaccggtttgcctggcttggaagcctgatcttcagcgccctcttcttttggggcaagagatttcatgtctggttcaccaacctccacaactctatcagggatgaccgctatctgattgggcggaggctgcacaactttggcgaggactcacactcacctgagcggagtgaatctggagcaagtatagggtcagatgatcaggacagagatattgtactgcgagatcaggaagaggaagtggggttgaggatgaggcgcaataatatgcatgcaaaccaacaacctaggtttgctttataa

SEQ ID NO: 22325 - DNA, 1218 bp, Zea mays
  Peptide Sequence Number=SeqID_64104
atggctcagaaggatctctatctaccgttcctggctctttccatcattgcctgctgcttgatgaacctgcaaactgttctcagctcaagcagcaggatgcggaattctacagacgatattagtgatgacaaatgccccccacaacctcatcccttaggtatgtgcaggtcccgagtagcagcttacggctatccatgtgaggaataccatgtgacaacggaggatggctacatccttagcttaaagaggatcccctatggtctctctggtgccaccgagatgacgaggacaccagtactactgttccatgggctactggtggatggtttctgctgggtactgagcacaccaaaacaatcactgggcttcatcttggctgatggtgggtttgatgtttggatcgccaactctcgcggaacagagtccagccgcaggcacaccaccctctccccacaagacccggttacataccttcgcatctctagcttatatagcttgaaatttggtcaagaaaccgccttttgggactggacatgggaccagcttgctgactatgatcttcctgctgtgcttgagttcgtctataacagaacaggaggcatgaaagtccactacgttggtcactccctggggaccttgattattcttgcggccttctcggagaacaggttaacagacattgtgcgatcagccgcgttgctctgcccaatcgcttatctcaacagcatggaatcgaggctcatcctgctcgccactcgcatcttcctcgcagaaacgattcacatgctaggttatcacgagttcaaccctgttgggccagtggcaaaggaagtgttgggaaaagtctgcgtcgacccagaggtcgattgctatgatttgttttcagctgtagcagtggtcaggaaagagacgatcaggaagtacgactacggaagcgagaaggagaacacgaagcgctacaaccagacgcggcccccaacctacaacctctcgtccatcccaagccacgtccccctcttcctcacccacggcggccaggacttcctcggcgacgtcgccgacaccaggcacctcctgcggacgctgctcagccagcacgacagcgacgacatcgaggtgctgtacatgcctgactacgcgcacggcgacttcatcatgggctacaacgccccgcagctcatatacaagcccatggtggagtttttcaagcgccactga

SEQ ID NO: 22326 - DNA, 1251 bp, Zea mays
  Peptide Sequence Number=SeqID_64105
atgaagacgcacgacacctcgttttgcgtcgcggccgctgagcgccacggtgcgcgtgctgacgaacaacggccgggacatcatcttcgcgcccctacggggagcactgggcgccagctggcggaaggtggccatcacggagctcctgagcgcgcgccggggtgctctcctttccgcgccatccgcgaggaggaggtcgcggccacgctgcgcgcgtgcgccgccgccgcggcggagtcgccgccgcgccccgtggagatgcgcgcgcggctgtccgcgctcgtggccgacgccacggtgcgcgccgtgatgggcgaccggtgcagggaccgcgacgtgttcctgcgggagctcgaccgctccatcgggctgtcggcggggttcaacccggccgacctgtggccgtcctcccgcctcgtcggcctgctgagcggcgccgtgcggcgcgccgaggagtgccgggacacggtgttcgggatcctcgacggcatcatcaaggagcacctgcagaggatggacagcgccggcgccggcgccggcgccggcgaggctgcaggcgaggaccttctcgacgtgctgctcaagatacacaaggatggcagcctccaaatcccgctcgacatggacgtgcttaaagccgtcatctttgacatcttcggcgccggcagcgagacgtcggcgaccacgctggagtgggccatggcggagctgatccggaaccccaaggcgatgcagcgggcgacggccgaggtgcgcgaggccttcggcgcgcgcggcgcggtggccgagcacgagctgggcgagctgcggtacctgcacctcgtgatccgggagacgttccggctgcacccgccgctgccgctgctgctcccgcggcagtcccaggagccgcgccgcgtgctgggctacgacgtgcccgcgggcaccaccgtgctagtgaacgtctgggcgctgggccgcgacggcagcggtttcgaggacgaggccagcgaggtggagttcaagggcgccgacttccatctcctgccgttcggcgccggccggaggatgtgcccgggcatggcgttcgggctcgccaacgtcgagctcgcgctcgccagcctgctgttccacttcgactgggaggcgcccggcgtgtctgaccccgccgagttcgacatggccgaggcgtttggcatcaccgcgagacggaaggccgacctcctcctccgccccatcctccgcgtgcgcctccccgttcccggtgtctaa

SEQ ID NO: 22327 - DNA, 225 bp, Zea mays
  Peptide Sequence Number=SeqID_64106
atggtgcatgctgccgatgattggcagctgccacggccccggcggaagccgcaggccgtggccgtccaccgggccgcgccggcgcttcgcgagcacgacaacgagcagcgacaccagcgccagtccgagctacaatttataaagacaaaacaacatagaaacagtagaaaccgctgtgagcctgtgactgggaaggccggccttgtcctggaatcaaccagataa

SEQ ID NO: 22328 - DNA, 1020 bp, Zea mays
  Peptide Sequence Number=SeqID_64107
atggaagccgcaggcggcggagccgaggatgagcaggtgatgagcgaggtgcacttgggctgcccgccgcacttctctggcctcctcgtctcccatttcagcttctcctcacggcccctagggccatatggacacaaaggaggcggcggcggcggcggcgggagcgagctagtcgcagcaactagcggttctgctagaggtgaccgccatctgttcactattcagcatggtgttaccagctcgcttaagagcgttgggcttcaggtttggaaagcggccttactattatctgactttattctgcacgaaagcttttcatcgccaaactttgatggtgttactgccattgagataggtgctggaacaggtttggtaggtttagcactagctcgagttgctagaaggatttttgttacagatagaggcactgatatccttgataattgcttggctaatctccatatcaactctggtatgctaaggttcgatgaagctaaagtctgtgtacgagaactggactggaaaatggcatggcctccacctgtgggtacatatgacccttctgatccaagtcggtatttatggtctgcaagtgaagttgaggaggctgagaaagcaacagtcctgtttgctgcagatgttatttacagtgatgatctcacaaatttgttcttcaacacggtgaagaaattgatgtcggtcggtgctaagaaggtgctatacttggccctggagaagagatacaacttcagtgtagacgaactagatgtcgtggccaatggttacacgcacttccgaagtttcttcacagcccaagatggtaaactgtttgcaaagagcacggtgatccgagcaacagatctggaccaggttttgttggaaaagcagatagaccctgcagagattcctcagtacatcagagagtatgagaggggcaaggatttagagatgtggatgatcatgtacagtccggaggagaaacagcacagtaactctacaaaaaccgtcttttccttctag

SEQ ID NO: 22329 - DNA, 285 bp, Zea mays
  Peptide Sequence Number=SeqID_64108
atgaaggggagatacggggcgggggcgtacctggaagggcgaggagcttgggggcgcacacgtacctggaagggcgtcgatggaagggcgatgagcttgggcgaggatcgcgaggcccttcggagctcaggagatgcgaaagcgtgggtagtccgtcgtcgatggaagggcgcggtgggggaggatttgggggcgagcgaggatttcggcgtcggctgtggatgcgcggatggcggctacgccctggcgccgagggagaggtgttcgggagcggagtgcgcgtag

SEQ ID NO: 22330 - DNA, 273 bp, Zea mays
  Peptide Sequence Number=SeqID_64109
atgccgcctcttcctgttcttaccttcttttccctgaagagctgcggtgtgaggagatacaacgatggcgcaacatcaacaagcgatggaggatccatgaaccatcccacctccttcatctcgaccaccagcgatgactggtctcgacctctacttggcgccattccttccacgaccatgacaatagtggagctcaagcagaggcattgtgcttggctcctcggcggcggcgacgcctccaaatctgagcgggtcgttggcggcggcgactag

SEQ ID NO: 22331 - DNA, 327 bp, Zea mays
  Peptide Sequence Number=SeqID_64110
atgtcgtccgatctcattggatggctcagattagatatcaaataccctttcgctcgaattcgatcggaaccattagatgtagatcgtgcggatggcgatctatgggcgttattttggatctggagcctcgattttgaatccagtggtcataggagcatacctgttgggattggcacgggtgtaatctcagccgtaggaacaagatcgtgcggccctggtcgaagcataccccttcggccagggatttttgttaaagagaccccaaaaaatttgttaaccaacccacggtctagtggcactgtcgtctgtgtctcgggaaacttataa

SEQ ID NO: 22332 - DNA, 222 bp, Zea mays
  Peptide Sequence Number=SeqID_64111
atggcgaggttgtggtggttgactggggtcggggtgagggataagccttcatggcgaggtcactcgtgtgtcatgggtgataaccaatggagccgtggtgtagtgattgcgaggaaccgttcgcttggagccttggatcatcaacgtcgagatctccactcactcaagttattctatcaagtggtatcagagctagtgcccattttaagaaggtgggaatga

SEQ ID NO: 22333 - DNA, 426 bp, Zea mays
  Peptide Sequence Number=SeqID_64112
atggacaagggacgtctcctacccaacggcgcccagacacagatgagcaccccaacgaatacggcggcgaccctccggagccatcccctgatggcgcaccagagcactgtttttctatccaagaggcagaataggacgagaggagaagggagaacatcatgggggcaacttactggagatagtagcctacagagtgctggccgcggtgacaggcagaagtgcggcagtgcgatgacgacgatgaacaattcagttggctccgaccgccgaactcgcccaggagagacactatcccaagcggaatacccctgcgttgaacccgacacccaccggcggaccggagacgcaaaggaggaaccccccggcgttgagatggtcaaccgaaaaacgcccgcggcagtggtgactgcggtcgagccgtgttga

SEQ ID NO: 22334 - DNA, 216 bp, Zea mays
  Peptide Sequence Number=SeqID_64113
atgtggctcgcccctcttcggctctccctcggtccctccccaatccggaaatccctaaccctaatcacgtcatcgtcagttgtcggctcgtcgcgtgtcgtcgtgcactcgactctcgtctccgactccaggctccggcttggcaggtcgccggccgactacgtcgtggtcgtgctagtgccaccagggccattgagggtttctcacgaggtgtga

SEQ ID NO: 22335 - DNA, 2073 bp, Zea mays
  Peptide Sequence Number=SeqID_64114
atgtcgtacgaccagtcggctttccaggtcgactacatgggcgtcggcgccggcgccggcgtcagcgcgtcccggcggcggttcatgccttcggagtcgctggcccgcggcgtcatcacgcacggctcggcgcagctgcgcaccatcgggcggtcgctccgggccggcgccaccatggcggccgtgttccaggaggacctcaagaacacctcccggcgcatcttcgacccgcaggacccggtgctggtgcgcctcaaccgcgccttcttcatctcctgcatcgtggccatcgccgtggaccccatgttcttctacctgcccatggtcaccgacgagggcaacctgtgcgtgggcatcgaccgctggctcgccatctccaccaccgtcgtgcgctgcgtggtggacctcttcttcctgggccgcatcgcgctgcagttccgcaccgcctacatcaagccgtcctccagggtgttcgggcgcggcgagctcgtgatcgacaccgcgctcatcgcccgccgctacatgcgccgcttcttctccgcggacctcatgtccgtgctcccgctgccccaggtggtcatctggaagttcctgcaccggtccaagggcaccgccgtgctggacaccaagaacagcctgctcttcatcgtcttcatccagtacgtcccgcgcgtggtgcgcatctaccccatctcctcggagctcaagcgcaccagcggcgtcttcgccgagaccgcctacgccggcgccgcctactacctcctctggtacatgctggccagccacatcgtcggcgccttctggtacctgctgtccatcgagcggatctacatgtactgcggcaacgaccggcagctggggttcctggagtggcgcaccatcacccggcaggtgatcaacgagacgtgcgagcccaagcgggacggcagcatccccttcaactacggcatatactcgccggccgtcgtgtcggacgtgctcaagtccaaggacaccacctccaagctgctcttctgcctctggtgggggctggccaacctgagcaccctcgggcaggggctcaagaccagcatctacaccggggaggcgctcttctccatcgcgctcgccatcttcggcctcatcctcatggccatgctcatcggcaacatccagacctatctccagtccctcaccgtgcgcctggaggagatgcgcgtgaagcagcgcgactcggagcagtggatgcaccaccggctgctgccgccggagctgcgcgagcgcgtccgccgctacgaccagtacaagtggctcaacacccacggcgtcgacgaggaggcgctggtgcaaaacctgcccaaggacctccgccgcgacatcaagcgccacctctgcctcggcctcgtccgccgggtgccgctcttcgccaacatggacgagcgcctcctggacgccatctgcgagcgcctcaagcccagcctgtgcacggagcacacctacatcacccgggagggcgaccccgtcgaccagatggtcttcatcatccgcggcagcctcgagagcatcaccaccgacggcggccgcacggggttctacaaccgcagcctgctcgaggagggcgacttctgcggggaggagctgctcacgtgggcgctcgaccccaaggccggcgcctgcctgccgtcgtccacgcgcaccgtcatggcgctctcggaggtggaggccttcgcgctgcacgccgaggagctcaagttcgtggcggggcagttccgccggatgcacagcaaggcggtgcagcacacgttccggttctactcccagcagtggcgcacgtgggcagccacctacatccaggcggcgtggcggcggcacctcaagcgcagagcggccgagctgcggcgcagggaggacgaggagctggaggaggacgaaggcaagtccaacagaatcaggaccaccatactggtgtcgcggttcgcagccaacgctatgcgcggcgtgcaccggcagcgctccaggcgggcagtggccgtgtccgagctgctgatgcccatgcccaagccgcgtgagcccgacttcggcgacgactactaa

SEQ ID NO: 22336 - DNA, 918 bp, Zea mays
  Peptide Sequence Number=SeqID_64115
atggttcaggtgattctcgatctcctcacgtcccggtcttcaccgccggcggccacggggcgtgacatttgggcgggcaggtggttggagacagaaaatcagaaacgaaagacatgttctcgccgtcttcctcatggaggcatggttcagcgtttccgctttggtgaccagggtttcgggcgtgatttttttctctctcctctaatgactctcggcgtcggcatcgcgtcatcaacgttcgtcgatctccagcgggcgttcaacttggtggtattggcggtggtggttggaattccggtggcgtgtggcggcagtagacttgttgcatctcagctgttcgacacaaggcgcttctggttttcttcaatccagtttgttgcacccatcgcgactctggcatgggcgacagacagacgtatggctgctactgcgatggctgaagtagttgtccagaaacatggttctgatccacatgtgctattgcagcagcatgaccaggcattgttcaaggtacccatgacatccatgagtgatgcccatggagtgtttgatgcaatttctagccatgttctatgggatgatgagttaccgcaaggtcttcagttacataactgtttattgaaactagtagctcaaggagagtgtatggttggcgagacagacatgaatgctgagctatgtgatgtggtgagctgggatgaggaagtggctactttgagcaaatgcatgcaatctcggccactcaccgggggtgaagagtacttagatagcaatgagttgattctagatacaaatcaaatcgctgtccatgttctaaatctcatccatgtgcatgatgtgccagttttctgtgagtgtgatggcttcaataattcacatggcttacgggagcagctagttgaagagatggatgactag

SEQ ID NO: 22337 - DNA, 309 bp, Zea mays
  Peptide Sequence Number=SeqID_64116
atgtcgtctttttcctcatctgctgcaaatgcgccgctggccgattcatcgtccaaagatacctttagcgattttgtggcggtggagttacagttaggccacacggtggagtttggtgtttcgaggatttcctcgccccaaccaccaatatggccgttggtgaaggcttctgtcgcatggcgcaccggactgtccggtgtgccatcagacactgtccagtgcgccagccacgtcaccaggccattgggttccgaccattggagctctgacaagtggggccaccggacagtccggtggtgcaccggatag

SEQ ID NO: 22338 - DNA, 330 bp, Zea mays
  Peptide Sequence Number=SeqID_64117
atggacaagaagctgagcgagcacttctctgcctacgacaagctcggcttcatgctgatcgcgctgatttgggagttcgattttttcatcgttcatgatcctgacacgatctctacatctagacaactggaagctaagcgagatctcgtcgctggtgtcgtctacggcaccgacttcttcacgaagaggaaaattcaagacagtagaggaatcttaattggacagattaattatggagtgtttgctgtagagagttatgttttcaagtctatcaaggagttgaccgaaaaaggcaatgctaccagtagtagcacatccagtgcaaattaa

SEQ ID NO: 22339 - DNA, 432 bp, Zea mays
  Peptide Sequence Number=SeqID_64118
atggccgcttcggtcgtcaaggatgtcctgcaagtggcagacgtccacggagatccggaagcaacagtctcatccgcgctcctggaccatgaggagcgcgttcatgaacttttgcgtgactgtgagcttcttgcgcacgcggcgaccgcacaccagcgcctgcagccgtacaatgccccgcagtgccctcaacgccctccaagcattaacgcatccactaacaagaaccggtgcgcggcgcacatgtgtgggaaacgacgagggggtggggacatgggaatcggcaatgatagaatgctacgggtggggacatgggaatggcagaacgggacatgggaatcggaatggcagcctacgccacgggacatgggaatcgaaatggcagaaacaggaatggcagcctacaccgccttactagtagtaaagatttaa

SEQ ID NO: 22340 - DNA, 192 bp, Zea mays
  Peptide Sequence Number=SeqID_64119
atggaggtccagctccagccactggcactatacaagcggagggcagagatcgcggttgctgccgttgcaagccatacagcgcagaaagcgggcatgttcaggtcagctcaccgtcggagtcggagactgcagcagtcgagtcgagccgtgtctcccggctccccggtcgacaacgtgcgccatgcactgtag

SEQ ID NO: 22341 - DNA, 936 bp, Zea mays
  Peptide Sequence Number=SeqID_64120
atgcagatcctacgcctgctcgcggcgcggcgtttccgccgccgccgccgccgcccggtgtccacgatcactgcgacggcgaccgcgccagtcacccctcgcggcggtgccgccggaggctgcatgtacgggtacggcgaggaggaggatgagggcccgttcttcgacctggacctgacctgctgctccgcgcccgcgtccagcgcgggcagccaggcggccgagtcgggctccgagtccgaggacacctcgtcctgcggcgccgccgccgacggcggcgccgccgcgcgcagcgacctggacttcgtcatatcgctgcaccgtagccgcccgtcgtcgccctcgtacgaggagcgcctcttctgccgcggcgccgcgccggcgcggcccccgccgctcatgttctgcgcgtccgagccgagcgacgccgcgtcgcgctcgcgcgcccgcgacagcagcggcggcggccggctgcggctccggacgctcagcttcgggtccgccaaggctgccttctccggcgggcgcgccagcttctcccggagcaccagcggcgcgcgctcggcgaggctcttcgccgcgtacgaccaggacctgccggacgagggaagggcgctcaggccgccctccggcgacgtcatccgccgctacctgagcaagatctcgagccggctgcggcgcgtgggcgtgggcgttggcgtgtctcatcccgctgccgctacggacctccggctgaggaagagccgctcggcctccgccgcgcaggcgtcctcgacggcccagtcgccgccgccccgacgcgacgactcgctagccgagaagcaggacggcatcgccagcgccatcgcgcactgcaaggagtccctccaccgagcgtccgtgtcggaggcggtggacacgtcgctggcgcgatcgcggagcgacccagggccgtaa

SEQ ID NO: 22342 - DNA, 216 bp, Zea mays
  Peptide Sequence Number=SeqID_64121
atgccaggcgggcagaaggcctatcagtcgaccctgaacggctgggtggcatggaagcgcaggcttccgttcgcagttggagccttcgaggaggcagagcggcagtcaggcgcgtccgcaacggcgcgtgggccagtacagaaccacgctgcagtgtggggcgctttgggccttcgtgctctgcgaggcccattatgctacactacatcgatttga

SEQ ID NO: 22343 - DNA, 474 bp, Zea mays
  Peptide Sequence Number=SeqID_64122
atgtggctcccgttgggtgtgcatatgcaggcacacccactgaacgacgtaggcgatgacgggcctgaagaaggtcgggtactggagggcaccgaccaagctccggtaggacatcgtgtcggcgaccaggggcctgctatccttagagaggcgtggagcagggcttgcagtcggacatctgaaacagccccaagaccttcatacccatcttcaaagtcaaaaaaggactgggataaactggaagctgaagtaaaaaaggaggagaaggaagaaaaacttgaaggtgatgctgcattgaacaagttcttccgtgatatctacaaggatgctgatgaagatatgcggagggccatggacaagtcattcagggaatctaatggtaccgttctctcaaccaattggaaagatgttggatcaaagacggtggaagcgagccctcctgatggtatggagctcaagaagtgggaaatttga

SEQ ID NO: 22344 - DNA, 1599 bp, Zea mays
  Peptide Sequence Number=SeqID_64123
gtgcgcaaaagaccacttaacaaaaaggaagtatcaaagaaggaagaagatattgtagacattgaacaaagatcaaactctttgactgtccatgaaactaaacttaaggttgaccttactgaatacgtcgaaaagcatgagtttgtattcgatgctgtcttagatgaagatgtttcaaatgatgaggtttatcgtgaaacagtggagcctgtagttcctgcaatttttaatcgaactaaggcaacttgttttgcttatggacaaaccggtagtggaaagacttataccatgcgcccccttcctcttaaggcttcccaagatgtcttgaggttaatgcaccatacctatcgaaaccagggatttcagttgtatgttagcttctttgagatatatggtggcaaattatttgaccttctcaacgataggagcaaactttgcatgagagaggatggaaagcaaaaggtttgtattgttggtttgcaagagtatagagtgtccgatatagagactatcaaggagttgattgaaaaaggcagtgctaccagaagtactggcacaaccggtgcaaatgaagagtcctcaaggtctcatgccattcttcagcttgccattaaacgccgtgtggatggcaatgactcgaaaccacccagaccagtcggcaagttgtcatttattgaccttgctggcagcgagcgtggtgctgatacaactgacaatgataaacaaacaagaatcgagggtgctgagatcaataaaagtttgcttgccctaaaggaatgcattagagcgcttgataatgatcagactcacatacctttccgaggtagcaaattaactgaagtgctgcgtgactcattcattggagactcacgcactgtcatgatatcctgcatttctcctagttctggctcttgcgagcatactctgaacacattgagatatgctgacagagtgaagagtttgtcaaaaggaagcaacgccaagaaagacgtgtctttggcagtgcctttaagagagtcgaactcttccccactgccttcagttgtaccctcattctctgcatctgaggtgatgaacgatatcaccgggagaagcaatttcggttggcccaagcagcagtatgttaaagaacagcctgctccaacatttgttgaacgaatgcccaaggcaaaggatgcggtggagttcacatcatcaaatatagctgaagtaccagatataatgtaccagctgggaaggcagccatcaaggaaagatgtcactttggcgaacaatatgagaaattccgttgcttacccaactagaagggttgaaccagatgatgatgatgagcatctaaataatcttctccaggaagaggaagaattggttagtgctcataggaagcaggttgaggagactctggacatcctgaaagaggaaatgaacatattaggcgacgcggatcagcctggcttccaactcgatgactacatcacaagactaagcagtatgctctcgcagaaggcggctgtgatcgtggacctacaggctcgtctggagcagtttcagaggcttttgaacgagaacaatgtgctgctatatgctcagagcccttga

SEQ ID NO: 22345 - DNA, 240 bp, Zea mays
  Peptide Sequence Number=SeqID_64124
atggccgcgtcggatctggagagcaaagccaaggaggccttcgtggacgacgacttcgagctggccgccgaactctacacgcaggccatcgacgccgggcccgccactgccgatctctacgccgaccgcgcccaggcgcacatcaagctcggcaactacactggtttgctgtgggcgcagttcttggccgacggagaagaggaggacggcggtggcggccggttgtgcctccacggctga

SEQ ID NO: 22346 - DNA, 639 bp, Zea mays
  Peptide Sequence Number=SeqID_64125
cccacacggccacccgaatcggccgcccccgccccggcatcccgcgtacgacctcccccgaccgcccccgcgccttcatcggcaggcaacgccgcgcacgcccccgcctcggcgaaccgcccccaccacgaccccgtccggccccggcgagctgcctcgacccaccggccgcccgcgcaccgacctcgcccgctcggccacgcccccggccgctcggctcggccgctccggcgagcccgccctcgcctcgccccgacgcgccccgcctcgccgcaccggccgcccgcgccccgatttcgcccgatcggtccgcgcccctcggcaccgccccccgacttggccgccctcggctgcctcgcccccggcgagccacgcgcccgcgtcggccccgccttgccgccctcgtccggccccgctcggccccgccctcgcgcccgctccggcgagccgcccgcgcgcgcccgcctcccggcgagctcgccccccccggttcaaccgcccccgtgccccggctcggccgcccgtccccgcgctcggcctcatcctgccgcgtcctcgctcgctcgcgctcgcttgccccggcgtgcttgcccgcccgccccgccgtgccttgctcgcatcgtgtcggccccggcatag

SEQ ID NO: 22347 - DNA, 2223 bp, Zea mays
  Peptide Sequence Number=SeqID_64126
atggatttaagctcgacgctgctatatatgatgcccaccaagtgtttgatagattgtgtgagggccatagaaggaataagtgagtttcagaggtccacagttgccattcagtatctttttatctctgttcagatgatgatgcaattagcaaagtcttcctggatcttgcaccttaactgcaacaaacgccgagtggctcccattgctgcactactatctgcagtattgcacccagcaatattttgtaatttggaaatgcaccagacaaatgaaaaagggccaggccctttaaaatggtttgttgagaatcttcttaatgaaggctcaaaaagtcctcgaactattcgcctagcagctttgcatttaagtggtctatggttgatgtacccaaaaactcttagattttatatggaggaactgaagctgctctcgttatacggatctgtggcattcgacgaagattttgaagctgaactctctgaaaaccatgaagcaagatttgaggtttccatgctagcacaaagtcctgatcgtgaattcacagaggtgttcattaatacagaattatatgctcgtgtttcggttgctgttctctttcatcagctttggaaacaaatcaaagaacatagtatattggaaactgaagaagctcttgaatgcggcaaactatttctactagaacttctggactcagcggtgaacagcaaagatctttcaaaagaactctacaagaaatatagcagtgtacataggcgtaaagttcgtgtgtggcaaatgatatgtgttctatcacactatgtagaagatgatattgttggagaagtgacatctagcattcacatctgtctttatagaaataatttgccagctgtccggcagtacttggagacgtttgctatactcttatacttaaaatttccaaccttggcagaggagcaacttattcctatttttcatgacaaagggatgcgacaacaggcactatcttcatatgtttttatagcagcaaacgtcatacttcactcaagacagtccgtccagatataccacctgaatcaattgcttcctccaatactgccgtttttaacatcccatcatcacagtttacgtggttttactcagcttcttgtccattcagtgctatcgaggttgtggcctactctgcatcccgaaacttcagaagatgcagtctttgagaggaggtgctttcaagaattgaaagattatttggcagaaaattctgactgtgttaggcttagagtttcaatcgaaggtttccttgatgtctttgatcccaatgcatctgggaccccccctggaatatttagcgcccgtcctgaggtgtctgacttcgaatgtgttccggtgtcagtgatggagcgtgtgattgagttcctgaacgatgtgagggaggacttgagacaagctatagcaaatgatacagtaacaatcaagaatgaggatctcgcggtgggagagcatcacaagagtgacgagagcgtgtctgagatggtaaaaactggtcaagaggtacttgatttccagaagaaaataacaccccataggggggactccgagcaagcattgaacttgaacaccagaggtcattcaggcgttggtgacgaatacatttcaagaataatttcagagatggaggaagatgaccaagttttcgacctagcgctagaagcaagattgcatgctgcggaaacgatcaagcagagccggcaagaactgatcgtggttgcgtcattggtggaacgcataccaaatcttgcggggctgacgagaacgtgcgaggtcttcagagcagccggtctggttgttgccgacaagagcgttcttcaggataagcagttccggctgatcagtgtgaccgctgagaaatggctgcctgtgacggaggtccccgtggacagcgtgaaggcttacttggagaggaagcggggcgatggttactcggtgattgggctggagcagacggccaacagcatgcctctggaccggttcgggttcccggaccggacggttctggtgctggggcgggagaaggaaggcatccccgtcgacatcatccacattctggacgcgtgcgtggagatcccgcagctggggcgtggtgaggtcgctcaatgtccatgtcagcggcgccatagccgtctgggagtacacgcgtcaacaacgcaatcagcgttagcttgttgcttgtttttgctccattga

SEQ ID NO: 22348 - DNA, 507 bp, Zea mays
  Peptide Sequence Number=SeqID_64127
atgacgagctcatctcgactcagggtgactgatgttggtctgctggactggagagtggagatgccgccgatttggtcaatgcgatgtgttagttctgttgcctcatggtgtaatccttacaactccgatgattctgtttcttctgcattttccgtgctatgggacttctatttgaatgttacccatcactccactattgccaatgagatcggagctgaacttcacctggcagcttatgaagctcttgcctatgttctggcagttctatctactgcttccagtactcagtttttggattttgtggaagcgaagcagacagatcaagcccacaagttttcattggacattttggtcaccactttccttgacaacatcaaccatcttcttacagagggaactctgacgcgaagcagaagagctgttttgatgacttggaaggttaggataatatcttgcctctttttgcagtacacaaagaagtcagtttggatggctcctaattcttaa

SEQ ID NO: 22349 - DNA, 480 bp, Zea mays
  Peptide Sequence Number=SeqID_64128
atggacagggagggggctgcgcagtacagagaagaggagcagggggcgtgcagagttgctgctcgaccacacaccattggagtggtgatatgttgctgctgctatgggagcggctgctccctgcccttggggaagaagggcgccgccgagggaggtgaagccaagggggagagcaggacgccgccgagcaggtccatggggaagacaaccgactgtggggaagaaggcaggaggcaccatggccagccggcggtgtggccgagcagggaggctccccacgccctacagggggagatgtcacaagggaggccgccatgggagagagggcagcggcgatctgctgttgtggggaggcgtgctgagcaccatggcgaggaggaggagccgagctccctgcttgctgtcgtgtgggagaagggaacaacgaaaatgtgtgcgtcggctgaagtagaagagagggagaagggttgtggcggctag

SEQ ID NO: 22350 - DNA, 333 bp, Zea mays
  Peptide Sequence Number=SeqID_64129
atgaccagcatcctcgcagcagccctcgcccgctcggccctccactctgcagcgccgtcgttgtccctgcttaagcgccgtctaaaattcctgcagcaagcctcgccgagcattgccccgcagcagcatgctccttcgcctcgtgcgtgggtgctcgacgaatcgcagcagcgagccacgccctccggcttcgcttcggtctcccatgcgcgacgacgcgtttcgtcttcgcgccccatgtgcagcaaccccgaccgagatcgggtacatattgtggctgcgatagttatttttgtagtcgtaagggatttgtcggcggatgtattcctttga

SEQ ID NO: 22351 - DNA, 1497 bp, Zea mays
  Peptide Sequence Number=SeqID_64130
atggccatccaccacccgcacctcctcgacttctcgccgcctccgaacacggtggccatggaggaggcgccgcccccaccccacttcgaccacggcctcctcgggctccatgtcgatggcatgcctcatcgcgtcctcgccgacgacgcgccggtggcggcatgggcgccgcaggccgtggtctcccactccctgtacggatacgataacacagcagcgggggcgtcgtcgctgtttggccaccatgaggcatcagaggcccagttctccgtgcttccgccggcagcgtcgtcgtttgcactactacctaaccaccaccaccagcagcagctgccgacgacgacggcggcgtcgagcatgcagcagccgttccagctgaggagctccaagtacctgggtcctgcgcaggagctgctcgccgagttctgcagcctggaaggggacctgctgcacgccacgaacaagcagggagcttccggagcagcagcaggtaacagcaggtgggacgacgtggagacgtcgtcgtcttcttctgctggcctctgggggcacctgtccctgagctccatggatctcctggagctcgagaggaggaaggccaggctcttgtccatggttgaagaggtggaccggcggtaccggcgataccgcgagcagatgaggtcagtggaggtgtcgttcgaggcggtggccggagccggcgcgtcgcaggtgtacacgcggctggcgctgcgggccatgtcgcggcacttccggtgcctgcgggatgcgctggtggcgcaggtgcgcgctctgcggaaggccatgggggagagggacggcggcccagctggtgcggcggcgggcgccaccaagggcgacacgcccaggctcaaggtgttggaccagtgcctgcggcagcagcgggcgttccagcacccgggcaccatcgacaactacccgtggcggccccagcgcggcctgccggagcgcgccgtcgccgtcctccgagcctggctcttcgaacacttcctccacccgtatccgaacgatgtggacaagcacattctagcgcgccagacaggactgtcaagaagccaggtttccaattggttcatcaacgccagggtgaggctgtggaagccgatgatagaggagatgtacacggaagaagtgaacccgaaaccggccgacgacacaagccaaaaccctagcgccggtggcggcgtcggcgtcggcgtcgccatcaaacctgagcagcaggtgagcacagctgcggcgggagccaccatcggaggcggcggcggcgaccatctgttcggtcctagttatcccagcatgtacgggagccacggcggcgccgtgtcgcttaccctagggctccagcagcagccgtttgcgtcgacgatgatgcaccagcgacgaccactgatgacgtttcaaggtgacgagcaagagccggcgctgccgtacagagaccttatgggctctcagttgctgcatcatttcgctgggtag

SEQ ID NO: 22352 - DNA, 360 bp, Zea mays
  Peptide Sequence Number=SeqID_64131
atggacattgattatgtaagaatcgatgtgcatgacctagagtcagctggattgaaccaaggacgaaggcacgagatcttcgaggtactagagcaagggagaaggtcaagggtgttggagctcatagatacctataatggtcaagttgtggagacttgggttttggagtccaaccccgacctaaaacaggccaaaaagggcaaaacaatcaagaaggttaagtatgcaagggaagctctcaaaaaagttcaattcaaaacagagaaaattcgggagttcagccaggatcctctctggtggatatcagctcagctggtttttgacctggttcagctggtttttgtcctggtccacctttaa

SEQ ID NO: 22353 - DNA, 183 bp, Zea mays
  Peptide Sequence Number=SeqID_64132
atgaccttcgcgaccgatggttggcttggacgtgtcctacgattattggcaaacgtctgtgactcctcctcgggcaccgaacgtcagcggacgtgggatgaggtggcgctggacaaaggggttgctcgagcctccagtttgttgggcaaatcgggcgcgaccccgactgactttataccctag

SEQ ID NO: 22354 - DNA, 264 bp, Zea mays
  Peptide Sequence Number=SeqID_64133
atggctgaatccttcctaatgtgcgccatagtcgacagagtggcctcctgtgagattcgtggtggagaaggcaaggcagagatgggagctctagggtgtgggaggctcaagcgaggcgaatatctgcctcagagcgtgacctatttgagatcgagctcgggcgagtcggaggttttggaaggtcccacgggggctcggtcgggacggagtttggtgatggccctcgacacggacctcgggcgaggtgaagcttgtgattcctag

SEQ ID NO: 22355 - DNA, 817 bp, Zea mays
  Peptide Sequence Number=SeqID_64134
ggacaacgacggcgctgcggagtggagggccgagcgggcgagggctgctgcgaggatgctggtcatgggggaaaacagcagcgaagctcgacgacgacgcaaggtgaagaacggtgctgctgcgaggaatcaacaacgcctggcttgttgcgcatttcgtcgagcacatagcaagcgtcaacgacgcactgcgcagcagcacgcaagcagggggaatggagctcgagtgccgagcgtccaccatggcagggacgacgagctcggctcggtgaagaggagcaggggctggcggccatggacagggagggggctgcgcagtagagagaagaggagcagggggcgtgcagagttgctgctcgaccacacaccattggagccgaggaggaagggcgccatggtgatatgttgctgctgctgtgagggggtcgagctgctgggagatgggagcggctgctccctgcccttggggaagaagggcgccgccgagggaggtgaagccaagggggagagcaggacgccgccgagcaggtccatggggaagacaaccgactgtggggaagaaggcaggaggcaccatggccagccggcggtgtggccgagcagggaggctccccacgccctacagggggagatgtcacaagggaggccgccatgggagagagggcagcggcgatctgctgttgtggggaggcgtgccgagcaccatggcgaggaggaggagccgagctccctgcttgctgtcgtgtgggagaagggaacagcgaaaatgtgtgcgtcggctgaagtagaagagagggagaagggttgtggcggctag

SEQ ID NO: 22356 - DNA, 492 bp, Zea mays
  Peptide Sequence Number=SeqID_64135
atggctcaaggcgcccctgctgcgtttccccctgcgagctcgagcttctccctcccggcacccctcacagcagcagcaacatatcaccatggcgcccttcctcctcggctccaatggtgtgtggtcgagcagcaactctgcacgccccctgctcctcttctctctactgcgcagccccctccctgtccatggccgccagcccctgctcctcttcaccgagccgagctcgtcgtccctgccatggtggacgctcggcactcgagctccattccccctgcttgcgtgctgctgcgcagtgcgtcgttgacgcttgctatgtgctcgacgaaatgcgcaacaagccaggcgttgttgattcctcgcagcagcaccgttcttcaccttgcgtcgtcgtcgagcttcgctgctgttttcccccatgaccagcatcctcgcagcagccctcgcccgctcggccctccactccgcagcgccgtcgttgtccctgcttaa

SEQ ID NO: 22357 - DNA, 387 bp, Zea mays
  Peptide Sequence Number=SeqID_64136
atggcccaatgcgctggtgctacatcatatcttcacactgcccctgctctgcgtggacccgctctccagcgtgactgcacgactgttgttcctcgcggcggtggtgttctatggcgtgatagcaaaatcgacgatcgcaagaacgcgctcgactttgactgtacgagtgtccgcaaccgcatcttcccccgtgaggactcccgtcgcagcgcaacctcagggtatgcggggacttgtcctcccctccacctcctatttcaacaaatccagagagatgacgaaagcgcgccggacacgatacgcgatacttttcgaagcggctcaagcctccacaacgctgatggcggcaggaaatccgcgctgaacgcggaaaatccgtgcatttag

SEQ ID NO: 22358 - DNA, 297 bp, Zea mays
  Peptide Sequence Number=SeqID_64137
atgtccactgtcaacactcaacagatgcagagcagcagagatgcagacgctgctggccgtcctccagagcaccagttaccagacacggcagatgctagactgctggagtggcggcacagcggtggcctggaggacagggtgacgggccgacagggcaggcggacgggaggacgacctggacctagagtgacggcggcctgggtcctggtctggcggcgtggcggacgtgaggacgagccacaggaggacggggggcgggccacgacgaacgggagtgcgcggcggccggtggtctag

SEQ ID NO: 22359 - DNA, 1023 bp, Zea mays
  Peptide Sequence Number=SeqID_64138
atggagagatcagctgagagctggtgggtgcttcccatgaccttgataccggccatctccggcgagcaacacggtaacatggcaaccgtagccactagcttcgcctacctcgccatcttcgcatgcctcgcatgggtgggcgcgtccctgctctactgggctcacccaggcggccctgcgtggggcaagtactggagggcgagggggaagaagccgtcggcggcgatcccggggcctaaggggctcccggtggtcggcagcctcggcctcatgtccgggctggcgcaccgctcgctggccgacgaggcgtcgcgccgcccgggggccaagcggctcatggcgctgtcgctcggcccccgtccgcgcggtcgtcacgtccccacccgggacgtggccaaggagatccttgatagcccggcgtttcgccgccccgcccccttgaaaccacgccgccacggccccgtactggcgcgcgctccgggcgcgtcgccgcgggccacctgttcggcccgaggcaggtcgaagcctttcgcgccgtaccgcgcggccgtcgccgagggcatcgtcgcggccctgctgcgcgccggctccggcggcgccgtcgtccaggtgcgcggcctcctgcggcgggcgtcgctctactacatcatgcggttcgtgttcggcaaggagtacgacgtgtcacgcgtggtgccgccgtccggcggggaggaggtggaggagctgctcgagatggtgcacgaggggtacgagctcctgggcatggagaacctgtgcgactacttcccggggctcgccgccctcgacccgcagggcgtgggcgcacgatgcgccgagctcatgccgcgggtgaaccggttcgtgcacggcgtcatccaggagcaccgtgccaaggcggtcgccggtggagacgcgcgtgacttcgtcgacatcttgctctccctgcaggagagtgaggggctcgccgacgccgacatagcctctgtgctctgggtaagaataagaaagaacccatgcacttaa

SEQ ID NO: 22360 - DNA, 372 bp, Zea mays
  Peptide Sequence Number=SeqID_64139
atgttgtctatgccgaacacggcggcgcgatggtgcttgtggaacagcggcagcggcaagggctcgatagggtggtccccgcggcgcggctgtgtctttatccctcctgtgctggtgaaacccggacccggtatccgcatggtggttgcaacggcgcccgagaagcgcgcggagctcggccatgcgcgagacgcggtcaaggttgttgcagacccggggctggtgattcttacacgcggggtccacaagtcaatgggacaagctagagcgagcggttggggcgcgggtcccacgagtcagggctgtgcgcgcgtgtctgataaattgggccacgcggttgggattcgggagtgggccgaaatggggtgttaa

SEQ ID NO: 22361 - DNA, 513 bp, Zea mays
  Peptide Sequence Number=SeqID_64140
atggcgctgtccgcgtcggcggcgtcgactggccgtgggtcgcgggcggagaaggtgaagaggatcttcgagtgcttcgacaccaatggggacggcgggttggaccgcaacgagatggccgcccttgtcgtcaccgtcaacccttgggtcaagttcagcgaggaccagatctccgccatcattgacgaggtgttccgcacctacgtcgagttcatcctccccgacggcagcagccttcccctatcggggctgctccgcacctacaacgacgacgacggggacgtcgaccgcgacttcgtcgcgctctcccttcccaccgtccattccgattcctcatccccgaatatcgccgcgggggacgccgccgcccactcctccccgccctccgtctccgccgctgcctggacgacagctgttgggggcgtggcggttgcagctttcgcggggaagatgggggcatgcgtgcagagggggaggcaggggcacaggagacggtctacactattgccttaa

SEQ ID NO: 22362 - DNA, 711 bp, Zea mays
  Peptide Sequence Number=SeqID_64141
atggcggcaggactgggacacgtcgctgtgctgctgtgtggagtagcagtacgatacagcgtacagctgcaaccgccacgccgagaaacctgccacgcccccaacagctgtcgtccagtcccctccccattccgcgtccgcgatgctcgaggtccgcaaccacacgcgctaatcgacgcgccggcgcttgcggagggccggggaggcggaggcagaggaggtggaggggagaagcgaggaggactgggcgaggaagacggcgttgtcgaagtcaggatcgtagacctggtccccgcaggcggcgcagaagagctcggcgtggtcgacggcgatctggtggtcgggcctcgcggaggcggaggcgtgcgtggcagcgtgggaggggctgaagacggcggtgcaggagaggcaggcgtagatgcgggaggtggggacggggacgcggcggcgcagggcgagcagcgcgggagctcacgcgggtcccaccggatctcggggcggccgagcgagcacacgcgtaggcagcggcggaggaagcgcagcgagcgtgaggacaggcggtgtgcggcgaggtgtgggcagggcggtggtatggactgggtggacatcggggaggggacggaccggggtgtgctatggtggggacaacggcggtgggtgacggggtggccgggtcggggtgggggtgcgatcggtggagtgtggcagtag

SEQ ID NO: 22363 - DNA, 801 bp, Zea mays
  Peptide Sequence Number=SeqID_64142
atgaccattgcagtcgccaatatcttcactccgaaacatttccatcctttctgcacagacttcactgactgcattgacagtctcagaagtcgagttgtacggcatgtagcgcagacagaaaagaccagacctgtgttcccagctgtgctttccatgagcttctgggccgccaacctcaccggctcagataacaagtcctggatggacccactacaaactttcactctctcttgcgcttgcgcagcctcttcttctccgatcccgactccaactctccctctctccttcgcctggcacatcctcggcggcgcggcagcctgcttcttcaccggcgcggcggcctgcttcttcgacgacgcggaggcctacggcggcctaccgagcggacgggtccacggacgaacggatctccggcgcctggcagatcttcggcgcgcggcctaccggttgtggacggatctccgctgcctggtgccctggcagacgcggcagcgtcttctccaggcgggtggatctccagcgctcctcgagctggagcaggcaggcgtgccggtcttctccaggcggatggatcttcaccggcgcggcggcctaccgggcggacggatccggtcgatctccagctgctccgtgcctctgctgctccgcggcctgagctccgggcggacggatccgcggcccagcgactccgctgcctctgctgctctgtgtctccagcggatccatgcctctgctgctcggcgtcctgagctccggccgtctcgcgctgttgcttgctccttgaatccgcacacatgctag

SEQ ID NO: 22364 - DNA, 297 bp, Zea mays
  Peptide Sequence Number=SeqID_64143
atggagatacagcttcgccgcgtttccagcaacccaggctggccgtttctgattcacagggtgcacagccagtggactggaactggcgcttccgcgcttcgattcctgaatcctggctgcgcggcgcggtcgcggagacgggaagctggaactgaaacggcgtcgctggcgcttcgattcctggagactggagagtggagactggaactagaggtggcgggctggcggcacggcgccctggagattgtgacgggtgctctggaactgggaatggcgctggcccgggttagggtttag

SEQ ID NO: 22365 - DNA, 543 bp, Zea mays
  Peptide Sequence Number=SeqID_64144
atgggtttctctgctctcattgcaagtctgctgtactgctatgaaatgggtgtgaagtacatcaccgtttacgcattcggcattgacaattttaaaaggttttacccaacactgattccctttgctcacaaatgcgcctggacgccgtctccgttcactttaacgttacttacaggatggacccactacaaactttcactatcttctgcgcagcagcctcttcttccccgatcccgactccaactctccctctctccttcgcctcggcggcacggcagcctgcttcttcaccggggtggctgcttcttcaccggcgcggcggcctgcttcttcacccgcgcggcggcctacttcttcgacgacgcggaggcctgcggcggacgcgacgcggcggccttccgggcggtcggatccgcggacgaacggatctccggcgcctgtcagatcttcgaacgcggcgcggtggcctaccgggcggacggatccacggatgaacggatctccggcgtcacggcttgcttcttcaccggcgccgcggcctga

SEQ ID NO: 22366 - DNA, 336 bp, Zea mays
  Peptide Sequence Number=SeqID_64145
atgccgtacaactcgacttctgagactgtcaatgcagtcagtgaagtctgtgcagaaaggatggaaatgtttcggagtgaagatattggcgactgcaatggtcatgcttatagatgtccatctgggccgggcccaccgggtggcccgcgacacggcacgaaaatggcccagcccagcaccggcacggtccggcttcaaacatgtctggataagcccggcccgttcgctgtgtcgggctgggccagggatttcagcctgtcgggtttagcccgacccgacccatctaagggggaggcacgtggcggcccggtatcagtgaaatccggtgttgtgtag

SEQ ID NO: 22367 - DNA, 312 bp, Zea mays
  Peptide Sequence Number=SeqID_64146
atgcccacatcacttatgtttgtgggatgccttcgagatgatgtttttgttagtgctcttgtgatccacgtgtcgtgcctcgtctgcttgactacaaactctgcccatggggaggtctttgtcgtggccttcacgacccatgtccgagaggtggcgatcgtaggtgtcgaccgcaatcgaaagggcttgccccccacgaggggcgaagactcttttgggtgtcctttgcggtcttcctatgaaccccttcgcttatggggacggccctctcgaggtcccctgtcaaagcttttgcagtcttccaagggttga

SEQ ID NO: 22368 - DNA, 405 bp, Zea mays
  Peptide Sequence Number=SeqID_64147
atgggcaagaacaacaagcggaagcgtgagccgactcctccatccgaggacttcggtgattcggagtactcagaggaggagttctcctctgagtccgagggggtccctggctcccattcctctgcgggcttgcggcggaggtctggacttacttccgggccgtcgagcgctccggggctcgagggctcggatgagtcggagtactcctcggacaaggaggactcgtccgaggaggacggcggcggcgatggcgaggaggacgacgacgacgatgacgacgacgaaggcggtggcggcggtgacggtgacggcggcggcaggggcggcagcagcggcagcaaggatggcgacggcgccagcagcaggggcggcagcggcagaggcagcaacagggccagtggctag

SEQ ID NO: 22369 - DNA, 468 bp, Zea mays
  Peptide Sequence Number=SeqID_64148
atggatccgaggtatggtacacgtagaggagacattggtgaactggatgatggatttcttaccgcgagaggaggcggaaacgaggacggccacagcaaaggggaggaggccgagagcgcaggtatatacactgaggctgccgagaagcatcaacggaatcccacgattccggtctccaccatccgcacgccgcgacgcgattcgcgtctggtgagcgagctgggaacctgggcctacccgtcggcgacaacagccgacgctgcgcacttgcgtagcgcgactggcttcaacacctactgggatgcgcgattgacggaaccagctgaagacccggcgcatctccgccatgcgcggtggtttagttgggggaaggatatgacgaggccggtccatgcatcagtgagaggtactggcgcgcggcgtgagcggtctgcacagtgggacccgcgtgacagcgagtgccagtga

SEQ ID NO: 22370 - DNA, 732 bp, Zea mays
  Peptide Sequence Number=SeqID_64149
atgaacagtgcacgattcccttccttatctggcgaagctaaccattgcagccaccggtcctcgtggcacactggacagtccggtggcgcaccggacagtccggtgcgacctgtagggggttacaagcgtccgcgtgggagggagcgagaggcctgtacgcgccgtcccgtcctcccccgcgtggccaaccctccatacgagtgccctggcccttccctttataggcgtaaggagagggcccagtccgagccctgggtcgggcgaggcggaggctcctacgaggtcgaggtcgagtctgtcttccgtggtcgaggtagagtccgagccccgggtcgggcgaggcggagaccgtcggctgaggccagggctgagtccgagccctggtgttgggcgaggcggagttcgtcgtcttctggggccgaggccgagcccaaaggtcgggcgaggcggagttcgtcgtctttcggggccaaggccgagtcctggggtcgggcgaggcggagttcgtcgtcttccggggccgaggccgagtccgagccctggggtcgggcgaggcggagcttcctatggcgcccgaggccggacttggctgctgtcagcctcactctgtcgagtggcacagcagtcggagcggcgcaggtggcactgtcctctcatcaggccggtcagtggagcggcgaagtgactgcggtcacttcggctctgtcaactggagggcgcgcgtcaggataa

SEQ ID NO: 22371 - DNA, 336 bp, Zea mays
  Peptide Sequence Number=SeqID_64150
atgagcaacaagacttatgtcgggcgcgatgaacagaattactaccagccacgacgagcacatgagggcgtgaccatgggagaggagcgccaggacgcgacatggcagttgaagtccggtggctgggcactagtaaggtccagtaccagggcgcagcagccgacgatgttgggagccaggggtttgaggaagcagcggccagcgaggaaagggcgcggttcggcgaggttgcggcacagggggcgcgatgaacgccggatctggggaaggggagctgctcgcctggtgaaagggaaatgtgcccttgggccatttctaagtattttggtgatttag

SEQ ID NO: 22372 - DNA, 378 bp, Zea mays
  Peptide Sequence Number=SeqID_64151
atgatgagcaacaagacttatgtcgggcgcgatgaacagaattactaccggccacgacgagcacgtgagggcgcgaccatgggagaggagcgccaggacgtgacatggcggttgaggtccggtggctgggcactagtaagctccagtaccagggcgcaacagccgacaatgttgggagccaggggtttgaggaagcagcggccgatgaggaaagggcgtggttcggcgaggttgcggcacagggggcgcgacgaacgccgaatctggggaaggggagctgctcgcctgggcgccatggacagaaaacaggagctgcaggggcgttgctgtgccgtggggaggagagtagtagagggagacgcgccatgggggagatga

SEQ ID NO: 22373 - DNA, 414 bp, Zea mays
  Peptide Sequence Number=SeqID_64152
atggcaaggttccaaatttctctcttctcctgcatatgccgcctgtgcgtgtgtgtcgatgggcaccagcagcagtgggcgctccccttcgtcggcgccgggcaggtcaggccgccgtcgcagcaggcgccaccggataggaagggccacagcggaggcggggtcatggattcaggctccagatccagtggcggagccagcgaacgatgtgaaaactcgatctttatctcgacttttgacaatttccacctggatcatggaagtgccacgagagatggttcagatgtaccgagtggccagtctgcgagcagcgatttgagccccggccttccccgttcgcttcatgcttccatgtacagcgcaagagcaggggagagcgcggatcgaggccgcaatcctgtctgcgagcagtga

SEQ ID NO: 22374 - DNA, 954 bp, Zea mays
  Peptide Sequence Number=SeqID_64153
atgagcgaggtgaaaattgtgcagggtggcaacgtcccggacgatgacggtgcaacgctcaacatgggagtggcgtcacgcggcggtggaagcaacagctggggaccttcaactacgactaccagagctatgcgcttaactttaaccagagcactgacgaatagcagcagcgtgctgagtttgctttggacaacgtcggtggtggtccgtcatgagctactagaagggaaatgtgaccttggaaagtttgtagacgaggtctgcctcatcctaaagtacgtagtgagccaatgcttctcgaatcaagatcagaccgacactatgagccgtgatacagaggattttgatggagctaagccatcaggtgcagttaccatcgacgccctgcttctgaggcaaatgtggaacgtcgggcagcgcaagaggaaaagctcagagatcctcgcaacggctgacaagcccgccaagtgccaggagacgatcacgatccttcgccaacttcatccgaggatcgcttctctctataagaccttcggcgacgaagcatggacccaacactccatttgcattcccaagacgagctcggcaaagtccgactacaagccgcagtcgctcgcgagcatcctggtcgaggcctccacgtctcccagtcccactcccaccacgcccacgccacaggtgctatccaagaaagatgaaggaagagagccgaaggcggctcctagaccgactgcggtgacctgcaacgacgcggtggatgcattatgctgcctgcagggtaatgatgtatcccctgtggcgcggtcggtccgagcccaaggtcgggcgaggcggagacttctcctgaggctaaggccggggtcgggcgaggacacgattcctcctgaggccgaggctgaggccgagccctggggtcgggtgaggcggagacctcctcccgaggccgaggcctaa

SEQ ID NO: 22375 - DNA, 1296 bp, Zea mays
  Peptide Sequence Number=SeqID_64154
atggcgtgggcgggggcgcggaattgcaggaaggaagacggcgcggcgtgggggctggagcgggggcacggtgaggtgatggccttcgccgagcaggttgcgtcgggggcgctgacctcacagtttgtttccgagaggaaacgactcgagggtaggattgagcaccttcgaacgcagcacaccaaggcgattagagataagtcagcggccgaaaataagagacgaaacctcctctataaagtgatagcgctagagaaggaaaagggagatctcggccaccgacttaacgatgaaaaaaaggatgcggagaacacccttgtggaggctcaggcgacccgcgcggcggctcaggctgcccgcaaacgtgctgctgacttggagctggagctgaagaatatgcacgaccaccacgagaggacggtatcttccagccatgttggggttgaccgggcgcacacactttttgtggatgcgtaccatgaccttggcacacagaccgcccctttcgacaaatcgggggaggaggtggggacccgctttctggggtggttgcaagatgagctagagtccctcccgtctattgtgacaggtctcatgtcctatgcgtctctcatgatttgcgaaggggctgtgaatgctttgtcccgtgagggatgcatgcatttcgaggtcttcgaccgagccaacgaagacttcgatcatggcatgttccagattgaagatggcgtgctgaagcacactgctggggcgctttatgataggatgtggggccctcacggccgcgacatcgtccaggagaggtcggaccgagcgctggcatatgcgatgaacaaagaagatgtggaggacctcgccggccttgaatgctcggtggcccggaaggatgcttcagcggaggcgagagccgaagagcaagctatgttccaaggaggtggcgctgagggtcctgcaacggcagatgcttcggcgctgatcggttactgcacaggtttcgacgtcggggcctatgatggaaatgcggtgtttcttagtagtgacgcgtctggggaatctcatgttggttcatggtctttcgagggtggaaagttggggagccctttttcttggatagatgatgaatcctcggaggatgaattagattattttgtggcgtttgatttagctgtggtggagtctccgttgagggtcgccccctgtgaagagcgggtgacttcggtcggtgcaatcctaggtgggccacgggggcaaaaaaagatggggggtgttggggacttgttctcaaatgctatgcgttaa

SEQ ID NO: 22376 - DNA, 366 bp, Zea mays
  Peptide Sequence Number=SeqID_64155
atgtccggtgtgcaccggacatgtccggtgaattatagcgaagcgcctctgaaaattcccgaaggtgcaaagtttggcttggagtccctggtgcaccggacactgtccggtggtgcaccggacagtccggagaagaagatgacagaggaaaagatgactgaggagaaaaagcttactgaggagaagaagctatatgaagagaagaaagttgcagatccttttattgctaggttttatgagtctatggcaaaaacgaatacagagaaaattactaaagagataatggagggtttgtctgaagattctgatgacagtgatagctatgatgtggagagtggagatgaagattctgaggaccggccctag

SEQ ID NO: 22377 - DNA, 153 bp, Zea mays
  Peptide Sequence Number=SeqID_64156
atggcagtgtcgaggacaggtggggcaggccaggagttgtcaatggatgactacctagtgggtggtgttaccatgtttgatgcccagactgggctgctgcctgttgttgagttggtttacttgattcttcttaggcggaaacttagaagttag

SEQ ID NO: 22378 - DNA, 228 bp, Zea mays
  Peptide Sequence Number=SeqID_64157
atgtctatatctaatacatcggcaacaaatgaggattcgtattgtaggggtgttagcgcggactcactccgaatggtgagctacagggggctcgaaggtggatctgagattaagggtagacgttataatgagaacttgtattctactagggaggagattggcctcttgcttctgggcctcgtagcccatgtgatctcgtttgttggatcgtgcttcttggcctcatag

SEQ ID NO: 22379 - DNA, 306 bp, Zea mays
  Peptide Sequence Number=SeqID_64158
atgaaccgtctagcggtgctctctgcggaggcgcagatgatccgcggccctgggccagacagtccacaacttgaacgcaagagcggctccttctctacgtacgtctggaaggtctacgcttggggctcggacggtccagatggcgtagagggctgtcttcttcgtagtagacctagatctcgcatcccgagagggacctcgtcagaggtcgacacccctagttatgggcgaactgtccggctgagtcagccagaccatctgtttgagcaccggaccgtccacgcgcaggtgtcaaactgtccgtga

SEQ ID NO: 22380 - DNA, 1155 bp, Zea mays
  Peptide Sequence Number=SeqID_64159
atggagaagtcagatgagatcctgatgccgggtttccggtttcatcccaccgacgaagagctggtcagtttctacctcaagaggaaggtccagcaaaagcctatctccatcgagctgatcaggcagctggacatatacaagtacgacccgtgggatctcccaaagcttgcgagcaccggtgagaaggagtggtacttctactgcccaagggatcggaaataccgcaacagcgtaagaccaaacagagtgacggcagccggtttctggaaggccacagggacagacaggccgatctactcctccgagggcaccaagtgcgtgggcctgaagaagtccctcgtgttctacaaagggagagcggcgagagggatgaagaccgactggatgatgcacgagttcaggctcccttcgctcgccgatccctcgctccccaagcgtccgatcgacaagaccattccactcaatgactcgtggactatctgtaggatcttcaagaaaaccagttcgctggcgcaacgagcgctgtcgcacacctgggggcccccactgctgggggcaacagaggcagatgatatgatcaacgcgttgcagtcagtgcaggcttcagaattcgctctcgagagctcactgcaggttgcaccggctgcgcctgcagcaggccagttcagcagcaggcatggcttgcatgttcatggccagcaccagcagaagaagggtaccaacagcccgtctctggacggctcctcctcatgcaagctcatcaacttcaccagcagcagcccatccgaggagggacgaccccagagcttgagcttcccagtcaccttcccctttgaagtgcaagggacgcacaagactgcagccgccgcgccagtcttcttcggcgcgcatcctgatcatcacctcggtgggttcgttgtcgactcttctgccgatgtcaatggcggcatcgtcggtggcaggagccaggactcgtccaccaggaagcccagcaataatggcttcagcaccagcagcggtgactgggaaactgcggggagggtcagcttcccttttgatctgggtgcagattcttcagaggagtggaggtgcaacataccctgggagtccttgctgaccccggctgctgtccaggctgagctgctgccacactag

SEQ ID NO: 22381 - DNA, 594 bp, Zea mays
  Peptide Sequence Number=SeqID_64160
atgccgatggcgtacctacctagccgtaccagtacgtccctgttggcctgtattgagcccatgcagcaatcgataaacgggggccctatagatcttgagggccctgagcggtcgcatactctgcacaccctcagggccggccctgctcctgatccaccaccatctccggtcctcgcccccacgtctgatccgcgcacggatccccgtgatgctatggagcttccacgacctcaaccaccatgccgctccggtgggctccctatcagcgtcggctgcagcctgtacgcgcggtgcccggcgcctgggcagaagaacgtggtcacgacgcagggccgcgaggaccccaaccagagcacgggcatcgtcgtgcagggcggcaaggtggcggtcgccgccgacctggcctcgctcgtcgccaacgtctcgtcctacctcggccgcccctggaagcgctactcgtgcgccgtcttcgcgcagaccaagatggaggcgctcgtccacccgcgcggctggctcgagtggaacgccaccttcgcgctcgacacgctctactacgccgagtacatgaaccgagtctgctgcaagccaatttag

SEQ ID NO: 22382 - DNA, 588 bp, Zea mays
  Peptide Sequence Number=SeqID_64161
atggggcccaggggcagagcgtgctcacgtgaagcagtatccagagatttggaccgctgggtcagggatggacggttcaaatctggcgcacaggggttaacgactcggtggttggcgccgctcctgtccacggcggtgggttcgctggagatagggcagacacggtctcgggggcctagggtcgtcggggttggctggaattggcgaggagggcctggcgaactcactggtggggctccagtcgcgataacgggagcagaggcgagagaacagtgtagggggtgctccggacgggtctggatgactccagcgaggaatctcggccgcggggagggggaatcgagcgtgctaaggctcggactagctccggcgagggaaggggaacgctatggaccacaaccggggctcgggatggggctaatttggtcggacgccgagcggggcgtggtgaactggtgtggccgagctccagcgagttcctcacctcgggacaacgctcatgaaggcttggcgtggttcctttcacaagatccaagtgcagagttagctgatgattgtcctcatactcttaggcatgaactcatatag

SEQ ID NO: 22383 - DNA, 777 bp, Zea mays
  Peptide Sequence Number=SeqID_64162
atgggggagacctccgtctgtgaaaagccggcaaggagctgccgggctccggtggaccaactacctcccgcccgggcatcaagcgcgggcagcttcagcgaccaggaggagaagctcatcatccacctccaggagctgctcgggaacaagtggtccgcgattgcgtcgtacctgccggagcggacggacaatgacatcaagaactactggaacacgcacctcaagaagaagctcgccaagacgggcgccagggaaagcggtgccagcgccaagacgacgaagaagagcgatagggccgcggcgcccaaggggcagtgggagcggcggctgcagacgaacatccacaccgcacgccaggcgctccgggaggcgctgtccatggacgacactgcgccgccggcaatcaagccggagccgctgccgctgccgctggggcagctgccggcgccagccagccaggcgatgtacgcttccagcatcgataacatagcgcgtctgctggagggctggatgcgtcccagcgtcagtgggaatgcgtcggctgagtccatgtcctccttctcggcgttctccggtggtggcgacggcgcgtcggcaagccacatcggcacggcgcacacgccggaggggttcaccggcacgagaaaggaagagggcgcggggccggggccggcgtcattaccaatgttcgagaactggctgctcgatgacggcatggggaacggtgatgcgtccctcatctgcgtcccgctggcggacccgtgcgagttcttttag

SEQ ID NO: 22384 - DNA, 1017 bp, Zea mays
  Peptide Sequence Number=SeqID_64163
atggggaggccaccgtgctgcgagaagggtggggtgaagaaggggccctggacgccggaggaggacctcgttctcgtctcctatgtgcaggaccacggccccgggaactggcgcgccgtgcccacgaacaccgggcttatgcggctgcagcaagagctgccggctccggtggaccaaccatctccgcccgggcatcaagtgcggcaacttcagcgaccaggaagagaagctcatcatccacctgcaggcgctgctcgggaacaggtaactccacttcaagaacagccagtccttccgttggcgcatgctcctagtacgtcctctgtgattcctcagcgcgcggagcccctaacgatcgactgtgttttttgcacgatcaggtgggccgcgatcgcgtcgtacatgccggagcgcacagacaacgacatcaagaactactggaacacgcacctcaagaaaaagttcactagaacgggcgctgctggcgccgaggcgaggagcggcagatgggccgcgcccaggggacagtgggaacggcggctgcagacggacatccacaccgcgcgccaggcactcagggaggcactgtcgctggaccccgcgcctctgtccacaaagcccccggagcaactgccgcagccgacggcgcccgctagccaggcgacgtcgtacgcttccagcgccgagaacatagcacgcctgctggagggctggtggtcgatgcaccccggcgccgcgggaaaggtgtcgtccgggtcgaggtcctcctccgtctccgtctccgtgttctcggacgacgatggcgtaatatctgcgagcaacagcggtggcacagcggcagcgcgcacgccagaggcgtcgatcaggatgaccaaggctgacggcgagggcaccgcggggccggggccggggccatcgttctcaatgctggagagctggctgctcgacgacgccatgggacatggcgacacggggctcgtcaccgtgccgatgggcgacccgtgcgacttcttttag

SEQ ID NO: 22385 - DNA, 441 bp, Zea mays
  Peptide Sequence Number=SeqID_64164
atgtaccaagacgtgaacaaaagattctggtggtacgatatgaaaagggagatagcagatcgaacactctcgccccctctcttgctctgcgcgtggccagagaagtccaccgcccattctacggtcgccgtcgagccctcactgcgcccgttgcctggtgagttccgcctcgccgccagcaactcgggacacccctcagttcgcactcagcccctctggtttgcccggtccgcgctcaccggagtctccgtagtaaagccggagtccgccaccgttgacccgaggcttccccgcgtcctcgccgtcgcccaggcacccctgagtctacactcaagcgacttcgccgccgcggaggaggcaacgccggtcaccgagctgaaaagccccgcgcccccatcgcaatcgtccgcccctgatccaacgactcagatatgtggataa

SEQ ID NO: 22386 - DNA, 171 bp, Zea mays
  Peptide Sequence Number=SeqID_64165
atgcaggttggtgtcattggaaatttggttcattcatcaccaaagatcaagaaggaggttcttaatgcaggggcactgcaacctgtgattggattattaaggatgagtaatctgttggtgcaaccacaaccccttatattgcatatttttagtattagggatcagacttga

SEQ ID NO: 22387 - DNA, 1380 bp, Zea mays
  Peptide Sequence Number=SeqID_64166
atgcagaaggtccatattgtgcaaaggggtgcagtctgtccactaattgaaatgctacagtcggctgatgtccaactccgggagatgtctgcttttgcacttggcaggcttgcccaggacacacataaccaagcaggtattgcatataatggtggcttggtgcctttgttaaaacttcttgactcagaaaatggatctctgcaacataatgctgcatttgccctttatggagttgcagataatgaggactatgtatctgacttcattaaagtaggaggtgtccaaaagttacaagatggagaatttattgtccaggcaacaaaggactgtgtggcaaaaacattgaagaggttagaggagaagataaatggacgagtgttgaaacacttgctttatttgatgcgagtaggagagaaatctgtgcaaaggcgtgttgctctagctcttgcacacctttgtgcccctgaagatcaaagttcagtttttattgataataatggtctcgacttgcttcttgatcttcttatttccatgagttcaaaacatcaacaagatggctcagcagcattatacaaattggccaacaaagctgcagcactttctcccatggatgctgcccctccatctccaacacctcaggcatgcaaaagaattattaaattcaaatttactttgtattatataatcttaatcccttctacaggaaagcgattttatgcacacagaattgctttgcttgcttcttctgatgcatttcgtgcaatgtttgatggcgggtacagggaaaaggatgcaagggacattgaaattcctaatatcagatgggacgtctttgaactcatgatgagatttatctatacagggtcagttcaggttaccagtgaaattgcacaggatcttcttagagctggtgatcagtatctcttagaaggcctcaaacgcctatgtgaatatactattgcgaaggatgtgaatctagataacgtatctgacatgtatgacttgtccgaagcctttcatgccgtgtctctgagacatacgtgcatcttgtacattctggaacattttaacaagatctgcaccagagccgggtaccttctcttgctaattacttttgatctgaaagcagtgcgatttcaagtgactcaatttttaacacgcaatcttgccatgcagttctgcacagctgatccagcgtgttattccagagctccgcaatttcctaaccaaggcactgagttcatcaagaagcccaagtacaaccgacgacaggaacttgcagacttgattttgagtcccaattcattgacactgacaccgtcatctgaccaaagttgctggacatcctgtacagtgaagtttctggcgctgcgcatttga

SEQ ID NO: 22388 - DNA, 468 bp, Zea mays
  Peptide Sequence Number=SeqID_64167
atggtgctggcgactctggcgaaagaagatacacttcctctgatttttcagaaagaagatacacagatcatacctttttttggtggatcagaaattgtgcatatgcgtgtcatggttctgctgctcctgccattgcttgcccaactgcaaaaggtcatgctgcttggattgctcctgttgctcatgcccagacgtgccatgctgcaagcccagcatgcaacaaaccatgctttgggtccaacagttgttcatgatgcaagccagattgcccatcctgtagttcgagcagcagctcgtgctgcaatcagtcatattgcaacccaaactgcagctgcaatccaccacgccgtaaaccaaactgtagctcttactacaatatgtcatgctgcaaaccgaactacagctcatgttgtaaaccgaaccgagctgcttcatggccctcgccacgttctaattgctggcgcctag

SEQ ID NO: 22389 - DNA, 824 bp, Zea mays
  Peptide Sequence Number=SeqID_64168
gatccgttcgaggcggccgtcgaggagtaggactcaccgccagagtcgccagcaccatgggaggaggaacccggcgcagcggggccccgtggacgacgccgaggactacgacggcggcccgccctcgcgacagccatcagcgtcggtgtcgcaccgcacgcagccgcggccaaggccgagggccgggtccagagggagcagcaggaggatgacgacgagaggaggaccaaatggaggaaaaagtttctgtgttccaatggaagtaagatacaaccgttggattctaatggaacaggggagctcctcgtcgtggcacacgacgggcgccgtgtcgtgtggagccgcgcagcagcagaagcgccagcggtgccagggttcttccagcgatcaagctggttccagctcaagtagttctctgcaaatatcagaaccagaaccccaacaaatccaagaagaagaggattactatatggaggatgattgtgatgatgattttgatggctacgacgaagatgattatgacttcgatgaagctgactttaaccagcaccttgctgataaatttgatgatttggatcttcctccaggcgtggaggccaccgtaccttggttgcagaaaactacacccaaggaagatgtcaaagagccacctaaatcaaatactgcagatgagaatgcaaataaatatacgcagttcaagcagtttgatactgttcagaatttctctgaccattactacgctaagaattctcatggagagccaaacagagcctggtcaaagagagttcaacatgactggaaacttctggagaaggatctaccag

SEQ ID NO: 22390 - DNA, 822 bp, Zea mays
  Peptide Sequence Number=SeqID_64169
atggtggtgaacgaggcggacgggtgcgtcttcacggggtccgccgacggcaccgtcaagatgtggcggcgcgtgtacggcggcacggcgcacgcgctcatcatcgtgctccgctccgagctgtctcctgtgaacgcgctggcgctgtgccacgcggtgggagggagcggcggcggcgcaacaaggcggtgctgcttcctctacgcggggtgttcggacggctacgtgaacgtgtgggagaaggaggccaccgtggggcggccgacgcacgccggatacctcaagggccaccgcctggcggtgttctgcctcgcgtccgggtgcggcgggcgggtggtagtgagcgggtcggaggacgcaacgatgcgcgtgtggaggcgggaggggatcagcaaaggcggcggcggggcggtgcacacgtgcctggccgtgattgaggggcaccgggggcccgtgcggtgcctggccgtgggcggcggcgaggccggggaggtggaaggcagcatggtggtgtacagctccggtctagataagagcgtgaaggtgtggaggatacgtgtggtggggaaggaggaggaagaggacgatgacgaggagctagacgaggacggcgtcgaggacaacgatcaccccgaggcagcggtggcgggggagatatttatggaaggagggaagggtgatggcctcgacgcgcatgcgatccccgtcgcgatggacgacgtggtggatggcacggaggacgaggaggccgagttcgtgggctcgacgccggtgctgtcgccggtgtgggtggagaagcggcggcacacgagccgtgggtga

SEQ ID NO: 22391 - DNA, 771 bp, Zea mays
  Peptide Sequence Number=SeqID_64170
atggaggccagtttcaacagaagcagttccccagcatcaccaagttcaactaaagtagttatagaagaccatgcggagttatctggcttcaataaggatctagctgggtccaatgtcttcgggacacattcctcctctgttgaggcggttcaaagtcgacagcttgactactctcatttcatatcacttccattggctttacacccagatcttgtcaacaaactgaactacttccagagttcgatccttggggaagaaaacagtaacaaagatgggagccaaagtgaaggttctattggtgaaatggactatgaccacaagcaagcggaagcaaaaatgggtgccaaaggctcccaatcagattttggcattgacaagtcaatatttatcaaacccgaaacgtttcacctgacggttcttatgttgaagttgtggaacaaggaacgtatagataaggcctcggatgtgctccagtcagtatctacccaagtaaatgaagctttggaaaatcgacctatttccatacagcttaggggtctgttgcacgcgaccgtaatgaacgtgcggcacaggaagagcagcagaaataaacggaacacatggacggattcgtttgatgcccggggcatattcgggagatttgggaaggcggagtggggtgcatatcccatccatgagatccacctttctcagaggttcaagtttgacagaagtgggtactactattgctgctcgtcgatccccttgcctgcggagatgcacacggagtga

SEQ ID NO: 22392 - DNA, 441 bp, Zea mays
  Peptide Sequence Number=SeqID_64171
atggagagcagatgggtgggggagtggaacgcgccgatctgcgcgccgaataggagatctgcgtcgtgccgaggaggagaactggatcgcgcccatctgcgcgttgaggaggagatctgcgccgcaccaaggtggagaactggatcgcgccgagacacgggaggggatcgcgctgaggcacgggaggggatcgcgccgatgggtgggggagtggacctcgacatgggaggggtgtggggcgggatgcccggcggtgagcttggtggcgggcggtctcaggggcggggttggtgggggcgtgcgctcgggggcgggatacccggcggcgatggctggcgggcgcgcgtattaaccggtctggggccattattccagggagccgctgcggggctgggcggctggccatcgaaggaagccggaataagcgggggcggtatttga

SEQ ID NO: 22393 - DNA, 2265 bp, Zea mays
  Peptide Sequence Number=SeqID_64172
atggatcagagccggcgggcggtggagtcgtactggcgatcgcggatggtggacggtgtcacggccgacgacgacaaggtcgcgcccgtctacaagctcgaggagatctgcgagctcctgcgcgcctccgacgccagcatcgtcaaggaggtcgccgatttcgtcctcaagcgccttgacaacaagagccccctcgtcaagcagaaggctttaaggttgatcaaatacgcagttggaaaatctggtactgatttcaagagggagatgcaaaggcactcagcggctatgcgccaactagttcattacaaaggccaccctgatcccttaagaggggatgcccttaataaggctgttcgcgaaactgcgaatgaggctatagctgcaattttctccacagaggaccctaaacctgctgttgcaaccgaaagtcttggcaagcgcatacagggctttggaaatactaattacgagccatctagagatgacaagaagtctttccttagcgagcttagcgaggtagtgggtattggaagtgcatccattaagcaggggttgagcaactttgctgcagcgcatgcaatgatgacaaatgacaatggtagcacatacaggagccctaatctccgtagatctttgaccacggaatctgaaagatatggtcggtatgatccaagtgaaattcaacgtgagagccgagcctcatctgatgcttcaaagaatgcaccttctggtccttggggtccaacttccagttctacaccaactgatgaaactagctcaagtcaaccagggattaagactcgtgaagaaagacttctagagacaattgttactgcaagtgaagcttccaaattggatgcagttgccttgagccgtgcacttgagagcaaactgaattctccattatggcaggttcgcatgaaggctatttgtgtgttagaagccattgtaaggaaacaggatactgatccttactctatcatcgcttcatatttcactgagaacacagcttctgttgttaaatgctctgagctgccacaggtttctctcagagagaaagcctcaaaggtcttgaatatgctgattggggaacaacctaccggaaccgcagcaacaaaagctgcgatgcccacacctgttcagatgcctgatttgatcgatacaggtgatcaagatgatctggcaacaagttctggacatgcaagcattgaacagaattctgggaacagtgcatatgtttcttcagttgatgatttgcttggtggtgaacctatttctgatacaagtgtcactgctgatagtaatggaagcgacccatttgcagatgtatcattccatgaggcagagactaaggagactaatgatctgttctcagggttgacagtagaagagaaatcatcaactaccatgcatgatagttcttcggacaaaaatgaattaccagatatctttggcagctcccctgattctttcaaccagggtagtgttactgaccaaggaactgtcaatgatttgattgctggcttgaaccttaatggaacaggccatgctcagtctgcagttaaagcagaacccaatagcaacagtggttcacagttctttgatacaaaaaatgagtccggccatgtgccaagtgctgcaacattgaatgacattcttggtcaaaactcgctttaccaacagcagcagactccattgcagtacagctttcctcaacatatgatgctcaatcaatcatttcctggacaacaattaaattatggtgccatggggattcttcttgctcagcagcagcagttactgcaaagttttggaaatttcaatgctggacttgggaattcttctttcaattcgatgaacggtgggaatacatctgtgcttccagatattttcaattcaagtaatcaacctcaaaatcatgttgcagtgatgagcagttcgaagaaagatgacaataaagcttttgattttgtttcggtgccaaaggttcacaacttagccaataaaaagaccaagaattggattcaacaaaggagcaaagggataaccgaaggcagccctgaggcgctccgctataattcaccggactgtccgatgtacaccggacagtgtccggtgctccaaggaagagcgcctcaggaactcgccagcttcgggaaatcgctccgctataattcaccggactgtccgatgtacaccggactgtccggtgagccagtggagcaacggctacttcgcgccaacggtcacctgcagacgcattaa

SEQ ID NO: 22394 - DNA, 243 bp, Zea mays
  Peptide Sequence Number=SeqID_64173
atgtatggtttacaggtggtgatgaggaggatggttatgattatgcttatggtaatggttgcctttggtgcaatctatgctcagtgccccattgctaaatatatgtggagagtaattcaagttcccttgaatttaaggctgattccgaaaagtatcaaaaatctgtatgacaattggttagaaaaagaaggagcaaagaatggtggtgctaggaagcaagcttatccgaaagacggcaagtga

SEQ ID NO: 22395 - DNA, 189 bp, Zea mays
  Peptide Sequence Number=SeqID_64174
atggcgtggcaccagcgaaaggcgcagccccggcgaaaggcgcggccccgtccgacatcatgtgtatctgagttcgacgtgagtgaagacgacatccctgtgcagccgtggactaaaacttgcgcctcgaatcattggacaatgcctcatttgtccgcgatgaggacgcgagcgaactacctgaagtga

SEQ ID NO: 22396 - DNA, 189 bp, Zea mays
  Peptide Sequence Number=SeqID_64175
atggcgcgctccgctataaatcaccggattgtccggtgggccatcggactgtctggtgagcctgcatgcaacggctatccagcgccaacggtcgactctgcaaagtgctacatatctgagatcgtcgacgctggtggcaagaagaagccaaatccggcgttcgaggagtgggatgctcgggaccaatag

SEQ ID NO: 22397 - DNA, 258 bp, Zea mays
  Peptide Sequence Number=SeqID_64176
atggcaacagaaaaggggaaccgacttaaatatgaaaaggctattcagacctcaatgggttactatagagtcattagcaaatatgtcagaaaacaggcgcagaggaggaagacgtgctcagcaggacaggcagccccgcaggatgaggcactccagccgcagctgccaccaccgtccccgatgaccatcgagcagatgttcctaatgcagactcaggcggttcaagccatcggtcagactctggccaccattcagtag

SEQ ID NO: 22398 - DNA, 690 bp, Zea mays
  Peptide Sequence Number=SeqID_64177
atggcggggtgtccggagatggccggagcgacggtggttgacggagatggcgcgacgtggaggatcgctggtgaattgccgtgcataggggtggcggcttgcgcgggcggcagcggcggcgcgcgcgggtggtggggtgccggggcgtggggccggggacactcgcgggcggcggcggcgcgcgcggcgagcgcgggcggcgcggcgagcggaggcgcggggtcggtgagcgggggcggcgcggcgagcggaggcgcggggcggtttggtgactttgccgagtgcggcactcggcaaagtcttctttgccgagtgcccgataaaaagcaatcggcaaagccgccggcactcggcaaaggcccagattccggtagtgctattcaggtgccgtttggttcacaaaatgtaacgctagtctccccgaccctacgcgacgagaagagcgagggcttcccatcgaaccactccaggtcagccttggacagatggaacgccgcggcgatggcgtcggtcttcatggatcccaccaccctcaagttcctcctcaatgagatcggtagaaagttcgacgagaccaatgctcgactcggcccggcgatatcgctcgcgctgaatgaacatggtcggtaccgacccaagcattggggtcacgagcgtgcggtgtcggtactgagcgcctggagtttatga

SEQ ID NO: 22399 - DNA, 909 bp, Zea mays
  Peptide Sequence Number=SeqID_64178
atggctgcactgttttcccaagcggtcatccaacgaacaggtccttatggagaggcagggggccactccacggaggggcaccacgaccgcacgagccgaggccacgccgtgcaggggccacgctacgcagcggacatgtcgcgcccggacagggagcagcgcgccggaagagcgcgcagggacccatgccgaggcgggcatgttgcaggcaggggcgggcatgccacgccgcgccgcgggggctgctgcgcggagaggggccaagcgcaagggggccgcgcgccgggcaaggccgcgccaggggccaccacgagcagccatgctgcgcgagcgctgcggacagccacgctggggtggccgggttgggggcgagcgcgccggggcagggctacgccggggcgggggccgggcacgcgccgaacgggcaggggcatgccgggccaccgcgccgagccaacagggggccacgccaaggccgcgccgaacgggcatggggcggctgcgccgggcagggaggggccgggaccgggaccgagcgagcgcgctggggcggggctgtgccagggcaggggtcggggccacgcgctgcgccggacaccaccgccgctccttggtcgcgccgacccgagggcagggggccaggcgggtgcgccgtgtagggagggggagagggccgcgccggggccacgcccttcgccggggccacaccatggtcgggctgcgcccttcgtcggggccgcgccatggcctaggaagggggtcgggcatgccgcggggagggggccgccgagccaggggaagaaaggggcgaggaagggagaaagaggaggagtcggggctccaccgcgggagggagcaaaggcgatgcaggcggacagcgtcgagggcggctccgatcgacgtgggcga

SEQ ID NO: 22400 - DNA, 516 bp, Zea mays
  Peptide Sequence Number=SeqID_64179
atgtctatatcatcggagcacacgaatccagacactccacgcaacgacgaaaacaatcccgtggctgatgtaccagtgggaccaacaggggtgggaaaatccctgcatcagctgtttcaagcagagatgactcaaatgttgtgttcccaccactgccggttcggaggtccacaacatgtgaatcatcgaaaggtcaaaattcgacgaagcgacgagcagttgagaaggagcaattctcttctgtttccatcggctagcatgaatatatctgggagtgattacgcctctatcgaagatttggagacagcaaatggatatgactggtgtcagggcatttgtgattatctgaaggtgtattatctagacaatctggattgtgaatttgtgttgcccagtggaacacctcggtggagcgtgtttaccagaagtttaataaaaaggatcggtgacgtcgacaaaaagtcacacaacggaggcaaaatgacaaacgacaactttcctcaatatttacagtaa

SEQ ID NO: 22401 - DNA, 432 bp, Zea mays
  Peptide Sequence Number=SeqID_64180
atgggagatgggcagggcgagcaggaaaaagggaacgagggcgcacactggaagctcggaccaagacacagggagccggccatggaggttggggagctacgcacggaggcgaacagagagacgggcgccatgggcgagctgcacagccggcgagcatgcacgcgcagagaaacagagcgcgcaggggagctggaacgagaggagagagttccgagcgtgagcagggggattagcgcgctggacagcaggagaagcagaggccaagttgagagcagggagggacgcgccatggagatgggcggccgagctcggcggccatggaatgcgctcggccatgggaaggactcgacgcgtggagatgtcgtcctggtggccgacgagcaggaagggcgcgacacgagagagagcaggagcaacgagctgagagggtga

SEQ ID NO: 22402 - DNA, 1620 bp, Zea mays
  Peptide Sequence Number=SeqID_64181
atggacgacgacctgaaacatctgagggtcagcttctctggggtgaggcagggcggcgagacagtaccactaccatcacagcgaaggacgagttcacgcagagcgagtgatgcggcagaggagtacgacgcggcgtacgcggccacggtggcagcagtcgcctacgccatcgccgcgcgagaggagaggctgtcagcgtctcaagagagcacgccgtatgctgccgcggacaggcttgcgcgtggaaacaagcagtccagcaagtcagcacgcacaaccaagagaggcgagagcctggagaagccaaatttcgaaggcagaaggtcctcttcctcgagatggttcactggcaaagagcccatagacgatgactaccaagatgaacaggctaacgtgtcagtgaaacggccactaagaccggctcagaagaagccagcaccagcagagggtgcggcctcagacgaaaggctccctgctctcgctgatcctgcactacgcgtaaggaaggacttcagtttcacccggaaaccgtcagagaagagaggaagtaggcgattcgagcaagatcaggggaaccagacaacagcgccgccgccgccgccgccaacggcacggccatcggacaaggcgtcgagctcgtattcggcggccggtagtagggacagcggagctgccaccacgtccggtggaccaatggcgttctccagcgaaaacgaagccatggcagatgcgtgggagaaggagaagctggcgagaatcaagaggaagtacaacgagacgatgcagacgattgctgcatgggaggccgagaagaaggccaatgccaggcgccaaaagcagctgaaagatgagagtgagtcggagaggaagcgtgccaaggcgctggaggagtacaccgaggagatgtcgaggatcaacaaggtggccgctgcgtcgaggctgacggcggaggagaagaagaggagtgccgagaggaaggccagggacaaggcgcacacaataaggcaccataggaagctccgcttcgcccgacccagggctcggactcgggctcagccccggaagacggcgaactccgctccgcccgacccagggctcggactcgggctcagccccggaagacggcaaactccgctccgcccgacccagggctcggactcgggctcagccccagaagacggcgaactccgctccgcccgacccagggctcggactcgggctcagccccggaagatggcgaactccgctccgcccgacccagggctcggacttgggctcagccccagaagacgacgaactccgctccgcccgacccagggctcggacttgagctcaaccccagaagacgacgaactccgcttcgcccgaccccagggctcgaactctgccctggcctcagccgacggtcgccgactcgcccgacccaggggctcggactcgaccacggccacggaagacagactcgacctcgacctcggaggagcctccacatcgcccaacctagggcgcggaccaaccacgtcgacaggaggcgccatcattaccctaccccaagctgactcaggctacggggaacaagactggcgtcccatctggctcgctccgccagataggcaatga

SEQ ID NO: 22403 - DNA, 2865 bp, Zea mays
  Peptide Sequence Number=SeqID_64182
atgggcggtgtggctcagttggtggtggtggctgcgctcttggccactgcggccgccgcgccgacggcggcggcggcgggggcactgccaagcgaggtggccgtgggcgccctcttcacgtacgactccacgattggccgcgccgcgcagctcgccatcgagctcgccgtcgacgacgttaacgcggacgacaaggtgctcgcgtggaccaagctcaacttggtgtctatggacaccaactgcagcggcttcctcggcaccatcaaagcgccgtcgccgctcggctcgtctccgcctgcggcagctctcctgcactgcaaccaccgccaaagccgtggtcgcttcccgacgttcgagctcgcgccatggccgctcctcgacgcccgccgccgcgtcgtcactgccatctgcactccctgctgccaccgccgcgtcgtcgccgccctccccgccgcctgcgcgttccacaccggcgccgcatgcaccctctccattggataccgcgcgaagtttctgaatctcgtccagttcgctttggagctaatggagaaaaatgtagttgctgtgattggcccacaatcctctggaataggccatgccatctctcaagttgtcaatgagttacatgttcctctcctatcatttgcggcgacggatccaactctctctgcatcagagtatccttacttcttaaggacaaccacaagtgattatttccaaatgaatgctgttgctagcattgttgattactatcaatggaaaagggtgactgctgtatacatcgacgacgagtatgggcgaggtggcgtctcggctctcggtgatgcgcttgcattgaagagggcacaagtttcatataaagcaactattcctccaaattcaaacacagatgtgatccgtgatgtactgtttaaagcaaacatgatggaatcaagggtcatggttgtgcatgtcaatcctgacacgggtttgagggtattttctgcagctaagaagctccagatgatggccagtggctatgtctggatagtaactgattggctagctgctgtcctagattcttctgcatctagaaatcctaaatatatgagtaatattcagggagtaattgttttgcgtcagcacactcctgattctgatgccaagaacaagttcatatctagatggaacaatgtggctcgtaatagaagtatgactcctggactgaactcatacggtttctatgcttatgattcagtttgggctgttgctcgttctgtggatcaatttctcaatgctggaaaccagatcaacttctcaacagatccaaggctgcacgatccaaatggcaccactttgcgcctgtcaactctcaagatattcgatggtggtgaccagatgctgcagcagcttctcctcacaaacttcacaggtctaacaggtgcagtcaaatttgattcaggtggcaatttgctacacccagcatatgacatcctcaatgtcggtcgctctggcacccacttgatcggctattggtccaactattcaggcctttctgtggctgctcctgaaattctgtatcagatgtcaccaaatgcgtccacaagtacccatcagctgaacagtgtggtatggcctggtgactccactgatatacctagaggctgggtgttcccgaacgatggccagcctctaagagttggggtcccggttaaaccaagcttcaaggcattggtgtcaggcagcacccctgattctgtgaggggttactgcattgatgttttcaagtcagcaattaaactgctcccttacccagttccttaccagtttattcctattggggatggcacaaagaaccctagttatgtcagcatcgttgggatggttgcttccaatacacttgatgcagctgtaggcgactttgcgatagtgagaaatggaacacggcttgcagagtacacgcagccttacattgattcagggcttgtgatagtggcgccgaaacttcttgacgaaaaactctcaccttcagaggagaataccagaaccgcgctcgggcgtttcgtgttgatcatatggatgtttgtcgtgttgatcatcacttcaagctacactgccagtttgacgtcaatcctgacggtccaacagctcgcgacaggaattacaggccttgacagtctcatatcaagctctttacctattggataccagaccggaaaattcaccaagaaatacctgatgctaaacctcaacgttcctgagtctcgattggtgcaactgaacacgatcgaggaatacgctgatgcccttaaccgtggaccaaaaaatggtggggttgctgctattattgacgagaagccatatattgacatcttcctgtcacactactgcaacttcaagattgttggacagcagttcacaagggaaggatggggatttgcattccagaaagactccccccttgctgcagatatgtcgaccgccatccttcagctttcagagagtggccagcttcagagcatccatgacgagtggttcacacagccgagctgcgccaccaatgatgagagcaatgtgggtgcaaccaggcttggcctcggaagcttctgggggcttttcctcatctgtgccctgatctgtctcttcgctgtggtggtgttcttcatacgagtctgctggcagtacaagcagtactccaattctgaagatgctgacgagtccaatgaagctggcgctgatggtgctggcaaaagacagcggaagttgtcacgccttggcagcttccaggagattctaaagtttttcgacatgaaggaggaggaagtcatgaagagctcgatgaaacgacggccaggtgagaaagataaccatgctgctggattctag

SEQ ID NO: 22404 - DNA, 267 bp, Zea mays
  Peptide Sequence Number=SeqID_64183
atggattcctcctcgtccagcctcagccagcagcccgagttcgactacctcttcaagctactccttatcggcgactccggcgtcggcaagagcagcctcctcctccgcttcaccgccgactccttcgatgacctctcccctaccataggtgatctctttgacttcgattatattccccgatctgatcgcctcccctcctcgcggcatcagtgtaacctcaatctctgttcccctatttatttccttcaggtgttgacttcaaggtga

SEQ ID NO: 22405 - DNA, 1455 bp, Zea mays
  Peptide Sequence Number=SeqID_64184
atgacggaccaccgcgacgtgatgttgcccttgtccctccaatacatagccacccgtgccctcctcctgctcgtcatcgcgtccgccgtttcctgctcttccttgccgccggaggacggcatccgggtcgtctctgcagagaaaagaatcgacctcacgggtcccatcgtcaaagtcttcctaacattgaaggtaatgtcttgctcagatgggcatcctgttgcttcctccagcataggcatctcccacaacttttcaacccctttgtgccaggttgagaatgctcccacggcctctgaagcatcacgagttctcctcgccttcacgcccacagagtttcaacatctctctattgtcaaggccacaagagcggaggggaagcgcaagaagaaggcattcgtacccctctcggtccaagcctctgagctcgccaccaccgctcccgacgcccctcgcctctactctgttctgctcagcactcctctgaaaccgggcgatgcaaccactctagaagtgctatacatgctcactcactctttagagcccttccccgctgagattagccagtcagagtcccagttggtttactaccgtgacagtgcggtgcttctctcgccctaccatgtcctggagcaggttacctacatcaaaatgccaagcaataggatcgaatccttcacaagggtcgatcctaccacacgagctggttctgaagtgaaatatggcacatacagtaaccagatgccaaactcctatttgccagttcttgtgcattatgagaataaccgcccatttgctgttgttgaggagcttttactcattgagtactttcttgccaggcttgagtatcaatctaggccatctatcagtggagcttcgtcctttaagaatcttcttgcaaggctgccacctcgggttcattcagtttactatcgtgatgagattggtaacatctcctcatcccatctgcgcactgattcacacaagtccgatctagaaattgagcccagatatccgttatttggtgggtggcactgcacgttcaccattggctatggtcttccattgcaagattttgtctttgagtcagttgatggccggcgctacatcaaccttacttttggttgccctctattggatactgtggttgacgatcttacagttaaagttgtgcttcctgaaggatcaaaaaatccagagcatgtagttccttttgtgacagagaaacatcttgagactagttattcataccttgacgttgttggaaggacgacggttgtactgaagaagaaaaatgttgtaggggagcacaacgttcctttccaggtgtactatgaattcaatccgatcttcatgctggcggaaccattgatgctgatatctgcagtgttgctgtttttcgttgccttcattgcgtatcttcacatggatctttccatcagaaaatcatcatag

SEQ ID NO: 22406 - DNA, 1605 bp, Zea mays
  Peptide Sequence Number=SeqID_64185
atggcggcggcggtcctccgacccacggccgccaccctccgcttcctctccaccccaccacaccagcgccgccgcgtcttggtcggacacctcccctttgctcgccgacgccgccactcctccaccgctacggccccagcgctggaggactccagcccccgcagtggcgaaggcaaggccgtgcgccgccgccgcgcccgtgaatctccccagggcctcctccgccaccagctcgacatgtgctcccgcaacgccgacctcaccaccgcgctccgcctctacgacgacgccctctccccggacaaccccatcccgctctccctccaccactacaactgcctgctctacctctgctccaacgccgccgctaccgactctgacagccatatctccgccaccgccgctcagcgcggcttcgacatcttcgccaggatggaggccgacggcgtccagcccaacgaggccaccctcaccagcgtcgcgcgcctcgccgccgccacccgcgaccctgccatggccttctccgtcgtccgccgcatggccgctgcgggcaccccgccgcgcctccgcacctacggccccgccctcttcgcctactgcgatgccaaagatgccgacggcgccaagcaggtcgaggctcacatggacgcatctggcgtcgtgcccgaggagcccgagctcgcagcgttgctccgcgtcaacgcggacacgggcaaggccgatgaggtttacaggctcctgcacaggacgcgcgtcctcgtcaggcaggtctgcgacaccactgcccaggtcgtcgaggcctggttccggtcggacgcagcgtcccaggcgggggtggacagctgggatcccaccaaggtaaaggagggcgtcgtcaagggcggcggcggctggcatggccagggatggcttggcaagggcgcatggagcgttggctggaccgagatgggcaaggatgggacatgccaacgctgtggggagaggcttgtctgcattgacattgatccagccgagactgacaactttgcaaattcgctcaccgaactggccattaagcttgaggccagggaagatttcctcagttttcagagctggctacgccgccatggaccattcgatgctgttatagacgctgctaatgtaggcctttacaaaagtaaagatttctgtttttcacaggttaactctgttgtaaatgctatacagagagtaactaaatcaaagaagttgccactgatcgttttgcataggagccgtgtaaatgttggtcctgcaaaagccccatacaaccagaagattctggacagttggaggaatgctggagctctgtatgcaacccctcctggctccaatgacgattggtattggctgtatgcagctgtcagttgccgatcgttgcttgttacaaatgatgagatgcgagaccacttgttccaactgcttggcactagttttttccctaggtggaaagaaaaacatcagagccttgatgctgctccactttgcgctgaggcatcaaggctcctggctctagacaatttaggaggctttgctcgtaaattcagccaccacacactatgcgctgaggcccaagccattttgtag

SEQ ID NO: 22407 - DNA, 300 bp, Zea mays
  Peptide Sequence Number=SeqID_64186
atggcgtggtggcgcgcgcgggtcgtcgcgccagcgcgccacgcctggctcgccgtcgtcgtcgccgcgcgcgtgcgcggccgcaagcgccgcactgagcgcgcaggaatcgtggacctccacaaggacgtgcagacctgcgggtaccacgacgttcaggtgatgtggggcatgctgggcctggaggccggcgcgcccagcgctccggagcgccggaagcggtcgccgttctggacctggacgccgtcgttctggcacttcgcttcgtcgcgccgcaccggcacggccgccgcgcggtga

SEQ ID NO: 22408 - DNA, 865 bp, Zea mays
  Peptide Sequence Number=SeqID_64187
atgaagagatggggcagcagcggacaggccgccgattccttctaccaggtccgccccgattgcagccaaaacgtccccaacaccaagttcaagatcaaggcggggaagacactgagcgttaggaaatggcatgctgcgttcacgcgtgatggatgcctggatatcgcctctgttctgagccgcatacagagagggtatgccagatggaaggaagaatgcaaagagatggattctcatgtcggcagtggtaaaatcatcaccgccccgattataactgaggatggattccctattaaggatccgttggtattacttgaggctacttcagacacgcaaggtacttcaatcgccaccggcaacagtggaaatggaattgagaaccgtgtcttggataaacaaattattgactggaagcttaccttacatcaaatagaaagacttggcgggggtgactatctcttcgcattccgcatgttcatggtattgttccggcgagaactatcatttggggactccttgtacctttgggaggaggtattgccgtgcgacggccctaggaacgatgaccccggtgccatgtgcgactctattcagtcatgtgccgccaccctccaggcgccgcccctagtccgtcgcgccgccagggccgcgcgccttctccccaggcgccgccccagcccgacgaggcgccctctcctccctccagccgccgccggtcatttcccttgccccggccgccgccccctgcccctctgcttcgcgcgccaaacacgcgagcagcaaccgcgccaggacccgcccgcgcgccgccaaggccgtgagtcgctggtccgcgctcgcaccgccgagaccgcgagcttggatg

SEQ ID NO: 22409 - DNA, 381 bp, Zea mays
  Peptide Sequence Number=SeqID_64188
atggggctcccggatgggactggtgtctctgccttggatttcttcgaagggcttagatttcaggaatggatcttcaacaagttcaatcgtccgaacaactttctcccggactgggtcagagaatggcaaccgttcgttgaggaagaatcaaagtcttggaaggtgactcatgagcatattcaaaatgcggtcgactcctttggaagggttctcatgtgggatcctgacccttcaaatctctctggccttgaggatttgccttcttcagatgagtcggtgggattcttcaatgatatcataatccccaagggattcacttcccccatgtggaagctcctgaaccagctgaagcagtgctggccattccagctttccccctag

SEQ ID NO: 22410 - DNA, 497 bp, Zea mays
  Peptide Sequence Number=SeqID_64189
atggtgtataagcaaaggtacatgggcgagagcggaaggtggccgaagaagaagttcttcgaggcccatgatgctatgatggcgaccgaggtggcgaagaaggcagcaaaggatgaaatgcacaggcccctgatcgcttgtgatagcgccattgtcgcgcaggttcaagtgcaaactttgttggaggggtacaacgccgaactacaagagcttcacctagccacgagtaaagtgtgcgaccaacttgctcctccaccgccgtccaaggtgcctctgatcgatcggttgcgggcgctacctggtcatgtggagcatgcggtctttgaaggggcattccataagggtagcctggtcttggatcaaatggtatccccctttaacgagatagatgtaggcatgatcgtggaggggttcgccgctggccgaagtgatgaggatttggacgctattggagacttgttctcaaatgctatgaatcaagaacaaggcaacacaaa

SEQ ID NO: 22411 - DNA, 417 bp, Zea mays
  Peptide Sequence Number=SeqID_64190
atgggatcgccgattgtgggtagtagcgacgtcgcgcaggtggatgagggagaggttgcgtctgtgatgatgtgggctctcgaatatgatcctggcatttgctccacttatgaagaggataatactggggctgtggtccacaaaattgaaggaaaggtaaaatcaatacgtcagtttggtaagtacgagagggagaatatgaagaagagggcaaacgatggtgatggacctgtccctatttcggtcttcctggttgctagtgtcctaaaagagaacagtacaaagcttctgcaagaggctcgagggattgatgacattattaggatattgaataatgttaatggaaatctggacgccaaaagagcttgcgttgttgcactaaagcttcataggaagtatcacaaaaagtcttggtag

SEQ ID NO: 22412 - DNA, 672 bp, Zea mays
  Peptide Sequence Number=SeqID_64191
atgaagccggacatcatgcaccaagggcaaggcactcctgctcctcctaccaccgccagccacgcccgccgcatcgcccgccgcacccgggacagctgcgccgcagccctcgccaacactctatgctccctcctcctgggcctcctcctcatcgccgccgtcgtcgtcttcgttatctggctcggcctgcgcccacaccgcccgcgcttcaacatggcctccttctctgtggccggcggcctcgacccggactatagcccggccggcgccagcctctccttcaacgtcaccgaccgcaaccccaaccggcacattggcatctactacgacgccatgcacgcatccgtccacttctacgacgcgctcgtcgcctccggcccggccttcgccgacggttggtaccagcccaacaggaccaccacctcaatcacgggactcctcgacttcctcggccccgtcaccaccgacgcctcctggccctccttttccgccgcggttcgggccggccgcctgccgctgcgcctgcagctcaccacggccatccgcttcagggttgccaacgccttccactcaggccgccaaaagatgcatgtcagctgcaacctgttcgtcggcgccaacggccacctgctgccggactccgtcggggtcgcctgtgacagatacatctga

SEQ ID NO: 22413 - DNA, 336 bp, Zea mays
  Peptide Sequence Number=SeqID_64192
atggggtttcccatggtacagtgcactgaaaaagatcttcaggtgcagtccccctcgccgtcggtgacctttgcgcaaggattcgcgctgatcgcggtgattcgtgctggactcaggcaggatagtgccgggagggtgaaaggatcagaagaggagcggattgggtcgcgggggagatcaagagctagaaccttgcaattgatcgaggggaaaggatcgtcagaggtagaattgtgtgtcagccaagcaagagcaccggccattgcgtatcttggccggtacaggctcaccggagacttgccgtcgccgtccaacgtcatggacccgacactgtga

SEQ ID NO: 22414 - DNA, 141 bp, Zea mays
  Peptide Sequence Number=SeqID_64193
gcttcgagttcttttggagaggaagagattaagggtgtcatgcctggttggagaggaagagattaagggcatgggcggcgtcgccgcgttcatcgaggactggcgcgatcagccgcgccgtctgcgcgagtacaaaatgcg

SEQ ID NO: 22415 - DNA, 336 bp, Zea mays
  Peptide Sequence Number=SeqID_64194
atggtgagtgcgccttctctgaccctgggctttctcacggccgggtttctctctggtagtctcaaggcttatctcctcctccttagtaaacaaacggctggtacttcagcaggccgtccaaggaccttcgccaagcatgatgagaaggatgtctacagtagaagggggcaccagaagaagagaatcataagattttatgaaaccagtaagcaactcccaaatggcataaagaatagggaaatggagacattagaaaagcaccatgtcgtgaaatctcagtcgcatgtgaggtgcaatggtctggcttttgataaactcgaatgtaagggtggctag

SEQ ID NO: 22416 - DNA, 312 bp, Zea mays
  Peptide Sequence Number=SeqID_64195
atggaggctcaacaggaggttgtggacaagaacgcaggaaataggagtgggaagggtgaggaggattcctggttgcttctctcccctaccattcagttgctgccccgattgagccaccgccgcctcagattcatcgtcgtcgccgacgatttggatgctaccgccgacgattcggatgtcgccgccctggatttggcctccgccaccctggatttggcctccgccgctcccgattcggcgctgccaaccccgaaatggcgccgccccttccccttccccttcccctatgtcatcttgttgattcttacctag

SEQ ID NO: 22417 - DNA, 258 bp, Zea mays
  Peptide Sequence Number=SeqID_64196
atggccagtctgatcttcttgttttctattaaagcgttcctttcttgtagcatggattactgggattctgacattagcacaatttgtcaagggcatttatctgtgcagggagagttttataattattctggttgtggaaataacttcaattgtaatcatcctgtaatccgtggatttatagaggattgcttgagatactgggtaacagaaatgcatgtttatggtgttcgttttgaccttgcattgcatctacaatga

SEQ ID NO: 22418 - DNA, 525 bp, Zea mays
  Peptide Sequence Number=SeqID_64197
atggcaccggtgtcggcgctcgccaagtacaagctcgtcttcctgggggaccagtccgtcggcaagaccagcatcatcacccgcttcatgtacgataagttcgacaacacttaccaggtccttgacattgttctctgggatgtccgagcccaaatcttttgtgtattgagagttttggacagagattgtgatgtgaatagcctgcacctgaattctcgtcctggtaatgctacaattggtattgatttcctgtcaaagacaatgtaccttgaagatagaactgtgagactccaactctgggatacagctggtcaggaaaggttcaggagtttaattccaagctatatcagagactcttcagttgctgtcattgtattcgatgttgcaagcaggcagtctttcttaaatacatccaagtggatagatgaagttcgcactgagaggggcagtgatgttatcattgtgcttgttgggaacaaaactgaccttgttgacaagaggttggtggtgtttgctctttcctga

SEQ ID NO: 22419 - DNA, 811 bp, Zea mays
  Peptide Sequence Number=SeqID_64198
ccaaatataccacagtacagtacagcctgattgcccaactgaaattcggttgacattgacacaccccgaccccgactcgaggttttggactcgtcgtgtacgccggctggcgggcagtgacgtcatccgcatccgtccaggaagtgaggtggcccgacgacggacggtcaagcttttgcgaagagaaagtcattgtggcccacgacgatcgtcgctgtcgggcaaaggaaaaaccacaaaggaggagacgcctaatcccattgactacgaccgaccagggattgccgtcatatttcaaacccactgctcgtcagtcctcgtcataatttctcaaatgctatctagtgcctatcggacgggtgatgctatagatttagataaaagagtaaaaggatctagactaaatttgttagggcaaccaaaaattcttatgtatctacaaggccaattgcacactcctcaattttgttcaagcttcgccactgcctgtaaagattctggtttacattctggtgcactattttttatcttccagattggcggatatggatgcattaacgtcactaaaacaatcaggcttgattggttgctgcagcagctcaaaggggcaacaacgtccaaatcccagacccatgcgcgctatgacttctttttgtgcacgctcggtcacgcgcaggatgacttcttttactgcaccggagggagggcaacaacgtccaaatcccagacccatgcgcgctatgacttctttttgtgcacgctcggtcacgcgcaggatgacttcttttactgcaccggagtgagtatgtaa

SEQ ID NO: 22420 - DNA, 585 bp, Zea mays
  Peptide Sequence Number=SeqID_64199
atgcagcgagaagaactagaagtggacctgcagaaagttcgggaacaaatgctagttgtacaaccctttgggaaagcaaggagatatatggaagatggaatggttgatttagctgattcatctaggcacccaatagatatgcataatgagctcctctgtgctcaagagactattagaatacttagaagggaggtttctgagaaggaatcagagattgctcagtgcaatgcacatatctcagagctaaacgttcatgttgaggcagtggcacaagaatacaagcacaagatgaattctaagaaagatgaagagcttagtgctgcgaaacaacgtattgtggaactcgagggcatagcagctaggagacaaagggaggaggcaacggagggcaataacaaggactcatctgacacacaagtgtatctcaaatgcaatgttcaatgtttctatgaagccaaagagaagtttcagcagttgcagaaggttatatccattcttggagatacagagaaaagagctttatatgatgagactgacatcagtgatgacgatgtgcgcacctcatttatagcactccagttctaa

SEQ ID NO: 22421 - DNA, 192 bp, Zea mays
  Peptide Sequence Number=SeqID_64200
atggtgccacaccctagaacgtcggggcctgaatgccaggacgtgggcatgatggccacatggggcatcgagggccccccattgaccggggttgccatgggctcaatcgaaggacatgtggcgtacccagacatatatagatcgggatctcccgaagcccgagagcatgggttcctaggcatcgcaaagtag

SEQ ID NO: 22422 - DNA, 1971 bp, Zea mays
  Peptide Sequence Number=SeqID_64201
atggacaccctcttcgtgctcggccaggagtcccggctgcgcatcctccagcaggcagcggcgcgcgtccccggctgcgcctacctctgcgcctgggcggcggccatcccctcccagccccatcggccagcttcatcctcttcctcggcagctgctgccaccaccagcgcccgcctgctgtgctgcatcgacgcatggctctgcgacggcggccggcccagcctcggtgacgacgcccaccgcctgcgcgcgctcttcgacgcctaccggggctcgctttgcgcacccgtctccgggtgcgtgccggggtgggcgtacaaggacggccgcgcgtacatggagctgccggcacacgacctcacgacctcggcgtcgctgccagtgcagcaacagttctatcaggaagctggcattcagatggcggcattcatgggatgcgagagcggcgaggtcgagatcggcatgtatacggcgccaactagcgggacgtctccgatgagcctggagtcgaccttgcagcaggttttctcggaggacttcttccagcagtcgctgctggaggaactgctccagctgccaccgacgcggccatcgtcgccgtccgtctccgtgggcagcccggcggccgatgccttgacgtcgcttccccgcacgatggccgccacgccgacgccgtcctcctccgtagagcgacgggcgccgccggttccaccgcctcctccgccccacgcgcgcccgccggtcttccccgtccccttcgctcggcacggcccaggtcacgtccgtttcccgagcgccgacaccgacgacgccgcgatggcgcaggccatgatcgacgtcatctccggcgcctcgtcttcctcggcgctccccactccaccgtccacggccacggcacctcctcctccgggaaagcaccaccgcgcgcggcggcgtcgtggggcggcaacggcgttccgggcgtacaacgcggcgctggcgcccagggcgccgtggcggccaccgggcgtcccagggcagcgcatgatcaagatgggcatctccatcctgaggaggatgcacatgctcaggttcagtcgggagcgcactggcaccacgatggcgcagaggggccaggagggagaggatgacctgtcgtcgccggccgtgccgacgagcagccagctcaaccatatgatatcggagcggcggcggcgggagaggctcaacgagagcttcgaggcgcttagaggcttgctcccaccgggatcaaagttagggcttgttcggttctaccccaatccatatggattgaggggtattgagaggtttcaatccctaaaagacaaggctactgtgctggccaagacgctggactacatgagcattctagtagctcaaatagccgacctcgaggcgaagaaccggagcctggagagccgagctcagcaccaccatcggcacgccaatggcggctccaatggcgggcgagtagtggtcctgcaggggctgatgagcggcacgtcgtcttcggagagggtgcaggtccacgtgaccgccggcgccggcgatgtctgcacgtcggcctcgtcgccgtcagcaggcccgccgccgccggccagccgggaggtggaggagaccgtgcgggtgcacgcgcgggcggcgcggagcgacgtgacggaagctggtcgcccggcgcgctggccgccgatcaagggcatggggcgcttcacggtggtggccgttgacgccggccggtccagcgatggcggcggtgactttgctcaggccacattcactctgcgagcgacggtcttgagccggctgtacatgtctagtggctcctccccttggcgaaaacagaagcgaccgagcctccccctcgatcgattcccgtttgctgatcttggtgaattcgtcaccctcctgcgtcgtcttgagtatgttcttcaatcccccttggcgtatcttcaatccttagtattttggtga

SEQ ID NO: 22423 - DNA, 324 bp, Zea mays
  Peptide Sequence Number=SeqID_64202
atgactccgacaacacttcttcttcgagcgatgacaagctcgataggcaggggcaagctcaatggactctgcttcttcgccaacactgcaggaggcctctacaccatggcacttgaagaggacatggtgatagatgagatgacaaatgtcgtagctagtcaggacaagttacttaggcttgtagctcatgagaggaaagagtacaagtgtaaggacgaggccacgcttagggagcttgagtccgctagagcttctgtggtagtgtccggcgagatagaatgtgatgagtgtgctctttacatgttacatattaccacattatag

SEQ ID NO: 22424 - DNA, 993 bp, Zea mays
  Peptide Sequence Number=SeqID_64203
atgcagcggcgaccagagttcagcttcccgggctcgccggcgcgggggctgccgccgcggccgccggcgaacccgatggcgccgcggtacggggacgaggaggtccggtggctgcaggcgtcgccgcaggcctcgccggagatggactacagctccggcggctcgggcacgccgtcgccgcagctgtgggcgcaccaccaccagctccaccggcagtacccggcgtcggcgggcagctcgccgtcgcgggcgcaggccatcgcggggtaccgccgcgagatgctcgacctcgtccgcggcctcccggagtccgcctacgagctctcgctccgcgacatcgtcgagcacccgtcgcccccgtcccctccccacgcccctaccaaccctctgccgccgcctaccaccgccggaccacgcgcgagtcgcgccgtccccgtcccggcgcaggagaagggcgagtccgccggcgccaggaaggacgccgtcgcggcggcggacgccgaggacggcggcggtagcaggaagcagggaggctccaagggcaagaagcagggggaggaagcagaggacgatgcggaagcagcggagccggagcctggaccgcagcgtcagcctggacaccggcctgctcatcaagctcttcctccccgctctccctcggcggcaaagaagaaggtctcgcccaagcccgacgccgccaaggacagcaagaagaagaaagaggaaaggagaaagaaaggaggcggcggtgcaggaggaggagtggtggaccaagagcgagttcagcgaggccgggaacagcagccggaccagcagcagcaacagcaacagcagcgccgccagcctcaggaatgccaatggcgccgccaatccgagagcgccggacaggagctggagcagaaattcgagtcttttctaaaaaagaagcggaccgggtgctacgctttcttcagggcgaacaagggcaagaagaacgaagccaaccaggactag

SEQ ID NO: 22425 - DNA, 243 bp, Zea mays
  Peptide Sequence Number=SeqID_64204
atggccgcgatcctcactctcccctcccccccacgatctgctccccccatctcaacaatcccccgcccccatcgtcgtgcgtctcggctgtcatcttccctaccggaaagcagcggctgggggcaagacggtacgatggctcacctacccggaagcgggcacagctacgccaccaaatcgaaccagacccgcgtcatcaagacacctggttgtatagataggattccacaactggtcgcctag

SEQ ID NO: 22426 - DNA, 513 bp, Zea mays
  Peptide Sequence Number=SeqID_64205
atgactactgcagaagtacctgttggagaaatatttactcctaaaagttggcttagctcaagggcctttcatgctctggaacacctacctaaaaagttggcaaacctttataacctcaataagaacttcggcaacacaattagaagggccacactacatagtgcctttatccaacccttaactgtgattactgatagccatgtaaaagatggcacagtgatcccagcagcgagccacaacaataatcaactcctgaggcaaaagcatcagccagttagtcacctcctcacaaaacacgaagagggcagggaaaataaaattgcacaccacaggatacaatgtgattaccttatctgcaatggggagctccccaagttcagagataaaggtcaatttggaaaacctatagcaaaggctgaatgcaagggttatgattttgatctaggaaaatggtgggacaattatgggacacaagttccaattttgcaaagaatggttgtttgtcatttgtga

SEQ ID NO: 22427 - DNA, 123 bp, Zea mays
  Peptide Sequence Number=SeqID_64206
atgtcggcggctgtggcgtgcgcggagagggcgactaacgacatgctgatcggcccggattgggcggtcaacatcgagctctgcgacatcatcaacatggatcccgggaatctggaatcatag

SEQ ID NO: 22428 - DNA, 693 bp, Zea mays
  Peptide Sequence Number=SeqID_64207
atggcaagcagtcagcacctgaagggtgtgaataatttcctgcagaagcatgggggaaggatgaggtggacttgcttaggatttcagaggaagtgcttgccaagtcctaccaatgtggcatatgaccctattagtacagcgtgtcatcgagcttccagttctggaagtgccccttattcttctccatatggagcttgtggtctgcccatcacacattggggatcggccgaaacacataagcagcagggtatgctgtctgcaaactggtttcacagcagcggtcctgcaactaaaggtcatcaatctaccgtccttgtaaatgacacaaggcaattgatttcttgtactgatcatgctcaagcaaatgtacatacgggtgctcctcctcggttaaaagctaacggacatgatctaaagaatttgtcactcagaagctgtggtcttccttctcggaaaggaaatttgaggaaactcaatccaaagagggttggtgctgcatgggcagaaaaaagaagagctgagcttgaaatggagaaggaaggtgaaattgttccaataacatctgattctagttggctacctaattttggtagtgtctggcaatcaggcacaaggaaggaatcaaggaaagaattcgagaaaaaccacaagtttcatgacacgaagagcaacatgacttatccttggagataa

SEQ ID NO: 22429 - DNA, 249 bp, Zea mays
  Peptide Sequence Number=SeqID_64208
atggccgtccctttgtcgcgtgtgctgttgctgtgccagcagcaggcgcgcgcggccacactagtattcatcagggcccgcgcgcgctacagggaagggaagcaagcagataaaaggggcacgggaaggaaaaatgatgatttcaacatggcgcgcgtgggaactcgtgttctaagcatcacaaaaaatgaacaagaggccgcagctgttcccacgcgcatggactcgtgtcggcgtgtcggcttgtag

SEQ ID NO: 22430 - DNA, 381 bp, Zea mays
  Peptide Sequence Number=SeqID_64209
atgaagctgtggaaggagacttccaggagttccaagactacgacgagttctaggagtgggttagcggcaacccccagtcggctgcctgtgaaggccgcgtttatctacgtttcttttccgcactttgatttactaccggacattatgctttatgtatgcatgtgtgcaagattacaagctgaccctaaggaatgccacctgagggccatgaaaaggatcttgagatatttggtttatactcttaactttgggctttggtaccccaggggatctacctttgatcttgttgggtattcatatgttgaatatgccagatttaaggttgacaagaagagcacattagggacttgtcagtttctggggagatccctagtgtcttag

SEQ ID NO: 22431 - DNA, 1371 bp, Zea mays
  Peptide Sequence Number=SeqID_64210
atggcgggcaacaagttctcgtcgtaccacctcgccgcggccctccgccgcgagccggaccccgccgccgcgctccgcctcttcctcaaccctcccgcatccgccaccccgttccgctattccctccgctgctacgacctcatcatctccaggctcgccgccgcgcgcctcttcccggccatggagtccatcctctcgcgcctggcctcctcctcgggtccccggccccgcgagcagctcctctgccgcgtcgtctccgcctacggccgcgcccgcctccccgccgccgcgcgccgcgccttcgcgcacccggccttccctgggccccgcaccgccagggctctcaacgccctcctccacgccctgctcgcctgccgcgctcccctccgcgacctcctcgccgtctgccgtgacgctgggaccccgccggacgcgtgcacctataacattctcatgcgggcagcggctgcgtccggctcccttgcccacgcgcgccacatgttcgacgaaatgctgcgacggggcatcgcgccgactgtagtcactttcggcaccctcgtcgccgcgctgtgcgctgctggccagctggaaggcgcgttcgaggtgaaggaagtgatggtccggcagtaccacgtgttgccgaacgtgtatgtgtatacaagtctgatcaaggggctctgtgagaaaggggatgtggatgctgcggtggcgctcaaggaagagatggcaggaaaggcagatcttgtgctggattctgctgtgtatgcgacgcttgtacgggcgttgttccaggtagggcgaaaaggtgcggtagttggattgctggaggagatgaaggggagtggggttgtggctgatacggtggtgtacaatgccatgctcgcaggcttttgtgaggatgagaaggatcttgctgctgcgttcgctgtgcttgacgatatgcagaagaatgggtgcaaggcggatgcggtgagctataatacattagttgcagggttgtgcaagctgggccggtggcgggatgcacatgaattggttgaggatatgccaaggcaggggtgccatccagatgtggtgacctacagaatgctctttgatgggatgtgtgctgctgaggagtttcttgaagcaaaccaggttttggatgagatggttttcaagggttttgcgccaagcaacgatggtgcacagaagtttgtccaggggattgagaaggaaggagatgtggtattgctagagtcagtgttgtgccgactagcgaaggtgaatgctttggtgccaagtggatgggaaaaagctgtaagtggtgcgctgaatgatcccacagagttgaggctagagaagcagcttgactctttaagaattgcttga

SEQ ID NO: 22432 - DNA, 1380 bp, Zea mays
  Peptide Sequence Number=SeqID_64211
atgccggtttcctgggacctgcccgacctggagcacgacgccgtgccgccgcccatcgccgccgccgcctccgccgcgccttcccccgcggcggcgtcgggcattgccgccgcagctgctgggcctccccccgcggcggcaccgcgcggggcgccgagccgggcggagtgctccgtggacctcaagctcggcgggctcggcgagttcggggctgcggacgggacgaaggagccggtagtggcagcggccgcggccgcggccgcggcgccgccgtccgctagcccgatgaagcgcccgcgctcggggcccggtggcgccgccggggcgcagtgcccgtcgtgcgcggtggacggctgcaaggccgacctcagcaagtgtcgcgactaccaccgccgccacaaggtctgcgaggcgcactccaagacgcccgtcgtcgccgtcgccggccgcgagatgcgcttctgccagcagtgcagcaggtttcacttgctcgcggagtttgacgaggccaagcgcagctgtagaaagaggctcgatgggcacaaccggcgtcgcaggaagccgcagccagataccatgagctctgggagctttatgacgagtcaacaagggacgaggttctcgtcgttcccggttccaaggccggagccgagctggcccggagtcatcaaatccgaggacagcggctcatactacgcgcaccagcgccacccggtcctaagcagcaggccgcacttcgccggcgggggctccacgccgccggcctactcgtccaaggaaggccggcgcttcccgttcctccaggacggctgcgaccagcagcaggtcggcggcttcagcgcgggcgcgggggcgcagcagctcgaggtctcttccacgtccacggtgtgccagcccctcctcaaggccgccgccgccgccgccccaccgccgccgccagagagcagcagcagcaacaagatgttctccgacgggctcgcccccgccgtgctcgactcggattgtgctctctctcttctgtcatcccccgccaactcctccagcgtcgacgtgggccggatggtcgtccaccagcccgcggagcacatccccatggcgcagcccctcgtccccggcggcctccagcagcagcagcagcaccacccgttcggcggctcccccgcctggttcgcctgctcccaggccggctccagcgccgtctccgccggcggtttcgcctgccccccgggcgtggagagcgagcagctcaacaccgtgctggtgccgagctccgacggtggcggccacgacatgaacatgaactaccacggcatattccacgtcggcggcgacggctcctccgacgggacgtccccttcgctcccgttctcgtggcagtag

SEQ ID NO: 22433 - DNA, 699 bp, Zea mays
  Peptide Sequence Number=SeqID_64212
atgaaagcatccccagcggatgccctagtggcgcgtctcaatgcacggatcctagaggggcggcttgcagcggcgaggtgcatggatcgccgcaccgacgccgatggaggctctgacatgtcgtcgtacatcgggttttccgtcgtgcctacaaagtccttgctggtgggcccaatactcaggagacaagagggttcaggaggctctattgatgctggggatattgatgatcgcaagagaaagagtgtggcgacacgtggtggtgtggatgaggggtgctctaaaggtaaggtcgtggctattgtgggggcctcgaacagatttgttaaggagctggtggagacgtgcgttgagccaggggaggtcatgaccttgctcgacctccgggaggcatcttctcggatgctgaaagtaaccgatggtgagtggcacaaaaaagtccctattcccatggctcccagcgaggataattttacgtcttatctggctcggtgctccaaagttttcccttacgagcaaaatattggcgctgctgtgacagctgtgatggacaaggactgccaggagtctttgcggaagaaacggaaagctcgttgtggcttgtggagcctcaatgtgaggcaaaggcactccataccagcacgaagggtaccgttgctaccgcagcgattcctccgcctgcggtgctggttgttatag

SEQ ID NO: 22434 - DNA, 147 bp, Zea mays
  Peptide Sequence Number=SeqID_64213
atggagctttccccccgtaacgtctttcattcagacaatcctctgcttcccagccttaagaagctggcgataatcgagtgtgagtcagattccacacactccatcatgcatggtcgtcgtttccgactctgcagcaacttgctttaa

SEQ ID NO: 22435 - DNA, 339 bp, Zea mays
  Peptide Sequence Number=SeqID_64214
atgacgaggccgtgggcttcggcgctgaccgctcgaggtggcgcagcggcggtgtgggcagccggtggtggcgcagcagcggctcggcctagcgctagcagatatgcatgcgcggatgcagtaggaatgccaggagatgcgccaagaacgggaggagatacgtcgggagctgcgccaagagcaaggggagatacgctaggagagaagggcgcagcagcaacagcaacaagcaccactgcctccaccaccaccaccagttccaccccgggacaagcaccgggaatttatgagtcacaagcccccgaccttctccagttcgccagaaccactagatgctga

SEQ ID NO: 22436 - DNA, 348 bp, Zea mays
  Peptide Sequence Number=SeqID_64215
atggcgcgcggtgatgccccgatcgaaatcgcctctgtgcgatacagagaatcgccgagtcctgcctcttggccctgcccgcacggtacactccctcggagtgcgatggtgaaccttgccccacttcccccctcctgcaactgcaagcgccgcagcaacctgtggtctgcttttcctccacgtattatggttttaaatgcacaaacaaagatccaatatgatgcaaaggttacagtgagtatgggggcaaaaacacataatgagatcttctctctccaaattgtttacaaattggatattacaatatactgggacaagagttatcagaaactgaaaaagaagagctaa

SEQ ID NO: 22437 - DNA, 798 bp, Zea mays
  Peptide Sequence Number=SeqID_64216
atggcgcgcggtgatgtcccgatcgaaatcgcctctgtgcgatacagagaatcgccgagtcctgcctcttggcactgccctcacggtacactccctcggagtgcgatggtgaacctcgcccagcaaccgcaagcgccgcagcaacctgtggtctgcttttcctccacggaagacagcgccgcctacgccgctccgactgctgagccactcgacagagcgaggctgacagcagccaagtccggcctcaggcgtcataggaaactccgcctcgcccgacccagggctcggactcgggctcagccccggaagacagcgaactccgctccgcccgaccccagggctcggactcgggctcagcctcggaagacggcgaactccgctccgcccgaccccagggctcggagccccggaagacggcgaactccgctccgcccgaccccagggctcggactcgggctcagccccggaagacgacgaactccgcctcgcccgaccccagggctcggactcgggctcggccccgaaagacgacgaactccgcctcgcccaaccctagggctcggactcgggctcggccccggaagacgacgaactccgcctcgcccaaccccagggctcggactcaaccctggcctaagccgatggtctccgcctcgtccgacccgggggctcggactcgacctcgacctcggaagacagactcaacctcgacctcggaggagcctccacctcgcccagcctagggcacagaccgaccacgtcaacaggaagcgccatcattaccctacctcgagctga

SEQ ID NO: 22438 - DNA, 819 bp, Zea mays
  Peptide Sequence Number=SeqID_64217
atggctacacagttgccatgcttcacacagctcagtccaccgtcttgtagttggataaaagatgtcgggaactgcaaggctacgcctgatagggtagccagaagtgcccgagctttgggccactgtcacttccggtgctgtgcaggcccccgtagtgcaaactctttcaagaagaaagactctttcgagaagaaagactctttcctcgaacttcatccggaggtatctctgctccgtggcgagaagagtgccgaggttgtgccaatgaaaggttcctctgatggggtcaatcggatgattgagagctccatgaacggcgttgagttttggatcgtgaacactgatgtgcaggccataagaatgtctcctgtgctcccccacaatagactgcagattggacaggagttgactcgaggcctgggcgctgggggaaaccctgatattgggatgaatgcagcaaaggagagcagcgagtccattcaggaagctctttttggtgctgacatggtttttgtgacggctggaatgggtggaggaactggaactggaggtgctcctgtgattgctggaatagccaagtccatgggtatactaaccgttggcatagtcacaacgcctttctcgttcgaggggagaagacgggcagttcaagctcaggagggaatagcagcattgagaaatagtgtggacaccctaatcgtcatcccaaatgataagttgctgtctgctgtttctccaaatacacctgtaactgaagcatttaatctggctgatgatattcttcgtcaaggcattcgtggcatatctgatataattacg

SEQ ID NO: 22439 - DNA, 327 bp, Zea mays
  Peptide Sequence Number=SeqID_64218
atggaggacgaggtgcagagggcagcggcgagggcgtcgtgggataggaaggcaaggggggaggaggaggatgaagaagaacatgatcctgagatgaccttggactactacgcctaccaggctaaaaagtttcgcaacacctggaacatcctctatttcggccacttcggtcgcttcgaggacaccaccaccgccgtcacccagtcagtggccgattggagccgcctccgcgaggcctgtggtcgtcagcccgtcagccgccgattggagccgccgctgcgagggcagcggctctgggtgaaggccgctgcctgctacttttgctag

SEQ ID NO: 22440 - DNA, 681 bp, Zea mays
  Peptide Sequence Number=SeqID_64219
atgaagctcaacaactttatggagaaatggaagagaagcattccttcaggaatgtgctgtccggatcttgagatgcttgaaggggaagtgttgtgtgaaaagcttggggctgagacctgggtgcatgctttcagtgttactgatctgccactggcgcctgctgagaggttcgcagcacttttccgtgatcaggacattggaatggtagaaaaaatagctatggaccttgcagatatagcttatggtgataatgcacactggaagttgcggaaccttgttaaggaggggcatcatgtcttaatcttttcgcagacccgtaaaatgctgaaccttattcaggacttccaagagggtcctggagctccaatatttttactaaccacacaagttggtggacttggacttaccaaggcagcacgcgtcatagtagttgatcctgcttggaacccaagtacagacaatcaaagcgtagatcgtgcttaccgaattggccagaacaaagatgtgattgtatacagctatcttgtttgtgccctcaggagattccagagctttttagtttgccacaacaaggttttgatgtttccctcacgcataagcagttgcaagaagagcatggtcaacaagttgttatgtaagagatctgttttagctgaacttcctttaatcgagcacggttaa

SEQ ID NO: 22441 - DNA, 474 bp, Zea mays
  Peptide Sequence Number=SeqID_64220
atggcgtcgccgctgctgcagcgcccccacgaactgctgggcccgcgcccggcgccgctcaagctgcaggtcgtgaacaggcggcggcgccggcagccggtgatcatctacgtggagtcgccgagagtcgtgcacgcgcacccggccgagttcaagtccgtcgtgcagcgtctcaccggcaccgcacccgctctcccgctgccgctcaagttcccgttccatttccacttcccgtcgtcggtgggagctgcaagccgcgcactgctgccactgactagcagcactagcagcggcgtcatgtcggtggtgacggttgctgatactacctgtggcggtggctcaccagtccagcagctgccaaatcaccatatgcttgtctccagcgatccgtgtgatctcccgccgccgccgtctcttgccgcgtgttatcatcaacaccacggcggtggtctcctcatcgaccaacaccagtaa

SEQ ID NO: 22442 - DNA, 888 bp, Zea mays
  Peptide Sequence Number=SeqID_64221
atgaggcactctgtgtgcaagcccaatgacgtcacattcgcaactatcttcagtgtctgcactaatcatgcatttcttgtacttggtaaaagtgtgcaagccctacagatgagaatgggttttgattcgtatgtgcatgtgtccaatgcattgatatcaatgtatgcaaagtgcgggagtattggtgaagcacgagctgtatttgagagcattagatgcaaagacttggtctcatggaactccttgatctttggatattcacagcatggccttgctgagcattgcctatatttgctaagagaaatggaagggcatataacaccggatgcaatctccttcctaggtgtgctctcatcatgccggcatgcatgccttgtggcagagggccgacggtgcttcagggcaatgattgaacatggagtagtaccagagatagatcactactcatgtatggtggatctttttggccgtgcagggctgcttgatgaagcatgggatctgatccagacgatgcccatgcctccaaatggtgttgtatggggctcccttctagcttcctgtagggtgcatggaagcacttggatcggcatacaagctgcagagcaccgtctaaagctggaaccaagttgtgctgcaattcatgttcagctagcgaatttgtatgggagcattgggtgctgggatgatgtggcaagagtgaggaaggtgatgaaggagagagggctgaaaacaaacatcgggtgcagttggatagaagttggcaataaagtttatacatttacagcagaaaacagatcaaagaaccagatgattgctcgttatgttcaagttcatttgaagaggcactcaataggaattgacatcacacctcaaatatctgcaacctag

SEQ ID NO: 22443 - DNA, 285 bp, Zea mays
  Peptide Sequence Number=SeqID_64222
atggagcaaggccaggggccgccgccgccgaagccgcctgcgacggagcgcgacatcggattcgccgagcgggccgtggcggcggcaggcgcggccgtcgtgtcagccgtcctcgtcaaccccctcgacgtcgccaagacgaggttgcaagcacaagctgctggagttgtttataacccggaaggaatttttagactatggagaggtactggtgcaagcctggcattggctgtaccaacggttggaatatatctgcctagttacgatttattgcgcaatggatga

SEQ ID NO: 22444 - DNA, 1194 bp, Zea mays
  Peptide Sequence Number=SeqID_64223
atggcggcggctcttcaagccacgccgatcaaaaccctagccacctcccgctggcgcgtcgaaggtgcggaggcgcggccgcggccgcggccgattgcggtgagcttccgttgctccgcggcggcgaggagctacaacatcacgctcttacctggggacggcatcggcccggaggtggtcgccgtcgccaaggacgtgctatccttcgccggagccctcgaaggcgtcgagctccggtttcaggagaagctggtgggcggctcggcgctggacgccaccggcgtgccactccctgacgagacgctcgacgaggccaagggttccgacgctgttctcctcggcgccattggaggctataagtgggataccaatgagaagcacctcaagcctgagaccgggctgctgcagctacgtgccggactcggggtctttgccaatctgcgaccagctgcagttttgccgcagttggtagacgcatccactctgaagaaagaggtagctgaaggtgttgacatcatggttgtcagggagcttactggaggcatctactttggcaaacccaggggttttggaacaaatgacaagggagacgatattggcttcaaacacagaaagtttattcagcttctgagccttaatcagaaccagttagggatgcaggatgtgatcgatcgtattgcacgagttgcatttgaggtcgctcgcaagagaagagggaaactatgctcggttgataaagcaaatgtgctggaggcatccatgctttggaggaaaaaggtgactgcactagcctctgaattccctgacattgagctctcacacatgtatgttgacaatgctgcaatgcagcttgtcaggaatcctaagcagtttgatacaattgtcacaaacaatatttttggtgacatattatctgatgaagcatcaatgattacgggaagcattggaatgcttccatctgcgagtgtcggtgaatcgggacctggtctttttgaacctattcatggctctgcccctgatattgctggacaggacaaggccaatccattagctacaattcttagcgcagcgatgctattgcgatatggcctaggagaagaaaatgctgcgaggagaattgaagctgcagttacagaaacactgaaccatgggttccgaactggggacatatattctcctggaacagtaagatag

SEQ ID NO: 22445 - DNA, 1923 bp, Zea mays
  Peptide Sequence Number=SeqID_64224
atggaggacgatgacaccgagggtgtaggcgagagcacctgtccccccgccgccgaccgaggaggctcctcctcggccggcggcggcggcggcgactcgcacagttacactgacatagagaaggaggtcttcgaccgtctcatggagaagagaatcccggaggtcgtcgcggacccggtggccttccgcgaagagctccgccgccacttcgagcgcctgccgctgaggtcagcgccgttggtcgactcccgcttgtgttcctcccctcacctgctttgcttcgcccttacaatcactgctatacgtgtatgcatgtgcagctacgccgtcgatgtgaacgtcgacaaggcggaggacgtgctgctgcaccggaggattctcaacgagtgcgctcaccctgaaaatcgccccatcttccatgtgggcttcctgaacgtgagtaccactgctcgatcgcgtctccactgtgctttggcttctcactggaaggccaaaacgcgccagcacagactgggatcgtatctttttttagaagagactgagatttttgttctgcctctgtatgagcagtgcatcccgccctcggtggatccacagtataacactcagtccatctctacgagcgaaaacggtaattgtgggggttctcaggattccactttgagaaaatttgagccatgcgaagggatcgaggacctcagtttaactggacaaaaagttgtggttgactctgtggccagttcttcgaggggagatgaagaaatcctccatgttcatgaaattattttttctaccattgacaaaccaaagctcctcgctcagctatctgctttgttgtctgaagttggactgaacatccgtgaagctcatgtcttctcaacgactgatggcttttgtttggatgtatttgttgttgatggctgggatacaaaggagacagatactttgctacagattctcaaggagacagcggcacgaaatcatgcctcattatcaaacccaaccaattctgcagcctcagaaagagtactggaactacaagagaagattggtgattcaaatattgacaggaattttctgcagattggggagaagattgcatctggatcttccggggacttgcatcgaggaacttatcaaggtatggatgttgcagtaaagttcctcagaaccgaacatgttaatgactcgtcaaaggtggagtttttacaagaaataattattctaaagagtgttaatcatgataatgttgttcgattctacggggcatgcacaaagcagagaaaatatgtcatcgtgacaggtgacgagtatatgcctggaggcaatctgtatgattttcttcacacgctaaaaaatactttggatctcccaacggttctcaggattgctatcggcatctccaaggggatggattatttgcaccaaaataacatcatccatcgggacttgaagactgccaatttgcttatgggctctgattatgttgtgaagattgcagactttggagtctcaaggaatccatctcaaggtggagacatgactgctgaaactggtacctacagatggatggcacctgaggtaataaaccataagccgtacgatcacagggcagatatcttcagctttgctgtggttctgtgggagctggtcacttcaaagataccatacagaaatctgacacccttgcaagctgcactgggagtaaggcagggaatgcggttggagatcccgtcatgggtcaatccacaactgtctaaactgattcagcgttgctgggacgaaaatcctaacctgcgcccctctttctcagagatcactgcagagctggaaggcatgttaagggatcatcaggcctccaagggaagcaacaaacattcgaaggcaaaggcacacaaaaaatcgcagagagaggcagaataa

SEQ ID NO: 22446 - DNA, 726 bp, Zea mays
  Peptide Sequence Number=SeqID_64225
atggtagtggccgccgcggccgcactctacctcgctgtaaagcccctgcccctcgtcctcgtcctcgtccaccacagccgccccgcgccctcctccgcgctccgcctcccccgccgaaccgccagcgcctggctgccgcgcttcccctcctgctcgacctcagcgccgccgccgttcgcagccgtcgcatccatggacgcgccgccccagggttaccgcaccaacgtcggcatctgcctcgccgacccatccctcaccaaggcaagcgcggcccctccctcgagcacgatcctgctcctctcccccacgcacctgcgctggattttctcggcttctaggatcgacattcctagcgcgtggcagatgcctcagggtggtatagatgcaggggaagaaccaagggcggctgccttcagggaattgagagaagaaactggtgtcacatccgcagagatcgtggctgaggctcctgtctggttaacatatgatttccccatggatgtgagaaccaagctgaatgccaggtttttatttaggcttactggaaatgatgatgagattaaccttaatggtgatggatctgagaagccagagtttggtgaatggacatggatgactccccaggaagttattgaaaaggcagttgatttcaagaaacctgtatatgaggaagcattgaaacactttgccccctacctacagtcagatcccgccgcttcatcatag

SEQ ID NO: 22447 - DNA, 801 bp, Zea mays
  Peptide Sequence Number=SeqID_64226
atggctccctcgttcactagcctcctctcggccgcgaactccgccgccgccgcgaccgcctcgcggctcccctcggccgccgccggacgggcatccacttttgtgcgcttcccgcatcacccgacgggctgggctggggcctccgtcgcggcgccgcgtacggcgcgcaagcgggcacccggcgtcgcctacgccaccgcagctaccgagaagagcatctacgactacaccgttaaggacattgatggaaaagatgttcctcttaaaaagttcaagaataaggtgttgctgattgttaacgttgcttctcaatgtgggttgacaacagcaaattacactgaactatctcatatctatgagaagtacaagactcaagtcattccaaatgttgtcgtcatgaagaggatcctcctggactctacagttagtttcaaaaggtttgagatccttgcatttccttgcaatcaatttggtgcacaagaacctggatcaaatactcagattaagcagtttgcatgtacaagattcaaagctgaatttccgatttttgacaaggttgatgtcaatggacctaatacagctcccatctataaatttctgaagtccagtgcaggaggatttttgggtgatctcgtgaaatggaattttgagaagttcttagtggataagaatggcaaagtcattgagagatatccaccaacaacttcacctttccagattgaggctggcagattgcaaatgattaatgcagtcttctcacttccaacatattacatgagcattctcaagctcccaaaaatg

SEQ ID NO: 22448 - DNA, 2535 bp, Zea mays
  Peptide Sequence Number=SeqID_64227
atgccacgattgttcgtaaccctgattgccgtcgccgttgctgctgtcagctcagtggattcgcacgccaccgaccgcgccgctctgctcgccttcaagtccggcgtacggggcaacctctccgactggggctcccgctcccctagaatgtgcaactggactggcgtcacgtgtgactcgacaggacgcgtgacgcgcctccttctcaagaactctaacctcagcggcgtcatctccccgtcgatcggcaacctctccgctctcaggaagctcgatctccggttcaaccacctctccggcaccatcccgcgggagctcggcatgctgtcccagctcctggagctgaggctcggccacaacagtctcaccggtaccatcccggaggccgtcgtctgcaactgcacctccctgacctccatcatcctgagcaacaacagcctcaccggcgagatcccgttctccgcacggtgccggctcccgcgcctgcagcagctcagcctctacgagaacaggctcgaaggcggcatcccctcgcccatgtccaacttcaccagcctcagctgggtgcttctgcagtacaatcgcctcggcggcgtgctgcccgtcccagatgttcagcaagatgccgtccctccgatcaatgccgaaatacccaaatccatcggcttattagctcagcagctagccaccatcagcatatcgaatagcggtctccgaggcgagataccagagaccttgtcgaacctcaccaacttggactacgttcttcttgaccacaaccagctctcgggtgccataccacctggtggtcttagctgccagatgatcctggacctttcgtacaacaagcttacaggccagatccctagtggcatgcctgggctccttggtagcttcaacatgtaccttaatctctctaacaacctcctagaggggcccgtgtcgtcactggagttcggcagcatggagatgatccaagctcttgacttgtcgggaaacaagctctccggcggccttccgtcttccatgggcgccttgaaaaacctccgtttccttgacgtttcttccaacggccttaccggtgtgattcctcggtctctgcaagggttgccgctccagtttgccaacttctcacacaacaacttcaccggcgaggtgtgcggcggagggtcattcgcgaacctcacgggcgactcgtttctcggcaatcctggcctgtgcgggtctgtccccggcatggcgccatgcggcggaaggaaacgtggccgcttcctgtacatagccatcggcgtcgtcgtcgccgttgctgtcggcttgttggccatggtgtgcgctgttgttgatcactacctgatgaggtcgtccaggtcgaggttggcaatggcagccccatctagtctactaccacgtttctccacgacaggattggtcaaggccaccggcgacggcgagaaggagagcggcgagcacccaaggatctcgtactgggagcttgccgacgcgaccgacggcttttcagaagtgaatctgatcgggaaaggaggatacgggcatgtctacaggggtgtcctccatggcgagagcgagacggtgatcgccgtgaaggtcctgcgccaggaccaggccgctggtggcgaggtggtcgccggcagcttcgagagggaatgccgggtgctcaggagcatccggcaccggaacctcatccgcgtggtcaccgcgtgcagcacgccggagttcaaggcggtcgtgctccccttcatgccgaacggcagcctcgacagcctcatccacgggcctccggcggcggcggcaggcgggccgcggcacctgggcctggacctggacctgctgctcggcgtggccagcaacgtcgccgagggcatggcgtacctgcaccaccacgcccccgtcaaggtcgtgcactgcgacctcaagcccagcaacgtcctcctcgacggcgacatgaccgccgtcgtatccgacttcggcatctccaagctggtggcgaccgacgacggcgcgagaggtccagaggtgacgggcgaggcatcgacgtcgtccgtgtgcaactccatcactcggctgttacaaggctctgtcggctacatcgcgcccgagtatggcttgggaggccgcccttcgacgcaaggcgacgtgtacagcttcggggtgatgctgctggagatgatctccgggaagaggccgacggacgtgatctccgaggaggggcacggcctgcacgactgggccaagaaactcttgcagcacaagcgtgacttgggcgccgtcgtcgaggagcgctcgctgctgccgtttggcccgccgccgcggggcgagatggaagaggtcgccgtcgtcttggagctgcttgagatcggtgtcgcgtgctcgcagctcgcaccgtcgatgagaccctccatggacgacgtggcgcacgagatcgcgtacctcagggacggtacgtggaggaagtacggggtgacagatctcaaaaccaccatttttgaccagcaaactccaagatgcaccgactag

SEQ ID NO: 22449 - DNA, 243 bp, Zea mays
  Peptide Sequence Number=SeqID_64228
atgggggcgggcccgcgcatctcctcggccctcgcggcgaccggcccctgctgctcgtcggcgccgacgtccgcgccgggcatcaggctcagggtcgtggtggtcggggcgcccggaggtggagggagggagcggttgctagcaggaaatttatgtagtccaaatatagtgaaatatttatggtatgatagtaatgaagtatatgatatttatggtatgatagtaatgaagtatatgatctaa

SEQ ID NO: 22450 - DNA, 543 bp, Zea mays
  Peptide Sequence Number=SeqID_64229
atgccggatgtcaaggcctacctcttctttagatggttaaagatccatgaaaaaaccctgaaaagaatcttgagcctcgtcctgtacttcagggtgtccgaatgctacgacaaggaggtttccgaacatttcaaggagtctatgatgaggttttttgaggacgaaactgagaaggtgaaagggttcacgtcagaatccaccgtcagctacagagaccggctcaagatcatggccgggctgataaaccacctaccttcgaatctaccatctttgcatcgccagggagaggactaccttgaggtggaccttgacatccaccggttcagctacattgctaggaaggggctggattcgttcagggcacgcctcaagaacggcatcctcgatctggggttaacgatccaggtcagattccatttagatcctccaacagagaagaagcagaagctatctatcacagtcttctttagcttctccttgtttgtctatattccagttgaccgctgtgatcttgcaggcctagaagcagtcggagctccctga

SEQ ID NO: 22451 - DNA, 243 bp, Zea mays
  Peptide Sequence Number=SeqID_64230
atgaacgacgagtctggcgccctggtctttaaggtcagcaggccgcgccatgcgcggaggccgttgggcgcggattcaaaggtggcgacccgcggcgtccggttgaggcagggtggagcgtggccgagattccaggcggccgcatcgccccaacgcaacgaacaccagaggaagacgatcctgatgggggggccccacacgtatgagagaaaatatgaaggcattggagaaccagtggtatga

SEQ ID NO: 22452 - DNA, 129 bp, Zea mays
  Peptide Sequence Number=SeqID_64231
atggggatgcgtggtctacgaggttctctggaggacatgattgctggagtgacttgcccctccatcttgccgccgggtgggactttcgacaggggccctacgtggtctgaggaggagcatgaggagtga

SEQ ID NO: 22453 - DNA, 462 bp, Zea mays
  Peptide Sequence Number=SeqID_64232
atggggctaaggcccaccatatggggtcatgaccaggccaggctcgcctcctgggctgggtcgtcgtctctatcaagctccataaagggaggaatcaacaatttcatctataggtttgggatcctgcaaataggatccagacctgcttgtgacccaatggatccccagacaaaggggtccagagggaacataaagctctggaggagaaggcgctctctgggtacaacaccaagccttcagaacagctctaggcatggaagacaccattcggacttcaggctaggtgaggtctggagtcgccacgtgtctaggcaagggtggcaggagcctagaccccctcaggtgcggtcgggcctatggtcaggaaagactagggaaagcagtgtcaccacttattcccaggcctgccctcatccaggcaggggtccggtgctaacacgtggccagacgcccctagcgtaa

SEQ ID NO: 22454 - DNA, 1560 bp, Zea mays
  Peptide Sequence Number=SeqID_64233
atggcggattccatagccggagctgtggcgtcagcccttgcgcaggagatggtgagcagagccgtctccctcgtgctgcaggtcggcctcaagcgcgaggacaaggcgccggcgccggcgcaactgcaagcccaggcagcaggtgctgcaggccacaacgcggagcggctcaagatggccgtcagccagctggagttcgccttagagaggaccgggaagctgcccatcacggacgtgtcactccttgaccagaggaagatgttcaagctcgctttcatcgagggcacgagcctgctcatcaccgagcagcggctgcggcggcagagcacgcaagcccgccaccagcacgaggaggtagaagaagaagcgaaccaccagaaaggccaagcgaagccgaagcgcaggcgacgatgggttcttgcggccatggcgcgcccgttcctcacctcctcctcctcgtcgccgtcgtcgtcgtcaccctgcatcgacgccgccgtcgtccggaggttcgagtggatggcggacagcgcgggcaggttcgtgcgggacgtggccgagtccggcagctcgctgcggcactgcaccttctgcaacccggtcgtgaggcgtctcctggaaggcaagcacctcaggtacgaggcggagcaaggagccgtgctgcggttcctcgacctctggccgctgtgcgtcgaaggccgcggcgtggagacgatcctcgagtacgggtacgaggaccgcggggcgccggagaagaacctcctcctgcacatcgtgctccggctctccgagagcatggacgtgttcgggacggccatacggtgcctgcaggcgatggcgtcccagctgaagctgctggtgagcgaggccgcggtcggggagctcgcgctgctggctgcgtcggtggacatgtgccgttccagcgcgcctccgtgggctcgcatcgatgaaggcgagtacgctagggccagccaggcgttccgtcgggatccagtgtgttgcagagacagagagagagggcagcagctaggacggcctcgggctaccagcggtggtggcgtcgctgacgctgcctcgtcgccggagttgtcccggatattgccggagcagatcatcgtgctggcgttttggtgccgcgttccggcggcaccggggtgcggcttgttgcctaccaggccacctctgaagatgacggttttcttctcgccccatgcgtgctgccatgatgcagaagaggagaggaggagcagttgggcgctggacctttctgccggagagaatggcaacccactgcttagagatgttagcgtacagcaagtcgctgagatggtaggacccaaggcacttgatcgtttcttgcgccagccacacctggcagtatatgcaatcacctggggctctgaacatggcaaggccatctttatcctggagagaccaaaagagcaggatcatagaagaagaaccgaaaggaatgcaaaccgcaggcacatgaaagaaggccagttgcagaaaatcgactttgcgtctttgaaccgcgggatgggatgggagtgcttttgctag

SEQ ID NO: 22455 - DNA, 162 bp, Zea mays
  Peptide Sequence Number=SeqID_64234
atggcagccacgccagttgtgtcgcgccagagtccagccggtcgatcatcgtcccgagacaacaagcagcctgtgtttcttaaaggtgtagcagaagaagtcctgagcaacaactattttgtgaatgcaagtgtcctaacctattatgtcttattcacatga

SEQ ID NO: 22456 - DNA, 216 bp, Zea mays
  Peptide Sequence Number=SeqID_64235
atgcctcacggtggcgcaagtgacccgatttgggggaaatccggtgactgtgggctatggtgcacggcagaggcaaactgcaggtggtatgagcgagtaatagagaggcggagcgagggcataaacagaaatatcgttgaattacaagtgtaccttcaactagaaggagatgatattacaagcgtgacgcaaaaagcgaatgccaagtcagcgtga

SEQ ID NO: 22457 - DNA, 195 bp, Zea mays
  Peptide Sequence Number=SeqID_64236
atgtcgccggacttcaaccgaccgtcgtcgcacgtagaccaagctccacggttctctagaggatatggttgctggagtgacttggccgtctaccttgccactgggttggacagtcgagtggaaccctacctcagcaggagaggagcaggaggagtgatgggacagacttccccatcctcccttatgtatcgttag

SEQ ID NO: 22458 - DNA, 261 bp, Zea mays
  Peptide Sequence Number=SeqID_64237
atggcaccctcgccgattcccgagagcagcgagttcgctgttgaaccagcctgtgcaccggacactgtctggtgcacaccggacagtccggaattgtggtttggggctcgggagtgtgatagcgactcccttcgtcgcggtgcgaatggcgcttccagtggcatgggcgttgggcttggtgggggcactaggaccgctaggaccgtcgatcttgcggcgaacgacggagattacaacaccacatatcgttttgcttcatag

SEQ ID NO: 22459 - DNA, 462 bp, Zea mays
  Peptide Sequence Number=SeqID_64238
atggcgtgcttgccggtcagggaagaggtacgtatgagatcagtggcgcctccccttagctttgacactgatgtcgttcttgcccttggcgccacgccgggagtggtgtcagtggcatggaggccgcccaccgggacgataggatggggagacaccgagcagcgcctggatgcacgcggccctaacaaggagctaaaggttcaactcaaaccaataaaaagatcaaagttagggttcaaaagagaggagcaaaagaaaccgaagagaaccctagtctggcgcaccggactgtccggtgcaccagggaccgtacaggatgaactcctcaccttcgggtttctgaggccgctctccactataattcaccggactgtccggtgtggcaccggactgtccgatgtgccaagcggagcaacggtctccagcgcaacggtcgacttcaacggtcggctgacaacgtga

SEQ ID NO: 22460 - DNA, 525 bp, Zea mays
  Peptide Sequence Number=SeqID_64239
atggaattactcagcaagtcttacctgactaaagaaaagactctcaagggtatgctggttaagggagtcaagggtttcaagggaggtaatcaagttcaaggaagcaagcaagtgagaaagattttaaaaacatcaaggaaggtggcaaatgcaccggggcttgccttcgttagtagcctaggcggcccagctatacagagaaacggggcgcgcccacacccgcattggcaaccttgcagaaaggtccttgtcttcttgaatatctcgacagagtccaaggcactatttaacacagtcgctgacagttacaaagacaccctcgcacttctatctattctcggttggaagtccacgacgacggtgaacacggccgcgctccgcgacgtgaatcgcaacggcggcggcgcgaatctctgcgcggaggagtcgccgacgatgatgagggtcatggacaagctcaaatggaagaagcgcgaagaccgtggtgactcttcgagggctctacaacgtaaaggcaacggctag

SEQ ID NO: 22461 - DNA, 1215 bp, Zea mays
  Peptide Sequence Number=SeqID_64240
atggtgcgcacgaagaatgtgtcagcgccagggggaggagacgacgaggaccctcctcgccccttcaggcaggtcaagggcaagacaatgtacttagagcagcaggaaggttgcaagaagcgacgtatggatagagcagtccgagcagctcttgcagcggtagtagcaccagagcaggcaaaaccgcctttcacagatgggtcgcgacgctctccagcagacttcacccttgtagcaaagtatctctatcagatggtcttcgtgctcgccgatagctgtcgtatgcgcactatctgttacatcttcacacaactgatcaggccgcctcaattccaaggcaccctcgaggcctcatgcctccagtttggatcatatcgtccagcccctgaagacccagtgctagtaccagatccagtgatagacattcaggctgaggatgtggcattccaccagttcgagacccagggcacagctgttgctgatgatgatgatgatgatgaccttgggatcccgccaccgcctcctatgcctcctcgctcacatgatcatgaggccgggagttccagtgtcgcccctagtgcccctcctgccattgaccctgatctagctacaatactccagccccttactaagcagcaagctcatctggcagccgagcaggctcgacaagcagcggtccagcagcagatgtctgagaggatgttatccatgtttcagatcattcaggacatacacgacactctgcagcagcagcttttggtagatagggctgagcaccgggctttcatgactcacattcttcaacataccggtgttcagtctgcccctcctccagctcttcaggcagcggttgtgccagcgattcaggcaggacccccactacctccttttggtccttctccctctccgctccgaccggtcactcgggatttctcatcatcgatcatcggatctgtcagtgctcagccgccagtgccaccagcgcctgctgttaccactgctgttgtggcggtgtccgtgaccactttagctccggtggatcctgcagcgcagcctctgtacgagtcagtaccagctccagcttctacgacaaatcctggatccaagactgagtctggcccccagcttgcgttttcacttctgccacgactgaatgtgccccattcctccttcctcctctggactgtaggtttgggttacccttttggtgtttga

SEQ ID NO: 22462 - DNA, 519 bp, Zea mays
  Peptide Sequence Number=SeqID_64241
atggcgagccctaaaggggggttcaatcccgccgagagggacgagtttagcatcaaccacgtcgaggcggattcggcggccacttacccgaagcgatggtggcccccaagacagtcgtccacggtgagtcgcttccctggcggccgcagcttctttggtgaggaattctcggcgcgacgtttgccaatcgagcacggcgagaccacgagtatcgtcccggggacgagctggagctcccagacccgactccggaaccccgccgatggtgtacgcacgggaagaaggcaggaggaggtgcagatgccatgcgggtcttatcccagggtcgaggtggacaacgaccatgccgcattccctggcgagatccggattccacggcgatggacgcgcgacgaagacgaccgtgagcaagggaggacccaccagcagcgatggagaaaggggcgtccgtgcgcaaagggactggcgcgtgggcccgcatcgcagtgtcagggcaccaagcgcgtgtggagtgggtga

SEQ ID NO: 22463 - DNA, 306 bp, Zea mays
  Peptide Sequence Number=SeqID_64242
atggtgaagccggagcaccaggacgaggcggtgattcgactgtggctgccgagcaaggtggtgagagaggccagactgatgggaatggcagcgaaggagcactttgtgcttgttcatggtgaagggcatggagcctggtgctggttcaagctccgctggctccttgagggtgctggctaccatgttacatgcattgacctagccggaggcggcgtcgatcctactgaccccaacacaatccggtcgttccagcagtacgacaagccactcatagacctcatttcaaccttgccggagggggagaag

SEQ ID NO: 22464 - DNA, 867 bp, Zea mays
  Peptide Sequence Number=SeqID_64243
atggagagaacaaagagagccagcatggttagtcaggtggaggaggaagaagacggcgagcactgcacacacaagacggtgaggaaggggctatggtctcctgtcgaggacgcgaggctttccagccacatcacacgctacggcgtcggcacgtggattgcattgcgctatgtgccagccgagatggatggatatgatcgtggagcgcacgcagggctggagaggagcgggaagagctgcagactgagatggatgaactacctgcagccggacctcagccgggagcccatctccaggcaggaagaggaccgcatcgtgtccctgcagaaactcctagggaacaggtggtccgcgattgcggcgaggatgcccggcaggacggacaatgagatcaagaactactggaactcactcatcaagaagaagaagaagaagaagctcaagcagagcatggacaccggcggcggcggcggcgactaccaccaatcactgccgggcccggagccggaaccggaagtgcaccggacggcagcacatgagggatcgtccgctggtatgtacactactactggtactggtcatatcgatacgtcggaggttcgagtcgagcatggcggtaccacagcctcgcacaacaacgactcggcagatcacccaaggccgtcgccgctgcctcagcttccggttttcgcaggccaggtactactggaccctgatgctgccgttcggaatggcgagcagacagcagcaccagctcaggcctcctccctcagcctaataccgtttcccaagagccgtgagatgaactttgtggaagagtatgtccagttcctcgtgtctctctcggatgatctgctggaaatatga

SEQ ID NO: 22465 - DNA, 249 bp, Zea mays
  Peptide Sequence Number=SeqID_64244
atgagtcaggtctcgtggttgcagttcatttggcgccttcttgctgtggtcatgcagtggacatgtgtagcacatgtccagagagaccagttcaccagagtggtgaagctggagctgaatgaatccacagtataccacaaggacggagcctctgccggtatcccatgcaagcgccaaaggtgggatgatagatgtccggagactcccaaccaaaggctagcaaaacatcgatctcaccgcaaacactag

SEQ ID NO: 22466 - DNA, 234 bp, Zea mays
  Peptide Sequence Number=SeqID_64245
atggagaagaagaggttcttgcaagaggttaaggttgttcaagctatgaagagtcatgatgcattgaagactatgatatatggatggaggtcctccaagaagttaaagttgaatagaaaagaattggagaagaaagtacttaaaggtggttgtctgggtgcactagaccctctaaaggggtccggtggtccaccgggcctcgaccaacggctcttcgtggaagccaacggctag

SEQ ID NO: 22467 - DNA, 633 bp, Zea mays
  Peptide Sequence Number=SeqID_64246
atgaatcgcctgaggccaacctcggacaagcagcacatttctgacgcgctcgagggcatctcgggtgatgctccagaaggtgccaagctccgtcgaccaactctacaatgcgggccgtctcacaaactctccgcccaccaaggtccaaaggcagatagactgaccaactctccactaacaaactcgcccgaggccacacccccatgggaaacaattcatgactcgcccgaggccaaccctgggtgggagaagcagtcacgactcgcccgagatgaaccccgggtgggagatgcagtcatgactcgcccggcgggagatgcagtcatgactcacccaaggccaagcctgaatgggagatgtagtcataactcgcccgaggccaaccctgtgcgaacttcgcacgccggctctgccccgacccacaggtacgccgcctccggcgccggctactcctttcgcctcgtgttggatgacccggccgccggctcgtggacgtcgttgctcgtgctgggtcctcccagtgcgcaagggcgcgacagcgatcgcctcccactattctgccatctcgccgcgtccggcgagaggctcgacactgaagttgatggtgctgggtgggtgcttcgggtgtcgtga

SEQ ID NO: 22468 - DNA, 309 bp, Zea mays
  Peptide Sequence Number=SeqID_64247
atggcgcctatcccggcagtcggcagaggcgggggctgcggaatggggggcgttcgcgcaccgcctgtcgtgctgcgtggtgggggcgcgggcggggcgtcgcctggtgaggcgctggcgaaggagacgagggccgagggattcgtggcggcggaggctcaccaggcgctggcgaaggagacaagggccgagggattcatggcagcggaggcttgggcgtgtgggtggggaggcgctggcgaaggagacgagggcgagggattcgcggcggcggaggtgcgggcgtgcgggcgggattcgcggcggtag

SEQ ID NO: 22469 - DNA, 342 bp, Zea mays
  Peptide Sequence Number=SeqID_64248
atggaagtcatcgttgaaaaagttgctgggtctaagagcggtagacggactgttacatgggcagatgagaatggaactgtcctagaaactagcaaagcatatgaaagcccttctagtagcataaaacaacctgaggaaggcatagacagttcaccaaggttcgcatctgcagaggcatgtgctgcagcacttattaaggcagcagaagctatttcttcaggcacggcagaagcagaagatgtagtttcaaaggctggaatcattattctgcctgacatgcttagccagaaagaatatgacaattgcaaaaacactggcggagatgttgacccagtggcctaa

SEQ ID NO: 22470 - DNA, 495 bp, Zea mays
  Peptide Sequence Number=SeqID_64249
atggcgccccgcatgctctgtgacgacgacggctctcagcccccttacggaagcaagaggacgtcagcaaggacccaaccgctccgacagctgtccctccgccaggctccatcgctcctccgacggccacgacatcacatcagctgggtgccaaaatctctccggctgccacgacggcatggccctcttagagagggtcggccgcgcggggacgaggacgagacaggcgctcgcttggaagccgctcgctccctcacccgcgtggacgcttgtaaccccctactgcaagcgcacccgacctgggcgcgggacgaacacgaaggccgcgggattcccacctctctcacgctgttctccggccgcctcgcttctccccccttcgcgctcgccctcgcactcgacccatctgggctggggcacgcggcgacactcactcgtcggcccaagggaccccccgatctcgaaacgccgacatttctagagtacaatgtgtga

SEQ ID NO: 22471 - DNA, 363 bp, Zea mays
  Peptide Sequence Number=SeqID_64250
atgcagttacacggtggtgaacttcatgatgccattggctatcttgagggcacaatggcaaagaatctagatcatttgacaaacgactttgatgttgccacaaatgttgtgcttggggagggagagcccatggtgagtggtccatttctgagcagcgatggtttgcatgacagccatgccgatgtgtcggtcgtggaagcgctggatcctcttgaacccctaggcgcctttcggaaaggtcctaccaagttgagtccccagaccacaaacgaccaagtcttcgccaatgaggacaaaggacttcgcacatcgatggtgtcagcgtgcctccgtatcgtctgcgaggagtgtgttgtggggtag

SEQ ID NO: 22472 - DNA, 543 bp, Zea mays
  Peptide Sequence Number=SeqID_64251
atgaagttcatgtaccctatgggccgaattgaacttagccgacccaacacccctttccacttctctcctcctggccagccactgtgccctgccgttctcaccgtgccgtgggccccacaagccagcggcctcagcctgagtccgtgcgcgcctacgctgtccggggttttccggctctcgctgactcgtgggcccaagctgtcggatttatcccctccagatcccaccaacctctgtccgattatggtgcgtattggtcggcatgttccgcccgaaaattccggcaacatcgccctcagtcggacttcgccgtggagtataaggaccgccacggccaagggccgcatgaactgccattgcgtgcccttggacgtacacccttgccggaacccgcttgaaggctctggggttcacgcgagtcaactgaaactcggactcggcggaatcgcgctcttgaccaatggagtgcctcgccggaatgggagcttcgccatgctgtcgcgcatgccgtggacagcttccctggcgtcgtttctgtctccg

SEQ ID NO: 22473 - DNA, 2325 bp, Zea mays
  Peptide Sequence Number=SeqID_64252
atggcatcaagcagcagcctcaatccctcctcctattcgtgcttcctcttcgtcaccgccgccgccgtcttcttcaccgcctccgatgctcaggtgcctggattcgtcagcatcgactgcggcggctccaccaactacacggacgagctgggcctgcagtggacgggcgacgccggctggttccccttcggccagacggccaccatctccgtgccctccgagaaacgcgcgcagtactccacgctgcgctacttcccatcaccgtccgccagcagcagcagcagcagcaagcactgctacacgctgcacgtccgcacccgcacacgctacctcgtccgcgccaccttcctgtacggcaacttcgacagcagcaacgtgttcccggagttcgatctttaccttggcgcctcccactggtccaccatcgtcatctacgacgactccaaggtggtcaccagggaggccgtcgtcctcgccgccgaccccgccctcagcgtctgcctgtcgtccacggggacggggacgcccttcatctccacgctggagctccggcagctgaacggctccctctactacaccgactacgaggcggacgccttcctggccctctccgccaggatcaacttcggcgcgcccaccgccgaccccgtcaggtacccggacgacccctacgacaggatctgggagtcggacatggtgaggagggccaactacctggtggacgtggccgccggcaccgtcaacgtctccaccgacaggcccgtcttcgtggccggcagcgagaggcccccgcagaaggtgatgcagacggcggtggtcgggtcgctgggcgagctcacctatcgcctcgacctcccaggcttcccgggcaacggctgggccttctcgtacctggctgagatcgaggagttcttggtcccggagacgcgcaagttcaagctctacatcccggggctggcggacgtgagcaagcccacggtggacatcggcgagaacgcgccgggcaagtaccggctctacgagccaggcttccccaacatctcgctgcctttcgtcctgtccttggcgctgaggaagaccaacgattcgtccaaggggccaattctcaacgccttggagatatacaagtacatgcacatggaactcggctcaccggatggacctgtgatggcgaccctgagcctggccctggcgtcgtcgtcgtcgtccttggctgatgttgcaatggaaggcggtgatccctgcctaccttcaccctggtcctgggtcaagtgcaattcagaagcgcaaccaagagtagtttccataaatctttcaggaaagaacttgacagggagcataccaccccaagtagcggatttgccctgcttagcagagatcggatttgctaataacatgttgacgggcccaattcctgatctcagtggctcctccaacctatccatcattcatcttgagaacaaccaactgaccggaactgttccttcctactttggcagcttgccaaaactgagcgagctctactctgggaacgtgtaccttggaacagcagggaagcaaaagaagaagcatgtcatcatcattatatctgctctgcttggagcatccttgctacttgcagccgccctctgttgctatatgctgacacgcaaggccatgaattcatcatcctcaccacaagcacaagagaaggcgcttcctgcagagcagaacaagttgcagaaatacccaagcacgcagcagctgcagtcgatcgccaccgagacggctcatccctacagcctgtgtgagctggaagaggcgaccaacaagttcgcgagcaggatcggctcagggggtttcgggatagtgtactacgggaagctgagcgatggaaaggagatcgctgtgaaggtgcctagcaacgattcgtaccaggggaagaagcagttctcgaacgaggtggtcttgctctcgaggatacaccataggaacctagtggcgtttctaggctactgccatgaggatgggagaaacattctggtctacgagttcatgcacaatggaacgctcaaagagcagctgcataggcgcgacaagcacatcagttggatcaagcggcttgagattgccgaggatgctgcgaaaggcatcgagtatcttcacactggatgcacgccatcgatcatccacagagacatcaagacgagcaacatccttctggacaagcatatgagagccaaggtgtccgactttgggctatccaagttgctggcagcggagggcaaggactctcacgcgtcaaccaacgtgagagggacaatgggctacctggacccgcagtga

SEQ ID NO: 22474 - DNA, 648 bp, Zea mays
  Peptide Sequence Number=SeqID_64253
atggcggcggcgagccgggaggagggagaggcatggtctacgggcttaagtgttagggctttggtagtgttggaaggggaagaatacagagcggagaagagaggaggagagagaggtaggtactacgtctctcagcagctgaccgagaagagcgacatgtacagcttcggcatcatcctgctggagctcatatccggctgtcctcccatctccaccatcgccttcggggacaacttccgcaacatcgggccgtgggccaagttctactacgagagcggcgacatcgaggccataatcgacccctccatctccacggcggccgagtaccaggacgtgcagtccgtctggaagatcgccgaggcggcggtccggtgcatcgacgcagagcctcggaagcggccctgcatgcctgaggtggttaaggagatccaggatgcattggcgctggagcgggcggcggcggagacgaccaccagcgacagggcgctcgcctgccctttctcccccgcggctgcgagcgtcaggtccggcgggacaatgaggtcgcacgacatggtcatggacaacctgctgctcttggacgatgacgacgactccaccttctccggttcgaccgtcaccaagctcaagtacccggagctacgatag

SEQ ID NO: 22475 - DNA, 2900 bp, Zea mays
  Peptide Sequence Number=SeqID_64254
ggaactccgctcttgccgtaggtcgtggaccatccgaccctcggctgtggaccgtctacgacgtcgtagagagcaccgccgtcggttctcttcaggtgttacaggagaacatcagctacaataataaagagcgggcagcgagcaatgcatattcatggtggtgggcaagccacatccgcaccaaacagtcaaaatggctcgacaaccacctccaagatatggaacacagggtcaagtgcatgctcttgctccttggggaggaggccgattccttctcaaagagggcagagatgtactacaagaggcgacctgaggtgatcactcaggtggaagaggtataccgggcatacaaggctctggctgaccggtatgacatcatgtcaggggagctacacaaagcaaatcacaccattgccacagcctttcctgaccaggtccagtatgcaatgctggaagaggaggatgataacatcccaaaggcgttcaccccagtcgacccacgcaaaatccacaagtcaactgttgatggattgatgatgaagaagaagaagaaaggagagcatcctgggtccatggttggaggagcaacctcagctccagtcaacaaggagaatgcacgggaagagatcagcaggctacagaaagctatattggccatgcagactgagaaagagtttatcaaaagctcctatgagagcggcattgcaaagtactgggatctcgagaaggaaatccatgacatgcaggagcaagtttgtcacttccaagataagtttgatgaaagcgcggtgattgaagatgatgaagccagagccttgatgacagcgactgccctcaagtcctgcgaagacaccattgtcaaactgcaagaacagcggaaggcatctgcggagcaggcagtgggagaatcggaaagagtcaaggttttcagagagaagctcaaggctataatgaacaaacacggcaaatctctaccggtctctctggacctttcagagaagaacaccactcggaagagccatggcgcaggaatggagaatgtgtgctatgtcaaacaatgtgcaatagacgcggagtctatcattgacaagatcaaggaacacttcgagtctgactgcaacatctccatggcagaagttacagagaggatcgatgaaattgtcaacatggtcgttgacttggacctcatggtttcagcacaaacctcccagatcgatcgacttcgccaggaaaacaatgagctggaggattccctgcaaggcctggaggacgagaatactaccgagctgcccagcactggatcaaatgaattgatcgagaagcttaggcaagcagaagaggagcttgtcagggctcaggctctcgaaagctccttccacaaagatgaaagcacaatccgttccaacttcttagaagcaataagcagactccatgagatatcagagctgttgctatcgccggtctgtgattccgcatctgccgcacgcacgtcccaagaaattgagtctttagggccgtcgtcatcaaatgagtgctgtgacatggagaaggtggtggatgatcctaacgatgcacttgtggcagacagcgatgagtcgtcgtcaggtagcactaagcttattagtgagcaacagttagacgtcggccagcaggacagaatttcacgtgagaggggttcattggtacggcttcgtcacatttcttcaggtaaccttggtggaggttgcgatggacaggaaggcctgtcgtcttctgccgtgactgacatgatgaagctgcaggagaggctcacagatagtctagacgataaggagaaggtcctcttaggtgagtacacttcactccttgaggactacaaggacgccaagaggaagcttgtagagatggagaaaaagaaccaggactgcctgaatgagatccggacactgcgtgaaggaatcatcaaaagcagctctgcagcagcaggggaaggaggcagcgagggttcgtgcaagaggagcttctctcgccggggtcacaggaggaccccaagctactcgtctatccatcagaggagaccaagcgtttcttccatttcaaggctgataaggatgggctcggccatccaagaaggtgcagcagggagcggcaagcaaagtgacctactggacgacctgaggctgccggctatcgcggaggcagagaatgcctcgcctctggaagagaagttcagaagggacatcgacacgctcttggatgagaatctcgagttctggatgaagttcagctcgtcgctgcagcgggtgcaggagttccagaacaagcacgacggcctgcagcggaagctgcagctgataaacgaccaagacggcaagcaggacgggtccacggagaagcagctgagggcgttcaagacggagctgcaggtgtggtcggagcagaacgcgatgctgcgaggggagctgcagtgcaggttcacgtcgctgtgcgacatacaggatgagatcacggcggcgctcgacacggaggccgaggaggaggctcacttcacgtcgtaccaggccgccaagttccagggagaggtcctcaacatgcagcaggagaacatcagggtgtcagacgagctgcaggcggggctggaccacatcaagggtctccatgcggaggtggagaaggcgctggccaagctgcacaagagcgtcaacctgccgccgcagcaagcaggagccgacaaggaggaggaggaggaggacgacagctcgtctggccatggcggcggcggcggcagcaagtccaaggtgccgttgcagtcgttcctcttcccggccaaacctaagaagacgtctctgctggcccgtgtcacgccagtgctcccgaagcagtcggtggacatgaagtttcttgccaagttgccaaggtag

SEQ ID NO: 22476 - DNA, 1629 bp, Zea mays
  Peptide Sequence Number=SeqID_64255
atggtgggctcctctctgggatgtccgatacttgagaagaagaaccaaaatcaaaggaaaaagagagaacagcgtcggaggctcggtgcccatgccgcgacagcgcagaaggctggagacgccgtggatccgtgcggcgtcgaattcgacgaggggaacacaccagcctacgacctctcccgcagtagctgcgtgtgggtccgcgcgctcccagcgaccccgccctccggcagtccggcgcgggggctcctctccgatccgactgcgccgcagcgcctagcgctcggctggcagccgccccggccggtcggccccgcccctgctgcctacatccgcctgcagccagaagatctgcctccagcgaccgccctgcctgcccttgtggcttctgtggttctgcacaccagcacacgcacttgtccccaaacaacggcggcggcgatgagtatctcagaagagcttcccggcgaaggatctgacggtgaggaggaggtcttcatcaacgaggaggacatcatccacgagataaccatcgacgaagaagatctccccgaccgcgacgacgaagatgacgacgtcgtcaacgggatgggtaggggtggattttgcttggagctgcagctttcagtctatgcgaatgaagtcttcattgtcgcctgcagtcctacagattcatcacttgtggcttctggaggcaaagatgataggggattcctgtggaggattggatcagaagagggtgccctggagctgactggacataaggatactgtcggcacagtggctttcagttcagatggaaatttgttggcttgtggaagttttgatgggcaaataaatgtgtggaatacagctacacgaactctcaagggaacccttgagggttccgggtcaggttttgagtggcttaaatggcattctcggggacatttgataatcgcaggatcagaggattgtaatgtatggatgtggaatgccgaccataatgccattctgaatacctttgctggacatagtaacacagtgacatgtggtgattttactccagatggtaaacttatatgcactggatcggatgatgcgtctttgaggatatgggacccaagaagtgcacaaagcagacatgttgttcgaggccatggctaccattctgatggattgacatgcttatcgatgacttcggattcacaaacggttgttagcggctccaaggacagttctgtgcacattgtgaatttaaactcgggccaggtcgttggctcattagcaggccacaccaattctattgagtgccttggtatctcgtcaagctatggctgggtagctacagggagcatggatcaaaagctgatcatctgggacctcacgcaccaatccagccgatgcatttgcgaacatgatgagggcgtgacatcgctgacatggctaggttcgtcaaggtacgttgcgtcaggatgcattgacggcaaggtgcgcatctgggacagcctctctggagcctgcgccagggagttcagtgggcatgcagatgtagtacagtcgctggccatcactgctgacggcaacaccatggtctccgcctcatcagatggctccgcccgtgtgtttgacatctccatgttcaagtga

SEQ ID NO: 22477 - DNA, 138 bp, Zea mays
  Peptide Sequence Number=SeqID_64256
atgtcccgtttgcaattaattgaagaccaggtaccagaggcaatgagccttgcagccagtttgcagcataaaaagcccaattatgtccgctaccggttcaacgcagcatgtgccgaggatttctactgccgagcataa

SEQ ID NO: 22478 - DNA, 327 bp, Zea mays
  Peptide Sequence Number=SeqID_64257
atggcgcggttgggacacgcggtggccaacggcgagggcacggcggcggtgagcacattaccccgcgggcgcaagaagctcctaaccaagtcaatcggatatattaaaacatcaagctctttgaagagctctttgaaaagaggtcacacactttacccacaagccgtgattcccattctgcccggggttctagcctccccattgatcactaccaaggtccttactgagaggtacttaggaaacaacctgagtcccctaaagtatcacaagaacatcattgggataacatcatcgtatcataagatttacatcatgttcattgattaa

SEQ ID NO: 22479 - DNA, 291 bp, Zea mays
  Peptide Sequence Number=SeqID_64258
atgcggaggtggccggggaagcgcggacgtgggcgcgtccacggtgggggcgtgggtgagaggttagggaagcggagggggctgatgggtgggtccgtggggcagcaagaggggatccgcaaattggcagtcaacagtgacggtgatatggaattttttgagccaacccaactttatattcaagccatcattcaacacttatcttcatttgctggtaaattcgatcctcatgcatacattaattgggagcttggaatagataaggaatttgataagcatgatttatcttag

SEQ ID NO: 22480 - DNA, 1311 bp, Zea mays
  Peptide Sequence Number=SeqID_64259
atgtatagcaacttcaaggagcaggcgatcgagtacgtcaagcaggcggtccaggaggacaatgccggcaactacgtcaaggcgttccctctctacatgaacgcgctcgagtacttcaagacccatctcaagtacgagaagaaccccaagatcaaggaggccatcaccgccaagttcaccgagtacctccgccgcgccgaggagatccgggccgtcctcgacgagggcggcgcggggccgggggccaacggaggtgacgcagccgtcgccacgcgccccaagaccaagggcaaggacggcgacgggggcaacggaggggatgactccgagcagtccaagctcagggcggggctcaactctgccatcatcaccgagaagcccaacgtcaagtggaacgacgttgctggcctcgagagcgccaagcaagctctgcaggaggccgtcatattgccggtcaagttcccacagttcttcacggattatgactggctacttgattcaaatctagaatttattgacctggcaagagagcttttagctaaaaaacgaataacttttgcaaaactccgaaagttgtcgcttgaaagtatatcttcttcagatctggtttcaaagtggatgggtgaaagcgagaaattagtcgcaaatcttttccaaatggctcgtgaaaatgccccttccattatctttattgatgaaattgattctttatgcggtcaacgtggagaaggtaatgaaagtgaagcatctaggaggattaagactgaacttcttgtgcaaatgcagggtgttggtcataatgatgataaagttcttgttcttgctgccacgaatacgccatatgctctggaccaggctgtgcggcgaagatttgacaagcgtatctacattccgctacctgacacgaaagcaaggcagcatatgtttaaggtccatctcggggatacaccacacagtttaactgaaagcgatttcgagagcttggcccgtcgaacagatggattttctggttctgatgttgctgtttgtgttaaggatgtcttatttgaacctgtgcgcaaaacacaggatgccatgttcttcttcaaggcagacggtgacatgtggatgccatgtggaccaaaacaaccggggtctgtacagaccacaatgcaggagcttgcatccaagggcctcgctgcaaagattcttccaccacctatctcaaggacggattttgagaaggtcttgtcgaggcagaggccgacagttagcaagaaggatctggaggtgcatgagaggttcactaaggagttcggcgaggagggctga

SEQ ID NO: 22481 - DNA, 672 bp, Zea mays
  Peptide Sequence Number=SeqID_64260
atgaatgttgtggtaacttcacacctacccgtctgtttatatagtgctgcagcatttgagaacaagtccccaacagatgtaaacaacaaattacacctcaagctccctgaaggcacgctgccacttaaagtccttcctctggagggagagcaagactgccgtcttggtcgaccagctggcccactctcgacagagcaagatctagaactgggtgctccagatcttcccctagtggcagatgttgatctttctggtagcgatgtccttaggtttggaggcgcatcaagagagaaaccaggcatatcagatggtttccatggtcttgatttgatagtgggtgagctgccccttgaaggtgttggcgctgcagttttcgctggtgaagaacctttgggcattgtagaacctggtttggtgattgacgacgatctaaccggtgcaaccaagttaccatgctgggcagaaggggcagaaggtcgccttgttggggtcaatgcccttgatgtaggcttgctttgcgctgatatggtgggcctggatgatagtgttgttgacctggtagcaggtattgatgatcttgaagtaggtgttgatgatcttgaaaagctccagttttggcaggaacagttgtccgggaagtgggggtccaaggtcttgaacctttggaactag

SEQ ID NO: 22482 - DNA, 501 bp, Zea mays
  Peptide Sequence Number=SeqID_64261
atggctatggtctacactcttgtttcatcagccaaagagtggctaagtgagatatatggtcagaatggtggtgacgaggaacctgaagaaactgaagcagaagaggaggaagtgggttcaactgtagcaagtggagactttgaattggctacggttattataccacatggtgaagctgttactgtagagagctttttggcgtggagagaccgatttgaagctgagttggccttacagcgtgctaaacttatgccagattcagctcttacatcctcaaaggaaaagaaactcacaggacggcagtattttgaaagtggaaggcatgcagtgaaaggagcaagcacagttgctgatgaagatgaagaagaggaggaggatattgaattcgatgatgattttgaagctatcttacaaaacttgttcccctactttgatacagacgatgaagaggacatgcttgagcattatctagctcaacaatcagagaactcagcagcttaa

SEQ ID NO: 22483 - DNA, 366 bp, Zea mays
  Peptide Sequence Number=SeqID_64262
atgacggagaaaaagcgaaggcagacgaagactgacggagcgaaggccctaagacggagggagcgttcgaagcactcaaaggctttgtcggttcctttcgaagccaggaacggcgaaggcctcaccgacttccgaagacttggcgcatggtgcatggagttttctgtcgctacccgcgcgtttttgaagtggtgggcccgtgtaaaaccgccctgggccgcctggtcccacttggataacgtaggtaaccagggcataattgtatttgctaagtgtaccctattgcgagaggctgaaaacactgttgctctaatacactatgttgcaagcatcaaatcatccccgttctcctactgtttggattag

SEQ ID NO: 22484 - DNA, 741 bp, Zea mays
  Peptide Sequence Number=SeqID_64263
atggagctacaacctaaccacactgtggagtttgggacatcgaggatttactcgggccacgtgcatgagatgcagcgtttgggttattttgggaatggagttgggcaagcaccgggggttgaagatgtcctcgaactggaggatccatcagttgacgccgaacgctatggtggcgttggcaaagtcttcgccaagaattattgtttgcattggcagaagaagaagatatgtggattgattgcccaatttgggtcttgcacattcatgccaaggactgggaagatgtcgaccgaagtagttgaaattgttccgtgtgccaagaataagtggggtgactggtggaatttttggttttatgtggcgccggaggatgtcaaaggggtgcctggtttgcccacgtccatcttgtgctcgcattgttatgtggcctttccacaatttaaagtgaagaaaggggttaaaaacgaggaggcccttcagaacgtagcccggttgagcagtgatcgtgatttggttgaagagttcgttgcctgcagtgtgtggccgctggctcacgggtggggtctagccgaagtcaagcttcacctgatgccgtttttgggtgaccagatggagcggaatcctacgttcgccatcgatctgcgagggcgggatgtcgccgcctgcattcgggaggtggagtcggaggatattaagattgttggtaaatatgtgccgaagacggagatgttaaggagctaa

SEQ ID NO: 22485 - DNA, 720 bp, Zea mays
  Peptide Sequence Number=SeqID_64264
atggggccgaaggcctcttggatttttgttgaggaattgacggggacatgtgctgggcctcaggaggttatgacgtcgcccgaactccgggaaacatctttgcgcatgctgaaggttaccggagacccaacagaagaagcagaaagccccgcttcgactggtggatccgcatcacaacaccaagatatcgcgccccagcgcgtgggggcagctctggctacaacgatgccccctgcgacaccagtggcacccacaaaggcatcttcgccaccgcgcgttgttgaaacgatggtgtcgaagactagaggaatagggcaggagttgtatgtcgatgactacctggggcggagactgggtagtttggtggtggcgccagcgaagctgcccgccagcacagggggtttggcaaagggtgtggctgggacgtcgctggacccatgggtggaattttgtgccgctgctgatggtggaggcgaagtcgccgtggcggctgccgccgaaggtgtggcgacatctgtcacgcgacaattgcgatatgtgacgatgcttgagaaggagaaagaagatctcagtcgtcggctcaatgacgagaaagaagccaccactgaggcgacgacagaggcagagagcgcccgcgcggaggcccaagctagccacaagcgtgccgtcgagcttgagctcatggtaaagagcatgcacgcctatttgaaagtcgcctag

SEQ ID NO: 22486 - DNA, 483 bp, Zea mays
  Peptide Sequence Number=SeqID_64265
atggccgagatcgacccgagtgagagtgggatcgccaccaccgcccggtgcttccagatcctactctctcctcaggatgatgattttgatgagtcagcttatgtcccagttcaactggccctgatttttgcgcacactgagaagtaccccgatgaacctccactactaaatgtgaaaagtgtacgagggattaaaccacatgatcttgcatccctgaaggaaaagcttgagcaagaggaagacgttgatgagtcctcatgcatgacagttaccctttgcgctgatgtcacgatagctgaacatgaggtggaggagttggggtcgaggataaccgtggtcaacgtagcaattgaggtagccaatgtcaaggcagccacacatgaagtcatgagtgcaaagaggcgtcgtggtgatgacaaagacgcgttgaagcagttgtcgtgtagggggcaatgtcgaggtcgacacaatcagggtcgttga

SEQ ID NO: 22487 - DNA, 207 bp, Zea mays
  Peptide Sequence Number=SeqID_64266
atgcaggaatcccttgtaggaccgccatcgcagcaaaatcctcccgagggcctccctacactgaccactcccctactgcccttgcccctttcgggactaggcgcactaatacagggaaaagcaggggtctcggtgaaagaatcactagacacagaccccatccatgtggactgcgggttgattcttaaaactatggggtctctttag

SEQ ID NO: 22488 - DNA, 347 bp, Zea mays
  Peptide Sequence Number=SeqID_64267
cgctgtctcgcgccgaggaacgggcacaacgcatgcgcgcgtggaagacgtcgacagtacgcgccgagccgccgaccacgaccacggtccacgaatgcgcctacggaaggtgtggacatgcgtcgtcaacaggggccaatgcgcctgcgtccaggaggatgaggaactggaccctcctcgtcctcgaccacatactcgacttcgaagcagtattggagaggagaaagtggaaggtcataccctcagatatggtcaagacacatttaagaatcccgatagaagaggttattgtgggactcaactactgggaccaccacactgacaccctcaatgccctgggaggctag

SEQ ID NO: 22489 - DNA, 177 bp, Zea mays
  Peptide Sequence Number=SeqID_64268
atgtcgcgcgcgttcgacgactactatatcaaggattatggcgccatctcggcgccggagctgtcggtcctgaccgtccgccacatggtggaggcccatcctttgattgcgtggccatgtcataaactagcatactacactgttccattgctttctgatcgtcaatttgcggtctga

SEQ ID NO: 22490 - DNA, 351 bp, Zea mays
  Peptide Sequence Number=SeqID_64269
atggtgacaaagctcagcagaggtcgttctcgctcaaaaatggcgaccctgatacgcggaacgaaggcaccggtcacaggtcattttcaactcataataaagggccaggatacgcgtgcagcgaggggcgagatactactgcctgccggcgataatccaagaagggatagagtgcagagaggagaagcgtcccggactgagaatctgaaccgcagcacagctcggtccagagctgcggcagcgaacgccttccaaagtgatattgtaacctcgtaccctaagattgcaactgggcatgcaactgaaataagttacccaatgcgagcttattttagcttattttcactataa

SEQ ID NO: 22491 - DNA, 1668 bp, Zea mays
  Peptide Sequence Number=SeqID_64270
atggcgtgctgctcgccgtcctgcaccatcccgctgggcttctcactcaccccgtgctccgcctccccgagccccaccgcgcatcccagcgcgtggggcgtggcaactccctcggccgcctccgcccgccctctttctcgcgccaggatctcaccgcgctgcacctactccggtggcgccagcgctgcccctggtcctggggagctacccgcggcggcgctccgacgggtccttgagatgccgggtgcgcaccaggcgcccgcctgctacgacgcgctgagcgcacgcctcgtcgagcgcgccgagttcagggcctgcttcacgagcggtttctcaatctctgccgcacggcttggattaccagatgttggtctcatctcgtacggggaaatgatcgatcaggggcgtctgatgactgaagcagtttcaatccctgtgatcggtgatgcggataatggttacggaaactgtatgaatgttaagaggacagtgaaaggatttattaatgctggttttgctggaattattcttgaagatcaggtgtcaccaaaggcatgtggacacacacaaggaaggaaggttgtctcaagggaggaagcaattatgcacataaaagctgctgttgatgccaggaatgagagtggctctgatattgttattgtggcaaggacagattctcgtcaagctgtgtctcttaatgaagcattatggagagtacgggcctttgctgatgctggagcagatgttctattcattgatgccctcgcctcaagggaagaaatgaaggcattttgcgctatcgcgcctggagttccaaaaatggccaacatgttagaaggtggtggtaaaactcctatactgagccctgttgaactggaagaaataggttataaaatcatagcctatccattatctctaattggtgtatcgatgcgtgcaatggaggatgctcttattgctataaggggtggtcgcatacctcctccaagcagcttgccaacatttgaggagatcaagaatactcttggcttcaaccactattacgaagaagacaaacgatatgcggtgacaccagcccaaccattgtacgggactggctatgataattatacaagtgaaccgaacagtccgggagattccaggtccagggctaaaaaaacacaagaacctgttattgacatattgcctcagctctatgatattggttccagtgacagcagaggaccttcaactggaatgtggtctcgaactcttcgactaaagattacaggaagagatgggatccagaaaatcgatgccaggatacctgctgggttcttagaagggatgacaagaattattccaggcttggctggagctaatattatggaaaggcttcggaatgctcctgttgatacagacaacccccagaatggtcaaatactgcttgattttgaggacgccatgggagataggatccagcttcacaacaatgatatgaatcggcggtgtggcacgaacaaggacgcctgcttccactatacagacctcgactatttcatcgccaactattccaagatgaagggcaagtcggaggcagacaagtgtcatttccaatcccgtcggcacaagtacacctctggcaaccacaagtctaagatgaggttcgacaaggtggcattcaagtaa

SEQ ID NO: 22492 - DNA, 183 bp, Zea mays
  Peptide Sequence Number=SeqID_64271
atggtgatgggcacacggactgtgagttgctgtgggcagggcaggcagataaaaccttcccaggaagatacgcacccaccaaggctcaaggcgagtgcttatcaggcatggtcaatgaaggtagcgattagaagagagttcacaacgactgaccgaaagaaaagatattatggaatgacataa

SEQ ID NO: 22493 - DNA, 1161 bp, Zea mays
  Peptide Sequence Number=SeqID_64272
atgcccgccgcgctggcgcggtacccgtccgcgacccgcctcgacctcaccctctgcgcgcgcgtccccgacgccgccctcgcctccgccgccgtctccggctcctccgccctccgcgccgtcgacctctcccgctcccgcgggttcggcgccgcgggcgtcgccgcgctcgccgccgcgtgcccggacctcgccgacctcgacctctccaatggggtccacctcggggacgccgcggcggccgaggtagcgcgggccagggcgctgcggaggctctcgctggtccgctggaagccgctcaccgacatgggcctcggatgcgtcgccgtcgggtgcacggagctgaaggacctctcgctcaagtggtgccttggactcacggatctggggatccagctcctcgccctcaagtgcaggaagctcaccagcctggatctctcctacaccatgatcacaaaggatagcttgccttctatcatgaagctacccaatcttcaagagctgacactggtggggtgtattggaatcgatgatggtgctcttgttagtcttgagagagaatgcagtaaatcactacaggtgcttgatatgtctcagtgtcagaatatcaccgatgtaggagtttcatccatcctgaagtcggtacccaatctattggaactggatctttcatactgctgtcctgctaaagaacctgctgaagctggacattacctgttgtcgcatggagcactccaactgattgggaagcactgttctcacttggaagagttggaccttactgacagtgatttggatgatgaaggattgaaagctcttgccagatgtagcgaactttcgagcctaaaaattggcatttgcttgaagataagtgatgaaggtcttagccacattggaaggtcttgcccaaaactccgcgagattgatttgtacaggtgtggagttattagcgatgatggaattattcaaattgcgcagggttgtccgatgctagagtctatcaacctatcatactgcacagaaataacagaccgtttcaatgattttctctctcaaaaatgcgcaaagctgaaatctttggagatccgtggctgccccagtgtttcatcgattgggctctcagaaatagcgatggggagcaggctgcttttccaagcttga

SEQ ID NO: 22494 - DNA, 1473 bp, Zea mays
  Peptide Sequence Number=SeqID_64273
atgggggtgtcgctagcaggtctctcttctctggataaccacaccaccaatcatgagggaatcaccttcaacacagggggggccatctacatcttctgcggtaacaagagcagcataactaaatcgattgattctgttgatgatagttactcagctgacggtgttgaagattcacaactattcctctccgtgccagctttaaaccaagctgcatcttatcttgcccagacagcttcattcctcactcaatgcctccctgtacctggttttgtgggtctatctgaggagggccaagagttattaacactgccacctgcatcggcttcaggcagactttctgttcagacttcttcagtagagccttccggtaccaattcatcccttggtcagtcagattgtggtggaaacccctctcaagaaaacgctggacagatggtgccttcgcatgtttttcagaatggagcttcactgttccaaggccttgttgaacgtgctcggaaaacggtccgtggttcagcagatgatattggctggctccagcgagatcaaagcttacctacaactgaggatgggacagccagattcttagagatttttggattctgtctgtttagtaaccacggacctctttactttgtcaaaacaaaggcatatttctccaagatgggtctggcttgccatattgccaaaattcatagtgagtcttcagtgagtaaaaatgcacgagagataaaggaatacatagaagaaatatactggggatcaaggaaacgtgtgctcctccttggtcacagcaagggtggtgttgatgcggctgcagccctctccctctactggccacaactcaaagacaaagtcgcaggtttagcattagcccaaagtccatatggaggaagccccgttgcttcagatatcctgcgagaggggcagcttggtgactatgtcaggctgcgtaagatcatggagatcttggtatccaaggtccttaagggtgatctgcaggctctagaagatctgacttatgaaaggcggaaagaattcctgcgacggcacccgctacctcaggatgttcctatcgtttcgttccacacggaggcaagcatcactcccagcgtgctcacagcgctctctcacgttgcacacctggagctcccgattgctggcgatggcaattccactaggatcccagttgtgatgccactttcagccgcgatggcagcatgctcgcagttgctggtggcgaggtatggcgagaagagtgacggtctcgtgacgaggaaagatgctgaggttcctggttcagtggcggtccggccggagcggaagctagaccacgcgtggatggtgtattcgtcgctgaaagaagagtctggggatcaggcggacacgtcgcaggtatgcgaagccctgctgactctacttgtcgaggttgcacagaagaggaggcatgagatggcaatgaaagacgagtga

SEQ ID NO: 22495 - DNA, 654 bp, Zea mays
  Peptide Sequence Number=SeqID_64274
atggcgaagaagcgatcgactggcgagctacggcggagaatagaagtaccatgcgacgcgaggccaagaccaaatggtctgctaatgagtcgagccaaggtatggcttgggccatacgtggccataccgggcgctccgcccctggtggttagcaacttctgccgacttgccagcactatatcctacactagaataggaaagcgccctatcgggcgctcagctggtccagagaaggtaactactgtggcattcaatggtagagttctcaagcttggtccagattcatgtcagtcaatgtgcccactgcccaagcttgtggaacaagcctactcaaatgaggggaacttagatggagtgcaggtcatttcgtggataaacatgtctaatgagctctataacatagtttcaggtttagaaagtcataatctgattctgagcttccgctacttagccgtatcggactggtttacacttccagccagtgtgaagtgcgtctttgccttctcaaccatcccaggcttgcaatatgcttgcagcggtgcagagcagcaacaggttgtattgtatgatgcggtggaggcaccctctccactcttcggcggctcgaccacaacgccagtgttgtcgccatcctcgtcccgttttgagttctag

SEQ ID NO: 22496 - DNA, 576 bp, Zea mays
  Peptide Sequence Number=SeqID_64275
atgccgaagtcgaagcgcaaccgcccagtgaccttatcgaagaccaagaagaagccaggtttagagcgcaagggcaaagtagtcgccgagataaaagatgctgtcgacaaatacagcagcgcctatgtttttacctacgataacatgaggaatcagaagctcaaggacctcagggagcagctcaagtcttcgagcaggatttttctcgctggaaagaaggttatgcagatagcgctggggcgttcgcctgctgatgaagctaaaacaggcctccacaaactttccaaggttgagcttaaggaaggccctctggaacagttcacacatgagatggagccatttctacgcaagcaaggacttccagttcgcttgaacaaaggtgttgtagagttggttgcagaccatgtagtttgtgaggaaggaaagcccctttcgccagaagcagcgcagactctgcggctgcttgggatacaaatggcgacattccgtctataccttgtgtgtcgctggtcgggcgatgactttgaagtttacaaagaaggcttgatgcacctaggagctgatgaatcctcttaa

SEQ ID NO: 22497 - DNA, 1857 bp, Zea mays
  Peptide Sequence Number=SeqID_64276
atgggcggccgaggtggcggggaggaggaggagggggtggtggacggcggccggcatcatctgcggcatgagcaaaggctgaacgtcttcggcggggaggaggacgacagggacgaggggtggcggcggtggtcggtgctggtggcgacggtgtggatccaggcgctgacggggaccaacttcgacttctcggcctactcgtcggcgctcaagtcgtcgctgggcgtctcgcaggaggcgctcaactgcctggccacggcgtcggacctgggcaaggcgctggggtggtcgtcgggcctggcgctgctccacatgccgctccacgccgtgctcatgctgtccgccgcgatggggctcgccgcctacgccgcgcagtactactgcctcgtgttcgccggcggcgctgatgcgggagcgtcgtcgtccgtggccgtcccctaccctctggtgttcttgttctgcttgatagcagggtgcagcatctgctggttcaacacagtctgctttgttctctgcatccgcagcttctctgcgagcagccgctccctagccctctccctctccataagcttcaacgggctcagcgctgccttctacactctctttgccaacgcgctctcccctttctccccagctgtctacctcctcctcaatgcaatcctccctctcgccgtctctgtccttgcactcccagcgatcctcctctgccacaaaaatgagggccacatccaaagtgcgcccgggcatgacggccgcgtcttcctcggcctctacatcctcgcattcatcaccggcatatatctggtggtctttggatctttcaccgcaaccagctctactgcgtgggtcatcctcacaggtgccatggtcctcctcgcccttcctctcatcatccctgcctgctccagttgctcagatggccctgaccctgcatatgatgacccacataagccactcctcatcagtcagatggagtccaatgccatgatgcaaaagccaaaggagaaccaggtgcaggtcaagggccgcctggcgacgctcggtgaagaacacagtgcaaagaagctcattcggtgtgtggacttctggctctactacacagcctacttctgtggagccactgttggcctggtatacagcaacaacttgggtcagattgctcagtcattgcaccagcagtcacagctcaccatgctccttgccgtctactcatcctgctccttcttcggccgtcttctctctgcactacctgacctccttcacaggaaggtgtcacttgctcgcacagggtggcttgctgctgcattggtccccatgccaatggcctttttccttatgtggaacaaacaagatggaagcaccctggtagcaggaacagcgctaattggcctaagctcagggttcatctttgctgcagcagtgtcagtgacctcggagctctttggaccaaatagcgttggggtgaatcacaacatccttatcaccaatatcccgcttggctcactcctctatgggcagattgctgccatggtatacgatgcaaatggccaaaagatgacagtagtggataaccgcactggcattgttgacaccatgactgtgtgcataggggtgaagtgctactcaaccaccttcgtcgtgtgggcttgcatcacatttctggggttagcatcaagcatagttctattcataagaacaaagccagcttatgccactgctgctagtcggtcaagttcatgcaggacttcaggattgaatctgactagcatttcagctttctgcctaaaattaaatgtgaaaacttctccttcagtctgtgccaaggaggcactaatgcttcaaataggggtgtcataa

SEQ ID NO: 22498 - DNA, 219 bp, Zea mays
  Peptide Sequence Number=SeqID_64277
atgggcgcgcggccgtgtggtcacagtcacagtggtcggagtgtgattggttggaaatcgaacgcgatgcgggccttccttttgggctcggtgggccacgagaaggtaactgtcttggagtcagaaaaacgagcttgggaaagcagtccagaggcccaagcaatgagagaagctctcaatccatggcgcaagcatgatgaacaagaacaacagaagtag

SEQ ID NO: 22499 - DNA, 465 bp, Zea mays
  Peptide Sequence Number=SeqID_64278
atgcgcccgaacggcccgggccgcggggtccccgtcgaacatgccgagccgcatctacacggtgacagtgttgaggagcgcgacgtcgacgtcggcgtcggcgaccttgcccgcggcgacgatggagccggcgtagagcgcgaggaacggcccgcagtcgaggtcgaggccgacgcggagcgtggcggcggcggcgtcctcgggggtgcgcgtgtaggcaaggggcggcaggctggggatgggggtggtggaggatttgggagaagagcttgcgaggaaaggggaggtggttggcgttgggcgattgtgaaggctggcgagcggggcgaaatcctcgcgcggatggggaggaagggggcagagctacctccggatgaggatggcggcgttgagtgcggcgatgcgcacggagagagagaagttgaacgcaccgatctaagaagtgacgttgtgttcaggacataa

SEQ ID NO: 22500 - DNA, 258 bp, Zea mays
  Peptide Sequence Number=SeqID_64279
atgccctggctgccgtcggctccggcgcctgggcacgctcacaccctcgtggagcagaaggcggtggatgaaatggtggacgggtttgggatcggaaggctgcaggagctcctcggcgctgctgcggggcaggcggccgagattgatgacatgtacgcagggatgctcagcaagctggagaagctcgccagggaggtggaaaagagcaatctccgtgtgctcgagcagctgcctgaatattcaaggcagattgactga

SEQ ID NO: 22501 - DNA, 654 bp, Zea mays
  Peptide Sequence Number=SeqID_64280
atggtggtgacgatgaagtgttgcttctcgtacgtggccggcaccacaccctactatagtcgttgctcttcgggccccttttccgacgacgacttccatgctgtctccaccgccatctccgggaaaccccagggatctacaagagaggcaacattgattaaactggttgatgcgttagaaagttttatgctccatggccttgtggagaacaagcactcgattgtttggctgtcatcacatttgttggcgcaactgatctggctgaaacagagtcgtcttttgaaagccatgtgggatgtgattcatccaaaatctggttcaaatgtattttttccatttacttactaccgtattttgcaagctgatgctggaaggagctgtcgcattgttaacacatggggaaatggtggttctaaaaacaagcttttcctagatatgcaagaattaaaagccaaaatatcaggtttggccttgaatctttctgctgaggttggggggaaaggtgtagatatgaagaaccttgctgaccaaagagacttgtttcaactttttactccaaaacatttagttttgctctgcttaagtgttaatgaatcaaagttggatacgcggtctctggtcaatctggaggtaagtgctcgtgctttgccatga

SEQ ID NO: 22502 - DNA, 801 bp, Zea mays
  Peptide Sequence Number=SeqID_64281
atggcaccgagcacggcactccccttagagcttggcacgttcaaccgcggccgtaaggcagtcaaatccgtgatggcgtggccgaacagaggagagcggcgccgggggacctcatggtcgtcgccaacgtcggtgactctcaggttgttctgggcactgcatccgacgacggtgccaccacaccgtccagctcatcgtccacctgaagcccaatctgccacccaagagtcatcggtactcgtcttatcgcgcgcgttcgacgactacaataccaaggactatggcttcatctcggcgccggaggtgatgcagaggaggaccgacaacaatcaccagttcgtcatcctcgccaccgttgggagctccccttaccaacccgcgagtgcagagaaccggccatgccccacctcgcccccacccccatgctcctccgacacacccgagacagcagatccacacgcatcggtgtcgctccacccgcatcgacgacatggacaggatctccaaaccactcgcggctgccgctccacccgcatcagcgacacaaataggatctctgcccgcgatcagcgcatgcacccctctcccaacaccgtgatgcccaccgccgcgcgtggatgccaaccccctccccaccaccccgcccccacccaccctctctacatcacgtggatcttagtaggagcctttgcagattggatcaaccatgatggacctccaagttgtttctcaggtgaggaccaagtcatggagggagaagagctcaacgccgggtaccacaccagcaacaacaacgggtag

SEQ ID NO: 22503 - DNA, 456 bp, Zea mays
  Peptide Sequence Number=SeqID_64282
atgggcggacgcggggtgccatcattacttgtttaccggggcgagccgggtaatgatgcaccccctgcggcgtggtcggtccgagcccaagttcgggcgaggcggagactcttcctgaggccgaggccggggtcgagcgagggtgcgattctgtccgtggtcgaggtcgaggtcgagccctggggtcgggcgaggcggagtccatcttccgaggccgaggcgggggccgagccctggggtcgagtgaggcggagtccatcttctgaggccgaggcgggggccgagctctggggtcgggcgaggtggaacttcctgtggcgcctgaggctggactcagctgctgtcagcctcaccctggcgggtggcacagcagtcggagcggggcaggcggcgctgctttcttgtcaggttggtcagtggaaaggtgaagtgactgcggtcacttcggccctgtag

SEQ ID NO: 22504 - DNA, 138 bp, Zea mays
  Peptide Sequence Number=SeqID_64283
atggcatcgaaatttatcccatggaaccttcggacatgggatgaaaacgcacataatatgaagaatgcggtttgggagaaggatgaaccagtgccgaagctacccgtgaaaaagctccggcttagcgatggaaagtga

SEQ ID NO: 22505 - DNA, 162 bp, Zea mays
  Peptide Sequence Number=SeqID_64284
atggagactcgtctaccacaacctgcaatttcttccgcaggtgattctattcatgcttttccatcctatgatggcaccaacaactttgagtcgaggatgactcaaaaccaagaaggggagaatgatgagttcatggatgtcaactatatgctcaaggcttaa

SEQ ID NO: 22506 - DNA, 294 bp, Zea mays
  Peptide Sequence Number=SeqID_64285
atgggtaaagtagtaggggagaggaacaggaaaagagcggtggctagggtgatgctgtgccagggagagaagacagggggagagggtggcagcgtagcgatgggttcattgtggcctctgagtctctacccaggggttgctttgtccttgcgcctccagctcagcagttcgctgtggcttccttgcctaggaggaggcgacctccttgctccgcatctctgccatgcaggagaggagggcaagcgtggtggaggtggcgatttagtagcaggagatgaggagacggaggactag

SEQ ID NO: 22507 - DNA, 792 bp, Zea mays
  Peptide Sequence Number=SeqID_64286
atggtggttgacagtggatctggcagtgaaggatctgctgtaaccgtgcagggaggcggaggcgatgagggcgagtggcgcgtcggattcggtgttgtgtgcaggcatggatgtgggcgctctcgacgaactctggtaggcgctagacatattcctcctgccctgaggtcagacgacaccatctcaagctcccttccaccaaactctagtggtcacaatgggagcatgatgaaccaggatcacagaaaggctcttgcagatagggagtttgaagcattacaggataggatttctgggaagatgataaattttcgaagagtttcttgcataaacgggactgttccactgtccccatcattaatgtcagctgaggaactttgttctatgtgcaagtttgtggaggatggaaaagagagattagtagttggtagtttagaccttaatcagtgtctttggctaccagatgaattgactggaaagaggcctggggtaaatgaagacatccagacaagagcatatctaagcaatgtctgtgttgccaaggagcttcagaaaaaaggcttaggctatacattagttgacaaatccaagaaattagctcttgaatggggcataacagatctgtatgttcatgtcgccatcaacaacgtagcagggcaaaagctgtacaagaagtgtggatttgtttatgaaggcgaagaacctgcatggaagggtaggtttctggggagaccaaggaggctgcttctttggcttgatatgagcaaagtgcttgtgcgatcgtgcatgtaa

SEQ ID NO: 22508 - DNA, 231 bp, Zea mays
  Peptide Sequence Number=SeqID_64287
atggcaaaccttgaaaaggcatttaaagcatataaattagtagataataaaaaagtggcatctttacatgaacttgaaaaggcatttaaagcatataaattagtagataataaaaaagtggcatctttacatgaacttgaaaaggcatttaaagcatataaattagtagataataaaaaagtggcatctttacatgaacttaaaaagacattttggtatggtttatactag

SEQ ID NO: 22509 - DNA, 1329 bp, Zea mays
  Peptide Sequence Number=SeqID_64288
atggcttcaatattctattttgatttctctgcatcgtttgttggtctgggtatgattgtccctcatgttgtaaactttgggttactttttggggccatcacctcttggggattattatatcctttccttcaaagtaaaagagggcaatggtatcacactgacagtcgtacaagtttgagtggaatgaatggatataagattttcattgccgtgacaatgattatcactgaagggatgtttaacttcattaaactccttacggtgagctcaattgacctatacaagaagaggcaacaaaatgattcagggaagatcaaatacatgttgacaagccccagccttagctatgatgatcgtagaaggcttgatgtgtttcttggtcagagaatcccgctccatgtgccggttgctggatatatcggatgtgcaatagtatgctcagtcgtcatcccttggatcttccaacacattaaactctaccacatggcccttctgttcaccattcttcccgttttcaccttctgcaacacgtacggaacaggactcacagactggtcagttgcacaatcttatggcaggttcatacagttcgtcatagcagcatgggttgccgtgcctggtgcggtcatcgctagccttgcagcctgtggggtgtctgttgcagctctgaatgtgtcttcacaagccatgcaagaccttaagactggctatatgacttcgacctccccgagagctgtagtggctgggcacatatatggtgtactgattggttctgttattatcccatccatttttcttgcatttgaggcgaacgccaaaagtactgcacccattggatccaaggattcagagtactcatgtccctctgcagcagtctatcgtgccattgggctacttgggaagcgaggagtgaaggagctcccagatcactgcatcaccctctgtttggttactttcttcatgacactagctattgaaacaattagattggtgtcccaaagaagaaactggaagctacacagtttcatcccatgcatgatagcaatagctctaccattccttgctgggccttacttcaccatcgatatgtgcctaggcagtgtcctgttaatcatatggaacaaaagaaataggccgcatgcagaattactgtcgtcagcagttgcagcaggcttaatatgtggagatggattgtgggttttgccgtcatcagtactcagcatcttcaatgtgcatccaccaatctgcatgaaatttctttccagtggaaaacaagtggatattgcagactcattcctaaatactttaggaccacatggaaggacatga

SEQ ID NO: 22510 - DNA, 507 bp, Zea mays
  Peptide Sequence Number=SeqID_64289
atggcgtccacgggcggcgcggccaggcttgggttggaaacaagggggaacacaaggacagcgcgcaggcaccccacctcctggacctcaattggatcgcgtcgcgctcccctggaggttggaggatcgacgcgtggagttggggagaagcaagcaggaatccatgccaggtcaggcgaggtaaatgggggcggactgaggaaaagagcagcggtaccggatgaggagggtgtggcagagatcctcggccaccttctgctatctgtgattgatggcggcgcgatggctgcctcggatccccgtcatcgcggagcagagggggaggagggtgcgatggggtggatccgaggccaccttccatcgacgacgtggggaggaggctgcggcggagatcgccggccaccttccgtgattgatggcgacgcgatcctcggcacaaatttgtggacttctttggtgacaagagaattgaggggaattagtgaggatgagggcccagagaattga

SEQ ID NO: 22511 - DNA, 297 bp, Zea mays
  Peptide Sequence Number=SeqID_64290
atggcgagcacttctttgaggaccagatttgaagaactctccatgtttaaaggttgtattaacttcatccaacatgatgtgcatgaacatgaccttgcatgcagatcccaacggcttcacgagtttagtgccttcgccgattggataaggactccggcgagcgaccgcattgccagcacctgcaggctcagtttcaggagtggaagaagcatagtagcacaaactgccaaagtggagctcctcgatgtacacgagaagaagcagggcagggtaggtatctcatgtatacaggtttag

SEQ ID NO: 22512 - DNA, 219 bp, Zea mays
  Peptide Sequence Number=SeqID_64291
atggggtgcctaagcatcagctggctccccgtcatgaagctgtacaacactactctgcatgaggaagttcatatgtcgcacaaccatttacacctgtatgagctgcccgaggaagccgagatggaagcaggtgtagttgaagctgatggcggggaacttgatgggggcttgacaaatttggaatcccgcctcttggtcctatggaagaccaccctctag

SEQ ID NO: 22513 - DNA, 132 bp, Zea mays
  Peptide Sequence Number=SeqID_64292
atggcgccggagaagaccgtggcggcgcggactccggggaagatggctactcacaccaatggctttgctctgatcacgacggctatggcactctgcggcatggtgattgttgcggggtgcgggggttggtga

SEQ ID NO: 22514 - DNA, 123 bp, Zea mays
  Peptide Sequence Number=SeqID_64293
atggctattcagtttgcgctggccaaggtgaccgcgggtgaacgattgaggacgatatctggtggctgggtgcgtgatgaccttgcagagctcacggtggcttcaatttatagggggcgatag

SEQ ID NO: 22515 - DNA, 414 bp, Zea mays
  Peptide Sequence Number=SeqID_64294
atggcggagaagagctcgcttcgccggttgaagcgcctcctcccggcgttcgccgccatcgacgccgcaatcgaggccgccaccggcttctcccgagacaatatccggcaagagaggggcaagctcgtggagatgctctgtgatatcatcacggacaacgacagcgtcgagctagcggaggggctctgccagctgctcgacgaggcgatggttttcgcgctcaagaggctgagggtggtggaggcgaccccgaccgtgctggcaaccaccgacgccatcaaggccgtcgccggtctgcggagtcacgagtccgggagggtttcattcaacaaccactgtgactatactcgttgtgctttctctgttctgatgatgtctacaagaagcaataggccgtgttcagtttctgcttga

SEQ ID NO: 22516 - DNA, 276 bp, Zea mays
  Peptide Sequence Number=SeqID_64295
atgtcgctcgacacgaagctcatcgtcgacgccattagcgagttcttcgacaaattcgacgcacggtgggccaagcgggacgccgcgcgggagacatccaggcatgtccctgttctgacccagtccgcggctgtcggagccgacgtcgttgccgacaactggggcgaccacttcgacagtggcaacgactccttcgagcagcactatgaggagcccatcatcgccgacaactgggcggcttcttcaacgacggcgagcagtactgcgcggcgctag

SEQ ID NO: 22517 - DNA, 1167 bp, Zea mays
  Peptide Sequence Number=SeqID_64296
atgccacgcagcgccgacgtgacgctgctgttcttggtagccgtccacgcgcttctcgtcactcatgccgctctgcaggaaggtttctacacgagcaacaccgactgcacggtggacgtggaggccaccgtggcgagcgtcgtccagcagttcatctccgcggaccgtggcgtcggcgcaggcctcatccgtccgcctccacttccacgactgcttcgtcaagggttgcgacggttcggttctcatcgacgcgagcccagccaacccggacccggagaaggcgtcgccgtcgaacggcggcctccgcgggctggaggcgatccaggaggccaagcggcagctcgagagcgcgtgcccagggaccgtgtcctgcgccgacatcctcgccttcgccgcccgcgacgcgtccggtccaacgtcctgagctccggggcgatcgactacggcgtgccctccggccgccgtgacgggctcacctcagccgcgtccgacgacagccggagcctgcccccgccgttcgccaggctcgaccgcctcacggagctcttcgccgccaaggggttcacgcaggacgagctggtcacgctctccggcgcgcactccgtcggccgcgctcactgcgcgtccttctcgcaccggatacacatacaccccaccgtaagcgagaccatggacgcgcagtacggcgccggactgcagcagcggtgtcccacggacgccggggacgcggtggaccaggaccaggccacgccggccgacctcgacaatcagtactacaggaacctgctcgccgggaaggtgctcttccgctcggactgggcgctcatcagcgacaacacgacgagccagatggtgccggacaacgcggggaaccaggcgcagtgggcagccaagtttgtcgacgccatgcgcaagatgggcgccttggacgtcgtcaccgactcaccggcgacctgcagggcgaaccaaatggcacccttcacttgggcaaagaaattcatgaaatccgatgtttgggaggtctttggcaagaacatgacaaccattagcattaagattcttgaccagtgccccctacaagatcttacccgcgtcaatgaagagcccagttccgtcaccctcctccctcagggattgtttgttttcagcttaatctatgtggattga

SEQ ID NO: 22518 - DNA, 339 bp, Zea mays
  Peptide Sequence Number=SeqID_64297
atgatggatcagccccctaggccacctgcggaaaataggggtgaccatttccagaagctgatggacttgtcgtgccaaaactatggcttcctagtccgttacaagttccaagaatgtgagatcttaaagagcttcatctacaaacagcctagcaagaaggcaaatccagaggagcctgccaaggcagcagaacaagaggcttccacagaagactttcccgaaatgacgggatgtctcatgatctttggtgggttggaagcctacaatgacaagagccgcctcaaggtggcccactgcgaggtgcatgcggcagaacccgtcatcccacaatacctctag

SEQ ID NO: 22519 - DNA, 330 bp, Zea mays
  Peptide Sequence Number=SeqID_64298
atgactaaggacaaagtacgcacaaaagacaaatgttggtccgtggggatgatatatggtcctagagagctgccaggaaaattagggtgtcacaatagttctattgagattatatgccttgcatgcgcgcttataagacttcgggtaggactccaaagtgatggagacaaggaggtgctaatcaaaggtgttaacactatgctcaagattgctctcaagctacttgccaagttatcatgggatgttatccagaccaagtcgattagagatgcgcaagattatggggatgtaggacaagactgtgatttgagggatgatggccagaattga

SEQ ID NO: 22520 - DNA, 873 bp, Zea mays
  Peptide Sequence Number=SeqID_64299
atggatcctaattatggagagtggaatttctctgagatcaagatagcgaaagctctcattgctagccacaatgccaagagtagctattctagtgacatgaacaataagcaaactgacattatagacatgctccaagcaaggtttcccacaaaagagaagcataaggtaaccaaactgtatgttgatctcatgttggagaagatgcagatgatattgagtggcaaccaacatgcaacaatgggtaagaagcttgtgaatgacaagtttgggatgtcgatagaggatccagccatagatttcatgggtggtgatttagtggagaaaaggacggccaaaaggaaggcaagggaggatatgaatacccacctagattctcagaaggagaggcggtaccgaaggttttggaccatagacgaacacaggaatttcctctatggtttgcgtgcatatggtcgaagcgactggaagaacatctcaaagcactttgttaccactaggacgccaatgcaaatctctagccatgcccaaaagtatttccataggatggagaacattgctaggaggcagcggagcagcatcaatgacattgtcctccacgatgatgaacccagggtgcaaagtaatgattctagcctacagaggttcaccttcaccagtggaacctacaacccaaatcattatggctctagcagccaatttgtcgccatgagtaacattgccaagcatatgtggtttccatctgtatgttgtattgaccaagagagcaccagcaacaaccaaatcactaccttagatagaggtgggtctggtggttcttgtgtggctctagaggtgcagggggttgggagcaaggcaaaactaattagtgattag

SEQ ID NO: 22521 - DNA, 303 bp, Zea mays
  Peptide Sequence Number=SeqID_64300
atgaagaggtgccttaacagacttaccaacaccatcaagcagaagacagagggagctttaccttcaacatttgtggtcgtcatcggccatcaaccaacgtctgtcctcaacctgctcgaggatgactcgagccatagctcgatcgatcccaaccccgatgccaacaaggcggattaccaccttgcttgccacatggcaggaatcaaggatgaccacctcatcatcaagttcctcccattcacctcatggagggatcaagggcctagcttgagcacttgcccaagtggcaccatccatgactag

SEQ ID NO: 22522 - DNA, 774 bp, Zea mays
  Peptide Sequence Number=SeqID_64301
atgtacttcgatgggtcgctgatgaaaacaggagcagatgctggtctgctcttcatctcacccctagggaaacatctccgctacgtgctgcgcctccatttcccggcgtcaaacaacgtggccgagtacgaggctctggttaacgggttgcgcatcgccatcgagctaggggttcggcgcctcgatgctcgtggcgactcgcagcttgtcattgaccaagtcatgaagagctcccactgccgcgaccggaagatggaggcctactgcgacgaagttcggcgcctggaagacaagttctacgggctggaactcaaccatatcgctcgacggtacaacgagactgcggatgagctggctaaaatagcctcggggcggacaacggttcccccggatgtcttctccagagacatacatcaaccctacgtcaagatcgacgacacgctcgagcccgaggaggcctcggcccagcctaagaaggcacccgggggcttctcgcacctgctggtcgccatcgacaaattctccaagtggatcgaggtccaacccctaaccagcatcaggtccgagcaggcggtggcgttcttcagaaacatcatccatcgctttggggtcccaaactccatcatcaccaacaatggcacgttgttcactgggaagaagttcctggacttctgcgaggaccaccacatccgtgtggactgggccgccgtagctcgccccatgacgaatgggcaggtggagcgtgccaacggtatgatttttgcagggacttaa

SEQ ID NO: 22523 - DNA, 318 bp, Zea mays
  Peptide Sequence Number=SeqID_64302
atgaaggtcttcgcaagatctagtttaggaacgctctcagcactaaccccatggaatgccggccagaggcctaacgacgcgggcgtggagcaggggcagagaggaggcgaggcagctctctggccaccgacggcctcgtctctagtgggaaaagggggtcctgtggtagatggcttaaccgtgtccgtgaggagcaggacgtcctctgggtcgatgcagggagcgacagagcagacagagggagaggagagtgcgtgtgggagtgtgatgtgggcgcggctaggtggtagcggcagaggtggaagaacggatagatag

SEQ ID NO: 22524 - DNA, 1140 bp, Zea mays
  Peptide Sequence Number=SeqID_64303
atggaacacaatttcatggtcgtgcttcgccgagtacgtgaacctatgcttcggaccaccatctggccgaacgctttgggtgagatcaaggcccttagtattgacatatgggaagaccgtaaaatatttgatacccaggcacaaagcctgaaagatgattttttcaggaggttaaaggacattagaaaccagttgaaaaatacaggcagtgagcagctggagaaggttgtctctagctacaaacatgtcctgaatgctcctatggatgaggatactctgatgcgaaaatgccaagcagctcttatcaattttgatgaactcaataaaacatatggaaataactccattttaggtggatgtagctattgtgcaaatggtttgcatcatacctttgttgcaactgagatatccttgagcctagatggtttgtataaagagatgcactgtagtagcaatcgttcgggctttatgcaggagctgcaggaacaacatagcattctcagaaactccatcgaacaacttaaagtgtcagaatcactcagggccaccctgatttttcatttgaaggaagcgttgaatgagcaggtgctgacgcaaataactctattcatttattttcaggagctcaaagtggaacacctcagaagccagcttcaggcagctcagccccgattcaagagagcttctgagctctgcgtggggcttggaagcaacatggaaaggcgtcagccatcaaatcaagggcttaagaggtccagtctctccgatccacttagcactgttgctccagaagctgtgaaatctcttcaaaagggacaatcaagtgcagtgctgtattcacaggagggaaatggtgttgagcacagcgtgacagagacaaagcttgctgcaggtgctgcttcagatgatatacgtggtggtgctttgtcttcacgagtcaatgggggcaacactatgctgaaaatagaagagcacacttctggtaacaagaggcagaagctagaggatgacgcacatatttctcagcctcgcccacctggtttccgtaatctaaccccgcctccatcttttcgaggattagctggtacattctatggccctcggttccccaccgcgcccccaccagcagacaggaaataa

SEQ ID NO: 22525 - DNA, 2790 bp, Zea mays
  Peptide Sequence Number=SeqID_64304
atggcggagacggcgatcacgacggtgctggccaaagtggcggagctggtggcgtgggaggcggctgtgctgctggaggtgggcgacgacgtgcgcctcctccgggacaagctcgagtggctccacaccttcatccgcgacgccgaccgccgccgccgccgccgcgacgacgagttcgtcgccgtctgggtgcgccagacccgcgacgtcgccttcgaggccgaggacgcgctggacgacttcctacaccgcgctgggcggaggaaggccgcgctgggctcccggtgcgcgctcgggtgctggtggcccggcgggtgcgccggccaggtcgcgctccgccacgacctctcggggcgtatccgccagatcaggaagcggctcgataagatctccgagaaccgcgccgactacaacatcgagcacacgcccgcgccggcctgggccgcttgctcctcctccgccaccaccctcgctgcctgggacgatctagaggagtacacggtcggcctggacaagtacagcgacatgcttaaggagcagctcctcgacgactccgtccccgcgcgcgcgctcgtggccatcgccggcgagagcagcattggcaagacgacgctcgcgcggaaggtgtaccagagcctcgaggtccgcaaccacttcgagatccgcacgtggacggtgctcccgcacaagtgccgcgccgccgacgttctccgcgacatccacgagcagatgacctcccagctgcggcggaccccgtccgcgtccaactccaagcaggccgtggaagacgcctgcgatgacaaagccttcgggccgggaaaggacatcagcaaccagctgtacaggagcatgacggggaggcggtacctcgtggtcatcgacggcagcgttgccgtcacggactggaacagcctacgagcttccctccccgacgagggcaacggcagcagggtgcttctgatcacggacttggaaggcctggaggtggtcggccacgctcaggctggccacacgtacgacccgatcgagctgacccggctgagcccggagagcacgtacgaggtgttccgacgccgggtgttcggcgcccgcggcgactgccccggccggtacaagtcgaggtactaccaagacgtgttccggatcacgcgtggcctgccgctgtcgatcgtcgtcctcgccggtatcctgcggtccaaggagctgcccgcagagtgggacgaggtgatggcgcagctggccccgccggcgcgcgagcagcaaaggggcggcagcggcggcagcagcaacagctggccccggatcatgtcgcgggccttcgacgacctgccgcaccacctcaagtcgtgcttcctatacctggcggcgatgcgggagagcaccccggtggacgcgcagcgcctggtgcgcctgtgggtggccgaggggttcgtgcgcccgcgccgcgggagcaccatggaggaggtcgggcaggggtacctcaaggagctcatctcccggtgcatggtgcagctggtggacaaggacgacttcggcgccgtgctgacggtggtggtgcacgaccggctgcacgcattcgcgcaggacgaggcacaggaggccagcttcatcgagagccacgacagcacagacgtgctcgcgccggccaccgtgcggcgcctcgccgtcctcaactccaccacggacaggtacgtccagctcagcaacgcgctccccaagctgcgctccatcatctgcgacctggtggagggtcgccgagtcaggtccagcaacttcatccgcaccagcgacctgagcttcctccatgcttccaagttcctccgtgtcatcgacatccagggactcgagctcaagaggctcccaaacgagatcggctccatgatccatttgaggtacctgggtctccgctgcggccacctagagaagctcccaagcaccattggcaaccttgtcaacctgcagtcgctcatcctcggcggccgccacgttctggaggtgcccgccgcgttctggaggatcgccacgctgcggcacgtcgtcgcgcggttcgctctgccgagcagggccctgggcaacctgcacagcctccagacgctacatggcgtgcagccccgcgggtggggcggcgactacaacccgctggggaaggccgccaacctccggtcgctggagctgggcgagctgacctccgagcacgccgatgcgctcgaggccgcgttggagaacctcgacctcctggagcacctggcgctgcggggcgacccgctgccgtcgagcgtgttcagcgtcccgagcctccgccggctgcagagcctgaggctgatgggcgccatggatgagccggaggggcccagctgcgcggaggacgtccggtacatccggccgaacctgaccaggctatcgatgtggaataccgaggtggggcagaagttcgtggacatgctggccgagctgccgagcctggccgagctgacgatgatgtacgactcatacgacggcgatcggctggcgttcgtggagactgggttcccgagcctgcagaagctaaagctcggtctaccggagctggaggagtggacggtggccccggggtccatgccggggctcggcacgctgacgctgtgccggtgcgccaggatgcagatgctcccggaggcgctcgccgggatgagggagctggaggaggtggtgctgtacagcatgcccgacatcgtgagcaggatcaaggaggacgaaggccaggattaccacaaagtcaagcacgtacccgtcatccagactatatactga

SEQ ID NO: 22526 - DNA, 468 bp, Zea mays
  Peptide Sequence Number=SeqID_64305
atggtggcggcgcccgcggaaggacccacctcgggggcaggccacgtaggggaggccggctggcgacaggccgcgtggatggagcgcgcggatctggggggtttaggcggtggcggcgctcgcgccctaggcgacgccgacaaagggggacccggtcgcgccgctgtgcaccagcggggaggggcggttgtgccgctaggagccgctagcgcggtgttcgagcagggggcggacctcagcaaggcaacagagctccatgggatgcgctggatggggaagagaggtgggggctggcgactgttggggagaagggctgccccgggagggaaggatgagcctcccggagcggcggcgcgacggtggtgggctggacctgggcaaacagctggcagctgtggggtggacctgtcagggcccaagggggcggcggcaagaagcaacagcaaggagcgcgagtcaaaaggataa

SEQ ID NO: 22527 - DNA, 588 bp, Zea mays
  Peptide Sequence Number=SeqID_64306
atgacaatggatatgctaacttctaaattaggacatgccaacaaagttaaggtgaagagcgagctttcaagttctccatacttcacaccacctttcttcatcaccgagcatcagcagacggaggagcagaagcagagactgagtaatagcccgcctacccgagcagcacatggcatgatcgtcgtcgacggcagagcaaaaccttgcagctacagaatctcgcccaggaaacgcgcagcagagcaggcggcgaactacacaacacagcgccaacgcggcagcgccggcgagctcgagctagatcaaaaccagagcagagcaggaatagagcgagcggagcgcgagagatgccgtaccttcggcggagccggtgccgaattcgaggggcgccgcctaggagggggcgcgcatttgggtggggagggaagtctagggtttaatcggggatttgtagaggggccggagcaggggggggaggaaggagagacgtcagttactggtcgctcgcctgcctgcgcgcgtgaccccgcggcgaggagcagcgggggcgcggccggggagtgtgagctggacgacgacgcggtgtga

SEQ ID NO: 22528 - DNA, 207 bp, Zea mays
  Peptide Sequence Number=SeqID_64307
atgtgctgctcgggtaggcgggctattactcagtctctgcttctgctcctccgtctgctgatgctctccatactccaggacagaactccagaacctgaatattcggtgcagtcacaatgtctgaaaacaacatacaagagtatctattttgccactttattttccatgattattccatcttcggcacattatttcagcatgaagtga

SEQ ID NO: 22529 - DNA, 501 bp, Zea mays
  Peptide Sequence Number=SeqID_64308
atgacaaacaagaaaaacacaaaaactgaatcaacaacaggcatatttcatgaggctatggttgttcacagcttcccagaggcctggggtcgaaaagataaacacagcgagtgcacaacaatgacaaacaagaaaaacacaaaaactgaatcaacaacaggcatatttcatgaggctatggttgttcacagcttcccagagggctggggtcgaaaagataaacacagagcagtaggacaccatggcgatctcggtgcccttaaacccgtagtccaggctgaggttacgcccaccggacagctccagttgagacctcgcaagataagagccaagctctggcgctttggcatacgagacctgttgatccaacacatactggtatcggaaaataggcaacagtcagctgaagaagttgaaggtgtatcatcatcatcagacgacgaggacgaggacgacgaggacgacgatgaggaggcggcggtctctgatggctctgaatag

SEQ ID NO: 22530 - DNA, 408 bp, Zea mays
  Peptide Sequence Number=SeqID_64309
atgtcaaccacccaggcaacgactgacaacaagtcacgatcaaccatcgagttcggcctcgggcgcaacaggaagctccgcctcgcccgacctcaggctccggcctcgaggggaggtctccgcctcgcccgacctcaggctccggcctcaagaggaggtctctgcctcgcccgacccccaaactcggcctcgacctcggtctcaggaggaatcgcgtcctcgcccgaccccggcctcgacctcaagagaagtctctgcctcgcccgaccttgggctcggaccgaccgcgccaacaggggatacatcattaccctattcctagcctgctcaggctacaaggaacaagaccggcgtcccatctggcttaccccggcaatgggtaatgatggtgccccgcgtgcaccatga

SEQ ID NO: 22531 - DNA, 336 bp, Zea mays
  Peptide Sequence Number=SeqID_64310
atgcgaattgcccgtctcgtcgcattaactccccggcagagcgagcgacacctcgggcaggcgaggcgggcgtcgtttcgcctccgccatgacgaccgcgtcgaaaaagggaccgggaaaggggtcgttgtggaaaggatccttctcggcgaaggaagcgggccccgagccctcctactgatcaggggttcgaaggctagcccctcggaaggggttcgacagccgccccagagcactcgggcttcaagcacattactgatcagggattcgaaggctggcccctcgaaagggttcgacaaccgccccacaacgctcgggctccgtgcccattactaa

SEQ ID NO: 22532 - DNA, 1635 bp, Zea mays
  Peptide Sequence Number=SeqID_64311
atgggtgagacaatctcgttcgcccctcggaaggccatcaagtcccaagtcttggcggactttatggctgaatgggtcgacacccagctcccggtagctccgatccaaccagaactctggaccatgtttttcgacgggtcgctgatgaaaacaggggcaagcatgggcctgctcttcatctcacccctcgggaagcaccttcgctacgtgttgcgcctccatttcccggcgtccaacaatgtggccgagtatgaggctctgattaacgggttgcgcatcgccatcgagctagggcttgtcatcgaccaagtcatgaagaactcccattgccgcgacccgaagatggaagcctactgcgacgaggttcggcgcctggaggacaagttctacgggctcgagaccccgtacctgcaatatttccaccgaggagagctgcccctcgaccgagccgaagctcggcgactggcgcggcgcgccaagtcattcatcttgctgggtgacgggaaggagctctaccaccgcagcccctccggcatcctccagcgatgcatatccatcgccgaaggccaggagctcttacaagaaatacactcgggggcttgcggtcatcacgcagcgcctcgagcccttattggaaacgctttccgacaaggtttttactggccgaccgcggtggccgacgccactagaattgtccgcacctgccaagggtgtcaattctacgcaaggcagacgcacctacccgctcaggctctgcaaataatacccatcacctggtcgtttgctgtgtggggtctggacctcgtcggtcccttgcagaaggcacccgagggctacacgcacctactggttgccatagacatattctccaagtggatcgaggtccgacccctaaacagcatcaggtccgaacaggcggtggcattcttcaccaacatcatccatcgcttcggggtcccgaactccatcatcaccgacaacggcacccagttcaccggcagaaagttcctggacttctgcgaggatcaccacatccaggtggactgggccgccgtggtgcaccccatgatgaatgggcaggtagaacgtgccaacggcatgattctgcaaggactcaagccgaggatctacaacgacctccacaagttcggtaggcgatggatgaaggaactccccttggtggtctggagcctgaggacaacgccgagccgagccacgggcttcacactgttctttctagtctatggggctgaggccatcttgcccacagacttagaatacggttccccgaggacgagggcatacgacgaccgacgcaaccagaccaaccgagaagactcactggaccagctggaagagactcgagacatggccttactacactcggcgcggtatcagcagtccctgcgatgctaccacgcccgaggggttcggtcccgagacctccaggtgggcgacttggtgcttcggctgcgacaagacgcccgagggcgccacaagctcaggcctccctgggaagggccattcatcatcgccaagattttgaagcccggaacatacaagctggccaacagtcaaggcaaggtctacagcaacgcttggaacatccgacagctacgtcgcttctacccttaa

SEQ ID NO: 22533 - DNA, 708 bp, Zea mays
  Peptide Sequence Number=SeqID_64312
atggatctcatgcagaggatcgaagcaatcaacaggcacagcacggaaccgtacgagcaagcagagaagtgcctcaacaccaactaccacgggatcaaggctgtcacaaaagcgctgctcccgcttctacagtcctcgtcccatggaaggatcgttaacctgtcgtcctactatggactactcaggctccagtttttcagcggagacgaactgaaagaggagctcagcagcatcgacggcctgtccaaacagaggctggacgagctgtcagagctgtttctcaaggacttcaaggatgggcagctggaggctcaagggtggccgaatgaaggagggttcgccgcgtacaaggcgtccaaggcgctcgcgaacgcctattcccggatccttgcgaaggagcacccgtcgctgcgcatcaactgtgtgcatcccggctatgtccagacggacatgaacttcgggtctgggcatctgacggtcgaggagggcgcgcgggccgggagctctcatgctggccatggagcccaagggaggcgtcactggcgcgtttttcgaccacaccgtgggttgcgtccttcgtgtaatatgctcgcccttgcactcgcaccgttagctatcgcactgctggacagggtcttcaacacccttcacgagaacccatatcttgttgacaattggcgcgggaccgttatcaccacaagttcttag

SEQ ID NO: 22534 - DNA, 927 bp, Zea mays
  Peptide Sequence Number=SeqID_64313
atggcagccctgcaacaacacgacgatggagcccgtagtgcgctcagcctcgcgcttctctgcaacaatgcattgttccccatgagggctcccgtcactattacgttcacgtcgtccatcgcaattagagactcgttaatttgtgttccgtcgcaacgcacgggtacatacctaataagggtcgctgtggtcacaggaggcaacagggggatcgggctagagatatgcaggcaactggcttccggtggagtcaccgtagtgttgacagcaagggacgcggagaggggcgcggaggcagccagcaagcttgggctacccaacgtcgtcttccatcagctggatgtcggcgatccgtcgagcgctgcacgcttagctggttttatcgaggagaagtttggcaggctggatatattggtcaacaatgcaggaattactggaacgacaagtaacgtcgacgatccagaagcttttcggcaagagctcgcgggcatggatctcatgcagaggatcgaagcaatcaacagggcacagcacggaatctttttcagcggagacgaactgaaagaggagctcagcaacatcgacggcctgtccgaacagaggctggacgagctgtcagagctgtttctcaaggacttcaaggatgggcagctggaggctcgagggtggccgaatgaaggagggttcgccgcgtacaaggcgtccaaggcgctcgcgaacgcctattgccggatccttgcgaaggagcacccgtcgctgtgcatcaactgtgtgcatccgggctatgtccagacggacatgaacttcgggtctgggcatctgacggtcgaggagggcgcgcggggagctctcatgctggccatggcgcccaagggaggcgtcactggcgcgttcatggaccacaccgaggtcgcgtccttcgtgtaa

SEQ ID NO: 22535 - DNA, 510 bp, Zea mays
  Peptide Sequence Number=SeqID_64314
atggaaggtgcagccgtgatgctccattacaatagtaacgaaggcgtccgcagctccgtgcgcccccgtcgtgccgcatgcctccaccgcgccagtcgtgccaccgctagaaccacgcatgaggatctccctactcgccagcggatctccgccacgcatgtcgtgacctccatcgcggcctcgcctcctgctcaaccccactgcgcgccaccgcgatgggatctgggagcagcaaggccaccgcgatgggatctgggaggaggcaagtggtcctcctccatcttcggtgacgagctcggaagactagcaaatgttggtgatttggcagtcaaaagagtaaacccagaagcagggatcgtggagctaacaaatcatgtgaactactatgagcaatcacacatacagggcaaccacctcaatgattggttggtgttttcccctctctacttgttcttagcactgcaattgatatctctaggaaactatggcatttttccttcgttggattaa

SEQ ID NO: 22536 - DNA, 267 bp, Zea mays
  Peptide Sequence Number=SeqID_64315
atggactgcaatagtattcacaccacagtaaatgttgagcgtttattcagtaacattgatataggcaagaggtatatgtatttcttaggcaagagaaaaaacagaagacaagtgttccaacaactaaacctccaaacttgcgaccaaggccacaaagacaaagtgttccaacaactaaacctccaaacttgcgaccaaggccacaaagacaaaatgctcaacctcaagatgaacaagcgattgctaatttgcagacggtgggagtga

SEQ ID NO: 22537 - DNA, 177 bp, Zea mays
  Peptide Sequence Number=SeqID_64316
atgccaaaattggccaagcacagagcggaatcggggaaattaggcacgggcaaagatcgtgagttcaagcatggtagcgcagggttgccattatcggtcatggtgccaccgttggctaggaaacatcgccgcccggctggtatggtgaaggagatggtgctcatgccgtcgatctga

SEQ ID NO: 22538 - DNA, 243 bp, Zea mays
  Peptide Sequence Number=SeqID_64317
atggccagggccttggttcatcgcccgttcactgtctcgcgtagatacgtatgcgtatcccgttttaaaatatcagctgatccagctacggtgcattgttcaattgcattagcagagtttgcaaaagaaaggaggagggatacgacatcctgggcataccaaattctcaattctctgcttctcttcctcctgggaggcccgatggtcagaggtgagcacctctgcccttccctgctcaactga

SEQ ID NO: 22539 - DNA, 1017 bp, Zea mays
  Peptide Sequence Number=SeqID_64318
atggagacggagacggtgaccgtgacgccggacggagacgccgagaagaaatactggaactctctctgtgcgtgcactagtgctggtgctgaggccatcggggtgtgctacggcatgagcgccaacaacctgccggcggcgagcacggtggtgagcatgtacaaggcgaacggcatctcggcgatgcggctgtacgcgccggaccagggcgcgctgcaggcggtgggcggcacgggcatcagcgtggccgtgggcgcccccaacgacgtgctgtccaacatcgcggctagccccgcggcggccgcgtcgtgggtgcgcaacaacatccaggcgtacccgtccgtgtcgttccgctacgtgtgcgtgggcaacgaggtggccggcggcgcggcgcaggacctggcgccggccatggagaacgtgcacgcggcgctggcggcggccgggctgggccacatcaaggtgacgacgtcggtgtcgcaggccatcctgggcgtgtacagcccgccgtccgccgcggagttcaccggcgaggcgcgcgggtacatgggccccgtgctgcagttcctggcccgcaccgggtcgccgctcatggccaacatctacccgtacctggcctgggcatacaaccccagcgccatggacatgagctacgcgctcttcacctcctccggcaccgtcgtgcaggacggcgcctacgggtaccagaacctcttcgacaccaccgtcgacgccttctacgtcgccatgggcaagaacggcggctccggcgtgccgctcgtggtgtcggagagcgggtggccgtccggcggcggcgtccaggccacgccggccaacgcgagggtgtacaaccagtacctcatcaaccacgtcgggcgcgggacgccgcgccaccccggcgccatcgagacctacctcttctccatgttcaacgagaaccagaaggagagcggcgtggagcagaactgggggctcttctaccccaacatgcagcacgtctaccccatcagcttctga

SEQ ID NO: 22540 - DNA, 117 bp, Zea mays
  Peptide Sequence Number=SeqID_64319
atggcgttcttcgccaacctggtgccctcgtaccaggtgttcctagatgacgtgtcgtgggagtggacgtgtgccaggggtaggattggcatcccagtccgaagagcaatcaagtga

SEQ ID NO: 22541 - DNA, 432 bp, Zea mays
  Peptide Sequence Number=SeqID_64320
atggtgacgatgagtactgagtctagcgacgctcaagtcatcatcctgtgggagattacccatttggtccgtcttaggcataccgctcataagtcggtgatccctttcctgtcgtcctaccttgcggagcgtccacttcactgcacggtgtccggtcagtcgagtcacctggagaggctgcacaatcatctacacgagcagcaggagcgccaacgtcaggagagggagcatcaggactcttcgtcctcgcctcggcaaaaggtagagcctatgaggcacccctcccggtgccctaaccggacgcgcccccctacaccaccacagggtgccccggcttctagaggaggtcctggaggagaccccgacagagacaacttaaaccatagcattgagctctcgggggaggaggagttggaaggatgggtcgcttga

SEQ ID NO: 22542 - DNA, 483 bp, Zea mays
  Peptide Sequence Number=SeqID_64321
atggatcctgctgccctcaagtttctcctcgatgagattggcagacttttctatgagaagagcgcgaagtgggatagaaggttttctcggtggaatgtgaagcgggagccagaaccatacctcagagatgaagttacagcagaggaaaatcgtcgacggcgtcgtgcccttcgccgcaccagcgagaagcacaccccagtcgcggtcaactcctacgtcccagccttcgccgctcggtttaacggtttctacctcgaccacatggccttcctcagcaacgggcccaactttgaccttattggctccgtcgtctccaaggacagagaggaggccaacaagtgcatgccctcgcaggacaagcctatcatcaacattgatctgccagactacatggagacatcgtttccggagtcggccctccacgacgttcccagcgccaactgcccaactacatggaggcgctcaccatttgttcgactctag

SEQ ID NO: 22543 - DNA, 255 bp, Zea mays
  Peptide Sequence Number=SeqID_64322
atggcgtctttgacatctcacacatttgttcttccaagtcggaccacactgctccttttgaaactgcagggatccttccgtgacccaaaggcgcctggtggtacacctataatgcagcaacgtgctccaaaattttctgcatcaattgggcttcccaacagtgagccaaaccatatatatgtaaggtgcttccccaaagttgggattcaggttcctcgtgacctcgcttttattcgtagcaatacatgcaaataa

SEQ ID NO: 22544 - DNA, 672 bp, Zea mays
  Peptide Sequence Number=SeqID_64323
atgagtactgattctaccgatgctccggtcatcttcctgtgggagattacccatgttacttctgatatggtgcgtactctccagatcacctatgtgaacaccaaccgaatccctccaccactacatgctcctttctacccagttgtggtggaagaagtccctatggagctgcaccgccttcaagtgaggaatggtgtgatcttggaggacagctctgaggacattttggcaacacccactccattatcagagtctcatgcctttgctgctcgagcttcatcttcagtgccaccggtaccagtatctcaagccccagctcctagaggtgatgaccctgatgattctagtgatgatgatgacgatgatgaagaagaggaagaaaacaatgacaacaatgaggatgtcaacaatgaacaggaaaaagaaaactttgttggattgtggcctatcgcggagcactacacttcatgtttgagacgggacactttccaaacttgctacaggatgtgctgcatgcgttgggaaccaatgtttgacctctctatgacacaaggcggcaatgctactcggagagctccgtggtccctcaaccacacctatcggcgtacagtcaccttcccctatgttcgcgtggtgaaagccagacaagtgtggttccaggtgaagctatag

SEQ ID NO: 22545 - DNA, 147 bp, Zea mays
  Peptide Sequence Number=SeqID_64324
atggctgtttctcgtcgatgccgccgtcgtggtctgcatggccaccagtcccgtgcagccgtctggtggggttgtgagattagaagtagaaaaactcttcgggctgatggattctcgaccgtagatgggagatcgtgcgtccaatag

SEQ ID NO: 22546 - DNA, 243 bp, Zea mays
  Peptide Sequence Number=SeqID_64325
atgactcggaagacatgctgctgcaggggcgtggctcgatatcagagcgctagctggagagggttgagcgccatgacgatgacgtacgaccgggaggttgacgctgagcaaagcaaacacgaggacgacgtccaacgtcctgagcgtgagctatatcgaaggcatgggcgactgacgagctttggcgaggtaggaaatgcacttgaggctgaaagctggcagacgttgaggcacgggcgctag

SEQ ID NO: 22547 - DNA, 393 bp, Zea mays
  Peptide Sequence Number=SeqID_64326
atgccctttgccacggtaagtttcgccttgatatccgtagctcggaacacaccccaattcgttctctgcccctctgatatcccctacacgcgctcacccgccctcctccatgcagcgatggtgccgtcgccgggcccctactgccatctagaggtccctgatgttcccttgagcatagacaacgagcagtccgtggtttccgtgggagttacaggagattttcctgagcaacaacttggtgaaggcatgtgtcctctgacccattatgtcctacttactttacaattcattgtctcgcataccatgatcaacataaggattgacaagttttctgtttatcctgtccttgattacccttttgggatttggctattatggttattatcatggtag

SEQ ID NO: 22548 - DNA, 297 bp, Zea mays
  Peptide Sequence Number=SeqID_64327
atggggagagaggagaagacagtctcacctcaccccgtcatagtgagtgtggcaggtggtgaaacaatttctctgagccacggtgaacacgctctagtgaaatatctcctcaccgtcaattccctgaaattagtcttcgttgccattgtggggttctccaccgtggttcgagctcctcagtatatcccggtgaacgttgtcttgttgttagaagacactgccgcagaccgcctccatgtcgaccacgactctctcccttcgcttgtcttcccgaccgtcgttcttgagtctcagtga

SEQ ID NO: 22549 - DNA, 223 bp, Zea mays
  Peptide Sequence Number=SeqID_64328
atggcgttcaccggggcagtgtctcaggcgatggacagtctacctacgacggtctattatgacgtggtgaagagactgctgagttttcctgcttctgttccaagatcgtccttaagcaggaggatgcaaattaagtatgaacttatggaaggcgaagacatcgtggttagtgtagatgaattcaatgagcgcaccttcctatttgttggagagtgctgccccg

SEQ ID NO: 22550 - DNA, 153 bp, Zea mays
  Peptide Sequence Number=SeqID_64329
atggccatgatgggttcagcatctgaaaagatgtacctctgtcaggtgatgaaacagccgagttttgttgtttctgctccaaggtggtgccaaaggaggaggcaaatcagtgaacatgttggtgggaggatgttttacctccctgatatgtaa

SEQ ID NO: 22551 - DNA, 282 bp, Zea mays
  Peptide Sequence Number=SeqID_64330
atggccctgctctccacaatggaagcatcctctgcctcctccttgcattggggcttcttgactgctctggttggttggtctgattattctgcatctagaactgacttcctccttgctagctattctggtgatactgctgctgatgctgagggtactgcttctagaactactgctgaggcagacgctggttctgctgctgatatccttgaggaccttctggaacatgacatcgtgggtggtgagataagactcccaccaggactaagctgctcccctcaatag

SEQ ID NO: 22552 - DNA, 1029 bp, Zea mays
  Peptide Sequence Number=SeqID_64331
atggtggttacgccggcgcacggccaaccggagcgcaagtgtcccaaattcgaacccggtaccagaaacagggagatggggattatggcaaacacgatagagggatggcttaccggcggcgagtactacaacgaagctggccacggtgcccggcatccgcgaaagaatcacacctccggtgacaaatcaccggccctccaattgatcttgtgcttgaagcttcccccgcacgacttccccatgcactctgcttccacaacgacaatcgccgagctaggatgggtaggggataaggcggtcaaggtggccgcaatttataccctcgcgcgtgatcgtgggatgcgtagtagcggttcggccaatgcggcagagggaagtctgcaacgtggcggcacggcttcgtcggcgtttgttacagagggaaggagcacctgccagggccccatccccgccgacctccccctcggcgtgcccgacctggcgctgctccacctcaactccaaccgcttctgcggggtgctgccggacacgctgctccacctgcgactcctccacgagctcgacctcagcaacaaccgcttcgtcggcgccttccccgccgtcgtgctcgcgctcccctcgctccgctacctcgacctccgcttcaacgacttcgagggccccatctcgccgccgctcttcgaccgcccgctcgacgccatcctcctcaactccaaccgcctccgcgggcccatcccggccaacctcggcaactcgccggcctcggtgcttgtgctcgcgcacaaccgcctcggcggttgcatcccaccgtcgatagggaggatggcggccacgctcaacgagatcgccctcatcgacgacgacctcaccggctgcgtcccgccgcaagtcggcctgctcaggaaggtcacggtgttcgatgtcagcggcaaccacctccagggcccgctcccgctctggggctggatccagggctacctcctgagcagctccttgctccggcacgaggacgtactctccgtcagcgag

SEQ ID NO: 22553 - DNA, 183 bp, Zea mays
  Peptide Sequence Number=SeqID_64332
atggagaagcggcctcaggaactcgccagcttcgggaaactccaacggctagtccgctataattcaccggactgtccggattttgttgaaggtgtatccgcccaattgagatcttgtggtgctactgttcccaatcaagctttgtctctgatgcagtggaaccctctgcagctccagaaatag

SEQ ID NO: 22554 - DNA, 378 bp, Zea mays
  Peptide Sequence Number=SeqID_64333
atggcaacgatcgccgagatccgcgcaggcgcagctcgccccgtcggaaatcccgtggttcacagatgctgttgcgcggcgatggagcggggagggcacgacatgggcacaaaagaacggggagaggggaagcctcgactggatgctttatggccaggggcctgctacttatgcgccagggagcagcgccacaatggccggtcggagatcccggcggcgaagaacgcgtggattccgttcatggagcgtgcagaaaaggggaaagacgacccagccaaaccggtcccacacgactggcgcgcgcatggcggatgcgtgaggctgaatggtggggcccacgtgtcggcgctatttgcaggaacagggctgcgcagatga

SEQ ID NO: 22555 - DNA, 666 bp, Zea mays
  Peptide Sequence Number=SeqID_64334
atgaccgccatcgaagcaaaatcatcccaagggcctccctacactgaccactcccctactgcccttgcccctttcgggtaccaggatgatcttcaggtgactcgtaacctcactgctaaacgtagcaatacatacaaacatgccgccaaccacgagatctacggtctggatcccaacccaccaaagcggccgccattctcgaatgccaaggccgccacgcacccagcagataccagagaatcacctggagggtcttcgagggccacggcaccagcggggttagcgacaatggcaacgatcgccgagatccgcgcaggcgcagctcgccccggcggaaatcccgtggttcacagatgttgttgcgcggcgatggagcggggagggcacgacatgggcacaaaagaacggggagaggggaagcctcgactggatgctttatggccaggggcctgctacttatgcgccagggagcagcgccacaatggccggtcggagatcccggcggcgaagaacgcgcggattccgttcatggagcgtgcagaaaaggggaaagacgacccagccaaaccggtcccacacgactggcgcgcgcatggcggatgcgtgaggctgaatggtggggcccacgtgtcggcactatttgcaggaacagggctgcgcagatga

SEQ ID NO: 22556 - DNA, 288 bp, Zea mays
  Peptide Sequence Number=SeqID_64335
atgggcgcggggctccctggcacggggttgcacgcgtcggtcggggcttggcttgacgctgcagagggtgtcgcgctcgacggcctggtagggcgccggttgggtctggtgaaggcgcgcggctctggctgcgcgtcgggctggggcggcctgggcggcgcctggggaacaggggcgcgtggccctggcggcgacgcgttgggctggggctgcctaggcggcgcctggatggtggcggctggagaggagaggaggggagcgagaaaacctagctggataccatgttag

SEQ ID NO: 22557 - DNA, 288 bp, Zea mays
  Peptide Sequence Number=SeqID_64336
atggcagcacagtggtggcgatgggatggctcggtgcagacggtggagggcactcacccggtcatagtgtacagggacgaatcggtgccaaacttcactgaaaacgaggaagaaactgtgattgaagaagaagttgtccctcaacctgagaatcctccagccgagaataacttctacttagacatctatggggtggaccctgaacctcctgcaacacaaggcaagcccattgcatttagccctttccttgttgttttaaactctttatcacttgagatgatgcattag

SEQ ID NO: 22558 - DNA, 756 bp, Zea mays
  Peptide Sequence Number=SeqID_64337
atggtgggcttcgaccgcgccggctacggcgagagcgacccgaacccttgccgctccgtgcggagcgcggcgctggacatggaggagctggccgacgcgctgggcctgggcgacaggttctacgccgtgggcgtctccctcggctgccacgccatgtggagcgcgctccgctacatcccgcacaggctggcgggcgccgccatgctggcgcccgtggtcaactactggtggcccgggctccccgcgggcccggcggcggaggcgtacgcgcggcaggcgcgcggggaccagtgggcgctgcgcgtggcgcaccacgcgcccgggctcctccactggtggatggcccagcgctggctacccacctccaccgtcgtcgacaacaccacccacctccccaacgggcgcgacgccgaggtccgccgcgcgctcgccgccgacggcacgctccggcggaagcgggaggcggccacacagcagggcgtgcacgagtcctaccaccgcgacatggccgtcatgttcggcaggtgggagttcgaccccatggacctgccggagccgccctgccccgtgcacctgtggcagggcgacgaggacggcctcgtgccggtcgtccttcagcgccacgtcgccggaaccctcgcgtgggtcaactaccacgagctccccggcaccggacacttcctgtccgccgtccctggcctcggggacaccgttctacggacactcttcggttcatcagccgccctggtagcgtag

SEQ ID NO: 22559 - DNA, 267 bp, Zea mays
  Peptide Sequence Number=SeqID_64338
atggagttcaatattcctgcattcccttccccgctcgctcgtgactgcggcgacaaaccttcggatctcgccgcggcgccgcctcccccgtaccccacccttcctcgcccgcccgcgactccgacgacaaggctccagatcccgccgcccagtgctccaacaatctcggatatacattatgcaaggcacacataccatcagggtcagcaacccgagccaacagaagagcaccagagtttgctaaatctgcatttgctggcgaaatag

SEQ ID NO: 22560 - DNA, 810 bp, Zea mays
  Peptide Sequence Number=SeqID_64339
atggtagtagcactgaggctgggacacttgtgctgcgcggttgtgcttgcgttgtccatctcttggtgcagaggacaaggaggaggaggaggaggtgctgctggtgcaggtggtgctggtgcagcagggggcgcggcaggtggtgctgtggttccagggacacaggatgccatccagatcgtgtcacaggctgctctctgctttgacaatagacaggtgataaacgggtgcctccaagcaatgggcaacaatgtcaacagcaacggcaacggtggcagtagcaatggcagtggcggcggcggcagcagcaacagcaacagcgggtcaacggcaagcatgtgccaagggccgtgcttcgggcagatgatgctgatgatgaactgcgtgaacggcatcctaggcaacatccagggctacagccccggcctcatgcagggcgtccaggccgtcttccaaatgtcgtgcggcaatgttggcaacagccagcagggtggcggtgctagtggaggtgccgccgccggtggtgctgctgctggaggtgccggaggtactagtggatcgtctagtagtgggggtgccgccgctgccggcggtggagctaatggcggaggtgccagtggtgctggtggtgtcactggcagcgccggcaatgctgttggtgccagcgggggcaacaatatggccaacggtgtcactacggctggcggtaccacgagtcctaacggaggtatggccattttttcgatgcagaattttcttggcctccccgctccacctcctccgataattcgaatcgaaggcaagctctga

SEQ ID NO: 22561 - DNA, 645 bp, Zea mays
  Peptide Sequence Number=SeqID_64340
atggagctgttcgagagagcgtgccactgtttcgataatcccaatatatacagccagtgcgcggaggagttcaggctgaacgcggagggcgcgttccacgtgcagaggaacgaggtggacgagtactgcggcgggccgtgcctggaggagacgaatctggcgctggagtgcgtggaggaggtggccgccgagagcttcaggttctccaacggcgcgtcggtgctggcggtgaggcaggcgctcggcacggggtgcagctacggccccgacagaggtaagcacgctctgtcaccctgcgcgcacatcagaccacccgcgccgcgctctcttacgttacgttacgaccgcgcgcgcgcagggacctttgagatcagggagcgcaaagactgcgtcggcggcgccgacgagtactactaccgcaagcctcgcgaccacgagcaggagaagccagcagtcggcggccggtactacggcgagggcagccagcagccgtacgagcagcagggcgccggcggatatggcgagggcgaggagtactgctccggggccgctggcaggctaggaggagagcgccgcggctactacctgcagacgatcatcctgctgcttcttgcctctgcaccaccactgatcctcacgctctaa

SEQ ID NO: 22562 - DNA, 225 bp, Zea mays
  Peptide Sequence Number=SeqID_64341
atggagaacacgagctcatccccgagcaaggatctgtccaagaggaggaccaggagcaagcttccgaggctcctatcgaggatctccccgcagccccagcaattgaaggcaagccccggtaccattcaggaaatggttgatggtgtgacttggcctaccaccctgccaccgggttggacggtcgagtgggatgttgcttcgacaggagaggagcacgaggactag

SEQ ID NO: 22563 - DNA, 324 bp, Zea mays
  Peptide Sequence Number=SeqID_64342
atgaggatggttatgattatgcttatggtaatggttgtcagcattgcaaccactgctcaggagaagatgaagctgtggaaggagacttccaggagttccaagactacgacaagttctaggtgtgggttagcggcaacccccagtcggctgcctgtgaaggccgctgttatctacgtttcgttttcgcactttgatttattggaaaagaaaagggagagaggaaaagaggttgcacatacaactgaagacaatccaaagaagaatacaacgaccaaggttatgaagaaggcaaaaatcaagaaaaggctcgttgtggacttgtag

SEQ ID NO: 22564 - DNA, 360 bp, Zea mays
  Peptide Sequence Number=SeqID_64343
atggattcgtccctcccggcaggcttcttccctcacggcagggcgcccccacgaagcaggtccctccctgtggcttcctccctccctcctggcggggaatttgtccctcccggactcccggtggggcgcccccatgaagcaactagggcttgctccctcccgcagtgggcgtggcggctcctcccggtggggcttggtcatgcggtcgatttggagctcgagatcgggaggaagagaggctgctgccgtgccagtgaagaagcaggctgccgtgccaccgaggatgtgccgcgtgaaggagagagggagagttggagtctatggcggaactgcccgaattattccaacttaagtgcctaa

SEQ ID NO: 22565 - DNA, 348 bp, Zea mays
  Peptide Sequence Number=SeqID_64344
atggtggttgctctcgggcggctctggcgggtcgcggggaggtcgccggagctaagggctggctcgggggagttaggcgcggtacagaggaggcaatggggaagacagccgagcactgggacgggctttatagccgtggcgcgggggttcgcgcacaggcgtgctctgagcgtgcccccgggtgtcagcccgcgtcgaacacgtgggagcttgcttctgccatggttcaacggcagatttgagcaccctagcgtgaacatgtgggatctttgttcaaaggttatgaagtatactactacttttatatttggcctaagccatgatcataaggttttcatgaccttttga

SEQ ID NO: 22566 - DNA, 1041 bp, Zea mays
  Peptide Sequence Number=SeqID_64345
atgtatttcgacgggtcgctgatgaaaacaggagcgggtgcgggcctgctcttcttctcaccccttgggaagcacctccgctacgtgctgcgcctccacttcccggcgtcaaacaacatggccgagtacgaggctctggttaacaggttgcacatcgccatcgagctaggggttcggcgcctcgacgctcatggcgactcgcagcttgtcatcgaccaagtcatgaagaactccccctgccgcgacccaaagatggaggcctactgcgacgaggttcggcgcctggaaaacaagttctacgggctcgagctcaaccacatcgctcgacggtacaacaagactgtggatgagctggctaaaatagcatcggggcggacaacgtttcccccggacgtcttctcccgagacctacatcaaccctccgtcaagaccgactacacgcccgagcccgaggaggcctcggcccagcccgaggcaccctcggcccccgagggtgaggcactacgcgtcgaggaagagcggaatgggaaggcacccgggggcttcacgcaccggctggtcgctatcgacaaattctccaagtggatcaaggtccgacccctaaacagcatcaggttcgagcaggcggtggcgttcttcaccaacatcatccatcgcttcaaggtcccgaactccatcatcaccgacaatggcactcagttcactggcaggaagttcctagacttctgcgaggaccaccacatccatgtggactgggccgccgtagctcaccccatgacgaatgggcaggtagagcgtgccaacgttatgctcctgcaaggactaaagccgaggatctacaacgacctcaacaagttcggcaagcgatggatgaaggaactaccctcggtggtctggagtctgaggacgacgccaagccgagcaacgggcttctcgccattctttctagtctatggggtcgaggctgtcttgcccacagacttagaatacggttccccgaggacgagggcgtacgatgaccaaagcaaccagaccagctga

SEQ ID NO: 22567 - DNA, 1305 bp, Zea mays
  Peptide Sequence Number=SeqID_64346
atggcgccaccgatgaggaagccgtacatgcgggagcactcttgcctcatcttcccgcccccgcgcggtcgacgcccgctggcggtcatcaagttcctcggcggcgccttcatcggcgccgtccccgaggtcacctacggctacctgctggagctcctggcgctggagggctttgtggtcgtgtgcgtaccatacaacgtcaccttcgaccacgaggccgccgcgcgggaggtattccagagtttccatgcctgctacgacgcgctgctcgcgtcggggctcccggaggccggcctcagcgccctggacatcgcggagctcccgctctactctgttggccacagcaacggggcactgcttcagctgctagtgggaagctacttctcagaaaggataccagaggctaatgccattgtctcattcaacaataggccggcatcggaggctgtgccttactttgaacagtgtgttttttccatcctgggtttgagtggcctccaactcctcactcctgggattgctgatgaagtattccaagattggtggaaagcagctgaagcaagagtttgtaaggagaagaaaaaaggctttaactcgctggtggcgctttcttcttggaggatttggaaacatcgaaatgcttgtgtctttgatggggtgcccccaagtgtatctaaagtcattcaggacattaaggaggaggccagaatatggtgcttggcgggtgctgctggcatgatagggcccctttttaggcaactgatgcctatgatggaggcctcgcctgtttactcgatggccagaaatgcatcaggatatgcatggaaagctctatttgatttagctggaggtcttttacgtgagtatgatcaagaagctacggtatctctgagcaaatttattgatcagttaccatcagtaatgaaccaggtttcagaaggtgtgtctgaatttaaaccaacaccacctgaaaaccgtgaattctgcaagaattcctacagtgtacccaatacattattggtcaaattcactgtagatgctattgatgatacagacatagttgaagatgtcctgagaccccgcgttgattcaatcggtggacaaataaagaaggtcatactgtcaggaacacatctaactccatgtatacaggcactcagctttgttgtattgcaggatgtcaaatggcaagttggttcagaatacactccagcagatgccattgcacaaggattgaaatcattggctcttagtgaaacaagagtcctctcaagaacaattgctgattggtttacatccctttaa

SEQ ID NO: 22568 - DNA, 132 bp, Zea mays
  Peptide Sequence Number=SeqID_64347
atgtcccgcagatggtccggccccgaggccggacggtccatggtccggacggtgccgtcggcgaactccgccgcccctgcgcacgcgcggaccgtccggcccgttaggcagggaaccctagccctgctctag

SEQ ID NO: 22569 - DNA, 207 bp, Zea mays
  Peptide Sequence Number=SeqID_64348
atggtgcagtgggggaaaccggcgccaccaccgttggcgcacccgtgggatgacctaccgaccgcgatgggtggtgctagtgcatcacgggacttcgccgcgcacatctggcgggagctattcgatctggtcattactaaatctgaatcatccatcggggatccgatggccagggtcactcgcggggttgaggggcgtaggatctaa

SEQ ID NO: 22570 - DNA, 969 bp, Zea mays
  Peptide Sequence Number=SeqID_64349
atgccacacagccacagcaacgaactgcgggagctttacgctcgaaaagccgcgagccttcgttcgtccccgtcaacgtcgcgtttcctctttttcccggttccccgatcccctccgcgttttcctccaccacaccaccacttccctcgccgccactcgcgttcccgcccccaaggattacaccgtggcatctcgctacagccgccgctgatgcatctctccttccatccccctgctccgtcgcatctccctcgccggggcggcgtcgcaccaaccacaaccccatccttcgtcctccggaggaaccagcggaggcggcgccaccaccaccgcccgtaccgcctagccccccgcgcctctctctcagacctcatcgccaacctcccctcctccctcgcgctcgtaggtcccgcggcgctcgcggctgcggccgcggtcgccacctctttctcctcctggtcctcctcgtcccagaccagcctcccgccgccgccccaggaatccgaggactacaacgcgtgcggggatgtcgcgggcgagtgggttctcttcaccagcccggcgccattcaaccgctgcgtgctgctgcgttgcccgtccgtgtctttcgaggacgggctcgacggcgtcaacgagcgcctcctcaccgaggagcggcactacgtgaatctgagcaggggctgcatccccgtggtgcgcggcggggacggtgcctatgatatctcttaccagaggatttgcatcgccctggaggacggtggggtgatcgcgctcgattggcctgataatttgtacttggacaaagagcatggactggattccacggtgcttatggtgcctggtacgcacgaggggagcatggagaggaacattaaggtgttcgtgttagatgcactgaacaacgggtactttcctattgtaatgaaccccagagggtgcggcggctccccggtcactaccccaaggtga

SEQ ID NO: 22571 - DNA, 324 bp, Zea mays
  Peptide Sequence Number=SeqID_64350
atggagcatgaggagcgcctagtcgctctagcgggcttactgtatggacgtcgaatcaaggacgatggagacaagcaaccggatgttttggacactgtccgcctgagcgtgaaggggggcaatgacagcgacgtcgaacctggcaacgtgggggagcatcgtgtcgccagggagtggacaagcgatggtcgtgtcaccaggaagaggaggggtggtgtcgcgcccatgccaccaggtggaggaggagctagctgtgccgacaccagagagagggaaggggcgccgatgagggagggggaaggcttggtggcggtggcagcataa

SEQ ID NO: 22572 - DNA, 282 bp, Zea mays
  Peptide Sequence Number=SeqID_64351
atgacgacggctgtgacgtgtctttgcgaggcggcgctgtacgtggtgagcaccaagacggaggaggaggcgatccggatcttcaccgagggcatcaagcccgtgcggacggctgtccgcaagtccacctccaccgactcctcgtcggacgacgacgtggagctcggctgctgctcctcctccaccaaacgctgttgcggcgccgccggcgctcatgctcgacgacgacggcgctccaccgacgacgacgacagggacgacgtcgctacagcgccattctag

SEQ ID NO: 22573 - DNA, 561 bp, Zea mays
  Peptide Sequence Number=SeqID_64352
atgtcatggccagggctgtgtagatcgaggtggagcacgcaatgtggagatcccacagctattgtgcatgccaaggcatcggcttgggccgagctcaacgaggcggaacgtgcaacacatagaagccaaaatgcagagaaggacatgcctagaagctcgtgtcggtcggaggagctgcgtgtgtcggggctaagcgccggcaaggatctcggcgcgcaacctagggcctggcatggccaagctggaaagaagaggatcggttgggggaactcaggctcgggtccaaggcgcctgctcgcttgtgcgcccgtggagggaagcagaggcatgggcgtgtgggagaaagctcgtcgtggagagcgtcgagcggggctgtacagaggcggctttggagtggtggccgaggagggagatgggggcgcacggctggaggagcacggcatggaagaaggtgctgctgcagccatgggaaatgagagaatttttcgccatttttgtgagagcaagggctatatatacctgatttctagggttaggcttttagtgggctcaatgagctga

SEQ ID NO: 22574 - DNA, 984 bp, Zea mays
  Peptide Sequence Number=SeqID_64353
atgccatcgtctgagaagatgattagcaattctatggtggtagatctccagcccggtcatacggttgcgttcgagacctcaaggatctactcgggccgcgtgctggaggtgcagcagctgggttactttggaagtggggttgggcgggctccaggggctgaaaatgtcccagagccagaggggtccctgcgggggtttgagtttgaggtggcggagggtgatcaagacgaggaggcccttctctacgtagcccgtctgagcagtgggtgtgactttatgcaagatttcgtcgcttgtggggtgtggcccttggcgcatggatgggctttgggcgagattgcgcctcgcccgatgccaaccctaggaaataaattggtgcgaagcttggcctttgtcgtggacctgcgcgggcacgatgctgccacttttgtgccggaagtggagtcggaggccgttaaaattgtcggaaaatatgcgccaaagaccgaaatgttaaggagctgggatattcgcggttccaacgtcaggttgaaccgtgtcttcaaattaaataaattgccttatggtccctacccggagggggactccactgatgccggtgactatcgaggcaagcaagtgaatccccgggccggcgaaggcccctcaaaggggaaagctccggttgcaacaattcgaaagaggaaattaggtatgggggctgatgagtctgggacgagggccactgggcattttgttgaggagttgatggaaacgtgcatggttcccggggaattgatgtcttcacctgagctccgggaaacttcttcgcgcatgctgaaggttatcgggggtcgatggtctaggaatgatcctataccccgggccactagtgaagatttttttacatctcaattggctagtgaattgagaatttttccttacggaaggaatattggtgatgttgtgtcggccatgatggagaaggatcgccaagacgcttag

SEQ ID NO: 22575 - DNA, 525 bp, Zea mays
  Peptide Sequence Number=SeqID_64354
atggagacggtttgcctaatactcggcttgcccagtgcaggtggcagcaaacctttcatggattggtatggtgaagttgatgttgccgacaggctcatgaaagacctcaagatatcgaaggatgagtttgatattgccacgattcagaaaataattgacaagggaggtgatgatgaactaaccatcatgtgtttcttcctaattcttttcaactgggtgatgttccatactttgtcctggtcaatttccaacaacgaagttctaatgttagaagatatggaccagctgccagacattgattggtgccaactagttttcaatgatttatgtgaggctgctgcaaaataccataaaaggaacaccaatcatgtcactgctacggcttatgggtgctccattgttattttgttccgtagcaggacaaacacatgttgtgttgctgctcctgaatgcccagtaaatgacatgttccatatccacgttcttcggatgaaagacttgatatctagcaaggttctttgctag

SEQ ID NO: 22576 - DNA, 213 bp, Zea mays
  Peptide Sequence Number=SeqID_64355
atgaagtgtgatgtggtgaagggtgacaaagggaccttggaggacccatggtcgagattttgtgtcgccgctcgaggcgggggcgaacttgcctctgccgccgctgctgttggcgtggctgcgtcagctgtgcagcagatgcgatttgtgaccaccttcgccgagcaagttgcgtcaggggcgctgacctcgcagtttgtttctgagagttga

SEQ ID NO: 22577 - DNA, 501 bp, Zea mays
  Peptide Sequence Number=SeqID_64356
atggctaacatctcctcaaacctatggctcgagttcgactcttcgattttggaccacgttacacttaagggatacatcagcgaacaagatggaagggcagacggcgatcaccgtaatttggaccctgaggtgagctcccctccccttctctctctctccctctacctcctcttcttcctcccccacgcgtgccctccctttaccctgctcgcgcgcgcccccgccccctcccagcccgcggcggcgcggcggccccgccctccccagcccgtggaggcgccccggccccgccctccccggcccacggcggcaccccccgccccgaccccgccccctgctcgcgcggcggcgccccagcctcgccccctgcccgcccggcgcggcctccggcccccggcgtggcccccggcggctcggcccccggcggcttggccccctgcgcgcgtcgttctggcccttagcatggttcgcgtggcctcgcgcttccccgtttaccgctag

SEQ ID NO: 22578 - DNA, 132 bp, Zea mays
  Peptide Sequence Number=SeqID_64357
atgggcgcaccatacatgcactgtttgtttcatttgtcctgtggcatcatcagggcgtgcagggatctcattcgggttgttcacatcatttaccaactaagggatctcgacagtgaaaacttcgtggcttga

SEQ ID NO: 22579 - DNA, 1264 bp, Zea mays
  Peptide Sequence Number=SeqID_64358
atggcttccacctccgcctcctcggcccccgtctccccctcccacccaaaccctaaccctacccccgacgcagatctcccatctgatcgccccatgcccgacgccgacggcggaagtggaggcgcctcgcccgcttccccggagaagcgggaggaggaggaggaggtgccgggggaggtggcggcggcggcggcggccgtggagcagccgaccccgcggaagacgcgccttccgcgtgcttgcaacaacaagcccaaacctcctcctccgccgccgccgcccgagcgtccgcgccgccgtgccgcggcggcgggcggcgcggacgagacgccgcaatgccgcgtggtcacgccgctcgtgtcggagcccgaggcgcccgcggagctgccccgctggcggctccgctgcatgtgggagctcggctccgtcctcaacttcctccacgtgttccggcctctgctgaacatcactggtgatttcacggctgaggagctcgaggtggcgcttatcactcccaacgagattctagatgatgtgcatatgccactgctaaagtcaattcctcctgtaactcgcatggctatgggacgtggaacctgggtgactgtcctgtgcagaaagctgaaggattggtggcattgggttgcagaaggtgatctgccaattgttgcatctcatggaactgaaattgagacgtacaaaactatagaaccagctattcgtttactaatcttgaaagcgatatgtgatatccgtgttgagcaagaggatattcggaacttcattgacagttctcttaagcatggacagaacttttctacctttcgtaaagatcggattggaggggattcccttggaatctcatactggtatgaagatgatgagattctcgggcatagattgtatcgtgaaattagacgagtagagcaggtcaagaaggagccaggaaagaggtctaggggaaaaggaggatcttcagctatttcagtcgtgtcctaccagtgggaaactgttgcgtccactttcgacgagtttgatgatgtggcagaaaaactcttttcaagtcggaacaggacagaggtttcacttggaaagaagctgaagattgaatatcttccagagatagaaaagatccataaaaagaaagagaggttgctcaaaaagcaacagagagaagctctccttcttgatagctacttgacatcagatggacttaccaccggccgttctctccgtgatagaaagcccgtgacttatacatttg

SEQ ID NO: 22580 - DNA, 594 bp, Zea mays
  Peptide Sequence Number=SeqID_64359
atggccaaattggtagttgcagcatctttgttttctcaccacctgagcaaagcaacagctgacccagaagcaaaacggttgaaacagatagcacctagtgaaaaaaatgacagaaggacagaagctgaaacaaattcagggaacgctagcaagtctgctgataaaaagcctgcacctaaagagccaccaaaagactacatccatgtgagggctagaagaggtcaagcaacggacagccatagcctcgcagaaagagcacgacgagagaagataagtgaacggatgaaagttcttcaagatattgtccctggatgcaacaaggttatcgggaaagcatcagtccttgatgagataataaattacatccagtctttacagcgtcaagtagagtttttgtccatgaaacttgaagcgattaatgctcatgtgagcaatgcaactgtagcttttccaaccaaagattttggtgttgcgccatataatactgctcctagcctgacgttggacccacaaacgccaagggaatacgcccagggctcgatgtcagattggcttcacatgcaggtcggcaacgcatatgaaagagtgacatga

SEQ ID NO: 22581 - DNA, 780 bp, Zea mays
  Peptide Sequence Number=SeqID_64360
atgggcccatgtcaaccatttggtcatacatttccacagacaccgggtaattttcaaactagaggttttgttgaatcttggttcaaacagtttgattggttagagtacagtgtacagaaagatgcagtttattgcttttattgctttttatttaagcctccaagaaccaacaactttggtaaagatacattcactaaagttgggtttaagaattggaaaaaagcaaaggatgtattcaaggaacatgtccaagcaattgatggttctcatagttatgcgaggaaacgtgccctcaattttgcaaatcagagacaaagtgtagctcatgctcttgcttttcgtggacatgatgaatctaaaacatcaagcaataagggtaactttttagagatgcttgagtggtatagaaaaagggatcctaaagttgcaatggtcactagtgagaatgctcctagtaataataaaatgagttgcccaaatgtccaaaaagatttggttcgagcttgtgcggaggtgacaagtgaggttattaaagctgagataggtggtcgtctatttgcagtgctcattgatgaggctcgggatgcatcaattaaggaacaaatggctatggttgtaaggtatgtcaatgataaaggccatgtaattgagaggtttcttggtgttccacatgttcctgatactacatcatcttcattaaagagttatagggcaaggatactatggagcctcaaatatgagagggcagtttcatggattgcaaagattggtattggatga

SEQ ID NO: 22582 - DNA, 290 bp, Zea mays
  Peptide Sequence Number=SeqID_64361
agtgtggtcctctccaatcacccactttgctaaatcgctaccctggactagaagaagaggggactggctcagaaggctccaatgagttccctcccaatgggagcttagaagaagaggtagagaagggcgatccggaagcagttgctaatgttaccaagcaaactacgggtgggagtatgtgtgcgaaatcaggagaggataaacaggcaagttctctagacgctttagctgcagagggttccaatgagcttgagcaaggtgagccaccaaatggatttaatggtctgtag

SEQ ID NO: 22583 - DNA, 1615 bp, Zea mays
  Peptide Sequence Number=SeqID_64362
tgcccgcctcgctgcccaagaagcacagtggtgcagttgggagtcgacagtggtgcaccattcggtgtcgatccacgaccttgaggtagcggtggccattatgccatccgcggcgttgattgcggagcgagacgctcaggtcgccgcgacccacgagtgtctggccgtgatcgctgacgactggggtggcctcttcggcacaggcgacgactgcatcatcgctgacaactggggtgggttgttcgagtatgctactcacttccaggaagaacaagacatcgacaactacatccccataaatgatggcaccagcttcaccgaggaagacgacggcaaccaccttcccacgctcgaaccactgctcaccgtcaccaccaccgccgccgaggtcgattccgtcgccaacaccgatgatgtcgaggctgactctctcacctccacctccacagtgggggtggccacatccgaggccgccgagatgcagttccacgtcgggtgggcgcgctggctggagggacaagctgactacctaagacacgatcgaatgctccgctccaatctagattccctcactcggagcaaccacccgctgctccaggatgcatcagccaccaacaactcgcccacccagtactcgatagaatgcttcagccatggcatcgtcttgttgaggactatcagtgctgcgcccacaagcgaggaccgcgcgctgcagcggaggcgtctcgagtgcctcgtcgtgtggcccgagtggcggaggattggcggacgaaactacatcatgctcaagcatcacctcaacaggatgttcgacgcgcgcgataggttctggcactgcgtcttcgcgctctgcgacttcggctctgtgcagggcctaaagaggaagctggagcggctctgcttggcggggagcgcgcctgacctagaagccctcgccgtgcttccgggcctgcgcgtgcgaagcctttccgaccagcgtgccgccaaccatacccccacgtccatgcggagcatctccacgatggccaccccgttcggactctgctctgcacggagatgctacaacacaagcgggacttcgacgggcatgacttccagcaccaggtcacagagctggatctccttcgagttcgagcactcctccatcccgacccccaaccagaaggtcttcaacctctcgtctgatgtcctcaataagagagatgtgtgggccgacaaggtgtttgctgcacaggaggtgttcgaggaattgtctcttagctcctctgctacttgggtcaatattgggaagctcttagcctctctgtgctggaaaattccttggccaccaccacatatacaagttgggttgggatgtggcagtgagactttaccttcaattccatggttgtctcccaccatagatagtaccaatgaggagagaatattcatcatatctgaggatgacaaggttgatgatgtggttgattggacgatggatgaacagatcgcagttgcagcctttgtgccagcttgtatagaagcttcgcttaatgatgggatgaatgcaggcaaaaccagggaagcctttgctgatcatcagtattttgagtatgacagtagattgaaaagataa

SEQ ID NO: 22584 - DNA, 285 bp, Zea mays
  Peptide Sequence Number=SeqID_64363
atgcagcttgcacatagaagggtttctttatggagaatggaaaaccaacagaaacagatcagatgggacataacgatggtcgcacaccattcacaaaaatctcaaacaccattattagaggggaacactaatacccaaagttatattgtagcggaggaaaatggatcgaaatcgcttggaccaaatgtcgatgctaaggaacgtaagaggcaaagggaaaatgaaagatatgtcatgatgttcgttgaacaaaaaatgagaaaagtaggaaacatcgtgaagtaa

SEQ ID NO: 22585 - DNA, 527 bp, Zea mays
  Peptide Sequence Number=SeqID_64364
atggcgtcgtccacaggtccacccttcccatcctccatagaaggcgccatcccttccttacacggcgaggaaaatggacggcaatcccatccatcggcgccaaaccctacccatccaccatattcggcgccctcccttccttacgtggcgccatcggtggggatatcccccaatctgctggaaggagtccgcgccaaatcagagcccaaaattcgcgccaaatccacgctggatgaggtggtggggagatcccccaatctgccccccttctacacgcctaccatgaacgggaatccctaccatcgagaaaccccctacccatcctccatagacggcgccctcctactaaccactgaaaaatcccttccacacgccgacaacttcatcctcctcgcgtttgtaagttcaattctcagatttatgatttcagatgttgagttgattttgcaaattgataagcgttttctttcatacggtaactctgcacgtggacagaatcacagctctgttagcactgttttatcaag

SEQ ID NO: 22586 - DNA, 1728 bp, Zea mays
  Peptide Sequence Number=SeqID_64365
atgccggcaggccagctgagctggccgttactgctaggcgcggtgttagcctttggagttgcagctagcccggcccaggcctccaggaacactcactacgacttcgttataaaggagaccaatgtcacccggctctgccacgagaagaccatcctggccgtgaacgggcagttccccgggccgaccatctacgcgcgcaaggacgacgtggtcatcgtcaatgtgtacaaccagggcagcaagaacatcaccctccactggcacggcgtggaccagccgcgcaacccgtggtccgacggcccggagtacatcacgcagtgccccatccagcccggcgccaacttcacctacaagatcatcttcaccgaggaggagggcacgctgtggtggcacgcgcacagcgacttcgaccgcgccaccgtgcacggcgccatcgtcatccaccccaagcgcggcaccgtctacccttaccccaagccgcacagggaggtgcccatcatcctcggcgagtggtggaacgcggacgtggagcagatcctcctcgagtcccagcggaccggtggcgacgtcgatgtctcggacgccaacaccatcaacggccagcccggcgacttcgccccgtgctccaaggcggacaccttcaagatgtccgtggagcacggcaagacgtacctgctccgagtcatcaacgcggggctcaccaacgagatgttcttcgccgtcgccgggcaccgcctcaccgtggtcggcaccgacggccgctacctcaagccgttcaccgtcgactacatcatgatctcccctggacagaccatgaacatgctgctcgaggccaaccgcgccaccaacggctcggccaacagccgctactacatggccgcgaggcccttcttcaccaacgcgggactcccgttcgacgacaaaaacaccacggccatcctggagtacacggacgcgccgcccgccgcggggccaccggacttccccgagctgccggccatcaacgacaccgccgcggcaacggcgtacacggcgcagctacggtccctggtcaccgaggagcacacgatcgacgtgccaatggaggttgacgagcacatgctcgtgacgatctccgtcaacacgctcccctgcggtgccaaccagacgtgcgccggccccggaggcaaccgcctcgcggcgagcctgaacaacgtcagcttcgtgagcccgacgaccgacatcctcgacgcctactaccactccaccagcggcgtgtacgacccggacttccccaacaagccgcccttcctcttcaacttcacggcacccaacccgccacaggagttctggctcacgaagcggggcaccaaggtgaaggtcctggagtacggcaccgtcgtggaggtggtgttccaggacacggccatcctcggcgccgagagccaccccatgcacctgcacggcttcagcttctacgtggtgggccgagggttcggtaacttcgacaaggacaaggacccggccacgtacaacctggtcgacccgccgtaccagaacaccgtctctgtgcccacgggcggctgggctgcgatgcgtttccgcgcggcaaatcctggtgtgtggtttatgcattgccacttcgatcgtcacacggtgtggggcatggacactgtgttcatcgtgaaaaatggcaagaccccaaacgctcaaatgatgccacgtcctcctaacatgcccaagtgctaa

SEQ ID NO: 22587 - DNA, 327 bp, Zea mays
  Peptide Sequence Number=SeqID_64366
atgggcaagagtaagaaaggtggtagttctttgcatcgctatggtgacaaacgcaagcacgactcccaggggattacctcggaggtctggacttacatccggtccgtcgagcgtgccgggctcgcggactcggatgagtcggagtactcctcggacgaggagaactcctcgaactcgtctgaggagggcggtggcgacggcgatggcggtgacggcggcaaaggcgatagcgacggcagcgacaagggtggcagcggcgatggtggcgacggcagcaagggcggcagtaggggcagcagcaagggcagcaataaggctagtggctag

SEQ ID NO: 22588 - DNA, 810 bp, Zea mays
  Peptide Sequence Number=SeqID_64367
atgcccgctgccgccgccgcgcgcggctgtgatcaacgtgaggacgtcaaacagagacgcgacggaaccaacctcgggcacggcgaggatatggaggcagcgaggggagaggaagatgacttggatggcttctgggtgtcgtacgggcggcggtgcccgcggcgccggctgcccccgctcatcccgtcgctggtcgcccgcggcgcgctcaggcggacttgcaccgacgacgggaggctcgtcatccggatagtgcccatcgtgcacgaggacgattcttcggtgccgccgccgccgccgcttcgggagctaccggccgctgcgcgagatgctagtgccaggaggactaacgttgcacggccggacgacgacagaaccaaccttgggcacggcgaggatgtcgaggcagtagtaaagcaggaagagaaagacgaagaggatgataatatgaaagcaaagcagacgcaagaggaagatgacttgttggatggcttctgggtgtcgtacgggcggcggtgcccgcggcgctggctgcccccgctcatctcgtcgctggtcgcccgaggcacgctcaggcggacacgcaccgacgacgggaggcttgtcatccggatactcaccggcaccatgcgtgagcgtgatccatcatacgttgcagttcaaccagagattcaaacttcaattggcatgaaagcatttggacggccgctggacgatcagcgcggccggttttataggcctccgtacctcggcgccaagatctatggcgccgagctacgaggccgcgtcggcgccacgcgtcaatgccag

SEQ ID NO: 22589 - DNA, 1638 bp, Zea mays
  Peptide Sequence Number=SeqID_64368
atggccggcgggaaggagccgatcgaggtcaggttccggctcttcgacggcacggacatcgggcccaccaagtacgatccctccaccacggtctcctcgctcaaggagttcatcctcgctcggtggccgcaagcgaaggcacactgcccgacagccgccgccgtttcttcctcttcatcttcctcgcagcgccgggccttccatcttccgctccctccccgactcgcccttggcacgcaggcgacagcggcggcgctcaggttcgggctctcagcgacggcggggcaaccccagactcgctgccgtcgtcagcggctcttcctcccgcctctcgccaatcgactcgcaccctcgcctccggtcctcgtcccccccgcataccggccggcgaccctgcatgcgcgcctcccgctccccttccgcctccggtggaccgtcgacagcgcccggccccggcggctgcactgcgcgccgcgtgcggccggcgggcagtgggagccagcagccgctgctccagcaaggcggccgtgccgctttggtagcgcttgcccgaaacgaagcgttacctgtccgcttacgtttcagcgcgagcttagtgcctccttttggaaccctggtaatcatcttagcactaacaacccgatgaggccaaatgattcgttggaggctcaagacatggttcctgctgagggaaaccacagttgcttctcaagtgttcagtccactccagaaattgagaagaagtatgtgcatcgtgtctatgatgccatagctccccatttcagtgcaacaagatttgctaaatggcccaaggttgcaggattcttgaattccttgaggccagggtcggttgtactggatgctggctgtggtaatggcaagtatttgggtttcaaccctgattgtttattcataggatgtgatataagcccaccgcttattgagatatgtgctgggagagggcatgaggtgttggttgctgatgctgtcaacctcccatacaggaatgattttggcgatgcagcaatttcaattgctgtgttgcatcatttgagtactgatgataggcggaggagggccatagaagagctaatccgtgttgttcgaagaggtggtctggtgcttataacagtctgggctagggagcaggaagacaagtctttgctcaacaagtggactcccctctgcgagaaatatactgaagagtgggttgaacagagcagtcctccagtacgcagtaaatctggaactcttctggaaagcattgcagaaactgatgaagatgctggtttcacgaagcaaacagatgaccgattgaaaagctgtcatggtgaggtggaggacaagaccattgactgtagtaattcaaagactgatgaaaatgagaaaaaccagcaggagtactttgttccatggcatctaccatttcaccgagctgaaattggtggtgcatctgctgctctggaaaatggatttgcaaagaaagatgagaagaagggtacagtggtctacaatcgttattatcatgtttttgttgaaggagaacttcagagattggtttctggcataaagaatgctgctattgttgaccagttctatgacaaatccaactggtgcattgttctcgagaagctttga

SEQ ID NO: 22590 - DNA, 462 bp, Zea mays
  Peptide Sequence Number=SeqID_64369
atggcgagatccagcgttaccgtgcgagtgcgagagtccgagactgagagggacgaggaggacacgtccacggaggcgccgagcggagacggagaggccgagagcggagaccgaagatggaggagatggacgagaggcgagacggcggtcgcagtcgcagcggagaggagaggagcggtcgagcggctgagtggtggttccacctacaagctgctctacaaggcccacaccaaggcgaacgataaggcactggtgcagaagttgctcaagggaatgaacaaaacggggattgtcccgaataaaaagttcttcctggacgctttagaagcatttggctcctctgagaggaaacccaggacatcaccaggcataaactctgcaagcaagcagagtacagattcggctggcgattcagaaactgctacttctaagaaaccagagatctgtggtcctatttactga

SEQ ID NO: 22591 - DNA, 321 bp, Zea mays
  Peptide Sequence Number=SeqID_64370
atgacagctttcaatggtcacgacaatgaggacaaacaacaggaagttccagtacttcttaggaacaaagctagtgctattacaattaaagatgtaataatatatgcaggagatccagatcagacggcccaggcgcagcgggtcgagccagtgcccgagctgttcaatctcgaccgcccatcacgatttgaacagctagcgcaggatcggacggtcgcgggatggtcttcttcctctggctctggatacggcagtgcccgcgcagccccggacgacgagctcgccggcgcgaccacagtggcagagcagagttcgcagtga

SEQ ID NO: 22592 - DNA, 1110 bp, Zea mays
  Peptide Sequence Number=SeqID_64371
atgacgcgccgcagcgacgcgcgcctgaggagggtcgtcatggagccggcttcgcctccaaccgctgcaagtcgcgcggatgagggcggaggcgagagttttgcagtttctactgctgtcttcgctccgaaatccaaccgaaatctcagaggtcagaggaaagtaggaaacctcgttcgggaacctgctttgagtgagactccaatccttgggcgccattgccgcctgttttttgtgctcggaaaggcgctgtctgattcctgtatatttattttggcaatgctttcagctgcaacaaaactaaccatggatggcactagctttgacctgacagagcacgaaggttcaaatttgtctccttttctactcaaactttttaatgaggtgctacctggagtacataattttggggcaacattaattgaaggacgtgaccaaaagaagcggccaactgagttcacaatgaaccaagttctccagccatttgttagtgagaagttcaatttcacaaaagtcagcccgttggaggtgatctttaaattcaatgacactgagaaagattctgcacaatattttgatggtgttcctgatactgtttcagcttcttctagtgccatcttgattaatgcatactacctgaaagtacagtatccagttgaaaaggcaatcacggagaagctcaagaccctagggaatagcgtgagcatttttcacctggtggattacccagtcaatggctttgtgttcgaaggtggtgcgagcctggaagatttgtcagatgtggtctccaaagtctgcatcttcctgcaagagaacaacagacctttcaatgtcctcatctctgaatctggcaagagaattttccttctaccacagtgctatgcggagaagcagctcctcggaaaggcgagccaagagttcctggacatgagaatcaatccagcaatctgggagctcagtggccatctggtactgaagcggaggaaggactacgaggaggcctctgaagcaaacatatgcaggtttttggttgaagcagctctttctgaaacagaatttcaggagctgaacctatgcgtgctcgacttcctgaccagctctcttggttga

SEQ ID NO: 22593 - DNA, 567 bp, Zea mays
  Peptide Sequence Number=SeqID_64372
atggcgcctcctgttgacatgtctggtctgcgccctaggttgggcgatgtggaagctcctccgaagccgaggtcgaatctgtcttccgtggccgaggtcgagtccgagcccctggttcgggcgaggcggagaccgtcggccgaggccagggcagagtccgagccctggggtcgggcgaagcagagttcgtcgtcttctggggctgtgcccgagtccgagccctggggtcgggcgaagcggagttcgtcatcttctggggctgagcccgagtctgagccctgggtcgggcggagcggagttcgccgtcttccggggcttaggctgagtccgagccctgccccgagtccgagccctgggtcgggcggagcggagttcgccgtcttccggggctttagccccgagtccgagccctgggtcgggcggagcggagttcgccgtcttccggggcttagcccgagtccgagccctgggtcgggcgaagcgaagcttcctatggccggtcagtggagcgacgaagtgacggtggtcacttcggctctgtcggctggggggcgcgcgtcaggataa

SEQ ID NO: 22594 - DNA, 2301 bp, Zea mays
  Peptide Sequence Number=SeqID_64373
atggaagcaatggaggccgaagaaggtccttttctggctaatgatgccaaggaatttgtagagcatttcatccttctgtatctaagctttccgccattttcccctttatcgaagcatcaagacccagaagcaagcctggccatcacttcggaaactgtgcttttaaagtttgagaagtctagaagccagcttcaggagagtctaaggcgcactgaaagcatagtaactgaagatattggctgtaagattgtggagattgttggtgagctggaggaaattgtttttacattagatagatcagagaaggaagctggtgatgagctgatcaaattgctccagagaaataataaaacaaatggttccagtgacagtggggagcttgaggtattccatatgtctgctcttaaattgggaattacatcttctagggcagcactcaccgagagaagagcccttaagaagctaattgagaaggcccgttctgatgaagacaagcggaaggagcttgttgtgtcatacttgtacaatctcatgaggaagtactcaaagttcttcagaagtgagactggtgatgatacagattctcagggatcgtctccatgctcgccaacagtattaggcatggatgatatgtatgggccgtacaacaatggtcgggcatttagtagacagctttcgagcattcagtctttcaattcaaggtttggatctttcaattctaggcttggatcattcaattgcagacgtggtggtggtccaaggtctgagaatatgtcaatccctcctgaagaacttaggtgccctatttccttacaactcatgtatgatccagtcatcatttcatccgggcagacttatgagcgtatttgcattgagaaatggttcaacgatggtcacagcacatgtcctaaaactcagcagcaacttgcccacctgtcattgactccaaactactgtgttaaggccctcattgcgagctggtgtgagcagaacgattttccagttcctgatggtccaccagggacttttgatgtaaactggagacttgctttgtctgacactgaggccgcaggctgtgtgtcagttgaaagttttgattgtgctaatgcaaagagtgtcaaggttgtcccaatggagaacgttagaaaggaggagccagcaaacagtgaatcgggaactctggatgacggctcctgtaacgatttcgatttgaacgaaggctatgggaacttgctgctcctgctccatgaaagaagtaacatgaacaagcagtgcaggttggtggagcagataaggtatcttttgaaagacgacgaggaagcaaggatccagctgggctcaaatggctttgccgaggcactggttgagttcttgaggaatgctgtgaatgatggaaatgagaaggcacaagaagttggtgcaatggctcttttcaatcttgcagtcaacaacaacagaaacaaggggctcctgttatctgctggagtcaccgatctacttgagcagatgatatcgaatccacggctatctggtcctgccacagcactctacctgaatatttcctgccttcctgacgcgaaggccgtcatcggttcgagccaggccgtgccgttcctagtcgaccgtctgtacagccaagacggcagcgacacgagaggaagctcctgcaagcacgacgccctgtacacgctgtacaacctctcgagccaccaggccagcgtgccggcgcttctagccgcgggcatcgtggacgctctccactgcctcgtcacggagtctccagggtcggaggaggggcttggctggacagagaaggctctggcggtgctcatcagcctcgcggccacccaagctggccgaaaggagatcatgtccacccctggcttggtcagcacgctggcgatgctgctggacacgggcgagtcgacggagcaggagcaggcagtgtcgtgcctcctggtgatgtgcggcgccgacgacaagtgcatcgcgccggtgctccaggaaggggtggtcccgtccctcgtctccatctcggcggccgggactgggaggggcagggagaaggcccagaagctcctgaagctgttcagggagcagaggcagcgggacacgccgccgccacagcagcagcagcagcagctgctgcagagccagctggcggagggcgggaacggtggtggtggagctatcgtgtgccaccgggaatcgaagccgctgtgcaagtccaagtccaggaagctgggcaggacgctgagctcgctgtggaagaacaggggcttctcgctgtaccagtgctag

SEQ ID NO: 22595 - DNA, 995 bp, Zea mays
  Peptide Sequence Number=SeqID_64374
atggcgcctcctgttgacgtggccggtccgcgccctaggttgggcaatgtggaggctcctccgaggtcgaggtcgagtctatcttccgtggccgaggtcgagtccgagcccctgggtcgggcgaggcggagaccgtcggctgagaccagggctgagtccgagccctggggtcgggcgaagcggtgttcgtcgtctttcggggctgagcccaagtccgagccttgggtcgggtggagcggagttcgccgtcttccggggcttagcccgagtccgagccctgggtcgggcggagcggagttcgccgtcttccggggcttagccgagccctgggtcgggcggagcggagttcgccgtcttccggggctgagcccgagtccgagccctgggtcgggcggagcggacagtcggagcggcgcaggcggcgctgtccttctgtcaggtcggtcagtggagcggcgaagtgactgcggtcacttcggctctgtcgactggaggacgtgcgtcaggataaagctttgtgctgatgggggttaccagctgagaattaagagccttgaggaaccttctagaacccatcggggctccgggatggagcccagaagacgagagcgcagggtcatcgccatcgccggtgcggcagcgctcgttgccgtgggcctcaatatcgccttctccgccgtcgtcgcccaccgtcggaggaagcgacgagagcttccagggtttactgctcaagtcaacctatcagcagctgcgattaaaagaacgaccgaccgtatcatctctaagtcaagggaaacttatgattcagtggctgcagtgcccctagataaagtcagttttgctaatgtcattgcaccattggcagaattagatgcgctgcaattccctctggttcaagcttgtgttcttcctaggatggtatcaccatctgaggatgttcgcaaggcaagtgctgaagcagagaagctattggattcccactttgtgctttgcag

SEQ ID NO: 22596 - DNA, 635 bp, Zea mays
  Peptide Sequence Number=SeqID_64375
ctcctccttccgtgctcgctgcgccctcctgcttccacccccggcagcggcaggggcaggaggagacgacggtcgccaccggcgccctgcaccggcggatgtcggatcgggagctccgccccctgcgctccatcagtacgttccaaacgccgtccgtttctagcagcggaatcacaggggacggtcgatgcctgttcaggtccgtcgcctacggcgcctgcctgaggagaggaaagcatgcgcccagcgacagcgcccagaaggaactggccgacgagctccgagccaaagtagctgatgagttcgtcaagcgaagaggagacaccgaatgctttgagagttatgtgagacagatgagaaagcctcatgcttggggaggggaacctgagctgttcatgtgttcccacgttctcaggatgcccatcaccgtctacatgtatacgggcagctccgacggcccaaggatcatagcggaatacggccaggaatacggaaaggacgatccagtccgcgttctctacgacggctacgggcactacgacgcactccagccatctctcgacagctgcgtaactgcgagcagctcaagatttgacgacgctatttttttactccagttccacacagccgtatag

SEQ ID NO: 22597 - DNA, 819 bp, Zea mays
  Peptide Sequence Number=SeqID_64376
atggcggcgagcggaggagcgatggggagctacacgcaggcgggcagcgacgccgcgctgggccccggccacggccacggccacgcgcagctcagctcgcagtggagcttctccaggcaggacctgccgcagatctcggagatggggatgataccggccgacatcggggagagcatcgtgggcgccggcgggtgcaacagctccagcgacgccgcgcagtcctcctcctacctctccaggaccttctccgtcggctcctgggacgacaccaactccatcatgttctcgtctgccccctgcaagaagcccaaggtggaccccgccgccggcgccgacgacatggtcaccaacttcagcaccattgacccgcagttcggcctgtccaactcgtccctggagctgcccggcatggacgactacctgcagctgcagcaggactccgtcgcctgcagagtgcgtgcgaggcgtggctgcgcgactcacccacggagcattgccgagagggaaagaaggacgaggatcagcaagaggctgaagaagctgcaagacctcgtgcccaacatggacaagcaaacgaatacgtcggacatgttggaccttgctgtggagtacatcaaagagctcaaggaccaagttgaggcaacaagagctgctgctgatgctggagaagcagacggaggagggtttttacgccgtaacaatgtgactgttaaaccagagctgttgcttcaggagaccaggccgcgggcagaagtgcgtgacatgtggagcggcttccatgactcagcttcctcttttcttggttgttccacggactag

SEQ ID NO: 22598 - DNA, 453 bp, Zea mays
  Peptide Sequence Number=SeqID_64377
atggagctcgcccctgcctcagcttggactgcgtcgctcggctctggtcaaagaagatccctctgcccagcccctctgctcgcctgccgtgttcgtgctcgagcccttttcctgccgcgcgccgagtcctctgtcgtgctaagctcgctcacctcgtccatggccgtcgtgccgagtttgtcctacgcgagctcctctgtttgggctcggactcgggctcagccccggaagacggcgaactccgctccgcccgaccccagggctcggactcgggctcagacccggaagacgacgaactccgctccgcccgaccccagggctcggactcgggctaagacccggatgacggtgaactccgctccgcccgacctctgggctcggactctggccttagaccctgaagactggttatctccgctccgccccgacctccacggctcggattcgggctaa

SEQ ID NO: 22599 - DNA, 180 bp, Zea mays
  Peptide Sequence Number=SeqID_64378
atggcttccaccgcgaccaccatggggggaatcgtccgcgacatcacggagacgaagaagcagaacctcgccggcggtgatgaaggtgcaccgtcgctcggccggcctatgtctcaatcaccgatctggggaagcaatcaccgtggaccgttgatcgagtatccaacgcctagggtttga

SEQ ID NO: 22600 - DNA, 225 bp, Zea mays
  Peptide Sequence Number=SeqID_64379
atggcttccatcgcgaccaccatggggggaatcgtctgcgacatcatggagacgaagaagcagaacctcgccggcggtgatgaaggtgcaccgtcgctcggccggcctatgtctcaatcaccgtttttgctcacgtcggcggtagcagaggagaacaacaaagctgggcgatggcccgcctgcgtcgtcgggtggatgggctccgctggagcaggcaccgcgtga

SEQ ID NO: 22601 - DNA, 178 bp, Zea mays
  Peptide Sequence Number=SeqID_64380
atggccccaaacttcaaggtctccaacgttgacaaatatgagtccaagcaggacccaggagactggtatctaatgactcgctcttcgttcgagccatacaacaaattgcgccgaccatttccgatcagcttgttctggtatgcggacttctatatcaccaccgatgagcgtggcccag

SEQ ID NO: 22602 - DNA, 459 bp, Zea mays
  Peptide Sequence Number=SeqID_64381
atggggcttcttttatgtcaaaggaggttcgctagacaatatgatctaactgtcggtgattattataattcaatgatggacaatatagataaagtgaccggcaagagaatgatagctctgggagaaatagaaaaggacaagatcatggtcgcaaaagcttacaacaagaaggtcaaggctaagtcattcccggagaaactatccattatatccacttgttgtgaaatgatccttggttattgggacccgccagtcagtgagcgtactaaggaaagagcctttggtcattgggggccattagtggccgaaagaggtggatacgtcaaccctgaaagaattcacctcctgtcaaaccccacggcaatgagccaagggtcgggcgtggcggaacctgacaggaggaccaggcgtgtcgaaagggaaatactcgagtggatctcgcgcccggccctggactga

SEQ ID NO: 22603 - DNA, 1362 bp, Zea mays
  Peptide Sequence Number=SeqID_64382
atgcacctgctgatgctcccttggctcgccttcggccacatcgtgccgttcgtgcagctggcgcggaggctgctgtcctccacctcctcctccgtccgcgtcacgttcctcacggccgctggcaacgtcccgcgcgtcgaggccatgctgtcctctccctcgtccaccggcgaggcggccgtcgtcgtgccgctgcgcctgccccacgtgccggggctgcccgaggacgccgccagcacggcggacctctcgcccgagggcgccgagcttcttaaggccgcgctggacgctgcccggccgcaggtggccgcgctgctggccgagctccgcccggacgccgtgctgctcgacttcgccaccccgtgggccgccgaggacgccgcggcgctgggcgccaagtcgctccggttcagcgtcttctccgccgtcgcaggcgcctacctctccgtccccgcgcgccgccccgacgcggcgggccagctgccgtcggcgcgcgacctcatgtccgcccctgccggcttccccggctcctccccgctcgccgccgccggcgtcccggcgtaccaggcagccgacttcacctacatgttcaccagcttcggcggccagccctgcgtccacgaacgcgtggtggccggcatccgggcctgcgacggcctcgtgctcaagacctgcgccgagatggagggtgcctacatcgactacctcgccgcgcagtttcgcaagcccgtgctcgtggcggggccgctggtgcctggcccgccggcgggagatctcgacgaccactgggccacctggttgtccgcgttcccggacggcgccgtcgtcttcgcctcgttcggcagcgagacgttcctgccgccagccgcggccacggagctgctcctggggctcgaggcccacggggtcgccccgttcctcgccgtgctcaactcccccggacggcgcccgtcccgcccgccggggttcgcggagaggggtgtcgggggagagggctcgttcatgccggggtggggtgccgcaagcagcacatcctgcgccaccggagcgtggggctccgtcgtggagggcctcgtcgccggctgccgcctcgtactgctgcccatgaagggcgaccagttcctcaacgcggcgctgttcgcgcgcgagctccgcgtgggcgtggaggtggcgcgccgcgacgacgacggctggttcgggcgccaggacgtgtgcgacgcgatcgccgcagcggtggcggacgtgggggaaagggacgccaggaagtgggccgactttttgacggacgacggcgtgcaagggaggttcgccgacgagttcgtccggcagctcagggagctcgtcggcgcggcctccagttga

SEQ ID NO: 22604 - DNA, 180 bp, Zea mays
  Peptide Sequence Number=SeqID_64383
atggagaggacaaacgcagaaaagatcgccaatgatatgctagctaggttgtctgaggattctagcgacagtgagagttttgatgtagagagcgagaacgaaggggtcaaagatcggccatggagactgtcacacccgggtttcggggcaccaagacccgggcgcgaacataaccaccag

SEQ ID NO: 22605 - DNA, 617 bp, Zea mays
  Peptide Sequence Number=SeqID_64384
cgccgcacgccctggagctctcctgcggcgtggagatttttttttcctctcgacgctatctctctccctcgtcttcttcaccgacagcgcgcatctcccggcagagcagctcctctgcgccgctgttttcaggcgttctatcttccccgtgatcctatccgctgccgtggggcttatcccctgcaccgctcaagctcgtggaagagaatcccgccgccctgttgatttttttcagccatcgcgggataaaaatcgcgtgcgcctttggtctctgcggccgccgtcgattctccctggctcctactcttccagcgcgcccaccttcccagctcgttctccagcctttctcaagttcgtcgcgcgcctcctgtatttctctgtggccgacgctcagctcctagctccggcgcatgtccctctgctcagctccggccgcgagcagctccctggtgcttggacccggctcagcgcgctccctgttcccatcaccgcaagatcccctctgccccagccccctctgctcgcctgccgtgttcgtgctcgagcccttttcctgccgcgcgccgagtcctctgtcgtgctaagctcgctcacctcgtccatggccgtcgtgccga

SEQ ID NO: 22606 - DNA, 1041 bp, Zea mays
  Peptide Sequence Number=SeqID_64385
atgaaccactcacttttgaaggatggcagctggggcccactggccgcgtcagggccacctgctcgtggcagcctgagaccaggcgcgaggatgctggcggtgttcagcggcgaggtggtggaggtgccggcggagctggtggcggcggggagccggacgccgtcgcccaagacgaaggcgtccgagctcgtcgcgcgcttcctggggaccagctgccccgccgccgtgtccgtgcgcctcgccgacctcggccacctcgcctactcccacgccaaccaggccctcctccgcccaaggtcgttcgcggcgaaggacgaggtgttctgcctgttcgagggggtgctggacaacctggggcggctgagccagcagtacgggctgtccaagggcgccaacgaggtgctcctggtcatcgaggcctacaaggcgctgcgggaccgggcgccgtacccggccagcctcatgctcgcgcagctcgccggcgcctacgccttcgtgctcttcgacgcgtccaccaactcgctcctcgtcgcgtcgggcggcgacgtgcccctcttctggggcgtcaccgccgacggctgcgtcgccttctccgacgacatcgacgtgctcaaaggctcctgcggcaagtccctcgcgcctttcccgcaaggtctgctgcctttagttcctctttctgaatcatcaaaaaaagaaaggagagggtcgtcttcgtcttcgtctctgactgagtacccacttcctgcaccgtacacaggttgcttctactctaatgcccttggaggattgaagtgctacgagaatcccaagaacaaagtgactgccgttcctgcaaacgaggaggaaatctgcggcgcaaccttccaggcctccatcatcatcggtctcatgcgatgtttagaaaggaaggatccagagaccagaggtggaaggggctacggtgctcacagcgctgcattaggagatgaggtgtcttcctccgtctccaggcctggactgggggcaactgtacatggtgcctggtggtgtaatgtaacataa

SEQ ID NO: 22607 - DNA, 369 bp, Zea mays
  Peptide Sequence Number=SeqID_64386
atgggggaggagttcatccgggtcctcaatgcatgtggcggatgcggcgctccctgtaccgtcgtcggcgtcctctgcggcatcaatttgggccgccgcggttgcaagaactgggctggtgtggccgccgtcagcgatttgtgcctgcgacaacacgggaacctcgggcgagtcgtgtgggtttccctgggaagctctgcgcgttctcggggtctcaccaggggagaatggcaaccgaaatcgctcgtcggtgtgtacatcggcctcatacccggcctcgccgtggatcggtcgctgcgcgtcgtctctgtagatggcccataccccttcgccatgtcggtttcactaaagagccctcggcttatttag

SEQ ID NO: 22608 - DNA, 315 bp, Zea mays
  Peptide Sequence Number=SeqID_64387
atggggagccacaaggcgtctggcggcggcggcgggtacgagtgcagcagcgaccacgacggtgggctgcacaagccgctgttgcccaatagcgggagatggtactggacggggtctcgtcagtccagcctcaacgccgccggtacctcctccatggttgtcccgcttaagttccatgtctctgctttcctctgcacgctcatggttgcgctttgcctcatccagttcgccttcacaagcggttactcctcgccgacgcaggacaacgtcatcagggacctcagcctctccgtcgctgcggtttctacatcctaa

SEQ ID NO: 22609 - DNA, 270 bp, Zea mays
  Peptide Sequence Number=SeqID_64388
atggtggcggtggcgggatgggtggggctcgagcctcttatcgcttcccctaaaattatattcgtccctgcatatcatctcctactggttaggtttgattttacccaaaagccaccaaacccggaccatgtgcaaacccttagcaaaccttttcaaggttatcctggccatcactttcttgtatacagttctaagcctagagcaaaaaggcaagggcttgttcggttagctctcaatccatgtggattgagtgggattggatgggtttga

SEQ ID NO: 22610 - DNA, 264 bp, Zea mays
  Peptide Sequence Number=SeqID_64389
atggcgtgccgcgagcacgacacgacaacacgcacaggggtgggaactcgccacgctggggctacgcaggatgcgcgtgaggctgcgccgagggcgcacacgagcgagtcgcgggcgagccgcgagcacgccggccacacgcagaccgagacggtgctgcgggcacacgcagccgcgctgggggcacagctggccgcgctgggcgccgctcgctggtcgagccagtccccatggcagcggggcaaggtggcgatgcacagctag

SEQ ID NO: 22611 - DNA, 489 bp, Zea mays
  Peptide Sequence Number=SeqID_64390
atggagggccagggtcgtcggggctggcgcgtcccgtgcgccgtggtcgcccggctgctcctcttcctcggcgtgaccgtcggcttcgcgttcgccatctaccgcgcgtgccacaaccacaacaagcgcgaccttgtgttcgccatcgtcacctacttcctcgtcgtcgtgttcgcgtgctgcttcgccaagctccagcagctgcggcgcgacccggccgccacggaggcccagatgcggcgtgtcaggatcgccgcctgggtcgtctcgacggcgttgggcatcgccgccacgttacgcgtcgccgacgcggtgcacgggctggcgctgaagctggtcgtgtgggctgtctccatcgtgctccacgggttcgggttctacttccttttcctccgcaaaggcgccaacgccgcccgccagcccggaggagaaggtctagtaaatccaatgtccgcgcccatatattgcaactgcaacatcatggattag

SEQ ID NO: 22612 - DNA, 318 bp, Zea mays
  Peptide Sequence Number=SeqID_64391
atggctcgacatcgcctgtctacatggtctttcctttaccacgatgttgactcggaaaacagcgccgcctgccccactctgactgttgtgccacccgccagggtgaggctgacaacaactaagtccatcctcaagcgcaacaggaagctccgcctcgcccgaccttgggcctcggcctcagaaggaggtctttgcctcgcccgacctcagggctcggcccccgccttggcctcgaaaggtggtctccgcctcgcccgaccccagggctcagcccccgcctcggcctcggaaggtggtctccgcctcgcccgactctag

SEQ ID NO: 22613 - DNA, 768 bp, Zea mays
  Peptide Sequence Number=SeqID_64392
atgtgcgacggtgaacacgggctccatgcacggcggcgaggggatcttcagagagggaggtccagctgcttgctgcagctgcgggtgacgtggatcgacgaccgtgtgcgtattgcgttcgcaggcagcaaatcagagacccatatccctcgcctcccacacttccaaggtttcgtagagcaggaggagaaggaaaaaggcggatatacctgttcgttgccggagaaggacacgacgaagacctgtgcatctggaggtgacataggaagctccgcctcccccgaccccagggctcgggctcaacctcgacgccggacgacggactccgcctcgcccgacccagggctcggactcagcctcgacctcggacgacggactccgcctcgcccgacccagggctcggactcagcctcgacctcggaagacggacttcgcctcgcccgacccagggctcggactcagcctcgacctcggaagacggactccgcctcgcccgacctagggctcggactcagcctcgacctcgaaagacggactccgcctcgcccgaccccagggctcggacttagcctcgacctcggaagacggactccgcctcgcccgaccccagggctcggactcagcctcgacctcggacgacggtctccgcctcgcccgaccctagggctcgagctcaacctcgacctcggaggagtcaccgcctcgctcgaccccgggcttggaccgaccacgtcacaggggggccatcattaccctacccctagctag

SEQ ID NO: 22614 - DNA, 669 bp, Zea mays
  Peptide Sequence Number=SeqID_64393
atggagcccgtgttcaccgtcgcacatggttaccagacaccggtaacggcgccggcgccgcagcatgggtcggggcagatggagggccagggtcgtcggggctggcgcgtcccgtgcgccgtggtcgcccggctgctcctcttcctcggcgtgaccgtcggcttcgcgttcgccatctaccgcgcgtgccacaaccacaacaagcgcgacctcgtgttcgcgatcgtcacctacttcctcgtcgtcgtgttcgcgtgctgcttcgccaagctccagcagctgcggcgtgacccggccgccacggaggccgagatgcggcgcgtcaggatcgccgcctgggtcgtctcgacggcgctcggcatcgcggccacgttgcgcgtcgccgacgcggtgcacgggctggcgctgaagctggttgtgtgggctgtctccatcgtgctccacgggctcgggttctacttccttttccttcgcaaaggtgccaacgccgcccgccaacccgagtcggctttgcccggccgggtgtccccagaggagaaggacttgaccgccatcgctgccgccttgagggctgccaccgtcgccctgcagtggagtagtgacggatccagtggtcgttggggccgtagtggagtccgtctctatttgggtgtagatcttccaatctag

SEQ ID NO: 22615 - DNA, 555 bp, Zea mays
  Peptide Sequence Number=SeqID_64394
atggagcccgtgttcaccgtcgcgcatggttacgagacaccggtaatggcgccggcgccacagcatgggtcggggcagatggaggaacagggtcgtcggggctggcgcgtcggcagggtgccgtgcgccgtggttgcccggctgctcctcttcctcggcgtgaccgtcggcttcgcgttcgccatctaccgcgcgtgccacaaccacaacaagcgcgaccttgtgttcgccatcgtcacctacttcctcgtcgtcgtgttcgcgtgctgcttcgccaagctccagcagctgcggcgcgacccggccgccacggaggccgagatgcggcgcgtcaggatcgccgcctgggtcgtctcgacggcgctcggcatcgcggccacgttgcgcgtcgccgacgcggtgcacgggctggcgctgaagctggttgtgtgggctgtctccatcgtgctccacgggctcgggttctacttccttttccttcgcaaaggtgccaacgtcgcccgccaacccgagtcggctttgcccggccgggtgtccccggaggagaaggtctag

SEQ ID NO: 22616 - DNA, 1608 bp, Zea mays
  Peptide Sequence Number=SeqID_64395
atggagatcgccaagaacagcattgcgagcggccgcgtccgcgacctgccgccatcgaagcgattcaggcacgtcggctcccacctcggatcgactcccagcgtgccgctgccggccaagaagcgcatgctgccgtcgcacacgccggaggaagcagccgtcgctctctgcctcccggtgaagaagagggtcatcgcggcgccgcgggtggaggtggccggcgccacattctgcctcccggcgaagaaacgagccatcgtgccgtcgccgccggaggacgcggcgcccgcgtgcctccccgctaagaagcgcgcctgcgcagcaccggcggatgcggccgtgccggcgcgcgttccggcccaggagcgcccgtgcgctccgctgccgcctccgccggttgtggtctcttgggcccgcgtgtcgactaagaagcgcgtccacgcgccagcgcctcggggccacgccgccggttccgttccggcgcgccgaccagccaacgctctctcttgcgccgagcccctggaggatacggttgcttcggcctccgtctgggctaagaagcgcgcccactcgccaaatcgtcgggaggacgctgcccgttctaccccggtttgcctgccggtcaacaagcgcgtgatgccgccgtttgtgccgcctccatccgtgcagtcagacggtgctcggctagtcgccgccaaagaagccaggcctcaaggatccagtacgcacgtcgacggcggcgccgtcagttctagagtggcaagtggcgccgaagaacgcgccagaggcaaagagttcaagaaacctgagaagcccatcaaccataagggaaccaaggagcaggtgtccatgaagccaaggtctccaccacgtgaagggaagcatctggagaagccgtgcgagatcgtcgatgtcgagcagtatgaagctgtggctgaagcgctcaggaaatctgacgaagcggctgatgctaagggagcatcgctcaaagacgtgacgaggaatggagctgatgaagtggcgggccaagaacaagggcgagagcaggagcccgtggacgtggaggacgacgacgacggcgtgcgctgcgccgtgtgcgcgagcaccgacggcgacccgtcggaccccatcgtgttctgcgacgggtgcgacctcatggtgcacgcgtcctgctacggcaacccgctggcgcgggccatcccagacggcgactggttctgctcgccgtgcgtcgccgggaggggcaagccggcggcggcgcggcgccggagctgctgcctctgcccggccgggggcggcgccatgaagcgcacgacggaggggaagtgggcgcacatctcgtgcgcgctgctcgtgccggaggtgttcttccgggaccccgacgggcgcgacggcatcgactgctccccgcgtccccgcgcaccgcccaagtgcggcctgggcttccacgtctcctgcggcctcggcgccggcctctgcatcgagtaccaggaggggaagggcggcggcggcgccatcgtcgccggcttctgcagagagcacaccgagctatgggagaagcaacaattgacaggcaagtacaagattgtggcgagaggacaagaatga

SEQ ID NO: 22617 - DNA, 1491 bp, Zea mays
  Peptide Sequence Number=SeqID_64396
atggcggcgtggtcgtcgccgccgtcgcttcgccacctcctcatgctccgtccatgcttgcccctcagccccacctgccttgctggctccttgcgccgccacatccacagccgctgccgcctcttctcctccgccgcatcctcctcgacactgacccacggcgacatcgcctcgacgcacggtgacgccgatggcgtcgtcgaagtcaaccctccgcgcggaactagggatttcccgccggaggacatgcggctccgcacctggctcttcgaccaattcagggaggtctcccgcctcatggccttcgaggaggtcgatttccccgtcctcgagtcggaggctctcttcatccggaaggcaggggaagaaattacgcagcagctctacaacttcgaggacaaagggggtcgccgtgttgttctcaggcccgaaattaccccttccctcgcgcgcctagtcataaagcaaggaaaatcagtctcccttccactgaaatggtttactataggacaatgctggcgatatgagcgcatgaccagaggaagaaggcgggaacattaccaatggaatatggatatatttggtgtgcctaaagttcgggctgaggctgagcttcttcatgctattgttctcttatttcaacgtcttggaattacatcttcagatgtggggatcagggtgtccagtcggaaggttcttcaggctgttttgaacatgtactccatcccagatcacttattcactcaagtttgtgttattgttgataaattgggtaaaatgactagggaagaaattgagaaggaacttgtttcaactgggttgtcatctgaagctgtacagggtatcatcgatgtgctttcaatcaagtcattgtccaaacttgaagaggtgttaggctctgatgttgaagctgttgctgacttgaagaaactcttctcctttgcggagcaatatggttatgctgattggatttgttttgatgcatcagtggcatttgatagagaaggaaaactgagagcaatttgcggtggtggaaggtatgatagattgctttcaacatttggaagtgaagatataccggcttgtggctttggatttggagacgctgttatagtggaactgctgaaagaaaagggtctcttgcctgatatgtcacgccaaattgatgacattgtcttccctttggacgaagaacttgaaggaccagcatccagtattgcttcctctctgaggaagaaaggccgatctgttgaacttgtagaagacaaacgtctcaaatgggtatttaagcatgcggagaggatcaatgcgagccggctgatattggttggaaattctgagtgggagcgaggcatggtacgcgtaaaggtgctatcaaccagggaagagtttgaggtcccttctcatgctgcagcatctgctgtggatgtgaggacgacagtactcggcgaagccagcatagaatgcacatatcattggctcctttgttga

SEQ ID NO: 22618 - DNA, 153 bp, Zea mays
  Peptide Sequence Number=SeqID_64397
atggacacatcaaaccctgaagcacttgtcgatgcaaagaatttgaacatgtttgttgggcaaagaatgcgcgcggttgttcaagtacaacacaatgaagggataggggtaaaggatagtaaagaatacaagagatctggtggagacctctaa

SEQ ID NO: 22619 - DNA, 297 bp, Zea mays
  Peptide Sequence Number=SeqID_64398
atgcaggcggcatgcaaccgcgccaagtgggcgcgcttctccgacttccaacacacccagcatggaggcccaggaccacgcgtcatgcaaccggcgcgccggatgctgcgtgcgagcaactgcaccgccacccgcgccacgaccacgcctcctcgactgcggaaccagtaccgcgactcgaggcaaccctacgcacgacccagcagcgccagcctggtgcgatgggaccgggaaagggggataccccgaaaaggatcattctccgtgaaggaaccaggctccgagcctccctactga

SEQ ID NO: 22620 - DNA, 309 bp, Zea mays
  Peptide Sequence Number=SeqID_64399
atgcctccctcaccatcacctaggagatctctgaaagaagtttgccacgcaagggggcatagttttgtcagtattctgcctgctaaatcgaaggatgatgaactcacgttgttcaaggatatgcagaaatatgagagggataacttcttactggaagcaacagaggattttgatgaatccatctcaaagttgagatattttcgagattcaaagattggtgtcaacattgctgcacgcggagaaaatcgtgatttacttaatactgatggtgaaagaaatgactatgattggcacattacttccttttag

SEQ ID NO: 22621 - DNA, 219 bp, Zea mays
  Peptide Sequence Number=SeqID_64400
atgactacaacatgtattgatatgttgcttaggctcccacaccttcaaatggtgaccattggcgctgtcagccttgcaccggacagtccggtggctctccaggaactagccattgggctactattccctggtgcaccgggcagtccggcggtgtggcaccggacagtccggtgtgccaccggacagtccggtgctctcagccggatggtccgcaagtga

SEQ ID NO: 22622 - DNA, 2349 bp, Zea mays
  Peptide Sequence Number=SeqID_64401
atgccagtaataaaatccagaactattgcatcacctaagaagccgtccaagagtttctcccctagttctggtccaaagaggtcctttgattctgcagtttggttaatggatcgtcgcaaagctcctcaagataagttcaggccacttctatcaagtgttccttgcaccacatttggtgttggcaaaggggataatgtacactcatctatgttgtctcataattcctcactcacaacaagcagtaatttaagctctgaccatggtgtcacttttagcccttgtatgggtaatgaacaaggaccaagtgatatagccggtgactgtgaagcaacacctacttacagtttgtctgctactcaaagtagcccaaaatctccaagcacagaaaaaaatgcggaaagtaacatggaagacctcaatatggaaagaagtagaatagtcgagacttcaggtaatgttgcaagtggttccaaggctgggctaactaaaatggcaacatgcactaggtgtgaaaagttatttaatgcgataaaagatgatggagaaattgatttgtgtgaagaatgtggtttagtagatgaggttctttttgtgaaccccaagatagagactttggaagaacatcaaaaagaccacaaaactagaatttctaaaccttgtgttgccttggaagctcctcacattactcccgatcatggtgaagataccaagaagtcatttcttgatagtcagctgttgaatgatgaacctccagctgattgtctgcaaaagtgtcctcagtctcagtcaacaatatatacaaccgacagaatgcttttaatgctgcatggagagaatgttaatgaaaatttaaggccagatgatgttggcaactcttcccaaggaagtagcctcgatatttcatcccatcaatgtaacataaataattatcaacaatcggaactagcatctgtagttgagtgtgataatttaagagatcaaactgccaaccaccagaatgaggtgttccaacgcctgccagggtcagtgtatcaaagcattgaatttgcctctaatacacttacctatgacagttgttgtaaacagggatcggctgggcattcaaatctaaaggttgaaaatacggagggtgctgggatttcagtactgctgcagaagtcaagcagtaacaaatggcctgttatagaagggcgacccttagctggtacaaatattatctgttcagaaccctactatacaagagatggtgttactatgctaaagcgtaccattggatgggatagttcatcagcgtcttccattgatcaagggtctacaaggcaatctggacatttggaacaccttaaaagtagtaatcgtcatgactttgagaagtctcaaataagtagtaccatgagttgtaaaagcattgcatccatgtcagacatgtcaagtagcaattgttcagtttcagtttgtcctcgggatgatgcaattgcagatactggcttcctaaccgacaattcagaaagcagtgctcctcgatccataatttgtactgaagaacttaatgagtcgtgtaagtacacactctcaagtgctatagagtgctggtctgctgcacaggctattgttaatgttggcattggttcaactgaagatgtagtgattcagaaactatgtacaggtaggatggttcacaaagattacacaagtgataactcatgttcatcagatactgaaacatgtagcaatatctcactctctctggctcctgaggaacgatgcatacagaaaattgaagaaggtacctcagttggcactccagaacacccagatggtgattgtggcatcagtaattatcaaatgcagcatgaaacaattcctgaggcagataggttggatgatggttgtgcgtctgttatctctgaggaggccaacataatggggcttcctggtaatgccctttgtgtcgataatgtcgaggtggccgagtgcaagggcgtcgagccgttgtcgaggtgcagtgcatcgggtacctatggtcgatgtagctgtcgaggacaccgaagaagacaagccgcacaagtcgcgggcgcaggcgtagcatgtgggaaggcccgcggagcgtcaggaggcgctaggatgatggtgtcgcagaaagagggcgccatagacgaagacagtgacacaatcgaggaagtcgtagaggaagtagccgatgccgaagatgatgctgtcaaactgtcgtggacgaggcgtgctccaggtttggcacgcctggaaacgtgtcgtagacgaatgcacgtgccgatgttgccagtatcgcacgtactaggtagaaggccccaaccaagtgtcagcgtttga

SEQ ID NO: 22623 - DNA, 237 bp, Zea mays
  Peptide Sequence Number=SeqID_64402
atgtccaatccactgaaagatgaaggagatccaccccttgaatgggatactagacgatctgacagagatgtgcgtagattcggaggcgaagttcctccttttctgtttaaaattgggtcacttgagccagtactcaacctccttgaagcaggacttggtgacctttgtggaggtgttgatgtcctagaagctggaggagtcgaagaccttcgtgatggtgccgctggttgcaaatga

SEQ ID NO: 22624 - DNA, 321 bp, Zea mays
  Peptide Sequence Number=SeqID_64403
atggcgcggttcctggcgcggatgcacttgggcgcgacttggggtcggcttcaagggcgcggtgctgcgcggggtcgcggcgggcggctcctggcgcgtctgggcaggggtgctgacgcagcgcgtgtgtcgcgtgcagggcgctgggtccggccagttcttgggcgcgtgcttggctgggcgtgcaggggcgtcggcatcttggcgggagtagggtcagcggcttggccggggcgctcgacggtcctcctggcgctgcacatggagcagagagcaggagagaggagagagctgggtggggtgaccaggggtggcggctag

SEQ ID NO: 22625 - DNA, 669 bp, Zea mays
  Peptide Sequence Number=SeqID_64404
atgggcccatgtaaaccatttggtcatacatttccatggacaccagcgacaagtgcagccgaagatgaggcatataaagcgcgtttgtctatcatgttaggcattgcaagatttctccttttgcaggctcttgcttttcgtggacataatgaatctaaaacatcaagcaataagggtaactttttagagatgcttgagtggtatagaaaaaaggatcctaaagttgcaatggtcactggtgagaatgctcctggtaataataaaatgagtttcccaaatgtccaaaaagatttggttcgagcttgtgcggagaagacaagtgaggctattaaagctgagataggtggtcgtctatttgcagtgctcattgatgaggctcgggatgcatcaattaaggaacaaatggctgtggttttctttactaatattatttttcttgtttcacttttatgtaggtatgtcaatgataaaggccatataattgagaggtttcttggtgttcaacatgttcctgatactacatcatcttcattaaaggtagctctggatgatatgctagcaagatatggtttatctatttctagagttagagggcaaggatacgatggagcctcaaatatgagaggtgaaagggatgttggggacttgttctcaaatgctatgagttaa

SEQ ID NO: 22626 - DNA, 1188 bp, Zea mays
  Peptide Sequence Number=SeqID_64405
gtcgggggtgtaagcagaggtggtgagccttcgcatggtgggggcagaggtctaagccctatgtatcatcctcttacatggaatgcaggaattacatcaccatgtggtagaggacgagggcatggaaacaagagcagtgataggcagttagcccttggagcatccagtggatcatctgcatcagaggctcagcccggaacagtgtgtgcaccagcacatgtggtgcaagctacaaccatcaatttcacacggggtactgtagttccagctgcttggtgtgatctatgccgagtggggtgtaatagcaaggaaatcctcgagcagcacaaaaatggaaagaagcataaacggactgtgcagagaatgcaaaattttgctcgcctgcaaggtatgactccagctatagctgacatgggtgcccgttcatcaacatcttctcagttggctgaagtagaaggcccctgcccctctaatgcagtacatatggtcccatcgattggttcaaccagctttggtggagagcacaaagacttggctactgaaaatgttgtagcttcagtttctggagtgcaaattactgaggtgacatgcagttcttccaagcaaaacacagcacatcatacaacagcagttggtcacagtgtccaagcacacgtagaactgcatgttgcggttcaagcttatcagccttcgaacgagatgaaagatggcggtgaagctgcaccaaatgcaacagttccatcaaatgcgcaactggtggaagcaaggatggatgtcaatggcaacaagactggcccaaagaggaaacggacaagagtcggccgtgggggaaagaagctgagagtgtctgaagcccgacgtcaaaggcctgagcgagtaagggagcaaccgctagtctgcaacatttgcaacgtgacttgtgatacaagagctgtatttgacatccatctaggtggcaaaaagcatcaatcacgactcaagcgctctcaaggcccagatatgttgttcggtcctttggttgcgcgtgttcctccaaaccagtcagcagcacacatgacaggagctcttgaaccactgtaccatggcttgggagctcctttggttgagcaggagccacatctggctggcacgatgcagcacgctttccccgttcttccacaggctgctccaaccattcacggctgctga

SEQ ID NO: 22627 - DNA, 1527 bp, Zea mays
  Peptide Sequence Number=SeqID_64406
atggcggggctgccgccggtcgccaggcggcgcccgctcgcgacggcgtcgtcgctgctgctgcttttgctgctgctcgtggtgaccgcggcggcgcgcgaggagcggggcctggcgcgtgtgcagggcccgccgccgcgccaccgccacgcgtacgccgcgatgatgtacatgggcacgccgcgggactacgagttctacgtcgccgtgcgcgtcatgatgcgctccctcccccgcgtccgcgccgacgccgaccgcgtcctcatcgcctccgccgacgtgccgcgcgactgggtccgcgcaatgaattttgaatgcaaaatgcgaaatgaaacgagacacctattgacaatacaaggggacgtatgcaggacagaagaggatggcatgagggtgttgatagtggagaacctcaggaatccttacgagagcaacctaggagggaccaacaagaggttcaagctgacactgaacaagctttatgcctggaccctggtggactacgagcgtgtcgtcatgattgattccgataacatcttcctccagaacacagacgagctattccaatgtggacagttctgtgctgttttcatcaacccgtgctacttccacaccggtcttttcgtgctccagccttctattgatgtattcagaagcatgcttcatgacctggagactggccgtgaaaactctgatggtgctgaccaaggctttttggttgggtgctacccagacttgctcgacaaaccaatgtttcaccctcctgagaatggcacaaagctcaatgggacctatcgccttcctcttggctatcaaatggatgcgtcatactactatctcaagctacattggcatgtcccctgtgggccaaacagtgtcatcacattccccagcgcaccttggtttaaaccttggtactggtggtcctggccggtcttgccattaggtctttcctggcacaagcagcgctgggacgatcttgggtatgctgctgaaatgccagtgattctgatggagcttttgatgtacatagttatcatagcagtcaccagattggcaaggccagggatcaccaaactgtgctataaccgacggcctgagaagcaaagtgccctggtgcagtggctgatcaagctggctgcaattgcggctatggtggctgcatattccattccattctttgtggtcccacgcacagtccacccgatcatgggctggtccgtctacctatttggcgcgcttgccttgtcagtgctcgttatcaatgtttttctgctcccgccacttgatgtgcttacaacgtggcttgcaattgtgggcatgctcatcgttatggcattcccatggtaccatgatggtgttgtgagggctctggcggtctttggatatgcattttgctctgcgccaatcttgtgggcatccatggtgaggatgatggactcactgcagacgatgcttgagagggattcattcttcccccggattggtgaaccagcacaggagactgaattcagcaagctgtactga

SEQ ID NO: 22628 - DNA, 159 bp, Zea mays
  Peptide Sequence Number=SeqID_64407
atggccatccggccaaacacacggtcgaacttaaattggaacgatgctaatcgctatccagtgtacatagaacatgtgagacagacttgtaccggaataaatggtgcgaagctccctggccgcggcagaggatgtcccacggcggagcaggagtttccg

SEQ ID NO: 22629 - DNA, 774 bp, Zea mays
  Peptide Sequence Number=SeqID_64408
atggccgtctccgacgatgaaactgttgagatcgactgcaacgaggagcgacggttgtgtgggttggccggagacgacgatgaggatgacctccgggaggatgctgcagcgctctttggccttagcagtgagcatcccgtccatgtcggtgatgaacaacaagtcggtggtcaggatcaggaagtgtggttagatttcgagaaattttccaaaaccgtgaatggtaagaaggtaagtggtggcactggccacctgacccgacatagagatagatgtcccaggaggcgtgaaaaaacccgcatgtctcagtctcagatatcttttaatcctgatggtagtatgcgtaattgggagtactgtcctatggttgcacgtaatgaattggttcgattgcttgctaggctagaaattcctattagtttgggtgaaaatgctgcatttgaacactacattagaactgcacataatcctaaatttgtgcctgtctctaggcaaaccaccaccagagacatggttaaatacttcactgacaaaaaggctaagcttgttgagacactttcttcttctgatgttaattgtgtgtgtttgacctctgacatttggtctggtaatgccaaagaggactaccttagtgttgttgcccattacataaaccctgattggcaactagagaaaagggtgcttgctttagttcttattgatgtgtcacacaatggacaaaacattgttgatcgtgttgctggtgtgcttgctgattatggcttgactaataag

SEQ ID NO: 22630 - DNA, 234 bp, Zea mays
  Peptide Sequence Number=SeqID_64409
atgtcagcaacttcggcgagccactccccagctccatgggcattgccaccaccaccggtcatggctccaacttcgtcccacaccaatagcctgaggggcatcgccaaatttagcaacaacgcgatgcaagggaagagtatgaagcccagacagttaatagcactgtaccagaatcaaggcacatctactgaagcaataaaggggctggatcaaaaaacattcatacacacctaa

SEQ ID NO: 22631 - DNA, 159 bp, Zea mays
  Peptide Sequence Number=SeqID_64410
atggcggcggcatgggcggggctggctttgttgctcgtcgcggcgcagttggcgtcagtggcgcaagtcacggcgccagcgttcctgtgggcgcccaaaaactacgggcagaattgtaatcctgctgccgcctacgctatggctctagctactagctag

SEQ ID NO: 22632 - DNA, 159 bp, Zea mays
  Peptide Sequence Number=SeqID_64411
atggccgagggcgcgggtggtccggctggggatgcggacgcttgtttgtttgtattgctacgactagcgcgaggttacgagtcatctgaggtcatcctggtacctggaatctcaagtcccaggcaagttgtgcccttgaccacttttattacccaataa

SEQ ID NO: 22633 - DNA, 366 bp, Zea mays
  Peptide Sequence Number=SeqID_64412
atgcccggcataccgagggatgtcgccgagcactcgctggacattcgagccggagcccgacctgtcaagcagcctctgcgccgattcgacggggaggagcgcagagccataggcgaggagatccacaagctaatggcggcggagtccatcaaagaggcgaaaggtgtcaagctcaatcccgaaatgtgggtcttcgggcggggcatcgaagccaacccggagaagatcgcgaccatcgcacagcaccccgagcccttgttgggggcacccgggggctacacgcaaccccgggaagggccgcttgtcatcgccaaagttctgaagcccggaacgtacaagctggccaacggtcaaggcgaggtctag

SEQ ID NO: 22634 - DNA, 621 bp, Zea mays
  Peptide Sequence Number=SeqID_64413
atggcgccccacacgctctatgacgacggcggctcccagctctcttacggaagcaggatcggtgacgtgcaaatgcggccacggggaacctctctgcaacaaagctccgcatctgctctcggcgacggcgatgcggcgctaccgaagaagaagaggaaccggccaggcaatccgaaacctgatgcggaggtgatcgcgctgtcgcctcgaacgctgctggcgacgaaccggttcgtgtgcgaggtgtgcagcaagggcttccagcgggaccagaacctgcagctgcacctgcggggccacaacatgccgtggaagctgaagcagaaggaccccaaggacgcgcgccggcgggtgtacctgtgcccggagccgacgtgcgtgcaccacagcccgtcccgggcgctgggcgacctcacggggatcaagaagcactactgccgcaagcacggcgagaagaagttcaggtgcgacaggtgcagcaagcgctacgccgtcgagtccgactggaaggcgcacggcaagacctgcggcgcccgcgagtatcgctgccactgcaacgccctcttctccaggtccgttcctccgatccatagtcgattcccagaccaacggcgaatctag

SEQ ID NO: 22635 - DNA, 1284 bp, Zea mays
  Peptide Sequence Number=SeqID_64414
atggcgtgccaagtcacttgggtccctgaatttagtctcttgtgtcacttaggtcctagaaaatttttattagttttctctaacctgattttgactcatccatccatgtacgcaagcaggaaagacaacttcatcacccaccgcgctacctgcgacgcagcagttcgtgggaccgcccagaagccaccgctggtcgccggcctctacgtcggctcaggcagcgatgataggctcgggctctccgacgccgccgcccagatgcatggcttcgcagatcaaggccagtcctcttcagcagcagaagcctcacagtttgaccatgtcatgccatcgtactcgggctcctccatgttccgttctcaggcgtcagacttctcgttgtctttcttcctcggcggcggcactcctcttatcgaacaagacctgtccgacaacggtggtgatctctccgaaggcagccagggccctctgctccatggcaaggcgcccttgcatggcgtgatgacgcatctccccgagcagcagtatcagccaaacagcggcaacgccaacgttaacctcctggacattgggttcttctctggcaacagtggtggcacgtctggcagccagggccctctgctccacggcaaggagcccttccatagccatgacctgacgcaacttcccgagcagcagcaccagccaggcagcagcaacgcccgcgtcaacctccctaaccttggggtcttctctggcaacagcggtggatggcccggaagcagccatcaggacgcgcgccttgtcatccaagaccaactcaacggcggcagcagcagcaacaccgagcatggtaacgggatggcgtccatcggaagccacttcggcggaggcttcgtcccttccctgcacaactcatctccgtcggccgggctctcagcgacggcgctcctgatgaaggcggctcagatgggctcgacgacgtcgagcaccacccacaaccccaacggccccagcgcgctgctccgcgcagccggcttcgcaggcactgccagcgtccgggagactagtagcagggcagcggaagaagagaagtctcacgaggcatatttccatgatctcatcatgaactcactgccattaacgggaggaggcaccggcggcctctcagggttggcgggcgtggacgacggcaatgtgagcacaagggacttccttggcgtcggcagggacgacgcgacggcaccgcagggcctccacggcatgggcgccccgaatccgacccagatgaaatggtacatgtga

SEQ ID NO: 22636 - DNA, 600 bp, Zea mays
  Peptide Sequence Number=SeqID_64415
atgacattacctttagttaaaagacgccagggattcgagacctccccgcgtttcatggcattttccttcacacggtgccaacgcgtggcagaacaaaaattcgccaccatcacggctcacggacgcgaaagtttttctcaaatagggttgactgctctctcccacgtcgttgcgtccgctcccttccacaccgcctcctgcatacctctcacgctcgccatcgcattcgcctcagccgaccgtgccaccacctctcgatgctgcattcgcctcatcggacccccacgtgccaccacctctcgccgtagctcgcgtccattacccgcgacagggtcgccgctcactggaggaacggagcgccgcgtcaccgacatcgtcgtggccaggaagcactcctgctcggcgctcgacgttgccttccatgcgctcgaggcggaggccagggacgccaagatggaggcgcgtatccgcctcgtgagagaacagagggccgctccaccaccgacactgtcctcgaggagcagagtttgttactttgttgttcctggcctgaattctctcaccctacagcaacagttggatcaacgagctcaaatgtaa

SEQ ID NO: 22637 - DNA, 309 bp, Zea mays
  Peptide Sequence Number=SeqID_64416
atggaggcgccgatggaatggattgccgttcactttcctctcggccttgaagatggaaggggatctccgagggacacagcgcagatgccgtccatctcgccagggaagggggcgccgatggtggagcgctgggaggagggtgggcgctttgtggtcgcaactcccgttgatggggcacgacggctgacggggattgtgggggcattgacggggctcgaattgttcgcaactgggagggtgaggagggcgcaatggggagcggagcagaccggggggcagaatcgtgcactgtggatgcctacgctgtag

SEQ ID NO: 22638 - DNA, 303 bp, Zea mays
  Peptide Sequence Number=SeqID_64417
atgagatggggcgacagcatctatggtgtagttggtgctagtcggggcgacgtggaggtcagcaccggggcgacctcaaagccgaggagccctacgcagtgcagcacgcaagtgaaggtgctaggcctggaccccgcgggcgggaagctcttgagcgtgccgatgttgaggatggactcgagggcgtccgggtggcgcaggaactcgctggcgccgacgctagagacatcgtccggcagcggcaagcgctgctgccgcctcgctgacagccgggcacgccgccccattggtgactggccctag

SEQ ID NO: 22639 - DNA, 462 bp, Zea mays
  Peptide Sequence Number=SeqID_64418
atggaaacaatttcgcttctgattcccccaaagtgcctgccaccacctagccaagagctgcatgtggacacaacagtcacccctgcatcagaagccgtctccaagcagaagcagccaattgtagtagaaacagaagtgagaagaagcgccaggcttcgggaaaaggcaaggggcttcaagaactgttcaagggctacaaggaaatgctcttgttgtgcacgcatctccccaccttcaatctcacacaaaattattaagaagcttggcgaagagttttgtaaagtggctccaatgtcccttgacttaggctctctgaatggttccaagactacaagcaacattatccagaggccaagtgcatctaccagtaacagagatgatgaatctaggtcatcaacggaacaaccggaagacattaataatgatgatgaagcggcgcctagcaccccagctagggagtaa

SEQ ID NO: 22640 - DNA, 237 bp, Zea mays
  Peptide Sequence Number=SeqID_64419
atggcgttccatagagttgatcctacgccttttcttccacaaggcttcgtggcgcatcaggttcatcatcgggaaatcatgatgctgagggtttccaaggagtttcttggactgttcaatcctccagaaccagtggtgaatgctaataatgttgaggagcaatttagctatcagctctctggccttgaagatttgccttcttcagatgagtcaatgggttcttcaacgacatcataa

SEQ ID NO: 22641 - DNA, 420 bp, Zea mays
  Peptide Sequence Number=SeqID_64420
atgcacagggcacgaatactgggcattgttcccccactccgaccactatttcaactgctcagagcatggctacatgtgatgccaagacctggcctcggcctcaggagagatctttgcctcgcccgagcccggcctctgccaactgctccaaacagggcaacacgtgatgccaccagctctcctgtgaaccccgctgaagacaggatggctacagaaaccacaaggccgtgtagtagctgcgcggggttcgggtgctgggcaggcgcagtagctggctgtgtgggcgctgggggtcaacaggtccacaactcagtagctgagagagcgctgtgcaggcgctgggcgtgggcccctagggcacaagccgaggcggagcgcgaggggcgggagaaccagtcggggcgcctggggcggttctag

SEQ ID NO: 22642 - DNA, 558 bp, Zea mays
  Peptide Sequence Number=SeqID_64421
atggcgcgacgacggcccgggtcgacggtggcggacctcggcggctgcacggaggacggctgcttttacagtcgaccattgcgtggagtagtcgttgctccgctggtgcaccgcacagtccgtaacgatccgaatcgagaatgcttccacgttgacctagagctcctcgaggtaggagatcacctcgacatgccacaggaaggtgaccaacctccaccgcacaacccagacggggcccagactcctctagggagccatgaggctcacctcaggcagctccgacagttgcacgataagctcgaggaagagcaacaacgcctgcaacagctacgacaagctttggagggagaggctgcgggcaaggccctcgacggaggcgcacggacgaaggcacgtgacgtccttcgtcacattgaggaagatgccgatgctgctgagctcctcgtcctcaaccgggcaagccaaagcctagcggtgagttcgctcttgctccacaccatgccgaagccctccaccaccgagggacgctgcatccacagcaaactagggggcttctag

SEQ ID NO: 22643 - DNA, 435 bp, Zea mays
  Peptide Sequence Number=SeqID_64422
atgcggccagcccgcctcgccagcaagctcacgcagcgacacggcgcgcagccggcgtggcccgtgcgtgtgcccccggcgtggcctcgtgctcgcgttcggcacgacctgcgtgcggctggcgtgcccgcgacccgctccagccccggcgtaatctgcgcggcgtcgtggcagcctcgccgtcgcttcgcgtcgtgcacgcagcacgtcctcgtgcttcgccatgagctcgtccggccgtctgccgtcgtcgcggaggaactgggtgtagttcgcttcgccgtcgtgccgttaatggggctcggtgtatgcggctcgctctaccaaggaggtgatgagaatgatggttttggtattgattatggtaatggtaaagaagaaggcgtcgaggcggacctccaggagttccaggactttgacgagttcgatgattag

SEQ ID NO: 22644 - DNA, 2745 bp, Zea mays
  Peptide Sequence Number=SeqID_64423
atggccgccgccgcaggcccgccgtcgcacagcgcggacctgatgccgccgccgccccctccgcccgtcctgacgacgactgcgccccgtcctcgccgccgcgcaagggaagtcagctcccggtacctctcaacgcccgtcccctcgaccccgcgcctctccaccgcctcctccacgcggtcgcgctccccgtcgccgacgccgtcgcctcgtggacggcagcgggcggtcacgcccttcgccaacgagaaccacccacccccgccgccgcctcccacgggcaccgttgcgcgccggcgggccgtccagaagcttttcgaggaaatcggcgccggcaacccgcgcgcctcggtgagctccaactcctccgccgtgcccgcagctactccgcggccgctcccgcgctccaccagcgggccggccgcacccaccgcgcggagggggtacccgcgccttccgacgcccgcgcgtgctggctcctgcccggcttccggcgcagtggattccgacaccgcctcttgctgctcttcgtctgatacgtcgtccacggccactgacctgtctgaggcggatcgggcgctcgggatggctccagccgcgccgtgcgagagcccgccactgctgggcccagcgtcctgccgcggtggacgcctttcgtcagagctctgctcgtcggtgccggagtcgggcggatcctcgcgggcgtccaacccactgtgctaccgctcgctcaactcggcactgtcaatctcaacggcgatggctgggaagttgacggcggcagggaggccaccacagccgcaagggccgaaggtagctgatctgaagaaggcggcgatcctggggggcaggaaggttgcggggaagcaggaagacgtgcacctgctgcggctgatggacaattcgtacctccagtacaggttcctcaacgcccgggctgaggcagcaggcaaggccaaggcggcggctgcagagaaatccttgtacggggtcgaggagaggattgccagcctcagggtatctgtcgctgagaagagggcagaggtagagaggatgaaaagggagcatatattgagatcagtagtaaatgcgcagtcctctcctctgccctgcctcttcaaatacgaactgggcggcgccaccactctcgccgcactcacccggagtcggagcggagcatccgatcctccaccagtccaccaccgagtgcactcagccacacaccagctgttgtgccctgtgcggcgctctactgagcgatacgcggacttggcggcggccatgccactctcggagccgtcggcgccggccgtgctcgcggcgctgccgcgggcgctctccctcgcggccgcggccgtcgcggccgcaaccgcgaccctcctcctcatctccgccgtcttctccaccccccaccacgcggcgtcctcctcgtcccctcagctttccccgtccgccagcgcctccaccgcggcgcctgtggccccggcgcccgcacacgcgcccgactccggcccaggccacccccaccccccgcctcccgttcccccgtgccctcccaacgccacccacgacgtcccctgccacgagcctccctcgcgcgagcgccactgccccccgcgcccgccgccgccgccgcctcttcttcctcacccgccaaaggacccgccgccgcaccctccgccgcactgccgcgtcccgccgccgcccaggtaccgcccgcccccgccgtggcccgcgcgccgcgaccgcgcgaggtacgccaacgtggacctcccgccgctgcccccggttaaggcggcggatggacagcagcaggaccccgttcacggtcgcggggagtggctgctgttcaccgacggggtgcagggttatgtcgagcggctggagcgcgtcgtgccgctccgcgacggcgtggtgcacacggcgctcgacatcggatgcggggtcgcgagctttggggactatctgctcaactatggcgtactgaccatgtccattgctccgagggatagatttgaaccgcaggtgcagctcgccttggagcgtggactgcctgcaatgatcggagcgcttgttgcccacaggctaccgtatccatcgaggtccttcgacatgatgggctctacatgctggaaatcgaccgtcttctccaacctggtatgcgaatatttcgacagtacaatcttgctaaatataacttttgttacggtgcagagatatagatacgacactctggtttgggagaaaagggttaacttctatctcacgtatctaaattttttgtctaatggaacctacagaaatgtcatggacatgagtgccggttctggtggctttgccgctgctatgtccaagcatcctgtctgggtcatgaatgtggttcctgcaaatacgacagagaacgcccttggtgtcatctatgagcgtggtttgattggaacatacactgactggtgcgaggccttctctacttatccacgaacatacgatctgatacatggtaatggaatcttcagctcccatattcacaagtgtgggattatcgacatcctggttgagatggatcgtattctccggccagggggtgccgtcatagttcgggacagagccgacgtcgttctcagagtcaagaaggacgccgaccgtctacgatggcatagccgagttgtcgacactgaaaatgggcctctggatccagagaagctcctcattgtggacaattccctgccactcccagggagctga

SEQ ID NO: 22645 - DNA, 360 bp, Zea mays
  Peptide Sequence Number=SeqID_64424
atgggatgtcgccgccatggtcctgctcctccactgtcattcagtgtgcgcggcatggtcgaaggtgatcacaagatccagagcaagaagccaacggagtctccatggggaatctcgacctcatcgtcagggaattgctcgtcgtcgtgcaacgtccgccatggagccaatgcaccgtgttggaaggaccactgtcaccccaatccgagcgcacaacacacctcttggagtccctggctcctgtccctgctccgaactatggtgctccctactccagtggtctggtgctccctcctccctgctccagtggtccggtgctccctgctccagtgctccggtgctcgctcctccctgctctag

SEQ ID NO: 22646 - DNA, 1581 bp, Zea mays
  Peptide Sequence Number=SeqID_64425
atgcccggcataccgagagaagtcgccgagcactcgctggatattcgggccggggcccgacccgtcaggcagcctctgcgccgattcgacgaggagaagcgcagagtgataggcgaggagattcacaagctaatggtggcagggtttatcaaagaggtattccatcccgaatggcttgccaaccctgtgcttgtgagaaagaaaagggggaaatggcggatgtgtgtagactacactggtctcaacaaagcatgttcgaaggttccctaccctctgcctcgcatcgatcaaatcgtggattccactgctgggtgcgaaaccctgtcgttcctcgatgcctacttagggtatcaccaaatccggatgaaagagtccgaccagctcgcgacttctttcatcacgcccttcggcatgtactgctatgtcaccatgccgttcggtttgaggaatgcgggcgcgacgtaccagcggtgcatgaaccatgtgttcggcgaacacatcggtcgcacagtcgaggcctacgtcgatgacatcgtagtcaagacaaggaaggcttccaacctcctctccgaccttgaagtgacattccggtgtctcaaagctaaaggcgtcaagctcaaccccgagaagtgtgtcttcgaggtgccccgaggcatgctcttggggttcatcgtctccgagcggggcatcgaagccaacccggagaagatcgcagccatcactaacatggggcccatcaaggacttaaaaggtgtacagagggtcatgggatgtctcgcggccctgagccggttcatctcacgcctcggcgaaagaggtctgcctctgtatcgcctcttaaggaaggccgagagcttcacttggacacccgaggccgaggtagctctcgggaacctgaaggcgctccttacaaaggcgcctatcttggtaccgccaactgatggagaagccctcttggtctacgtcgcctcgacctttcaggtggttagcgccgcgattgtggtcgagaggcaagaagaggggcatgcattgcccgttcagaggccggtttacttcgtcagcgaggtactgtccgaaaccaagatccgctacccacaagttcagaagctactctatgcagtgatcctgacgaggcggaagttgcgacactacttcaagtctcacccggtaactgtggtgtcatccttccccctgggggagatcatccagtgccgagaagcctcgggcagagttgcgaagtgggcggtggaaatcatgggcgagaccatctcgttcgcgcctcggaaggccatcaagtcccaggtattggcggacttcgtagccgaatgggtcgacacccaactaccgacggctccgatccaaccggagctctggaccatgtttttcgacgggtcgctgatgaagacgggagccggcgcgggcctgctcttcatctcacccctcgagaaacacctacgctacgtgctacgcctccatttcccggcgtccaacaatgtggctaagtacgaagctctgatcaacggattgcgaatcgccatcgagctaggggtccgacgcctcgacgctcgcggcgactcgtag

SEQ ID NO: 22647 - DNA, 657 bp, Zea mays
  Peptide Sequence Number=SeqID_64426
atgtctggagaagtcaccgacaagagcgagaagataccttcaggagagaaatttgaagagaaagtaccatcgggagaaaagcccaatgggaacaaagaagaaaatgtgttgtctgagaagaagcacaaggagaagcataaagagaagaaaggagaatcccaaggatcctccaagtcacacaagaaggacgacaagaagaagaaaaggatgcggaaggtggtctacttcgagaccggcacatcttcatcgccttccacatccaacgtcgtgtcgtcattttcaaagtgccatgagcgcaaaccggttaaccaaatcctcttttgttatcctcgtaatcctaaacatacacccttgttttcggttccattagagaaaccaccacaatttaatggtgaagattattcgtggtggagtgttaaaatgaaaagtcacttatattcaatccacccaagcatttgggatgttattgaattaggtatgaagatacaaaatattggagatgaggactatgatttggaagaggcgacccaaatcgtacatcgcaactcctacgtcacaacgatattgcttgcctctttgtgtagggaagaatacaacaaagtgaatgggttgcaaatagccaaggagattttggacacacttaatacaacacactaa

SEQ ID NO: 22648 - DNA, 1488 bp, Zea mays
  Peptide Sequence Number=SeqID_64427
atgaagcgtcaggcgatgatgggaaaagatactgggaatttgcttcggccatggatggaaacgccgtatcagctgattttcttatacaatctatgctctcttaccagaaaaggggttataaagaacatgaggcgcaacattgtagatggaaacagttttgcatttctttgtgacaacatagatgagcttgagcactctgttcaggagaatttacctagagtctctgtagtcatgcctttgaagggctttggcaaacataatttgcaaaattggcgaactcagattacatcactttatggtgggccactggaattcttgtttatcgtcgagagcaaatatgatcctgcttatcatgttgtttcccgtttgatcacagagtacaagacgtggcattttaacggaagggtagcttatagtttgacaaacaacaatatcctgcatatacattatagggctgatgtaccttctttccataccaagtttagcgaacgtcgctacgagcaggccctcgagattttctcttggatggaatcatgcagctcccttcgactgtcgtcatgggatcatgcagcaagactggacttgattgctaaagcttacagtacttctcaagccgaggaatactacaacaaactacagagccctgctaccagacaagcagcatcgttcccgctcctccattgctatgttatggaaagagatcatgagaaggtccttagtgtaattgacctcatgaaacggaacaacattcacagaaatgttctctcctacaacctttggatgaatgcttgtgctgaagtctctggtgttgactcggtacaatcagtgttccaggtgatgttgaatgatgagacggtcaaggttggttggagcacatactgcacattagccaacattttcaggaagaatggactgaacactgaagcacaagcgtgccttgtgaaagctgaagcaaaattgtcacctacagggcgcttaggatactcttttgtaatgacatgttatgcggctctgaatgacagcgatggagttatgagaatgtgggaggctagcaaaagtgtgccaggtagaattctcactgcatactacatggctgctatgtcatgttcaataaaagttggcgacatcagccaggccgagtgtatctttggaaagtgggaagcagggtgcagaaagcatgatgtgagggtttcaaatgttcttcttggtgcttatgtgaggaataggtggattgaaaaggctgagaggctccacctccacatgctagagaaaggagcatgtccaaattacaagacatgggagatattgatggagggctatgttcaaagcaggcaaatggacaaagctgtgggttgcatgaagaaaggtttgtctctgttgaagagttgccattggagacctccagttgaactgatggaggccattggcaaacatttcgaggagcaaggaagtgctgacgatgcatatcgatatattaaggttctctag

SEQ ID NO: 22649 - DNA, 187 bp, Zea mays
  Peptide Sequence Number=SeqID_64428
atgggaaccaatgggcatctcgacctcgacacgggagtatgcatgtgtgcaaggttccaggcaaatactaaggaaattcaccttagggccgtgaaaagaatcatgagggataatgtgacagaacctcccaagtcatttggcccacctacagttgtccttgttcatcggacctcggacaaccctacag

SEQ ID NO: 22650 - DNA, 813 bp, Zea mays
  Peptide Sequence Number=SeqID_64429
atggcgaagggcggcgtggagaggggcgcgctgctgccggtctcagcggacgacggcaagggaaacggcggaggggcaggcggcgacgatgccgtgctgttcaaggggtccgccatgacccgccgcggcggcaccgccgcgctctcttacatggcatgctccgtgttgctagtgatgtttaacaaagcagctctctcttcgtataatttcccttgtgcgaatgtcatcacactccttcaggttattactacgcaccacacctctttccttggcttatttactctacatggttttatcagtgtggctttgattgtattcggagcattcgttgctggagctcgagacttgtcatttgatgctcgtgggtatgctattgtctttgtggccaacattacgacagccatttaccttgctactatcaaccgtataggaaaatctagtggcctcaatagctttggcctgatgtggtgcaatggacttgtctgtggaccttcagtactgttattgacatatattcagggtgacctaaagagggccatggaatttccgtacctttattcccctgggttcatgactgtgctgctattttcgtgcatcctagcatttctactgaactacactatcttctggaacacaatcctgaattctgcactcacacaatcgatgtgtgggaacttgaaggatttcttcaccgttggaattggttgggtgctatttggtggacttccttttgatcttcttaatgttataggacaaggactaggctttctgggctctggattgtatgcctactgcaagatcaaaggaaagtag

SEQ ID NO: 22651 - DNA, 264 bp, Zea mays
  Peptide Sequence Number=SeqID_64430
atgggagagcttaggggcacacaggccgagctagagccagggacgcgccgagcagaggagggagatgagcagtctgcgcagaggaggatgcacagcgctgggcaaaaccgagccagaggggcgcgccggcgattggaactcccccagcggcggtggctactccggtgctctgctccctcggtccctccacagcagcggtgtgacgctacaacagatggcagcgggcagcgctggaggccgagcgagctgacacggaggagataa

SEQ ID NO: 22652 - DNA, 756 bp, Zea mays
  Peptide Sequence Number=SeqID_64431
atgggcctctgctcctcctccaccgccgcccgggccgcctccgaccccggcgccgcagccgcgggtgatgccgccgcggcaaagaaggggcgcgggatcgtcgcgtgcgggaagcggaccgacttcggatacgacaaggatttcgaggtgcgctactcgcttgggaagcttttgggccacggccagttcggctacacctttgccgccgtcgatcgcgcctccaccgagcgcgtcgccgtcaagcgcatcgacaagaataagatggtccttcctgttgctgttgaagacgtaaagagagaagttaaaatcttaaaggcattacaagggcacgaaaatgttgtacacttttacaatgcattcgaagatgacaactatgtttatatagtcatggaattatgtgagggtggcgagctacttgatcggatattagccaagaaagatagtcgttacagcgagaaagatgctgcagtagttgtccgacagatgctcaaggttgcagctgagtgccacctgcatggtttggttcatcgggacatgaaacctgagaacttcctattcaaatcaaaaaaggaggactcgccccttaaggctacagattttggtctttcagacttcataaaaccagggaggcaattccgtgacattgttggaagtgcctactacgtagcaccagaagtactcaaacgcagtttattgtgcaacatagtaatattgaatacaaaaacaagtatttgtatcttcacaaaaaatgcatga

SEQ ID NO: 22653 - DNA, 708 bp, Zea mays
  Peptide Sequence Number=SeqID_64432
atggacatcacaatgccgcacaccagctccacgcgcagcaatcacaacatcatcgtgactatgctggcggcacatcctgacccggacacaaagccgcctgtaaagaagaggtggcaggttcggcagcctaagtcactgaagcctaggaagcctaagaaggctgctgttccaccagagaatggggcacttaatgagcatgcgccccgaaggaggggacctaagaagactgtggggatggtgattaatggtattgagttggaccttgctaacataccgacaccagtgtgctcatgcaccggagctccccagcaatgctaccgatggggcgcaggtggctggcagtctgcatgctgcacaacttctatttcaacgtatccactgccaatgagcacaaagcgccggggcgctcgaattgctggaaggaagatgagccaaggtgcattcaaaaaggtgcttgagaagcttgctggcgaagggtacaaccttgctaatccaattgacttgaagacgttttgggctaagcatggcacaaataagtttgtaacgatcagtggtctgggccaaagcaaatttattgtttctgtcattcttattttaacagagtatttcttcagcaagaatgtatgcaggttggttgtgcttaactttttttatagtacatgggtactgtttggttcagatgctattaagatgctattaagggaatga

SEQ ID NO: 22654 - DNA, 1356 bp, Zea mays
  Peptide Sequence Number=SeqID_64433
atggtgtcagctctcactccctcagcagagctgctgcctcacccccgccaccctgcaaaacgagggttactagggttccggagggatcatagccgcgctgctacatcgaaagtaagagttaccatgctcagccagcagaatccgggcggcgagagcgccggcacgcctcctctgtacctcgggatagacttcggcacttccggagcaagatacgccctcatcgacgagcacggggccatccattcggaagggaagcgagcttactgtgcgcctgtcggcgacgccgcgggctgggcgagctcgtggcgagcggcgctcttccagctcctcgccgacgtcccgcctgcccaccgcccgtccgtctcctccatctccatagacggcacctccgccaccgcgctaatcgtcgacagcgagaccggggagctcctgggcgggccgttcctctacaacgaaggcttcccggacgctctgcccgccgtggagtcggtggcgccggcgaaccacaccgtgtgctcccccacctccacgctctgcaagctggtgtcgtggtgggcggcctcgggcggcgcagccgcgggcgcggcggtgctgatgcaccagtccgactggctcctgtggctgctgcacggccggcccggcggcgtctccgactacaacagcgcgctcaaggtgggctacgacccggagctcggcgcctacccgggctggctgacctcgcagccctactcgcgcatgctgccggccgccgtcagaccacctggggctcccgtcgctgcgctcagagacgacgtgcgctcacagtacggtaaacgctcgtactacgtgctagtagtagtgacgtcgctggggtcaactctggcgatcaagctggtgagcagagtccacgtggccgacgcgaggttcggcgtgtacagccaccgcctggacgacgtgtggctcgtcggcggggcgtccaacaccgggggagccgtgctccggcagctcttcacggacgaccagctcgcggcgctgagcgagcacatcgacccggccgtcccttcccctctcgactactaccccctgccgaagaaaggcgagaggttcccggtctccgacccagacatgatgccaaggctgcagccgcgccctgggagcgacgcggagtacctgcacggcatactggaatcgatcgcgcgaatcgaggccaaggggtacagcctgctgaaggagctcggcgcgacggcggtggaggaggtgttcacagcggggggaggagcgcagaacgacaggtggacggccatccgggagagggtgctcggcgtggcgtccggaaggcccagcagactgaggcggcctatggagctgcactgctag

SEQ ID NO: 22655 - DNA, 549 bp, Zea mays
  Peptide Sequence Number=SeqID_64434
atgaccgtttgccgtggtctcaccggacagtccggtgacacatcggacagtccagtgaattttagccgtggagcattgagttttcccaagagcgacatgtttgtcagtctcgcctgcctgggcaccggacactgtccggtgcacaccagacagtccggtgcaccgcaggctagtctagagctccaccatcatcgacccgaggcatccctacgtctctgccgttgctccgggactctagtgtttcctctcgaggcgagtaacctccctgcaccccctatttctctgtttattgcctcggtctttgtgggattgctcgccggagcagattcgtgccaccgtgggaccatcccaccgcggtctgcgccctctggtgcctccgcgctggcgtggtgcccatggtcatgttcgccagtttgccctgaatgcgcccgagtccttccccaagtacctagagccctgtcgcggccgttcccctcgtctccggcgagatcccgacgtgaggtcgagcggtgccaccgcaccaaggacccaccatcccgaccacgatga

SEQ ID NO: 22656 - DNA, 264 bp, Zea mays
  Peptide Sequence Number=SeqID_64435
atgggagagcttaggggcacacaggccgagctagagccagggacgcgccgagcagaggagggagatgagcagtctgcgcagaggaggatgcacatcgctgggcaaaaccgagccagaggggcgcgccggcgattggaactcccccagcggcggtggctactccggtgctctgctccctcggtccctccacagcagcggtgtgacgctacagcagatggcagcgggcagcgctggaggccgagcgagctgacacggaggagataa

SEQ ID NO: 22657 - DNA, 1878 bp, Zea mays
  Peptide Sequence Number=SeqID_64436
atgggctgctcctcgtcgaagctggacgaggaggcggccgtgaagacctgccacgaccggaagagcttcgtgaggaaggcgatcgcgcagcgggacctgctggcctcctcccacgtcgcctacgtccagtcgctccgccgcgtctcgatgggcctcttctactacttcgccgaggacgagcacctccaccggctgcaggagtcctcgtgcgtgcaccgcccgggatcgcccgacaaggttctcgtcgtcgtcaactgcctgaggccggcgggtgctccggtgcatccggtggtcgagcagtgggagccgactgatgaggccattgaggctgccacgatagacggattcttcggggcggatggcccgttcctccgtcctccgtccattgatccgatgtttggcccatcggtgtcgccgcagccgcggagatgggacctcttctgggaccctttctcttcgctgaccgatcatccgagttacagcgtcgaggaggtgagagatgatcaagaagacgaacagataccagagctggaggaagagagtgacggcggcggcggcgactgtcaccgagaaggtgaaggcggagcagaggaggaggagggtgaacaggcagcagtagcagcacaggtggcggcgccgtcgagggagcaggtggggagaaaggtggaccatgtgagcaacgagctgagggtgctggcaagcgcagaaatcgagcagcatggcgcgcctggcttcaccgtgtacgtcgaccggcccccggcgagcatggcggaggccgtgagggacatccaggggcatctcatgaagatccttgacactgccaaagaggcctccgtgctgctggaggttgtcccctaccagaggagagttcaaccacctgtcccgagggacgacggcgaggagcagggcgcccccgaggtcccgccggagccgttcgagctgttccagagccacaaggagagccttgacaggctctacgagtgggaaaagaggctgtacgaggaggtcagggcaggggagcgagtccggctggcctacgagaagaagtgcgcgctgctgaggagccaggacgccagtggcgccgagccgttcgccatcgacaagacgagggccgccgtcagggacctccgcaccaagctggacatctccctcacatccgtcgacgccgtgtccaggaggatcgccgcggtgcgcgacgacgagctcctgccgcagctcctgcagctcgtgcgagggttggcgaggatgtggagagtgatcgccgacgcgcaccgggtgatgaagcgcaccgccgacgactcgatcgcgctgctcacggcctcggccgccgcggccgcagccgcccggcccgacccggtacgcgaaggaggtggtaccagggggccgccgccgcccccgggcgtggcgcgcgcggccgcggccgcgggcgcgctcggcgcggagctccgcggctggcgcgcggcgctggaggcctgggccgagtcgcagcgcgcgtacgcggccgcgctctggggctgggcgcggagctgcgtcaaggacggcgagaacatgccgcgcctgatcgtgagctgggcgcgcgcggtggaggccgtggacgtggagccggcggccagggccgtggacgcggccgctgaggcggccgccgccgtcgcgtcggccgcgaagcggcagcgcagcggcgggggcgaggagtggttcaacgaggacgaggggaagaagaaggtctgcgtggggctcgccgcggcgctgggtgccatcgctgaggccggcgccttggccgtcttcgggtacgacgagctgctgctcgagatggagatgggtgcgagggaacgagagcgcgagatctccggcagggacgacgaatgcttcaatccgtaa

SEQ ID NO: 22658 - DNA, 303 bp, Zea mays
  Peptide Sequence Number=SeqID_64437
atgccgcgaagccttaggcagcacaaagaacatctgcctcagcacgacggcgatccctctcaagtttgtaaccatctgcagctgctaactcaggtcgggggcggctcgtggcctaggtggcaggtcagggacgtcggcgggactggagttcccttcttcatggccgcacatgcatcgtcgccgtcgtccgtcgagcgcggcagccgggcggccacagaacctcgcatgggcctcctgccgctgttcctccgggtggactcccaggccatagaaacatgggctctttctggtggaagagcatga

SEQ ID NO: 22659 - DNA, 234 bp, Zea mays
  Peptide Sequence Number=SeqID_64438
atggagtggcacgcccgaccacgcttgccactgcagtgcatccatcgatccgatccaatctcgcctgatttggacacctgcctctctgctctacaggacctagaggacgagcctggcgcaacaagaaggtcggcggcgccaagcgccaagcgcagctgcaccaccgaggattcatggaagagtttgcgagtgtccaatttgatttgtgaaggtacactatcagcttattattga

SEQ ID NO: 22660 - DNA, 192 bp, Zea mays
  Peptide Sequence Number=SeqID_64439
atggcttcagctggtgtagccccatctgggtacaaaaacagcagcagcaatcctgtccgcggagttcgcgtccaagataatgcaataaatgattataggggtttaaagaagtttactaaagaatgttgcccactaaagctctttgctaaacacttgaaagtggagcgacaggcttgctatgagcctgcataa

SEQ ID NO: 22661 - DNA, 816 bp, Zea mays
  Peptide Sequence Number=SeqID_64440
atgaccgaggcggcgaggtttcatggtatgataggtggtggtggtggcaaggggatgcaagacaatgtgatcaatggcttcgacaacattccgtattaccaaaagtttggggagggctctcacatgtccgtagacagtgtcgatggcttcaacctgaccaattgtgctggtggttctgttgccatgtcagttgacagcagcagtgtgggctccaacgagtcccgcacggtcatactgaagcacccaggcctccgtgatgctccgactgcaagctattcagtcaacaatagtgtcttccgccccaaccgtgtagccgcacacactctaaatgaggatgcattggcccaggttttgatggacccaaatcatcctacagaggttggacatggggggtccttttgctcaaggagcctttggaagctgtaccggggaatatataatggagaagatgttgccattaagctgctggagaagtctgagaatgatccagaaagagcccattcgatggagcagcaatttgtgcaagaggttatgatgctgtctaggctgagtcacccaaatattgtaaggttcataggggcatgcaggaaatcagtcgtgtggtgtactattactgagtatgcaaaaggtggctcagttcggcaattcctggcaagaagagatctgaagtcagataaccttctgatttcagcagacaagtccattaagattgctgactttggagttgctcgcatcgaagtgaaaactgaagggatgacaccagagacgaacctaccggtggatggcaccggaaatgatccagcacaggccctatga

SEQ ID NO: 22662 - DNA, 1692 bp, Zea mays
  Peptide Sequence Number=SeqID_64441
atggcgcggtcgcggccgcacgaccacatcatccgcgccgccttcaccctcgccttctccgccgctattctcctatcgtcgccggccacggcggccccctcggagggcgacgtgctggtagcgttccgggacacgctgcgtgggccggacggtgcgccgccgggcccgctgcgaaactggggcaccccagggccgtgccggggcaactcctcctcttggtacggcgtgtcgtgccatggcaacggctccgtgcagggcctgcaactggagcggctcggcctggcggggagcgcgcccaacctggacgtcctcgccgtgctcccgggcctgcgcgctctcagcctcgctgacaacgcgctcaccggcgcgttccccaacgtgtccgcgctcgccgtgctcaagatgctctacctgtcacggaaccggttgtccggcgccatccccgagggcacgttcggccccatgcgcggcctccgcaagctgcacctctcctccaacgagttctccggccccgtcccggagtccatcacctcgccgcggctgctggagctgtcgctcgccaacaaccacttcgagggcccgctgccggacttctcccagccggagctcaggttcgtcgacgtctccaacaacaacctctccggacccattccagcagggctcagccgcttcaatgcaagcatgttcgcaggcaacaagctcctctgcggcaaaccgctggacgtggaatgcgacagctcggggtcgccgcgctccggcatgtcgaccatgacgaagatcgccatcgcgctcatcgtcctcggcgtgctgctctgcgccgcgggcatcgcctccggctccctcggccgccgaaaaagaaagccgaggcgcgcgggggccgagaggctgggcagcggcgaccagacgccctccaacccgaagctcaacaccgcgccggccgtcaacatcgagaacgcggccagcaccagccagccgcgcgccgctgccgcggccgggggcgccgccgccgccgccgccgcggggaagcgcccgcgccgcgacgagcacgggcggctgtgttcatccaggagggccgcacccggtaaccgagggtcgctcttggactgggggaagcgtctgcggatcatcaagggcgcggcgcgggggctggcgcacctgtacgacgagctgccgatgctgacggtgccgcacgggcacctcaagtcctcgaacgtgctgctcgacgccgcgttcgacgcggtgctgtcggactacgcgctggtgcccgtggtgacggcgcagatcgcggcgcaggtgatggtggcgtacaaggcgcccgagtgtatggcgccgcaagggaaaccgtccaagaagagcgacgtgtggagcctggggatcctcatcctcgagatactcaccggcaagttcccggcgaactacctccggcaggggcggcagggcaacgccgacctggccgggtgggtgcagtcggtcgtcgcggaggagcgcaccggcgaggtgttcgacaaggacatcacgggggccaggggctgcgaggccgacatggtgaagctgctccaggtcggcctggcctgctgcgacgccgacgtcgaccggaggtgggacctcaagacggtcatcgcgcgcatcgacgagatccgggagcccgagcccgccgccgccgccgacgacgagtcgtcattatcgtcctag

SEQ ID NO: 22663 - DNA, 528 bp, Zea mays
  Peptide Sequence Number=SeqID_64442
atgacggccgttcaggcagcttttgctgttgtaaataagggtgcccgtccggtgatccctcaagactgcctaccttctctaagacacattatgactcgctgctgggatgcgaaccctgaagttcacccgccatttactgagattgtctgcatgcttgagagtgctgagatggagctcctgagcaaccatgccagttatagaaaaaagaagaattttgttgctaaaattcaagaggaagatatgccttatgtttctcaagatgagaaacaagaaataattgcagatttcttcgaagatctcttaaatcgtagggatcagcgggattttacttttgatctagcttcatttcacccacagccccagcaagatctatcttccctggatgagcctttcacggctgaggaagtatgggatactatactatcaaaggattgcctcttggcaaggcacccgggcctcacggatttactgagagattttacagtagctgctggaacattatcggtagcgatgtcattgcagcattaa

SEQ ID NO: 22664 - DNA, 792 bp, Zea mays
  Peptide Sequence Number=SeqID_64443
atgaccgaggcggcgaggtttcatggtatgataggtggtggtggtggcaaggggatgcaagacaatgtgatcaatggcttcgacaacattccgtattaccaaaagtttggggagggctctcacatgtccgtagacagtgtcgatggcttcaacctgaccaattgtgctggtggttctgttgccatgtcagttgacagcagcagtgtgggctccaacgagtcccgcacggtcatactgaagcacccaggcctccgtgatgctccgactgcaagctattcagtcaacaatagtgtcttccgccccaaccgtgtagccgcacacactctaaatgaggatgcattggcccaggttttgatggacccaaatcatcctacagaggtactgagcagctatgagcagtggaccattgatctgggaaggttggacatggggggtccttttgctcaaggagcctttggaagctgtaccggggaatatataatggagaagatgttgccattaagctgctggagaagtctgaagaatgatccagaaagagcccattcgatggagcagcaatttgtgcaagaggttatgatgctgtctaggctgagtcacccaaatattgtaagagatctgaagtcagataaccttctgatttcagcagacaagtccattaagattgctgactttggagttgctcgtatcgaagtgaaaactgaagggatgacaccagagacaggaacctaccggtggatggcaccatgcaaagttcctgaagtgcagggaaatgatctagcacaagccctatga

SEQ ID NO: 22665 - DNA, 600 bp, Zea mays
  Peptide Sequence Number=SeqID_64444
atgcacacccgagaaaacttctcggtcggtcacccatcgctaaattgctccaagtcaaatgataggaggcaaataagttttgtctggaataaagctcctgttagccatgtaaggcctttcacttctccatgggacagctcatctgagctccctcaagcaaaggaaataagagagttgtcaacgaaaggtgggacaattactggacaagttcatttggataaatcttacgtgtccactgctattccatcacttacccatggcaaagatgagccttggccaatgaaaggtccggacatgtctatagctgcttcaaaattcgatggagcaccggatcttcagcgtgctctctctcttctgtcagttggcgcctgcggattgcccgatcctgtacaccaaacatcttgcgtcatccaattcactagtgccagcgagaacagtggcgaccttcatctatcacatggagcgaactctggtctagcgtcatgcggtgatggacagcatatagcttctcagcctcaggctcagctagttcggtttaccatggataccagcaacagtgtctatgagcccagtttcttcagtgtaaaccagataaattaa

SEQ ID NO: 22666 - DNA, 255 bp, Zea mays
  Peptide Sequence Number=SeqID_64445
atgggctggctgtggcatcgctgtctagcacatgttggaatgaagaacctccacaaacttctaaagggagaacatgtgttaggactagcaaatgtgtgtttcgagaaagatagaccttgtgcagcgtgtcaggcaggaaaacaagtggggagcactcatcacaacaagaatgtgatgacaacatcaagaccactggagctactacttatggacctcttcggacccgtcacttaccttagcattagaggaagataa

SEQ ID NO: 22667 - DNA, 489 bp, Zea mays
  Peptide Sequence Number=SeqID_64446
gtcggcaggcaagggaggtggcatcgggagacggggcatcaggtgtgtgcgaccgcgaatcgcgtcaagaggaaggctcggaggcagcaggtggctggaggtcgtggcatgcggagcacggcaccgacgacagtgttggatgcgtcgtcattgagcatctcaatctacaacgcccgtcctaggctcggcatcgttgtcgaggtattgcgtgccatcgacgagctggccaagcgcctcgacgaagtcaatatcatgttccttgtcgtgcacgacagcgccgacgaggttaccgacccggaagtcagccacgccttatacgccgccgccgccagcaaggataatactatcaagatatacgacgggatgctctactctttgctatttggggaaccgaacgagaacatcgagcgtgtccgtggggatatcttggcctggctcaacgagagatgcacaacccaggcaactcaccgtaacatacctgtcgaataa

SEQ ID NO: 22668 - DNA, 183 bp, Zea mays
  Peptide Sequence Number=SeqID_64447
atggagcggtgtcgatttgggctgattggccggttgaagggtgctggtatcggcggattggaggatggcgggattgagagccggggcgggggcaaagcagatttggggcgagctttgcgaccgctccttccatgcatagcgtgggcgagctcaggtggcactgcaattcatgatcacaagtaa

SEQ ID NO: 22669 - DNA, 798 bp, Zea mays
  Peptide Sequence Number=SeqID_64448
atggcttcagctggtgtagccccatctgggtacaaaaacagcagcagcaatcctgtccgcggagaccgcatatttcacgcgctcgccgtgctctacggcatcgtctcggccgtcgcgccggtaagcaccctcattgttcttcaaatcttattgttcttcatcctcgccgtgctctacggacgaaggcaagcggcggccggatccgccgcctccgatccagaccccgccgcgccggtcttcccggcgtgggcgcgcaccccgagcgagtgcctcgcggagctgggcgtctcggtggaccgcgggctcagctccgaggaggcggcgacgcggctgcagcgccactactcggagttcgacgcggcgggcgtcgtccgccagatcgcgcgcgggctgcaggcgctccacggcgcgggcgtcgtgcaccgggacctcaagcccgagaactgcctcttcgccgacaggggcgaggcctccacgctcaagatcatggatttcggcctcagctccgtcgagggcttcagcgaccccgtcgtcacccctgttcggctcgatcgactacgtctcgccggaggccctctcgaggcaggatgtctcggctgccagcgacatgtggtctgttggggtgattctgtatatcttgttgtccggagcccaaccctagagcacccgtcgagccccgccggccctagcctcggccccgacgccacctcgcgccgccgcacagatggagttgctggtgccggtgccatggcagtcggtgtcgacgcaccgcacagatggagtctctgtgggcggtga

SEQ ID NO: 22670 - DNA, 231 bp, Zea mays
  Peptide Sequence Number=SeqID_64449
atggcactggccgcctccgccgatcctgtgttccttgcttttttcgttttcttctttgcgcccttaccgcctgggccaccgtctgcagattcaggctggttattaaggctgcaaggcacaggcgacaacatggcgggcgtgagtgctgcggctaggcgggtgcacccgggcagggtgcgggagaagctggtcggagctcaggttaaagagctttcggacatgatatgctaa

SEQ ID NO: 22671 - DNA, 219 bp, Zea mays
  Peptide Sequence Number=SeqID_64450
atggctccgtcgagggcttcagcgaccccgtcgtcacccctgttcggctcgatcgactacgtctcgccggaggccctctcgaggcaggatgtctcggctgccagcgacatgtggtctgttggggtgattctgtatatcttgttgtccggatgcccgccgttccatgcaccaactaatcgagagaagcagcagaggatactgcagatgtcacattcatga

SEQ ID NO: 22672 - DNA, 507 bp, Zea mays
  Peptide Sequence Number=SeqID_64451
atgtggagatttacaaaccatctatctcaacgttgctcttttttgtttgcactgcagcctgttggggtagttggagctattacaccatggaattttccattagcaatgataacccggaaggttggaccagctttggcctgtggctgtactgttgttgtcaagccatcggagttcacacctctgacagcattagctgcagcagatcttgctcttcaagcgggaataccagcgggtgcattgaatgttgtgatgggtaatgctgctgagataggtgatgcgttgctgcagagtacacaggtcagaaagattacattcactggatcaacagctgttgggaaaaaactgatggctggatctgcaaatactgtgaaaaaggtctccttggaacttggtgggaatgcaccttgcattgttttcgatgatgcggacattgatgttgctgttaaaggcagttcatctctagttccctttgtggatgagggtgacatagctgtcaagaatgtgtaa

SEQ ID NO: 22673 - DNA, 540 bp, Zea mays
  Peptide Sequence Number=SeqID_64452
atgtgttacaaacaacatcactacatgaaaaataggaaaaacgccagtaacaataagaacgtcggggccgacgttcttatacagggacgaggagatgcaacaactgcgaaaagagatggaacaaatgcgacaacatatgcaaatgatgcaatctcagaatatgtatatgtggatgcatcaacagtctttccaaatgattctaaatgcacaattggtaatctatttgcttgcagacgtacggtagtggagtacctcagcaaggcgttactcccactccgccagcgaaccccttgtcttcgcatggtgatgcatcacaggatctgggacaggtccccacaaccaaatgacgcgcccaattatgtcgtgggtatatgctccgtagatgctgccttagatgactccgcagatgctgcctcagatgccacctcagatgccaatgcagatgctgtctcagatgccaatgctgatgttgttgccacaggtgatgtgggtatattctcctatggggctgtcaaaatgccttggggatatgctccatga

SEQ ID NO: 22674 - DNA, 546 bp, Zea mays
  Peptide Sequence Number=SeqID_64453
atgccgcgcgcaggggtcgaaggccgtgcgcacgcgccgaggccgcgggcgagccgcgccggggaccgaaccaccacgccggggctgcgcgcacgcgcaggggccgcaccgcgccgggacgcgcccgcgccgagccacgctcgcgtcgggacgcgctcgcgccggggcgtgcccgcgctgagggccggggacagggggcgggacgcgtcgagcgccgccgagcaggggagggccgcgccgggcgccgacgtgcgggacggggccgcgccggacgccgacgggcgagacggggccgcgccggaccaccgcgccatggccacgggcgggcgaaccgcgccgccgcgccgggccacgggcgggcgagcgggaccggcggccatgtccgtccggaccgaggccgagacgcgggggaaaggggagccggggccggtcgcgctaagcaagattatagtggcgggagggagaatgcgggagagggagggagtcaggtctcaccgtagcgacgacgctgaccgcaggggagtatgcgctgcagcgcctgagtga

SEQ ID NO: 22675 - DNA, 801 bp, Zea mays
  Peptide Sequence Number=SeqID_64454
atgacactctcgccacctcgacctctcccaagtggctcgccttcaccgcactcagggacaaggaacctaagggaggtggaggcagcaaggcaccgagcgcgcccaccacagaagcatcgcctggcctgtaggccctccgatcatgatggtggcacgaccgttgacacaacttcccccgagtggctcagcgcgaccgtgccactcggatatgccatcggcaccaacggcgcgggcgccgatgaaggaaaagtgccttccctcgcagcacgagccgcgtccttcatcgttttgtgtgatacatacaaactaaaggaatggcgggtaaggacccagaaacaatggcagagaggaatggaaaaaaacactactcaccaggaagagcgcgcccggacaaagggcatcctctatgcaaaagggtccaccgccggtgaaggctccgacgatgccccttcaggacacctgaccgacaccgcagatgcgacagacgttgtgggtgtgggagatgctgctgtcatggcaggacaattcgcccatcgacgccaatgccacggatctgccacaggacgtggaggtcatgtcctacatatcggtggaggggataatactcctcctcaggtcggcctagtgggtggcacggtccacccatgcatgcatgccatcgagtcggtccagcccattctaagtctatttgtgtcatgtctgagctcctggatggacacatgggccgacatggcacggatcggggccaaaacaggtcgtgcctatctcggcactgttcatattgggactaagcgggcttaa

SEQ ID NO: 22676 - DNA, 438 bp, Zea mays
  Peptide Sequence Number=SeqID_64455
atggtggcgcagaggaacccgatgtcgacgaagggcggcacggtggtggtgacggagcttcgacttagaacgccggcacggacggagtcaccggcggcggctcgctctgctctcttttttgtccgcggcgaggcgcccgcggtgctattcaagggtcagacggctagcgtattcggggaaagggagggcgagtggttagcaggggaaggacgattcccaggagcttctatttatccctcggcgcggttgaacgggtcgggcgcgcgaggattccgcggcggcggcgagctcgcgcagtttgttacagcgcagcggaagcgcggggaagacggactgaccgatgggtcccgcggagtcagtgagacaatcccgagtccgcgcggtattggacagctgaccggtgggtcccgcaaatcagtgattcagcgccgcgcgtga

SEQ ID NO: 22677 - DNA, 297 bp, Zea mays
  Peptide Sequence Number=SeqID_64456
atgggtcggcgcgagacggagcgcgaaggggggaagaagccggagggagacatgcgtaaaaggggaatcccacggtcttcgtgttcgtcccgcgcccaggtcgggcataaggagaggatccagggtaatgatgacgcctcctgtgacttggtcggtccgagtcctaggttgggcgaggtggaggctcctccgaggtcgaggtcgagtctatcttccgaggccgaggtcgagtccgagcccctgggtcgggcgaggcggagaccgtcggctgaggccagggctgagtccgagccctag

SEQ ID NO: 22678 - DNA, 438 bp, Zea mays
  Peptide Sequence Number=SeqID_64457
atggtggcgcagaggaacccgatgtcgacgaagggcggcacggtggtggtgacggagcttcgacttagaacgccggcacggacggagtcaccggcggcggctcgctctgctctcttttttgtccgcggcgaggcgcccgcggtgctattcaagggtcagacggatagcgtattcggggaaagggagggcgagtggttagcaggggaaggacgattcccaggagcttctatttatccctcggcgcggttgaacgggtcgggcgcgcgaggattccgcggcggcggcgagctcgcgcagtttgttacagcgcagcggaagcgcggggaagacggactgaccgatgggtcccgcggagtcagtgagacaatcccgagtccgcgcgatattggacagctgaccggtgggtcccgcaaatcagtgattcagcgccgcgcgtga

SEQ ID NO: 22679 - DNA, 525 bp, Zea mays
  Peptide Sequence Number=SeqID_64458
atggtggcgcagaggaacccgatgtcgacgaagggcggcacggtggtggtgacggagcttcgacttagaacgccggcacggacggagtcaccggcggcggctcgctctgctctcttttttgtccgcggcgaggcgcccgcggtgctattcaagggtcagacggctagcgtattcggggaaagggagggcgagtggttagcaggggaaggacgattccccaggagcttctatttatccctcggcgcggttgaacgggtcgggcgcgcgaggattcccgcggcggcggcgagctcgcgcagctttgttacagcgcagcggaagcgcggggaagacggactgaccgatgggtcccgcggagtcagtgagacaatcccgagtccgcgcggtattggacagctgaccgggggggtcccgcaaatcattgattcagccccgcgcgtgagaatgaaaggtgggggctggatgtcagggcagcagcgcgcgcggtggagaggatcccaggccgcgcgggagggggtgggatga

SEQ ID NO: 22680 - DNA, 1248 bp, Zea mays
  Peptide Sequence Number=SeqID_64459
atggaggttgaccttgccactgtaggtgtctaccagagcagcatcgacgcggaacaggggaaggtgacggtgtccggcctgctggatccggacaccatcatcaggaagctcaacaaggccggcaagccggcccagctgtggggctccaagcccggcgtccctcagaacggccatggcggcggcaagggccagcctaaggacgccggcggtggcaagggccattccaaggatgccggcggtggcaaggcccagaagggcggtgcgggtggcggcggtcacaagggtgccggtggtgccggtggcgggggtggtggggccaaggatcctaagatggtgatgccgcagccgacgccgcagcagctccagcagctgcagcagcagttgcagatgaaggggctgaagctcccgccgcacctcctgggcggcaacatgccggcgttccccgcggccgcgccgttgaaggaccaccccaagtccgtcaagttcgccctccccgaggacagcttcgacgacgacggtggcagcgagttcgacgatgacttcgacgacgacgacttcgatgacgacgaggactacgacgacgagggcttcgacgacgacgtctacgacgagcccaagatgatgaagcccatggccgtgccgccgccgtccggcgggggcgacaagaagggcggtggtggcaagaagggtggcggcgggaacgagatcccggggaagaaaggcggtggcggtggtggcgccgtcggtgggccgatgggcggcatgctgccacagcaggccatgatgaggcccaacatgctgggtggcgctggtgccggcttccccggtacggcccagatgggcggcggacctatgggcatgccgatgggccacccgcacatgggtatcatgcagcagggcgggggcggcggcggcggcgtgccgggcctgggattctaccagggaaatgccaacggcggcggcggcggcggcatgcattctggcgcggagatgcttcaggccgccgcggcgtccgggaaccccatggcgcagcagcagtacatggccttgctgcagcatcagcagcagcagcatcagcagcagatgatgctgcaacacgggaacggcggaggagcagggtacccggcaatgggctacggctatggccggccaccgatgatgcattacccaatgcccccgcactcgcatcccgagccatacaacatcttcagcgacgagaaccccaacagcacctgctcactcatgtga

SEQ ID NO: 22681 - DNA, 501 bp, Zea mays
  Peptide Sequence Number=SeqID_64460
atggcagctgcagggtgcagggccgggggaggcgccggtgccggtgtcgtgccgtgcgtacccgaacccgaggaccgcaccgcgtctcgccttctgttctgcgatggacgtgcacggccaccggtcaagtcaagtgacgacaacagcgcacgctcatgggtgcctgacgcgagcagacagcacgttggagtggagcacagtgcgagcctggcctcggcaggccaggagattctccagtgtctccttgatgccgtggcgctcctggccgcctctcccgacgccatccccacgaacgccttctccgacaccgtctccgctccgccgtcttctccgacgtcgtcaacttcccctcgacaaggtcaaatcctgctcttgttctcgctctgctatgtcttgttgcgccccttctcgtatgttcctgttgttttggattcggctctagatctcgtctcccatccatcggcccgccggatcctgccatccatcggccgcggcagctga

SEQ ID NO: 22682 - DNA, 2898 bp, Zea mays
  Peptide Sequence Number=SeqID_64461
atgcccggcataccgagggatgtcgccgagcactcgctggatattcgggccggagctcgacccgtcaggcagcctctgcgccgattcgacgaggagaagcgcagagtgattggcgaagagatccacaagctaatggcagcagggttcatcaaagaggtattccatcccgaatggcttgccaaccctgtgcttgtgaggaagaaaggggggaaatggcggatgtgtgtagactacactggtctcaacaaagcatgtccaaaggttccctaccctctgcctcgcatcgatcaaattgtggattccactgctgggtgcgaaaccctgtccttcctcgatgcctactcagggtatcaccaaatccggatgaaagagtccgaccagctcgcgacttctttcatcacaccgttcggcatgtactgctacgtcaccatgccgttcggtttgaggaatgcgggcgcgatgtaccagcggtgcatgaaccatgtgttcggcaaacacatcggacgcacagtcgaggcctacgtcgatgacatcgtagtcaagacgaggaaggcctccgacctcctctctgaccttgaagcgacattccgatgtctcaaggcgaaaggagtcaagctcaatcccgagaagtgtgtcttcggggtgccccgaggcatgctcctggggttcatcgtctccgagcgaggcatcgaagccaacccggagaagatcgcgaccatcaccagcatgggacccatcaaggacttaaaaggcgtacagagggtcatgggatgcctcgcggccctgagccgtttcatctcacgcctcggcgaaagaggtctgcctctgtaccgcctcttaaggaaggccgagtgtttcgcttggacccctgaggccgaggaagccctcgggaacctgaaggcgctccttacaaaggcgcctgtcttggtgcccccagctgatggagaagccctcttggtctacgtcgccgcgaccactcaggtggttagcgccgcgattgtggtcgagaggcaagaggaagggcatgcactgcccgttcagaggccggtctacttcgtcagcgaagtgctatccgagaccaaggtccgctacccacaagttcagaaggtgctgtatgctgtgatcctgacgaggcggaagttacgacactacttcgagtctcatccggtaactgtggtgtcatccttccccctgggggagatcatccagtgccgagaggcctcgggcaggatcgcaaagtgggcggtggaaatcatgggcgaaacaatctcgttcgcccctcggaaggccatcaagtcccaggtgttggcagacttcgtggccgaatgggtcgacacccagctgccgacggctccgatccaaccggagctctggaccatgtttttcgacgggtcgctgatgaagacaggagccggcgcgggcctgctcttcatctcgccccttggaaagcacctgcgctacgtgctacgcctccatttcccgccgtccaacaacgtggttgagtacgaggccctggtcaacgggttgcggatcgccatcgagctaggggtcagacgcctcgacgcccgcggtgactcgcagctcgtcatcgaccaagtcatgaagaactcccactgccgcgacccgaagatggaggcctactgcgatgaggttcggcgcctggaagacaagttctacgggctcgagctcaaccacatcgcttggcgctacaacgagacggcggacgagctggctaaaatagcctcagggcgaacgacagtccccccggacgtcttctcccgggatctgcatcaaccctccgtcaagatcgacgacgctcccgagcccggggcaccctcggcacagcccgaggcaccctcggctcagcccgaggtaccctcggcccccgagggtgaggcactgggcgtcgaggaagagcagagcggggccacgcctgatcgagattggcaggccccgtacctgcaatatctccgtcgaggagagctaccccccgaccaagccgaggctcggcgggtagcgcgacgtgccaagtcgttcgtcttgctgggcgatgaagaggagctctaccatcgcagcccctcaggcatcctccagcgatgcatctccatcgccgaaggtcgggaactactgcaagaaatacactcgggggcttgcggccatcacgcagcgcctcgagcccttgtcgggaatgctttccggcaaggcttctactggccaacagcggtggctgacgccactagaattgtccgcacctgcgaagggtgccaattctatgcgaagcagacccacctgcccgctcaggctctgcagacgatacccatcacctggcccttcgctgtatggggtctggacctcgtcggtcccttgcagaaggcgcccgggggctacacgcacctgctggtcgccatcgacaaattctccaagtggatcgaggtccgacccctgaacagcatcaggtccgagcaggcggtggcgttcttcaccaacatcatccatcgcttcggggtcccaaactccatcatcaccgacaacggcacccagttcaccggcaaaaaattctcggatttttgcgaggatcaccatatccgggtggactggcccgccgtggctcatcccatgtcgaatgggcaagtagagcgtgccaacgacatgattctacaagggctcaagcctcggatctacaacgacctcaacaagttcggcaagcgatggatgaaggaactcccctcggtggtctggagcctaaggacgacgccgagtcgtgccacgggtttcacgccgtttttcctggtctacggggccgaagccatcttgcccactgacctaaaatacggctccccgaggacgagggcctacaccgaccaaagcaaccaagctagccgagaaaagactcgctag

SEQ ID NO: 22683 - DNA, 222 bp, Zea mays
  Peptide Sequence Number=SeqID_64462
atgaggaagcagaaggacacaccgcgagcggtgccgtcgagggacctgactgacgagcggctgctggcgtgggcagcggcggcaaagaatcagtacctgcaggccatggacgagaagcaggaggcggtcgcgcggcggccgtgcgtcgacatcctacgcgccaagggcctttcgctgggactaatttttagtctttccattataattacttttagtctttag

SEQ ID NO: 22684 - DNA, 552 bp, Zea mays
  Peptide Sequence Number=SeqID_64463
atgaagtacttctgggacaccttgctggatgctgacattgagagcgacgcgctaggctggcagtacatttctgaggctgcgggcggtcgtcggccttctgggggctggtctagaacatctgcgctagaacacctaaaaaagaagtccgccaaagatttgttgtcggtgtttcgagaccggggggtccctgggccgacgagtgaatgtcgccgcgtgccccagcccagatgggtcgagcgcgagggcgagcgcgaaggggggagagcgaagcggccggagtccggcgtgagagaggtgggaatcccgcggccttcgtgttcgtcccgcgcccaggtcggggtgatgatgacgcctcctgttgacgtggctggcctgcgccctaggttgggcgatgtggaagctcctccgaagccgaggtcgagtctgtcttccgtggccgaggtcgagtccgagcccctgggtcgggcgaggcggaggccgtcggctgaggccagggcggagtccgagccctggggtcgggcgaagcggagtttcgtcgtcttctggggctga

SEQ ID NO: 22685 - DNA, 594 bp, Zea mays
  Peptide Sequence Number=SeqID_64464
atgttcacggcgtcgtggttcttgctgtggaggcgttactcaagacgactacagggtgcaggactgcaggcacatgaaatcaacaacgtcggcaactcagcaaggcacaagcggcattggctgagctttgctcgagaagcagcatctaaacaaagaaaaagcaatgtagaggataagagagtagagagccatatggtggcacgtaagtgtaatttcagagagtggttgtatggtcctaggtccaattggcctgagtcagaggcaacagaaaagaaaaaaattgagtgggcgaaagagttgaagtctgatcctgtactctacaaatgtggtattgaagctaagtatggattagttccttccgagcttggtgtgggctatttttgtagacatatggagacaaggaaatgcagttgggagagatacaccaacaaagaagaggtgatgcatacaataaagtccaagagactcatgggacagaagatacgctgtggatctcagctcgtcgattcctccattaaagatcgtggacaggagatgcgtaggttcacagaatcaatgtattatgacagcccgatgcgtgttgagcggaggtga

SEQ ID NO: 22686 - DNA, 2383 bp, Zea mays
  Peptide Sequence Number=SeqID_64465
atgacaaaacttgggagtaaacaattctttcataggttagcatacttgaactatgcgacgtacgataataagccgagtttgtgggtccagacccccaccggactggacctcgcgtacgtgcaacctggttcaaaggcaagatttttcctctactggccccagacggatgaccacattgaagagcgggccccagggctgagcagacggatagcgcgcgtaaggactcctctacgtttagcgttcgcctctaaactcccacccaccaaccctttggttcatgtatcatcgtcgtcactcgtcacacactcagtcaggagtcaggactcagcagctagcctcgtcctgctcagcccaatcgccggcccagtgccccgcgccacagcagcggagcctaccatggtcatggcagcagccgtcgctctcgctcacttcctcggagcggcattgccgctactcctctgtggagcagcagaggcgggcgaggtgggcgtgaactacgggagggtggcgaacgacctgccggacccggcgtcggtggtgcagctgctcaagcagagcggcatcaccatggtgaggctgtacgacgcgaatcccaaggtgctgacgtcgctggccaacacgggcatcaaggtgatggtgatgctgcctaacgaggagctggccgccgcggcctcggacccgtcctacgcgctccagtgggcgcgggccaacgtggcggcgttctacccggccacgcacatccactgcgtcgcggtgggcaacgaggtgttcgactccaggccggacctgaactcgaacctcgtcccggccatggccaacgtgcacgacgcgctggcgcagctgggcctggccgacgccgtcaaggtgtccacgccggtcgccttctcggcggtccaggactcgtacccgccgtccgcgggcaggttccgggacgacatcgcgcagagcgtgatgaagcccatgctcggcttcctggacaggacaggctcctacctcaccatcaatatctatccgtacctggcgtacgccgagcacccggaccagatctcgctcgactacgccctggggaacccaaaccccggcgtgcgcgtcgacgacgacgacacgggcagcatcgcgctcgacgacgacaatggcgtaacgtaccacagcctcctggacgcccagctcgacgccacgtactacgccatggatgccatggggttcaccagtctgaaagcacatgttggggagactgggcatccgtctggaggaaggcccagacccggccggaggccgcctcgcggaggccggaggcatttggtggccggggacgacgacgggtaccccgtcgcctcgatagccaatgcccacgcatacgtcaacaacgtcatcaaccgcgtgctgtccggcaacacgggcaccccgcaccggcccgacgcggacatggacgtctacatcttcgcgcttttcaacgagaaccagaaaggcgacgggccggacgacatcgagcagaacttcgggctgttctacccgagcgagcagaaggtgtacgaattcgacttccaccacggcggcggcggcggcggcggcagtggcggcgcgaaggcgagctggtgcgtggcgaacgcggccgctggggactcacggctgcaggcggcgctggactacgcgtgcggccacggtgcggactgcagcgccatccagcccggcgcggcgtgctacgaacccaacaccaagctcgcgcatgcctcctatgcactcaacgactattaccagcggaaagggcgggccagcgggacttgtgacttcgccggtgccgccaacgtcgtctaccaggcgccagccgctggtggtgagctagatctattattcttcgccttctcagacacctgcagcgcggcaaaggcgagctggtgcgtggcgaacgcggccgtgggggactcaaggctgcaggcggcgctggactacgcatgcggacacggcgcggactgcggcgccatccagcccggcgcgacgtgcttcaagcccaacaccaaggccgcccacgcctcttacgcgttcaacgactactaccagcgcaatggccgggcaagcgggacgtgtgacttcgccggcgctgcttccgttgtctaccaggaaccagctggcgcctgcgatgccaagtcgagctggtgcgttgcgaacgcggccgttggggacgcgcggctgcaggccgcactggactacgcgtgcggccacggcgctgactgcagcaccatccagcccggtgccacgtgcttcgaacctaacactaaggtcgcgcacgcctcgcatgcgttcaacagctactaccagcgaaatggccgagccagcgggacctgcgacttcgccggcgccgcctccgtcgtctaccaagcgccag

SEQ ID NO: 22687 - DNA, 366 bp, Zea mays
  Peptide Sequence Number=SeqID_64466
atgggtacgctgctgagcattggtcctgagccgtattcaggactgacctctggtctaacgattgactcagagagtcgagactacctccgagagtgccaaggtggcccgagggcctctgtcggtaccccaaatatagggtacccactcttgttggctttaggcaggacccctgtgcctatcagtggccatgggatgatgagcaatctactccaacttagagtttgggctagtccagtagggtcattcgccttcgagccaccggcaccatcacacaccctgttgctgggattactcgtcatctacagtctggggtcggaccctcgtgggacagtcccggacccctacatgtgtcgtctagacctctga

SEQ ID NO: 22688 - DNA, 162 bp, Zea mays
  Peptide Sequence Number=SeqID_64467
atggagaagtatgaatatgataggttttccaatgcaaatgtagaagaaagaaggttgtaccaaatggatgtgaatagcgctttcctcatcgggccgatcaaagaggaggtgtacggggagcaaccccccttggtttcgaggatgaacgggaaccccgaccac

SEQ ID NO: 22689 - DNA, 1485 bp, Zea mays
  Peptide Sequence Number=SeqID_64468
atgcacggccgcgccctgctagcagcagcagcagcagcgctgctcgcgtcggccgtcacgctcacgcttctcccctccgccgccgcgcagccgtgggtgggcccgtggccgacgtgcgacgacaccaccggcaactactcggccggcagcgcctacgccaaaaacatcaagcagctcatcctcagcctccaggcaaacgcgtccaacacgcccgccctcttcgcgacgggctccgccggcgcgggcgccgacgccgtgtacgggctcatactctgccgcggcgacctcagccccaccgactgcttcgactgcggcaccaacgccggccaggacgtgtaccgggtctgcaacggcacccgggacgccgcgctcgtctacaaccagtgctacgtccgcctcgcccccacggacttcctcgccaccaccaacaacaccggcatgagagacctcatcaacggcaacagcgtccccgcgggagtcaacgtgacggcctacgacggcgccatcaccaggctgctcaacgccaccgcgcgctacgcggtggacagctccgccccgtccttgtctcccaggaagtacttcgccacgggccagatggcgggggtcgacccgcggttcccgaccggcatctggtccatggcgcagtgcgcgggggacatatcgccggtgcagtgccggagctgcctggacgacttgctggcgcagtggtggcagaagttcgacagcaaggagatcggcgcgaggctcgacggttcgcgatgcaacctcaggttcgaaacggggaacttctacaccggcagcccgatggtgaagctgcagatgaacggcgaggaggccgctccagctccggtgccttccacggatgttctacctggcaccacaggaggtaagaaaaattcagttggcaaacttctcggaattatattgccgatagtatttgttgctgcaatagctgccatagccctctgcatttggattgttcgtaagaagagaacataccaaggaacaaatcttccccaaacagacacaacttatatggccgaggacatcgaaagcatcaagtcgatattgttatcgttgccatcactacaagcagcaacaaataattttgatgaaagcaataaactaggcgaagggggatttggaacagtttacaagggcaatctttctggacaagaagtggctgtgaagaggctaccaaagggtttagatcaggggctagaggaactaaaaaatgagctagatcatgagaagaaaagacaactagattggaggaaacgattcaacataattgaaggagttgcacgtggattgcaatatcttcatgaagactctcaaaataagatagttcaccgtgacctaaaagcaagcaatattctgttggattcaaatatgaaccctaagattggtgactttggcctagccaggctctttttgcaagatcagactcgaggcatcacaaaccacatcgttgggacattgtaa

SEQ ID NO: 22690 - DNA, 1419 bp, Zea mays
  Peptide Sequence Number=SeqID_64469
atgcacggccgcgtcaccgtcctgctagtagtagccgcagcagtgctgctgctcgcgtcgtcggccgtcgcgcagccgtggccgagctgcaacggcgccagcggcaactacctggccggcagcgcctacgccaacaacaccctgcagctcatcctgggcctccagacgaacgcgtccgactcgcccgcctacttcgcgtccggctccgtcggagcgggcgcggccgccgtccacgggctcatgatctgccgcggcgacgtcagcagcaacgactgcttcgactgcggcacccgcgcgtggcaggacgtgcaggctgtgcagccgctctgcaaccgcaccagggacgccgcgctcgccgacaaccagtgctacgtccgcgtcgccgccaccgacttcctcgcctcgcccaacaacaccggcctggtgagcgtcgtcggcggcgccagcatccccagcggcgtcgacgtcgcggcctacgacgccgcgctcaggcggctgctcaacgccaccgcgcggtacgcggtggacagctcggtcccgtcgtcgccgccgaggctgtacttcgcgacggggcagttcgtggggctcgacccgcgggtccccaacatctggtccctggcgcagtgtgcgggggacctggcgccggcacagtgccggaggtgcctggatgacctgatgacactgtggtggaacggaagtgggttcaagccggacggggaaagcgcgatgttcgctggctcgcggtgcaacctcaagtctgacctgggggacaagttctacaccagcagccccatggtgaagctgcagatgaacagcgaagtggtcgttccagcgcaagcgccttccatggcagtaactgccatagtcctctttgtttgtaaaaagagaagatatcgaggaataaagctgccacacggaactcatatggccgaggactttgaaagcatcaagtcaactttattatcattgtcatcactacaagttgcaacaagtaactttgatgaaaacaataaacttggtgaagggggattcggtgtagtttataagggagatctttctggacaacaagtggctgtgaagaggttgtcaaaaggttcgggtcaggggctagaagaactaaaaaatgagttagttctggtcgccaaacttcaccataagaaccttgtccgcctagaagaccccgaggaaaaaatacgactagattggaggaaacggttcaacataataggaggagttgctagaggattacaatatctccatgaggaatctcaaaagaagattatacatcgtgacatgaaagcgagcaatgttttgttggatgaagacatgaaccctaagattggagactttggcctagctagactctttgggcaagatcagactcgagatgtcacaaaacacattgttgggacattgtaa

SEQ ID NO: 22691 - DNA, 408 bp, Zea mays
  Peptide Sequence Number=SeqID_64470
atggcggaggtgaagctagacggcatcggcgtggcctcgggcgtcacgagatgcgtgtgtatggcggggctgggaagcgcggggaggaaagcgataaagatcccaccgtcggaggaggggggcaccgacgggagccgtggagaggacggcagggggcaaagcggtcgcgccggcctggtggaggacggtcgcgccggccagatggagatctcccacttctctggagagcttctctggagcctgggcgcgaggatcctgcaagccggcggctggagaaaggcaagcggcacggcgacctccacaatgcggctgttgaaggccgagaaagaggaggagccacttctgcgcctaggccgcggaccatctgcgcctttcgtcaggtggttcgttatagtgtttggcgcctag

SEQ ID NO: 22692 - DNA, 216 bp, Zea mays
  Peptide Sequence Number=SeqID_64471
atggcgcagagagtcgtcttcttaacaacagacttagatcttgcctcctgggagggaccccgtcggggaggagagattctaggggtttctagcccactaagggctcctttggcagccagggcagggaaacccaggggagtctgcacccagggggacaaatacctcgcacccagattccctgggcaggagtgctcgtccggggctgccctgtcctga

SEQ ID NO: 22693 - DNA, 588 bp, Zea mays
  Peptide Sequence Number=SeqID_64472
atgaagtttattacacaagcagttcttgataacaaggcagacttaggcatcatatttgatactgatgttgacaggtctgcggctgttgattccaggggtcgtgagttgaatcgtaaccgattgattgctttgatggctgccatagttcttgaggaacatccaggaactacagttgtgacagatagtgtgacttcagatggattgactgtatttattgaaaataaacttggagggaagcatcaccgtttcaaacgagggtacaagaatgtaatagacgaggctattcgtctgaactctattggtgaggagtcacatttggccatggaaacaagtgggcatggagcgctgaaagagaaccactggcttgatgatggagcataccttatggtcaaacttttgaataaacttgctgctgctagaacactgggttcaagtattggtagtaaagttttgactgatttggttgagggccttgaggaagctgatgtgacagttgagataaggttaaagattgatcagaatcatgcagatttgaaaggagggtatgctaactctgaaatgttctttggttatttcacaaggagatag

SEQ ID NO: 22694 - DNA, 249 bp, Zea mays
  Peptide Sequence Number=SeqID_64473
atggatttgacgctgccatgtatcttgaatacagtggcattaaatctggtgcaaaagaaactgaaggtctactcacgcaggaagacaatgacaggtcatatgcatgacaaccaaagtggctcggcaacaagggtcgttggtgctctagaatctagccagttagccccaggggctgcaacacccatactggctctgccagaacctggtcctagacctttgatccttgcttcggatgatgtccctaagtga

SEQ ID NO: 22695 - DNA, 447 bp, Zea mays
  Peptide Sequence Number=SeqID_64474
atgacccacccgcttttcactccaactttgcaatcttttagctgtcaccttaagtttcttatcaagggtcaggaaaggagaactgttagcctcaaccgagtcccatccagacattcctcgtcttcctccgcgccacctacacaacccaccaccaccaccaccacccctgcgcccctgaaccgacaacctccccaacccacctcagctgctgcactcgtaccccgcccaccaacatcaccaccaccagccgacgccacttcagttccttcagccatgtcggcaccaactattgctgatctggccaagatgatcgaggctctggccaacacggtgatgaacctacagacgatcgtggtcgcgctgcagaaggagaagtcatcttcttcgtcgactaccggcgggggcatcaacggccaacaccacaacgatcgtcccccgcagttctag

SEQ ID NO: 22696 - DNA, 192 bp, Zea mays
  Peptide Sequence Number=SeqID_64475
atggagctgctcttcgtcgtggacgggtgcctgtacgccgcagcctcagtaagagtctcctccctattgattgaacttcatccctggatcataatgcgccttttgaatttgagtttgaaaccttggggccgtgttggagccgccgggcgtccatctctgatcgcgcggccaccattcactcgtaccccttag

SEQ ID NO: 22697 - DNA, 213 bp, Zea mays
  Peptide Sequence Number=SeqID_64476
atggagctgctcttcgtcatggacgggtgcctgtacaccgcagcctcagtaagagtctcctccctattgattgaacttcatccctggatcgtaatgcgccttttgaatttgagtttgaagccttggggccgtgttggagcagccgggttagggaagagagagttgagggtgatgtgggagaggagcgctggccgtaggatcgtgatcctgtga

SEQ ID NO: 22698 - DNA, 240 bp, Zea mays
  Peptide Sequence Number=SeqID_64477
atggcgatctggccaaggttgcttctctgtgaagactgggcctcgggcgagccgaagctttgtgctgatgggggttaccagctgagattaggagtcttgggggtacccctaattatggtccccgacacaaataatgactggatcatgatcgaatccaagctcaaagattgcctgaattcagacttagggcagtctgacaactcaactttgggctcattttactccaaattcttcatgtga

SEQ ID NO: 22699 - DNA, 426 bp, Zea mays
  Peptide Sequence Number=SeqID_64478
atggcggttccttaccggtggtccggttctgtgttgacggaatggtggcaaagcacgggcggagagaggggaaggggggagctcaccggagatgaagatgacggtggcgctggctcaatcgagctcggggaagggggaagaggtggccgaggccgggctgaggagttggggagcttggggtggtccttttataggcggccagggagggggaggaagggggggtggcgagcaccagcgacgcttaccgcggcggcgatgatggcgcacagtggtggcgacgggatagctcgggcatatggggtgacgggatggctcgggcaggcgcagggagacagggacgcaaggcgccaaaccttgctggcgagcgcgttaatggcgcggcgacggggcgggtggtggccggtagtgatcgtgccgatagcttga

SEQ ID NO: 22700 - DNA, 396 bp, Zea mays
  Peptide Sequence Number=SeqID_64479
atggccgtccccaactacacctacatcaagctcaaagtgccgggccccaacggggtcatcaccgtcggccccatgtaccgacatgcgtacgaatgcgacgtggagtgcgtggattacgccgaggccctcgccgaatctgaggccctcatcgccgacctggagagcctctccaaggaggcgccagatgcgaagcgccacaccagcaacttcgagccagcagagacggttaatccctcggacatgcctggtataccgagggatgtcgccgagcactcgctagatatccgagctggatctcgacccgtgaagcagcctctgtgccgattcgacgaagaaaagcgcagagccataggcgaggagatccacaagctgatggccacagggttcatcaaatag

SEQ ID NO: 22701 - DNA, 240 bp, Zea mays
  Peptide Sequence Number=SeqID_64480
atggagagtcatgatctcccggcagaatgggaatcacggctcgtgggtaaagtgcacaacctctgcagagtgtttgaaactgatatatcagccgtgctcgcggttatgagcggtggttatgagatcgatgattctggttatgactatgatgctggttgtcagcattgcaaccactgctcagtcgaagatgaagctatggaaggagacttccaggagttccaagattacgacgagttctag

SEQ ID NO: 22702 - DNA, 255 bp, Zea mays
  Peptide Sequence Number=SeqID_64481
atggagaaaggcggggaaacggtggagggaaatgcggcgaacctactggagctctcgaacggtggcgatgaacagaggacggcacggaggaaggttgacggaagcactgcgtcggcttcgaggcgtcctcgccggtggcaaagggcgtcggcagctccgatcggtgttatacgacggggtcgactgcaacgcaacggtggggatctggtggcggggcaaaatgggtcgctggcaagaggaccaacacagttgtga

SEQ ID NO: 22703 - DNA, 207 bp, Zea mays
  Peptide Sequence Number=SeqID_64482
atggacgtagatattgaaatggttgttgatgaggatcatgatgaggtgcaaaatgataatgacttagtaattcttgaaggcaatgacattaatgacgaacttgcgccttcagatggttgttggacaaatatggtgggtggttggctgaggaggagggggaggaggagcaggacggcggacgaggcagagcaggacgaggcacagtag

SEQ ID NO: 22704 - DNA, 314 bp, Zea mays
  Peptide Sequence Number=SeqID_64483
atggcggcgagaatggctggaaagcacgggctcgacggtcgcaaggggagggggcctggctcatatgggggcgggggcgcgatgatggcggcgagaatggcggaggggtcgcggttcatgggggagtcacggacaaagggagggcgggggcatggcgcacgggcacgcacgggcacatacccgcgtgcgtcggggcgggcggagcgagggatgcagattgggcgacatcgacgtgcgagatggacgggggcgggggcacgcggcggggcgggagcacgagcgccgtcgatggaaggaggtgccaaggttggaag

SEQ ID NO: 22705 - DNA, 1593 bp, Zea mays
  Peptide Sequence Number=SeqID_64484
atgcccttcattgttgctattgaaaatgtaatgcctctggttatgtcaggtattggaaaaagaaccagaggtaccagattttcccagcataaccagcctgcaaaacagctcgagacattctcagcaggagtaaatggaagctgcacatggagaatagcatccaacagccttaccccaagtgctgctagctggctcagtggttcattctcatgtggacaggtagtctcagcacggccattctcaagtagtgcagcatggttctatgctttctgtaataacataagtcatacggttccagacctgcctccacatcaagaaattgggatgccgtctctttcacctacaatgactgagggaaacattgccaagtggcttaagaaggaaggagacaaggtctcccctggtgaggttctctgcgaagtggaaactgacaaagccactgtggagatggagtgcatggaagagggctatcttgctaagattattcatggagatggtgcgaaggagattaaagttggtgaggtcattgctataactgtagaagaagagggtgacatcgagaagttgaaggattataagccgtcatcttcagctgaacctgtagctcctgctgaaccaaaggctgaaccagaaccctcacagccgaaggcggaggaaaaaaagcctacgcaggctcctgaggcgaagaccccgaagattgaagaagcttctcaatctggagatcgtatatttgccagccctcttgcccgtaaattggctgaagataacaatgtcccactatcaagtgtgaaaggtactggtcctgatggtcgtattttgaaggcagacattgaagattacttggcttctgtagccaagggtgggctgagggagtcttttgcagatccagggttaggttatgttgatattccaaatgcacagataagaaaggttactgcaaatcgcttgctagcatcgaaacagaccattcctcattactacttgacagtagatgcacgtgttgacaaacttgtccagttgcgaggtgaactgaacccactgcaggatgcttctggtggaaagaaaatatcaattaatgatcttgtcatcaaggctgcagctttggcccttcgaaaggtccctcagtgtaacagctcatggatgaatgattttattcggcaataccacaatgtgaacatcaacgtggctgtacagactgaacatggattgtttgttccagtaattagggatgcagacaagaagggactcggtgcaattgctgaggaggtgaagcagttggctcaaaaagcaagagataatagcctaaaaccagcagattacgagggcggcaccttcactgtatcaaatttgggaggtcccttcggaattaaacaattctgcgccatcataaatcctccccagtcagcaattttggccattggttctgctgagaagagggtgatacctggttccgctgatggccagtttgaatttggttcattcatgtcagctacactgagctgtgaccacagggttatagatggcgcaatcggtgcggaatttctgaaagcattcaagggatacatcgagaacccaacttcaatgctgctgtga

SEQ ID NO: 22706 - DNA, 180 bp, Zea mays
  Peptide Sequence Number=SeqID_64485
atgactcagaccattgaaggtcaaaagttccgaagcttcgtgaacggtatcttcggcatcatgttcaagcagcttcagctgaagctgtttctttttgcaggaccttcggcgacgaagcatggtcccaacagtagccccttcacggtgctagatcgtttttcgtacgagcttgatccgtga

SEQ ID NO: 22707 - DNA, 528 bp, Zea mays
  Peptide Sequence Number=SeqID_64486
atgagcgcaggccgccctggcacgggggggacccccgacgcagtcgcgcacgtccttcaccctccgctgggcaccgacaccgcggccccaccggcctgccgctcgcccgcgcgcgggtttgaccgcggggatcccctctcgctgacggcccggatccatccttccgccaccgcgagcgcgtcaccagaagtgactgacacgcgggaccatgttgtcagggcagcttcttccccaacggcctcaccatgcatggcggagcgcgaagatcttgcaaaatccgttgaagcacctcagccacgtcgcgcccatatagtgccacgacccccggtctcgcctactcctccccttattcttgccctcgcggccgccacgaaccccactgaaaaaccgccgccatgtccgcttggggagaagccgccaccggtgaaactcatcaccgcgcgttgcctgtcctcggtattgggccaggaagatcgccttcacatgggaaagccgtttgtgccctcaattcgagtcgaacaccgctaa

SEQ ID NO: 22708 - DNA, 1740 bp, Zea mays
  Peptide Sequence Number=SeqID_64487
atggcgatccgggaggcgatgcgcagcccgatgtgcggcagctgcgggagccccgccatgctcggggaggtgtccctggaggagcagcacctgtgcatcgagaatgcgcggctcaaggacgagctcaaccgcgtctacgccctcgccaccaagttcctcggcaagcccatgcccgtcctctcggggcccatgctgcagccgaacctgtcgctgcccatgccgagctcgtcgctggagctggcagtaggcggcctccgtggcctagggtctatcccttccttggacgagtttgctggcggtgtgtctagcccgttgggcacggtgatcacgcctgcacgggcgaccggatctgctccgccgcctatggtgggcgtcgacaggtccatgctgctggagcttgcgatcagcgccatggatgaactagttaagctggcacaggttgacgagcccttgtggcttcccagcctcagtggctctcccgacaagaagctgctcaactttgaggagtatgcccactcgttctctccgtccgtcggcgccgtgaagcctgtgggctatgtatccgaggcctctagggagtctggcctcgtcatcattgacaacagccttgctcttgtagagacccttatggacgtgagacggtggtctgatatgttctcgtgcatgattgctaaggccacagtcctagaggaggtgacatctggcattgcaggaagtaggaatggtgcgctgctgctgatgaaggctgagctacaggtgctctcacctctagtgcccatcagggaggtcacatttctcaggttttgcaagcagctggctgagggcggtggcttgcaatgctgcagcgccagtgcgaatgcctggcccatactcatgtcccctgatacagtttcagctaatgactcgtcagtcataacacaggagggcaagcgaagcatgctgaagctggcacggcggatgacggagaacttctgcgccggggtcagcgcgtcatctgcacgtgaatggagtaagctggacggcgctgcaggcagcatcggggaggatgtgcgggtcatggcacggaaaagcgtggacgagcctggggagccgccgggcgtggtcctaagcgcagccacatcggtgtgggtgcccgtggctccggagaagctcttcaacttcctccgtgacgagcagctgcgtgcggagtgggacatcctcagcaacggaggcccgatgcaggagatggccaacatcgccaaggggcaggagcacgggaactcggtgtccctcctcagagccagtgccatgagtgccaaccagagcagcatgctgatcctccaggagacttgcactgatgcatcaggctcgatggtcgtgtatgctccagtggacatcccggcgatgcagctcgtcatgaacggcggggactccacctacgttgctctgctgccgtctgggttcgccatcctgcctgatggcccaagcagtgtcggcgccgagcacaagacaggcggctcgctgctcaccgtcgccttccagatcctcgtcaacagccagccgaccgccaaactcaccgtggagtcagtagagaccgtgaacaacctcatattctgcaccatcaagaagatcaagacagcgctgcacttggacgggtctttagcacggagcaatggtggtggttcgggtattgactcggtctctgtcatctgcttcttctccatggaccatggcaacctgttgtctgatacgggatcttga

SEQ ID NO: 22709 - DNA, 219 bp, Zea mays
  Peptide Sequence Number=SeqID_64488
gttagggacgacgtgaaccttccaagctatcagagtgaaaacatcaatgacaagacattcgacgagaagagtcatgtcttggacccatacaagatgctttatgagtacgctcaatccactgtcacgctcaacctactctacgccttctccaccggcggctacgccaacattcaacgcgtcacacagtggaaacttgatgtcaccgaacatagcaagtag

SEQ ID NO: 22710 - DNA, 288 bp, Zea mays
  Peptide Sequence Number=SeqID_64489
atggcggcggcgctgctgcgaggctatagaggagatgagtctatggttgagggcttgaggtgttatggtgacatgtacttatataggtggggagatgggtggttacatgacatatctaatcagagaatgaagaaggcgctgcaggtgtcgaagtacccgaatccaacggagctagaaacgacgctcaagacgatccaggccttctcgctgatcgtcttcgcaagggaggcacgacacctagaggagtgcctcgtcgatgtcgtcgtgggtcgtgccttcctcctctag

SEQ ID NO: 22711 - DNA, 408 bp, Zea mays
  Peptide Sequence Number=SeqID_64490
atgacgagaatgcgggaggcttctcgacggaggtgggagacctcggcggagatctgtcaccgtcgacctgtggctgcaacatcgttcggggtccgggaaggggcacaaagcatagctagagttcgtggatctccccggagtctacacatgtggaggctgactggatctcgtgggattgctcaccatcgaatgaaggagggtgtcgggccggcatttcagctagctgactttcatcactgcctcgatatgatcactggtaatctgatccccatcgagttcgccccattctctttacaccaagtcttgtctagggcagattactgctacaggtcaggggctaccaccgtagtttggtgtcaaggtggggaagagacgtccctgatcgttgatccagggatagacgagtaa

SEQ ID NO: 22712 - DNA, 324 bp, Zea mays
  Peptide Sequence Number=SeqID_64491
atgacggtatcgacgaggcactcattcaagtgtcgtgtctccctagcaaagacgatcggcagcaaggcctcgatcgtcttgagcgtcgtctccagctacgtcaggtttgggtactccagcaactgcaacacctacttcatcctcaagaagactataaatcaagaagttgccacaggtcgacggtggcagctctccgccgaggtctcccacctcgccgagaagcctcctgcattctcgtcattttctgagtggagtgtgttctcatggaggcaacttgctgcttcggtttcttgtgagcggaaaagaaacccaactgtgtcctaa

SEQ ID NO: 22713 - DNA, 435 bp, Zea mays
  Peptide Sequence Number=SeqID_64492
atggcatggtgtaggggcgagcacagtgcgacgagcggcaacgatcagctctatgggtgtgcaccgtgtggcagttggcaagcaaacaacaataagagggcacatgggatggctgataggagggggagttgcgttgtgatgacacgattttggtggcaaggaggtagggcagctcaactggggctggggaagaggtggcacaaccggggcgagggagggggcgaggtggtagtattggtgactagggtggcaaggtggcggtgtgttggcgacatgaagagtgatgctgggattggaggaagtgctagatgcattgtgaaatatggtatgaagaaggcgctacagctgccggattacctaaagccgacggagctgaagatgatgctcaatacgatcaaggtcttcctgccgattgtctttgtaagggaggcatga

SEQ ID NO: 22714 - DNA, 195 bp, Zea mays
  Peptide Sequence Number=SeqID_64493
atggctgcagaggatacaaaaatgtgcgtcggagattcagttttcagcaccgacaaacaacaaaatggaggcttcgaaggactggaacttgaggaagcgcacttggatagattgcacatacaagcaaaaaatgcaaatatagaagatggatcctaccaaaaaaccttggcaaaaacaaggtgcacatgttactaa

SEQ ID NO: 22715 - DNA, 222 bp, Zea mays
  Peptide Sequence Number=SeqID_64494
atggtcaaggagtacacccaattcactgtcatgctcaacctactctacgccttctccaccggcggctactccaacattcagcgcgtcacgcagtggaaacttgatgtcaccgaacatagcaacaacaatgggaataaaaccctgagtatgggattactcagcaagactgacccgactaaagaaaagactctcaagggtatgctggatttaaaaggattcaag

SEQ ID NO: 22716 - DNA, 282 bp, Zea mays
  Peptide Sequence Number=SeqID_64495
atgaccggcgacggcgcgttcgagggtcggcctcttgctgctgtgatggccccatccttcacgcagccccacactcagtcgctgcgtggcacatctggggcgtcgcgtggagcacggtaccacgcgggccagaggtggactgacggcgacatcgacttctgcggcatgggtaccggcggcgaccggtgttccgtgacggcgagggcatatttgaagtccggcgtcagcctatcgctgctttggtggccccacacttgtcgcggccccagctgcagtcgttga

SEQ ID NO: 22717 - DNA, 933 bp, Zea mays
  Peptide Sequence Number=SeqID_64496
atgccgtacgagaatctggagatcctctgtttggcctacctgcacagggatcaatctctcgtttttgggcacatgattgcttggttaacggttaacgctgagatgtgctccaagaacaggggtaaagggtcgccgccgcgtcacccggccgccgccacagctgttgcccagccgcttgagcaggcaaccagaccggccgccgccacagctgctgcccagccgcgagcaggcaagcaggccgtccagctccgaccagccgcacgagcagcaagcaggccgcccagctccggccagccgcacgagcagccagccgcacgactagtgcacagcagacagcaccggcaagcagccgagcagctgcttctcatccggcgccaggtccagtgcgcgcgcgccttatctgctgcagctgcttgccgtcctcgtccgtcgtccctcggcaccggcagctcctccatggtgtcggactgggacagcgacagcgactgtgaagtacgcatgattgattatcctcgcgagcgtcgtgctggtgctgctactcaggcagagaaaggaaaggctatggtcgatgccggtacatcttcaagtgttgctggtgtgatggtgatggatcgatatgggaaaccagtgaagttaaatggaccaattgatgtgacttggagccatggtcatatatctgggagtgtggaggcatgccgtaaagtgccaaatcatgtgaaggacctaatgtctcaaaaagtaacagatgggagaattaggagggcacatgaaagcaagctgggttatttggaggagaagaggctaaagattcagcacttaatggccgcgcaagtgcagctgattggtgggatcaatatggtggagactatccagaattacaagagtttccacgtcgtattgtttctcaatgcatgtcctctagtggttgtgaac

SEQ ID NO: 22718 - DNA, 660 bp, Zea mays
  Peptide Sequence Number=SeqID_64497
atgtcagggaatcgatctcaggggccttttcatggaggtaaccggcaggtctttggaggacccagtgctctggtggggaataacccgatttatgcgggatttggctctaatacaggacctcaccggctgggagctcctcatggtcaggtttttggagttgttcctgcggcaactcgtggtcacgacgctatggattttggaagatcatcgcaaggacagcgggcgaggggctcccgcagtgccatagccaacagatggcctcgaccttacgataggcagcagcaacgaccattctctagacaaccgcagcaggtacagcctgccatcacaccttctccgagttttggtggaggtcttccctcctctgctcaaccagcgagggctcaggttcctgctgacagtgttggaggaatgcctcgcctcaaacacgtgcaaagtgcagaggtcaagcatgggtttccggctactgggaagtcattaagttcagggattatggcaacggctgagtcgggggagactttagtacaccaggctgaggtggcgaaagataaaggcaaatggtgctccagatgtcgaagtaaaggacatgtttcagcagaatgctctacggttcttttctgcgacatatgtgaaggttctgatcatgttgcagcttcatga

SEQ ID NO: 22719 - DNA, 258 bp, Zea mays
  Peptide Sequence Number=SeqID_64498
atggtgattattagccaaaaggcttgggaaattgcacatgcactgcacgcgtggcggagcctcttcgagtttccatgcagcacgattcgttttccaacgcgttgccgctgcatgaaacgcaatgaaggcaagccgtcgcctggctacctccacccgctgcaggctacaaacatccgtgacaccgaactcttcggcgtccacgtctatggcaccgacctcgacgtcgagatccttaacgccaagattgctgccacgtga

SEQ ID NO: 22720 - DNA, 630 bp, Zea mays
  Peptide Sequence Number=SeqID_64499
atggagcgctcaaccgtccgttccggccgcccctcggtcagctccacgacggcacgacctcagctctccaacctgggcctcggctactccatcgccatcgcgctcggcttcctcatcctgtttgcctccttcctgctggctttctacttctgcttcggccgcggcggggactactgggccggggaagcagtcaccacggcgtccagctctggccacctctccatcaccgtcccgcgcgtgctcttcgtcgcggaggggtccgagtcccccgaagacgacgcttacccctcctcctccgccgccgcggcctgctcccccgtcgggctcgacgcggccgccatcgcttcctaccccaaggtcgccttctccagcaaggccgccgaggctgacgccatgtgctccatctgcctcagcgagtacagggacggcgagacgctgcgcgtgatgcccgagtgcaggcacggcttccacgtcgcgtgcctcgacgcctggctgagccggagcgcgtcctgccccgtctgcaggtcctctcagggcttggttgagcgtatgtttagtgacaaaaaagcattgatcagagaagcttcaaatgtccaagtcatcctctttcaggggaacatttgcaggtag

SEQ ID NO: 22721 - DNA, 501 bp, Zea mays
  Peptide Sequence Number=SeqID_64500
atggcaataccggatctcgacatgcccttggagacatgttgtgtcaacaggggaatagaatcgaggatctgtcgtggtgcaaccggtttctattatgttgtaggaaggttgaggctgagagaacttaccatcagagagttcttgagatacttgaccaattggaagaagtatatttggcttaacatgattgatgaatatgatttatatgaagttcttgacatatatctgcttcatggtatatacactatgctgactcgcagcatgcagttgcttctcgcaatgggcgtcacctacaaccagcaacgcacgagcatatacctagtgaacatagaaggccttaaggatagggtgctcagggcatatatgttgtcaagtgtacatgataatcctcttcatactgaagttggtggtcgctcgttgccaataacagctcaagttgtctacctcatcactggtttgaaaagaggtaatcgaaaattccctcaagatgaccagtgctag

SEQ ID NO: 22722 - DNA, 264 bp, Zea mays
  Peptide Sequence Number=SeqID_64501
atggcgaggagtctgatgacgataggatgtgattgtgatgccatgccgttgtggcatctcccgggtcctacgtggccgcatgcgccgtacaacaagctccggcgctgccgccgctttgacgcgttccagagcgggtgcatcgcgctgtccatagtcaagcaggggagcctcatggtcgtcaccaacgtcagcgactctcgggttgttctgggcaccgcattcgacgacagcgccatcatgtcgtccaactcatcgtccacctag

SEQ ID NO: 22723 - DNA, 276 bp, Zea mays
  Peptide Sequence Number=SeqID_64502
atgcagtatgcatataacctaattataaagagccaggaacgggaagaatcacgaaaaatattctgggactccgttgaaactggagagaaggcactggaagtgttatttgaaatgagaaacatgcgcactcaagcagcaaaggatgctgataagaatgtaaagaagaagaaaaaacatcaaaaggaacaaacccaagtctgtgctggagaggaccttggatgggcgcgatgctcttactatctgcaagagactgacaagagagaaagactgcaatag

SEQ ID NO: 22724 - DNA, 603 bp, Zea mays
  Peptide Sequence Number=SeqID_64503
atggacggcggcggggagacgctgctggtgcggaggagcaagggcaagaagaggcggcagccggcggcgcccgcggagaggggctccggcagcggggacaggttccgcgcgctctggcgggactaccacgacctgctgcaggagaccgaggcaaagaagaggaggctggcgagcaagaagcgaagaagcctcgccctgcttgctgaagtcaagttcttgcgaaggaagtatcagtcctttccgaagggtggctcgcagcagacacattacaggttgaagaagcaggctcggtacatgccatccccattgggccatggtgcagggaccgaagtgccttctaccagcagaaacccaaaccttgacttaaatcaagattctgtcctgctaaaagggccttcttgtctgcagaacgatgtggggaatgattgccaggggcaacatggccatccagaagttgaaaagttagatcaggtcgaggtgaatgaagatacgatgacacctgatgtcaaattatcagtttgtagggatacaggagagtactctcctgtaagtgaaggtaagagggcggttccatggcaagaccggttcgcgttgaagacctag

SEQ ID NO: 22725 - DNA, 528 bp, Zea mays
  Peptide Sequence Number=SeqID_64504
atggccgacacatgcattcagctaccttcctggcctaaccacgcagaagaaagagcgacagatggcaataacgtgaggcttcatcatacctgcagcgaagtcgtggcaaagttggccaccgacatgaatcagatccacgaccaagttggatttcggcgaggaaattcggccatcaccgagcccggatgggaacacccagggcaaaaaaatccagcgacagtgggagtccgtgtcgcctacggtgctgttctgttgaggtttgagagaggagacaggttcccccaagtgagccagaacgtcgtggtcgccgcaacccttttggacaaactcttcgaggcagaaactctgagcaaatggaggatgcaccaggatactaggggcctcttcagcctcaccgttcaacaacaagccaagagttccgtgtcgcggcgccaagagctgggcgccaaccaatgtatcgtgtccacaacgatgggaaataatgccttattgggacaaccatccaatctcaaggaatccatgacatga

SEQ ID NO: 22726 - DNA, 501 bp, Zea mays
  Peptide Sequence Number=SeqID_64505
atgcaggtggcagtccgcccgctcgctccgagcgccgtcggaggaggaggtgcgttttcggccggtcttgtccggtccgtgcgtgagtggagggggaggacgcatcggagggtaatcagcttctcgtcggcgggacaggggggcgaggaggcggcgcggcgcgagacgccggaggagacgcggaagcggctggaggagctggacgcgctgctggaggggctggtcgagcccaagatgcggccgccaacgccacctcctcctccggatccgtacctggaccgagccacgatgataactgggcggggatcatcagccgacgagctgccagagttttctccgacatacgtggcgttctcgacgcttggactcgtcatcctcaccatcttcaccaacgtcatgttcaacctgtacataaaaccctccgtggacggcgtcgatccaccgcctgaaagaatccagagaacggccctagtcaatccagcagacaggccgtccgaatag

SEQ ID NO: 22727 - DNA, 612 bp, Zea mays
  Peptide Sequence Number=SeqID_64506
atgttgagtgaacagacggcggctagcactagcagcggcgagcatcaggagaggagcgtcgtcgaggacaggcggctacagccggtgggggagaacgaggaggcggagttcagggacatccacgcgctgagcccgccgccgagccagccttcgtcgtaccgccggagcaggcacgcgtccgtcgggagcgacaccgcgtccagcgagcccttcccgaccatgagcagggagttctcggccatggtcgccgccgcagcagccatcgccaacggtgccgccgccgacaggctcggggaggccgaggacgaggagaccaacccgctggccatcgtgccggacagcaaccccatcccgtcgccgcgccgggcccggggcccgcccaccccaggcgccggcgccgcccacgcccaacggcgacggaagctcgaggagaagcgcgccaaggcgatggagaaggcgcagaacgaggtggccagggcgcggcacaaggcggaggcgaagcgcgcgtcggcggaggccaagcggggcaccaaggtcgcgcgggtgctggagctcgccaacttcatgagggccgtggggagggcgccctccgccaagcgctccttcttctga

SEQ ID NO: 22728 - DNA, 369 bp, Zea mays
  Peptide Sequence Number=SeqID_64507
atgtggagacaaaacgcggtgcgcatctgctgccagtccaaagcagtcgaccatatcaatgcgccgacgccagccagagccgcagaagcaagaactctcaaggcgcgccagaaggagtgggggcgcgttgagcggcaatttggccaccagccgttcagcgagcagaagatcccaatcccaggcttccagctaccccgtccactgaacttcaactgtggtccttcctggtccctcgaccgcgaccacccacaggacccacataggtcagctaggttaggtgggtccctgaagccagaactggcatctcttcaacgcggagcgcgtcgcgtcgaagccccacacacgacacaccacagaccacaggtctga

SEQ ID NO: 22729 - DNA, 465 bp, Zea mays
  Peptide Sequence Number=SeqID_64508
atgtcgcgcgcgttcgacgactactatatcgaggattgtggcatcttagcgtcggaggtgacacagaggaggatcgacaacaaatatggtagctcgtttagctcgcgagctggctcgttaacgaaccgagctggctcgttaacgaaccgagctaggatgtcagctcagctcgtgacaaaattcaaacgagccgatccgagccgagccgagctgaccacgaaacgagaacaacattcggtcattcagtatttagagggccgaattgctcatcacgaggaagagatcaatgagccgagggatgggaggtgggtgctgcggtggatgactggaggcgcgacgggagcagaagacgacgggcaaaagaaacagctacaagtagaagctggtctatccgagagcaagctggtcttgctccatgttcccccttttctccctgctcctggtcctgaactcctgatcgtctag

SEQ ID NO: 22730 - DNA, 1341 bp, Zea mays
  Peptide Sequence Number=SeqID_64509
atgcccggcataccgagggatgtcgccgagcactcgctggacatccgagctgcagcccgacccgtcaagcagcctctgcgccgattcgacgaggagaagcgcagagccataggcgaggagatccacaagctaatggcggcagggttcatcaaagaggtattccatctcgaatggcttgccaaccctgtgcttgtgagaaagaaaggggggaaatggcggatgtgtgtagactacactggtctgaacaaagcatgtccgaaggttccctaccctctgcctcgcatcgatcagatcgtggattccactgctgggtgcgaaaccctgtctttcctcgatgcctactcagggtatcaccaaatcaggatgaaagagtccgaccagctcgcgacttctttcatcacacccttcggcatgtactgctatgtcatcgtgccgttcggcttgaggaatgcgggcgcgacgtaccagcagtgcatgaaccatgtgttcggcgaacacattggccacacggtcgaggcttacgtcgatgacatcgtagtcaagacgaggaaagcctctgacctcctttctgaccttgaagtgacattccaatgtctcaaggcgaaaggcgtcaagctcaatcccgaaaagtgtgtcttcggggtgccccgaggcatgctcttggggttcatcgtctccgagcggggcatcgaagccaacccggagaagatcacagccatcaccagcatggggcccatccaggacctgaaaggcgtacagagggtcatgggatgtctcgcggctctgagccgtttcatctcgcgcctcggcaaaagaggtctacccctgtaccgcctcttaaggaaggccgagcgcttcacttggacccccgaggccgaggaagccctcgggaacctgaaggcgctcctcacgaaggcgcctatcttggtgcccccagctgccgaagaagccctcttggtctacgtcgccgcgaccactcaagtggttagcgccgcgatcgtggtcgagaggcaagaagaggggcatgcattgcccattcagaggccggtctacttcatcagtgaggtactgtccgagaccaagatccgctacccacaagttcagaagctgctgtacgcggtgatcctgacgcggcggaagctgcgacactacttcgagtctcatccggtgacggtggtgtcatccttccccctaggagagatcatccactctcgagaggcttcgggtaggatcgcgaagtgggcggtggagatcatgggcgagacgatctcgttcgccccctggaaggccatcaagtcccaggtcctggcggacttcttggctgaatgggccgacacctag

SEQ ID NO: 22731 - DNA, 345 bp, Zea mays
  Peptide Sequence Number=SeqID_64510
atgggtgtgcctaggggtgtcttgcgctccatcgagcgcaccgggctcggtgggtcgaatgagtcagggatctcctcggatgaggcagactcctccgactcctcagaggagtggagcggcgacaacggtgacggcgagggcgatggcagcgacaacgatagcggcgacggcagcagcgacgatagtggcgagggtgacagcggcgacggtggcaacggcagcggcgacggcagcgacggcagcaagggcgacggtggtgacggcagtagcgacagcgatagtggcgacggtgacggcagtggcaagggcgacggcaaggccagtgacataatgccactggtttaa

SEQ ID NO: 22732 - DNA, 2091 bp, Zea mays
  Peptide Sequence Number=SeqID_64511
atgagatcaaggagcacaactacttggtttttggctctcctccacttaatcgtgttttgcaatatcaccggtgtcagttctctgtccttcaagctgaacttcactgagtcaaacagcaacggagcagccacgatccagttacaggaggatgccttctacaacaaggcggtcaggcttaccaaggaagagctggacgggcagatcgctcacagtgtgggccgagcagtcttggcagatccggtgaccctctgggatagcagcactggtgagttagctgacttcacaacccgcttcacattcatgataaaggcccgtgttgcagatggctcgtacggcgagggcctcgccttcttcctctcaccgtacccttcagttgtccccaaaaattccgaggatggtaaccttggcctcttcggtagtagcagcgccgatcagagtagtgagacatccaaccagatcgtggccgtcgagtttgacagccacaagaacccatgggatccggacgacaaccacgtaggcatcaacatccattccatcgtgtccgtggataacgtcacatggagaagcagcatcaaggatgggaagatggccaacgcatgggtgacttaccaggccagctccaggaacctgagcgtcttcctgacgtacaaggacagcccacagttcagcggcaactcctccctatcttattcagttgatctcagaaggtacctcccggaaaaagtggccatcggcttctcagctgccactggccagctggtagaggcccatcagatactttactgggagttcagttgcacggatgtgcgggtggtgaagagcaagaaggcgaaaagtttattagtcataagcttgactactagtgttagtggcattgtctgttctatgggtttggtttggtgcttcatgagtttgaagacgaagcatactagaagggcaagaaaggatcaagggaagcaagaatacgacgagtctattgacggcgagttcgagaaagggaggggcccaagaagatttcgatacgacgagctcgtgtctgctacgaagaacttcgctttggagagaaagctcggagaaggaggcttcggagccgtttacaagggttccctgaaggacccgaacctcaccgtcgccataaagcgagtcgccaaaggatcgacgcaggggaagaaggagtacatctctgaggtgaagatcatcagccggctgaggcacaggaacctcgtgcagctcgtgggctggtgccatgagcgtggggagttcttgctcgtgtacgagttcatgccgaacaggagcttgaacacgcacctctacgacagcagcaacctgctagcgtggccgctgcggttcaagatcaccgtcggcgtcgcgtctgcactcctgtacctccacgaggagtgggagcaatgcgtcgtgcaccgcgacgtgaagccaagcaacgtgatgctggactcatcgttcaacgctaagcttggggacttcgggctggcacgactcgtagaccacgaccgaggctcgcagactacggtgatagctggcacgatggggtacctggctccagagtgcgtcaccacgggcaaggcaagcaaagagtccgacgtgtacagcctgggtgttctcgcactggaggttgcctgcggaagaaggcctgtcgtgctgaaggaagacgacgacaagatcaacctagtcgaatgggtgtggcgtctctacggaaggaacgagatccttaccgccgttgacgggaggctcgacggcgcgctggacgagcgtgaagccgtgcgcctgatggttgtggggctctggtgtgcgcacccagactacagtctccggccttgtgtccgccaggtcataagcgtgctcaagttcgaggcgccgctgccaagccttccaccgacgatgcctgtggcggtgtacttcgcgcccccgatccatctctgcaggttctcctacacctcctctgatgacggaacgctgatgaaggagctggaagggtccggcgtctacgcgaagacgacgacgacgatctcatccagcgcaaccaacgcttctagttcacctccctctgttcgtttaccacaaatgggttactag

SEQ ID NO: 22733 - DNA, 177 bp, Zea mays
  Peptide Sequence Number=SeqID_64512
atggcggagcttaccaaccgagacgacagtggcgggctccggcgagggcaggggggcgagacggggcgatgcaaggactgccggcgactggtaggcaccatcgtcgtgaccagagcaggaaaaagaaaagaaaattatggaaaagagagggtaacacctgaatttagtggatattag

SEQ ID NO: 22734 - DNA, 351 bp, Zea mays
  Peptide Sequence Number=SeqID_64513
atggctctttctggcgaggattgcatccgagatgggaggaattcctcacgggaattggattttgccgtcgtggctcatatccttccggggacagtgtccgcgctgataaactctggggaagcttctagtataagggatgatggacatagtgcgctgcgtggcacgggcgcactgtttgacaatggactagacagggtggacaggcggcgcgtcctctctgcaataaatgcagagaccgtgcgacctagaggacttacgtcaggctccgcccattggcttatgtcatgggctacaaaccacgtggcagcatcaggtctccgcctgagcggggagcgcaagcgcacaggataa

SEQ ID NO: 22735 - DNA, 457 bp, Zea mays
  Peptide Sequence Number=SeqID_64514
gagctgcagtaccgctccttctgcttcgaccccggaccggctggagcgcgtccgcgggctgacgcttgccgacggcgccctcggccgctgcaccaccttcgaggcgctgtcggggctcgtgtggcgtctctggcgtctccggcgagcctccggggcggcggcggcgcgctgtgcgggcggcgtcacggacgcgggcggcagcgcggacgcgggcggcggcgcggacgcgggcggcggcgcggacgtgggtgtgcgggcggcggcgcggacgtcgacgagggacgtgggcgcgctgtgcgggcgacggcggcggacgggcggcggcggcgcggtgggtgtgcgggcgcgcggctgtgcgggcgtgtgtgcgttgtgtgcgtccgtgcgcggggtaacggacgacgttagggaaattgaattatttccgacggccaaggtggtgggccgtcggaaatag

SEQ ID NO: 22736 - DNA, 909 bp, Zea mays
  Peptide Sequence Number=SeqID_64515
atggatgtgggcggcgctgctcctgcccacagcggcttagtcgccggagttggggcgggtgcagactccaggggcttcaaggtcaccggagttggccaggaccggcgagaagggcccggaatacgaagagatccttactactacataaaggaaagcctcgagggatccttcttgccacattttatttcttattccctcaagccttccaagacaaccccaacttcccttgcttcctccaaaggttccatgggcgacaacaacaagaagaaggaggaggaggacgacaatgatgatgaggatgacgatgatgatgatgtggagggcggcgacgaagacgacaaggaggagggcggcagcgatgatgatggtgacaacgacggtgatgacaaaggcaatggcggtggcagcgacgatgacgaggaatctcgagagagctatgacatctttcgtgtggcacaggaggccgctaaggccgagctgctttgggctcaacttgccgaatccgatgctttggaagccgagctagagaaattatgctgccgcttgggtcagatctcgaattacgtcgaggatcatggttcctctttggtggagcctctgtacaacgtcttgtcttgtatcccagatattattgactttgtcattcatcgaggagctgccgtggtactgctcattggggagtttcggtccggctgtggccttcgggatgtcgttggccctctttcgtccctttcggacaaagggctggaggacgtgctagagggctacgacgaggcagttggtcgtgttgctgcccactctactgacctccgtggaatggtcagtgaaagacctccaaagggacctaggggcgggaatcgccacttgcgcctccttgacatcccggaccgtgttctcgaggccatgtga

SEQ ID NO: 22737 - DNA, 432 bp, Zea mays
  Peptide Sequence Number=SeqID_64516
atgtcgcgtcttctcgactgcggaaccagtgctgcgactcgaggcggcctcgcgcatgacccaacagtgccgatttggtgcagcggtcacgggtcagtcagccgcggcgggactaagaaaggggatattttgaaagggatccttccccgcgaaggaaacgggcccccgagccctcctactgatcaggggttcgaaggctggcctctcggaagggctggcccctcgaaagggttcgacagccgccccagaacacacagagtgagggatgaccctgggtacgtccgatacatggccgaggctcgggctacgctcccgagaggctcgggggctgctctcgcacccggctacggccaaactgttgacagcgtcaacgaaccagctttaaaaactcagaacctgatcgtgcacccgggctacggccaggccgcatga

SEQ ID NO: 22738 - DNA, 606 bp, Zea mays
  Peptide Sequence Number=SeqID_64517
atgagctccggtgacggcattcgaacagcgaggcgtggaaggtccagtcggggtgctgcgtggatgggcggtcatcaatgggggagagagagtaatgggggaaggagtaacggctactttgaagctccattaacgaaggagaaacggacggtcacggcgcgggctgctcggtcgatcttcggtgcacgtctgctcagtcgcggggtctttagccgacatcgggcgttcggggtcgcggtcctcggcagctggagcggagccgagtcctggcagggtcagcgttccaggcgcgcggcatcggacggctctagcgcctgggcagctcggcgggcgctcgggtcgtcgcggcgtcctggcacggtcgctcggtcggacccagggctccctggcggtgctggtctgggaagggaagagggaagggcgcgggttcctggcgcgcttggcttgagcgcgggtcgcaggggcacggcacacgggccagggtactgggcaggcatcgaggcttgctggcgtggtgcttctggcggcatcgggcacgtgcaggggcactggtcgcggtcacgctggttcctggcgcgggtagcggcgtcggcttcggtcgggtga

SEQ ID NO: 22739 - DNA, 420 bp, Zea mays
  Peptide Sequence Number=SeqID_64518
atggcggagctcggcagtagacctcaccgtggactcaggagaccggcatccccaatcgtagcgagagggacgaccagcgggacacagtccaagcggcaaggcttccccatggtagatacgaggcgatttctagagttcaattatcctgagatgtgtgccaagattatcacgatgcagtctcagtgttcacttctcaatataagctactgcccttcgactgaggaagcaatttcagcaacaaagcgtttattgtttacaaatcctcttggatgggaacgtagtgacttcataagagttcctatcaaagatcctaagaaacagtttctggtttatgggtctagcagagccagaaatatgaggcggaggggtgattctattacaggaggaggagggagtgattcttctggaggtggaggatga

SEQ ID NO: 22740 - DNA, 291 bp, Zea mays
  Peptide Sequence Number=SeqID_64519
atgggggtatcactgtgtttacaaattccagatcgcaacgtcaacgccgacatcgacgacaacaagatatttgctctggcaactgttttaagttctgttctgatctacaatcttcctgaaacaattcgtgaagccgatatatcgagactttcatttgccgtcgaaattgctgaagaattctatggaagtttgtcctttgctaacatatttccattttgccctttagcttgtggtaaactagagtcaaggggcaagatgtttcttttgagccagccaaacttctgtggttga

SEQ ID NO: 22741 - DNA, 321 bp, Zea mays
  Peptide Sequence Number=SeqID_64520
atggagcgtactcctcctgttgaagttgtagccaaggcgtacgacgtcgcgtatgcagttgtcgtagctgtagtagaggctcgttcggcggtcgtcattgcgcagaaggaggcagtggcagttgtgcaatatgcagccattgatagcaacaaggttgaaggagtcgtcaattcaatgaaaaactcaacctttgtttatgctaacacgagtgatgatgctttggacaatgttgatttcaagtatcatgttagcatcaagaattcccttgtgatacgctattcaagagatgataagacaatcaacattgttgcataccattaa

SEQ ID NO: 22742 - DNA, 225 bp, Zea mays
  Peptide Sequence Number=SeqID_64521
atgtcccaggacggtggggggtgtttcgcaaatactcagagcctggttgatgagatactcgctagttactcgactgtgccttcaaggaaggtctggaacctgagaggatgcactcaatgtgtacgagcttgcccaacagatgtattagaaatgataccttgggatggatgtaaagcccaagcaaattgcttccgcgccgagaaccgaagattgtgtgggttgtaa

SEQ ID NO: 22743 - DNA, 1356 bp, Zea mays
  Peptide Sequence Number=SeqID_64522
atggcggtggaggagggccgacgagggcggcggcgccacggagcacccggtcgaggtgatcggccgcatccggaacctcacctcgggtgtctcatccgcgctggagttcgcgtggggcgggacggccgtgccgtgcgcggcgacgccgacgggtgtcgcgacttcaccctcgacggcgtctctgtgtcggaggaggaggacctcgaggggttctaccgccgagctgtctatagatgttcttacatgtttgcaatttgcgtgctagctgtgttgagcatattgattaagcttggcatccgagctccccttcgtttcaccctggtcctctgcttggcatctgagctcacaccgcagcatttcggtgggtccacggggtacgaccacgacgacggtggcggccgggaagcgttggactccgtcttcgccgacattgttggcgcggaggctgccattgtgcgcccgcagttcttctccggtacccacgccattgcctgtgcgttgtttgcgcttctgaggcctgggcatgagctcctggcagtcgctgggcccccgtacgacactttggaggaggtgattgggatcagggggtcggccaatgtagggtcactcaaggatttcggagtgacgtaccgagaagttccgatgcaaaatccaaactgcatggtgatggttgataattgctatggtgaatttgttgagatatcggaacctgcaatggtgggagcagacttgattgctggaagtttgataaagaatccaggtggaactattgcgccttgtggtggttatgttgctgggaaggagcatttagtcgaagcagctgcagcccgtctatctgcacctggccttggggtggaatttgggtcaacacctggccatgttatgcgtgcgctgtttcaaggcctgtttcttggtccgcaaatggttggagaagcagtaaaaggaggtttgctcattgcggaagtcatgtcagccaagggatacaaagttgaaccacttccgagggttcctcgtcatgatattgtgcagattgagatgacaataacaaaagcgaaaattggagtagatccctcaggatgtgtcgaactagcaaagcatgtcagattgaacaaccctaaccttgtgttgtctggtttgatgataattgggatgcttgattactcctcaactccgaagaatttcaaggcactagccaactgtcgggaagatgtgtgcaaggagcttggaataccggaagagcagctcgaactatttgtggacatgtcatctgactttgaacaaacaattgaaatgggaagcacaaatgtaagagttgggtcaaccatatttggtgcaagagaatacccaaagaactag

SEQ ID NO: 22744 - DNA, 666 bp, Zea mays
  Peptide Sequence Number=SeqID_64523
atggtgggtggatccgtcgagatcctcggttcccttgcgatagaagcggatggcgggcggcacgataggcgagaggtagagtgggcagggaaacacgaagggcgggatggcgggtggggaaacgcggagctcgacgcgagaggggcgggtttgcagagctgggccggccaagatcctcgcatgtctgcgaggagagcaggctggaggttggcaaggctcacagcgaggagatcgagctggtggttgcctggttggtgcggagctcggccgaccgagatcgtcgcgacgaggaggatggaggttgccgagcgcatcggggacgccgtggatcctggagcgcacgaaccggcggtagaacccctcgaggtcctcctcctccgacacagagacgccgtcgagggtgaagtcgcgacacccgtcggcgtcgccgcgcacggcacggccgtcccgccccacgcgaactccagcgcggatgagacacccgaggtgaggttccggatgcggccgatcacctcgaccgggtgctccgtggcgccgccgccctcgtcggccctcctccaccgccatctcccgtcgcgtccaccgtgtgctcagcaggcgatggagtcgccaccaggtgtcgcggcgtggctggaggcggagcagaccgccccgtcttcgccctag

SEQ ID NO: 22745 - DNA, 1047 bp, Zea mays
  Peptide Sequence Number=SeqID_64524
atgaacgaggcggtgcaggaggcgaagctgctgcggcaggtgaacgcgctcatcgtggcacacctccgtagccagaacctcgggcaggccgcagccgccgtcgccgccgccaccatgacccccatctccgctgccgaatccgtccccgccaatcacctcctgcgtctcgtggccaagggcctcgccgcggagcacggaggaggtgacgccgcttccgcattcgactccgccgggttcggtgtggcggtgcagccgcccggctccagtgccgtggatttcagtattcaggatgtcaagggctcatccaaaagcttccccaagcacgaggtgaagcatgtctctgaccataagaacgctgcccggtgtgtgaaatttagtcctgatggaaagtattttgcaactgggagtgctgatacatccattaagttttttgaggttgctaagattaagcagactatggtaggagactctaaagatggccctgccaggcctgtggtacggacattttatgatcacacacaggccatcaatgatctggattttcatcctgagagtccaatactgatatcagctgcaaaagacagtacaataagcttgtatgtgactgcttctaaagatggttctctgcgcatttgggatggagtatctgctgaatgtgttcgacctattattggagcacatggatcatcagaagctattagcgcgattttcaccaaagatgagaggtacgtcctatcttgtgggaaagattctcgtgtcaagttatgggaagttggcactggacgacttgtgaagcaatatgcaggagcaattcgcagacaatttcgttgtcaggctgtcttcaatgaaaccgaggaatttgtgctatcagttgatgaacaaaacaatgaggttgtcgtctgggatgcacttactgctgaaaaggttacaagattgccttctggcagcactggtgctcctagatggctcgaccattccccagttgagccagtttttgttagttgtggaaacgatagatcgatcaaattctggaaacaaaccgtataa

SEQ ID NO: 22746 - DNA, 1533 bp, Zea mays
  Peptide Sequence Number=SeqID_64525
atggctttctccccgcgctcgccgtggtcgcgtgccaagaaaaccgacgtctactcaaccttcgttgtccacggcgatgacgatgaagacgacgcccgcggcggcaggggcccctccacgcgggcggaggaagacgaggaggaagacccctcctcgctgcctccgcttcttcagcggctccccaaggactttggcggcgcctcgttcgacgacgacgaggacccctactcctccgaccctgacgatgcttccctctctgccacggcggccttcaagagcggcgtcccggcctccggtcgatctccgttcctggatctgcggcgctcaagcccccgcgctaccgatgacgacccgtactctaccttcgtcgttcattccaccacacgctcggggagaacctcctccagccctcgcgggtccgcctccggcacattcatccgtcgctcgggtggctcgtctagccctcgcgagtccgtctctggcacattcatccgccggaccggcagcccgtcgagccccgggaagtcagcctccggcacattcatccgccggccagggagcccgtcgagcccccgcgggtcgttctctggcaccttcattcgccacaccagcgggggctccagttcccatgaatctgcctctggcggcggcgggggtttcgggtcctctttctggactccagcggtggagcagtcagaggagctccggcagccatcgcctctgatgcagcaacaacagcaacaacattcaaggcggaagccatcggtcagctcggtgccagacagtgttaccagggaggatccttccaccaagtacgagctgctccatgagcttgggaaaggttcatatggtgcagtgtacaaagcaagggatctcagaacgcaggagcttgtggctgtcaagatcatctcattaacagaaggggaagaaggctatgaagacatacggggagaaattgagatgctgcagcaatgcagccatccaaatgttgtccgctactttggaagctaccaaggagaggagtacctatggataattatggaatactgtggtggtggaagtgttgctgacttgataggcatcacagaggagcctcttgatgaatcccaaatagcttacatttgtagagaagcactaaagggccttgcttacctgcactccatttttaaagttcacagagatattaaggggggcaacatccttctaactgagcaaggcgaggtgaagttgggtgattttggtgtagctgcccagctgacaagaaccatgtcaaagcgcaacacgttcattggtactccacattggatggcaccagaggtcattcaagaaagtcgttatgatggaaaggtagacgtttgggcattaggtgtatctgcaatcgagatggcagagggcatgccaccaagatccactgtgcatccaatgagaattgatagactggctaacggtctctcttccccctgcctatctcaggttatcttcatgatatctagtgaaccagcacctatgctggaggataaagagaaatggtga

SEQ ID NO: 22747 - DNA, 471 bp, Zea mays
  Peptide Sequence Number=SeqID_64526
atgaaactgacagcagctgagtccagcctcaggcgccacaggaagctccgcctcgcccgaccttgggcctcggcctcaggagaagtctccgtctcacccgaccccagggctcggcccccgcctcggcctcggaaggtggtctctgcctcgcccgacccagggctcggcctcaacctcgacctcggaaggtggtctccgcctcgcctgaccctagggctcggcctcgacctcgacctcagaggatggtctccgcctcgcccgaccccagggctcgacctcaacctcgacctcggaggatggtctccgccctcgcccgacccccagggctcaacctcgaccccgacctcagaagggaaatcgcgtcctcaccccaaccccgacctcggcctcaggaggagttttccgccttcgcccgaccatggtctcggaccgaccacgccacaggggggatcatcactaccctacccctag

SEQ ID NO: 22748 - DNA, 726 bp, Zea mays
  Peptide Sequence Number=SeqID_64527
atggttcaggagaatctaaagatagcacagtcaaggcagcaaagttatgcaaacacaagaagaagagagctatgttttgaagtgggagattttgtcagcctgaaggaagaagcaacgtgggagcgtcaagatgatctaatggccaagtatcctgagctctttgctgcgcggcccatcctggccctggcccgtgcccctgcccccctatgcgcgtcctactcccctttcccacacacccatgatctaggaagagagaaaactaccctcttcatcctctctcccactctctccctgccctcgcttggatccctggtgagcggttgctgtcgttcgtcgagccccgtggtaatctcctccctctcctcccttccctcctccttctcccctgcccggtgcacccatcccgcagtagcccctacacgcgccctcccccgccacggtacgaccccctacccggcggccctccctggccctgatccctctatgtgcccgccttggcgtggcggtgccctcccgcagtggcctcctgcccctgcccaacgagcccctcctagcgtggccctgccagcccggccagcccggccccgtgcaacccctatcctggcggtcgcctaccctcccagtgtggccccacccctgcacggcccctgccccgacgaccgcctaccctcccggtgcggccccacccctacgcagcccctgccctggcggccccctaccctcccg

SEQ ID NO: 22749 - DNA, 204 bp, Zea mays
  Peptide Sequence Number=SeqID_64528
atggccgagaatctcgccggcgccgttgcccgagatccctggcagcacaaccggggtagcactgtccaggtcagtgttaagatcttccaccacacctacaagggtgttgaggggcttgggcgactggcacaggtggtgctgatgaagaagctccagcagcaaaggcatgaagtgctggggacggagtgggtgaaagtcgcctag

SEQ ID NO: 22750 - DNA, 447 bp, Zea mays
  Peptide Sequence Number=SeqID_64529
atggcgagggcaggcgggccacgcgcgacggacggcgagggcaggcggggcgcgcgcgacggtgagggcaggcggggcgtgcgcgacggcgagggcagatggggcgagcgcgacgacgagggcaggcggggcgcgagtgcggcggtggcgcggcgggattgggacgcgtgcgagaaggttcaggttgcgtccctgagggtgtccgcatgctcaacaccatcggaacaagccctcgacagcgagtacgcatggctccgaccatgcgcttggcgcgccgtcgccagggacttgatttgtgaaggaatagaaatgcaggggcttaagtgcaaagaaagcgaggaagaaactgtggttgaagaagttgtcactcaagctgagaatcctccagctgagaataacttctacttcgccatctgtggagtagacccagaaccttctgcaacataa

SEQ ID NO: 22751 - DNA, 1647 bp, Zea mays
  Peptide Sequence Number=SeqID_64530
atggacggcctcgtggcgccgtcgccatcccactccggcgccacctccggcggcggggcctcccaccgcaagcggaagctcccgccgtcgtcgctctccgacgccaccggcgacgaggacgacgacaccaccgctccgtcatccccctccacggccccatcctcgccctctcgcccgtcatctccatcttcttcgcactccgacgatgacgacgacgactcgctccacacgttcaatgccgcgcgcctcgacggcgcgccgagtgggggctctgcgtccggccgtcctcctaagccggattcctcatcagtgtctgctgctgcggcggcagccgcggctgcggtgggtggaggacctaagccggagcccggctcggcgaacgccggcgacgggaaggaggacacaaaggggctgttcacggacaacctccagaccagcggcgcgtacagcgcccgtgaggagggcctcaagcgcgaggaagattcaggaaggctgaagtttctctgttattctaatgacggcgttgatgaacacatgatatggttggtagggttgaagaatatcttcgcccgacagcttcctaatatgcccaaagaatatattgtacgccttgtcatggatagaactcacaagtcaatgatggttatcaggaacaatattgtcgtggggggcattacttatcgcccttatgcaagccagagatttggagaaatagcgttttgtgctatcacagctgatgagcaagttaaaggctatggaacaagattaatgaatcatttgaaacaacatgcacgggatgctgatgggctcacacatttcttaacctatgctgataacaatgctgttggctattttgtaaagcagggtttcacaaaggagatcacattggacaaagaaagatggcaagggtacattaaagattatgacggaggaatattgatggagtgtaaaattgacccaaagctgccatatgttgatgtggcaacaatgattcgacgtcaaaggcaggaattgattttcaaaagggttgagatacttgagaacgctcaggcacagtaccaggctccctgtcgcgctgcactctcgtacagccgcgctgcactcatgcacagccgtcgccctccagtgtcctgtcccgcacagccaccggcgaacaggaacatggagtcgccggcgcgcaaggaccaggggccgtcggggacactactgcagcccctgctgtcaccccaagacagagccgccgcccccgcccaacggcccaaaacagcccctgccatcacccaaggagaaagaagctggcattccaagaagactgataaagccagaagatatccctggtctcaagaaaatctgaatgaacatcctgatgcttggccattcaaagagcctgtggattcacgggatgttccagactattatgatatcatcaaagatcctattgatttaagaacaatgttaagaagagtcgactcggaacaatattatgtgaccctagagatgtttgtagccgacatgaagagaatgttcagcaatgcaagaacttacaattctccagatactatctattacaaatgtgcgacacggcttgaaaacttcttctcgggcagaattactgtactgcttgcacaactctcaaccaagagctag

SEQ ID NO: 22752 - DNA, 441 bp, Zea mays
  Peptide Sequence Number=SeqID_64531
atggtcaaggaacacatcttccttgcctccctcagcaacctcgaccatgacaccaatgacacttcttctttgagcaacgatgagttcaagatgcaagttgaggacaagctcaatggagtcttcttcttcattgacaccgcgtgtagcctctacaccatggcacttggtgaggacatagtgggcagcaatgataagaacatcgacgacaactccacctctgaggtatcactttcaacagatgatctcaccactgaggataagttacttaggcttctatctcatgagagaaaagagtacaagtgcaagtacaaggccacacatagggagcttaagtctgctagagcttctattgaggtgtatgtcaagactgaatgtaatgagtgtgctattcacatgtcgaactaccacattgtagaccaaatatgtcatcctgctagatga

SEQ ID NO: 22753 - DNA, 336 bp, Zea mays
  Peptide Sequence Number=SeqID_64532
atggtcggtcgcgttgatgagggaaagggccaggaaccgttgatctcgagttggatggttcggattagatcatggggtaccccttcgtggcaacgagatatggctgttgatcggctatcgggccacttcgaaacgttgcgggtgcctcaactgtctatcgcggatccgacgctcctggtggcataccgatttagagcggatggatctgatcggatgagcaagctactgaggacccaggtgttcagcaggtggagactgttaagcaggagctcgttgaaggtagtacctgctattgctttatgtggttttgggtatggagatacacattattcatga

SEQ ID NO: 22754 - DNA, 1473 bp, Zea mays
  Peptide Sequence Number=SeqID_64533
atggccacgagcggccccgtccttctggtctcgcaggcgcagcagcgcaagtcacggacctacaccccgagcccatggggtgacttcttcctccaccacgtcccatgcactccgtcacagctcttgtccatgaaaggagagggcaaaggtcaaggagcaacaagtgaggcagatcatacacgaaacgatcgcctccctccgaccctgcttcatgtgttcgagaaattcagggacgagagcggggccatcgtctcaggcgacgatgccagctgcttgctcatgctgcatgacgccgcgcatgcgagaactcacggggaggagatacttgacggcatcgtcgcttggagcaagagccgcctgcaatccctggtggtgcagaagaacctgctggagccggagcttgccgaggaggtgaggtgcgctttggagacgccacggttcaggcgggtgaagagggtggaggcgaggcgctacatccccgtgtacgagaagaagagcacgcgagatgaaaccatactagagttcgccaagctggactacaacatctcgcaagccatctactgtgatgagctcaaagaacttacaatatggtggaatgatttccgattgcatatagacctgagctttgcgcgggacagaatggtggagcttcatttctggatgctcggagtaatacatgatccctattgctcacggatcatgatagtcaagatcttcgtattcataagcttgtttgatgaccttatggacaactatagcaccacagaggagagcaatgtcttcaccgcagccatggaaaggtgggacgaacagatggcacagcagcttccagcaggcttgaaggcactcttggtcaggatatttaacgctacgaacaagatcgaggaggagttaaaacttcaggggaacatgcatgctgaactcatcaaaaaaatggtgattaatagtgccaagttctaccatgctgaggtcaaatggcgcgacgaacacttcgtgccaactagtcttgaggagcacctccaaaaatctatccctaccagtgcttgtatgcagatggcaaatcttgcgttggtttcactgggaaatgtgactactagagaggacgtcgagtgggttttcaccttccccaaaatcatcagaggtgcttgtattgtgggccgcatcgccaacgacatcgtgtcacatgagcgggaacaagcttcttcagaccatgtggcatccacggttcaaacttgcatgaagcagtacaacgtgacaataaaggaagccaacgagaaacttagagcggtaatcgaagaggcatggatggacatcgtccaagatagcctcgagcaggaacgccctagagcacttctcgacatagccatcaatgttgcacgagttgcagatttcatgtacaagcgcgaagacgcgtacacgctctcattcgtcatcaaggacattatagcttcaatgtacatctattccgtgtga

SEQ ID NO: 22755 - DNA, 279 bp, Zea mays
  Peptide Sequence Number=SeqID_64534
atggtggccgagctctgctgggggcggattcgggcgcaggaggcctggcaacgggggagctccagtgagcttggagaacgcgcgcgtagcgcgggcgatgtgggcgcggcgatctcggcatgcgcgcgtgcggtccgcgtggatgagcggttgaaggaggggagagggactagcaagcggggcctgcgaaacagcgacatggatgcaccagcgcgcaacgggccagggcgccaacaaggcggccctaatgggcagagagggagagggtcggcgagctag

SEQ ID NO: 22756 - DNA, 345 bp, Zea mays
  Peptide Sequence Number=SeqID_64535
atgtcgagagatcacgccaagaaggagatggtgaccggcgagaagcctgccacaagccacgggaaggctccatcaggagagtccggcaacaagatgaagggatccccttcacacaacaagactgaaaggaaatgtgcccttgggccatttctaagtattttggtgatcatgtgccaacacaaatggtttaagtatgaaactatgtcaaatggtggaagaagtgcaaatcgacacaaagtctgggtgcaccggactgtccggtggtgcaccggacagtgtctggtgcgccaggctggctctggtgaaaaggctgctctcgggatttcatcggcggcgtacggctaa

SEQ ID NO: 22757 - DNA, 753 bp, Zea mays
  Peptide Sequence Number=SeqID_64536
atgtcaaacgctggcgaggcgagaggagtgggaacgggccgcgggtcgcggctgccgcggtggacgcggcaggagatactggtgctcgtcgaggggaagcgggtggtggaggggagcgggcgcggccggggccgcggccggtgccgcaagcgctggagcaacctcgccggagactacaagaagatcagggagtgggagcgcgggtacgcggccaggaaggaggcctccttctgggacatgcgcaacgacgcgcgccgggagaggcgcctcccgggcttcttcgaccgggaggtctacgacatcctcgagggccgcgccggcggtaatgcggcggcgctggaggacgtggacggcaaggaggaggaggcgaaggcggtggtccacgctggccgcgcggtccaacggggtggcctcttctcctcgtctgaggacgaggatgaccaagaagaagacgcggccacgccaagcccgacgccggcgccggctgcggtggccgtgccgatccccggagagcaagctgttgctgttccatccttcctagaaatggcgcgtgcctcctctctttcagtgcacgctaacgataaggatgtactttggtattgggattgttacttgcctgacaaaagctttgcattctgcttacagttacagagaagacgactgatgtgcccaggcaagcgagctccgagcaagtcttgtgctgctttaaagctgtatgagactgagttgtccttttttatgacaaccgattag

SEQ ID NO: 22758 - DNA, 777 bp, Zea mays
  Peptide Sequence Number=SeqID_64537
atggagtcaccatggaggatgaagagcgacgtgttagacttggcttcaacaaagcctagggtcttcgaggcacaaattgatggtacatgtgttgttgacgaccaaagcctagaactccttcatggtgttgtgctagtgagggtcatcgagggtgctgcaatagacattacactggctggtagcagaggagtggctataaacggtaaactcgttgtgcgaggccagctggtgccccagcaccatgttctagggtcgtcaagacttggtgcaaacggtcctgctgaagtagggcaattcaccgaggcggggggatatggcctatgcagtggaggtggctcatcaatgaccacaacattcaaggtgaggggcattgtagggggtccaggcactcgcttgacaggaagcatcgaatcctactatgggaactcatccaaaaaatcaaagttagaggaagttgccaaggtggtggccttgacaaacgggaaaggcgcgtcaaacgaaaagcagtcggagcagatcaccgaggactcaccaacgcagtgtgggcagaagaggcagcgcagcgacgacaatgcctctggagaagccacgaccaacctgcaggggcagctggttgagatcctagaccggagcagtcagatggtggcggcgcagctagaggcgcagaacgtcaacagccggttgaacagggagcagaggaaggaccaagtgagcagcctgcttggtgtgcttggcaaggtggctgatgccctctacagaattgctgatgagctgtag

SEQ ID NO: 22759 - DNA, 312 bp, Zea mays
  Peptide Sequence Number=SeqID_64538
atgggccgacgccattaccgcgccccttctgatgtgctggccgacgtcgtcgctctggcagatcgtggttcgtttctgagcttcgaggactcgacggtcaagcttcggcgaccaaataacccagctcttcgagttctacaagatgatgatgaggaggatggttatgattatgcttatggtaatggtaagtggtattctttccgcttggaaagggttgcctttggtgcaatctatgctcaggtaaagaagaaggagaacggtgtcgaggcggatctccaggagttccatgacttcgacgagttcgaggattag

SEQ ID NO: 22760 - DNA, 522 bp, Zea mays
  Peptide Sequence Number=SeqID_64539
atgtccggtgcaccaggcccgtacggggttgaaccagccactattgggtttcagcaggcgcgctccgctatatttcaccggactgttctgtgcgccacaggactgtccggcgactttcaccgtcaccaagaagatcgaggccaggaaccccatctccactgggaggtgcacgctgaagacaatcttaaagagacgaagaaccataactataagagcaacaaaagaaatgataattcaaagtcaagatcaaggaaaaaccactataactgtggcaagaatgggcattttatttcaagttgcccttatgagaagacgaaagacaaagaagaaaagaacgaagagaagaagagctatgtcaagaataaaagttattcaagaagaggcatagcggtgaagctcatattgggaaggaatatgactcaaatgatgagagttcagactcttctaaagagaaaagcattgcaacattgtccttcaacaagtcatcactcttacccaagctcaagcatacttgcctcatga

SEQ ID NO: 22761 - DNA, 816 bp, Zea mays
  Peptide Sequence Number=SeqID_64540
atgtgcaatcaagtgaacacaagttcaatagaaaagtacaaacaccagagtgaaatcaagattctagggggcttggctgcaaactccagggacgacgggttactcgagaaccgagggttcattttacaaaactgcaaaccgaaggggtatcgggtcctgccagtcgttagatctgagatcaacgaccaggatttgaactggcagtcgggcgcgcgagtgcggacgcctgacaagcagggcccactggccagcggctcaggcggggcagagggtgagcgacggagcactagagtgctggcgcttgatgggcggggccacggcaaggccgggcccgctagtcagcagcgtggggcaagcgcgggcgtgtgcgcggatgcgtgcagacggacagggcctgccagtcagcggcaaagagcgggggaggggcccgacgctgcacgcggtaccgacgcgcgggaccgggggtccacaggtcagtggccgcgcaggggaaaagaaggggagggagggagtgaggctactgggtgggccacgaccgtcagggccatcttcaaccccgagccgggcgcatggccggccatgctcgatggcgagggtgccttctgtggggcgcgtgagctgcggacacaacagtggagtcacctgggaacacggccacgacgaagggaggaagaaagggggagaaaggagggagtaatgggctcaccgcggatgacgccggcgagcttgattgcgtggtgctccggcggcacaaacgtcgagggtcgacgggcgacgacaacgaccaaggcaaggacgacggcgcggggtggttag

SEQ ID NO: 22762 - DNA, 423 bp, Zea mays
  Peptide Sequence Number=SeqID_64541
atgaggcggtggcgtggcctcccggagtcgacaaagcagcgaatcggcaaggaggacgatggcctagcccccgattctgcgaagcagcgagtcggcgacggaggcgatgtcttagcccccaaaccgttaaagcagcgcgtcggcgaggtagaagatggtatagccttcgagccgacaaagcagcggatcgacgaggcgggcgatggcctacccctcgagctggcaaagcaacgcgtcggtgaggtgggcgatggcctagcctttgagctggcaaaacatcgcgtcggggaggtaggcgaagacctagcccctgagccggcaaagcagcaggtcagcgaggtaggcgatggcctagccttcgagctggcgaaacagcgcgttggcgaggcaggtgatggcccaaccttcgagccaatgaagtag

SEQ ID NO: 22763 - DNA, 171 bp, Zea mays
  Peptide Sequence Number=SeqID_64542
atggcattgtatgggtacaccatatcgactatgtcgaaggtcccaccctacgattctgcaatttatgaccattgcgtctgcatggggcgcactgtggaggtcgacgtctcttgcatcgaaggaggcttcggctttggcataaaggtcttttctcatggcaaagacatatga

SEQ ID NO: 22764 - DNA, 363 bp, Zea mays
  Peptide Sequence Number=SeqID_64543
atggctgggcgaggctacgacgagcgacgatgggtgaaggggacttcggtgatgatctcacggcggcgggagacacacggagaaatgcctgccacacacgctgtcacggacgaaggcacgatgacatcgatgatagtgtcccagcatgctcgagccttggggaagcacacacgtcattcggggaagcttgaggaaggcaacagtggtcaaggttcacgcggacgaggatggagaaggcgtggccacgaagctatctaccggcacccatggcgacgcggtgttgaggtggaagaagagggcatgagcgcgaggggaaagagtggcgagtgcaggaaggagtggagatgggcatgcgctcgatga

SEQ ID NO: 22765 - DNA, 372 bp, Zea mays
  Peptide Sequence Number=SeqID_64544
atggtgatccgcaaggagaggccaaatgtactaaagactgcaacctgtatctacttgaacaagagaatgtttacgcttaagatggcattcacgtttcggccgttcagaacactcatgaggggtggaatgtcgagacctccaggtggaagggcacttggtcaccacggcaagacgcccgagggaggcacaagttcggggcagaagggcaagggtcattcgtcatcaccaaaggtgggaagcccggaacgtccaattcggccatcaatcaaggcgagatttcaggcaaaggtccgaacttcaatcagccacgtcgctcaggccctttcgatgtctgcaagttgttcatatccttcgcacttacgcaaagtgtag

SEQ ID NO: 22766 - DNA, 1443 bp, Zea mays
  Peptide Sequence Number=SeqID_64545
atggcgtcagcggcgaacaccatgccaggcaagtctgttgtcctcctctcgctcgtcacgcttctcgtcgtcctcatctccgccgcggagagctacgacggccggtatgccgtctcgcactcggccatggcgcgccgctcccgcctggggacccggcacgcgcatcaccgccggacaacggtgccgcaccggtacgtgctcgcggagaagagcagcgcgcccagcggcggcggccccaagaaccacagttcgccggcgaaggccaacgccagctcgccggcgccggcgcctccggccgccgagcagactggccggcaccaccgcagccacaagaaccgggtgcgcaactggatcatcggcttcgtggtggggtccctcgccggcgtcatctccgggatggtgctgtcggtgctgttcaggctggcgctcaactgcatccgcgggcggtaccggacgcggtccggcgtgatgatcttcaccccgaagctgatcaggcggccggagcacctcgcgttcctggagaaggaggacgggctggcgtcgctggccgtgatcgggcgcggcgggtgcggggaggtgtacaaggcgcagctgcccgtggagcgggagggggagcagccgcgcttcatcgccatcaagaaggtcaagaagcacggcggcgacgcgcccagcaacaacctgagcgatgaggagagccggcagctggacaagaggtcccggcagatccagtcggagatccggacggtggggtacatccgggcaccgcaacctgctgtcgctggcggcgcacgtgccgcgcccggactgccactacctggtgcgctgaaagccgagaacgccgaggccgaggacggcagcagcggcagcggcaccggcgccggcgggctgtcgtggcccgcgcggctccgcgtggcggtgggcgtggcggcgggtctggagtacctccacgtctcccaccagccgcagatcatccaccgcgacctcaagcccgccaacatcctgctggacgacgacctggaggcccgcatcgcggacttcgggctggccaaggcgatgccggactcgcacacgcacgtcaccgcgtccaacgtggccggcacgctgggctacatcgcgccggagtactaccagacggtcaagttcacggccaagtgcgacgtgtacagcttcggggtcatcctggcggtgctggccacggggaaggagccgtccgaccagttcttcacgcagacggaggaggtggtcggcctcgtcaagtggctgcgccgcgtcatggaggccggggagcacgcgcaggccatagaccccgccatcgccggcgccggctacgacgagcagatcctgctgctgctgcgcatcgccttgttctgcaccaaggacgaccccaaggagcggcccactgccaaggacgtccgctgcatgctgtcgcagatcaagacctag

SEQ ID NO: 22767 - DNA, 240 bp, Zea mays
  Peptide Sequence Number=SeqID_64546
atgagtgaggacaaactgcgcacaaaagactcgtgttggtctgtggggatggtctatggtcctagagggctgccaggattaagtaccactgatacgggagtggatgtggtgttacatggtgtcatcgtgaaggaaagggaaaagctacaaaggttgacacagcgccgaagctgtgaagcaggaaagcttcggcatgttcgcagaaaagggaaccgacttaaagatgaaaaggccatttag

SEQ ID NO: 22768 - DNA, 828 bp, Zea mays
  Peptide Sequence Number=SeqID_64547
atggcgtcggagtgggaaatggccatgggggtggagctcggcatgggaatgggcacgtaccactaccaccacaacgcctccagcatcaccaccgcgccgatgagcagccaccacagcggcggcgccagctactccacgccgcaccaccaccactactatgggatgccgcccacgggcggcgccggcgacgccatgcgcgtggacgaccttctcgacctctccaccggcgccggcgccggcgcccacgagttcttccccaccgcgcctgcgcccgcgaccactgacaaggggcaccaccacccgggagccatgggtgagccgtcacccaccgccgccaactcgtcggatcaccagacgtcgctcctctccttcgccgatgagttctacatacccccgtcgccatcctcgtcgtcctgctcgtcttcggacttcccgtcgtcgtccaacaggccagcgcgcggcaggaagagcccggggcccggcggggacgcggtggcgggctcggacggcggcgtgcggcggtgcacgcactgcgcgtcggagaagacgccgcagtggaggacggggccgctgggccccaagaccctgtgcaacgcgtgcggcgtgcgcttcaagtccgggcggctcgtgcccgagtaccgccctgcggccagccccaccttcgtgctcacgcagcactccaactcgcaccgcaaggtcatggagctgcgccgccagaaggagctcatcctcatccgcggaagccaccgcgacgccgccgcggctgcaggagcaggatccgccgggccgaggccggagctcatgttccgcgactacggcgtgtgttag

SEQ ID NO: 22769 - DNA, 321 bp, Zea mays
  Peptide Sequence Number=SeqID_64548
atggtcggttcaaaagatagttctgacgtccttgccagcaacatcattgagccgactatggagactttgtcggctgaagatcaacaggagttcgaagaacataaggagcagacgatcgaggaagcaaagacaaaattcccggctaacttcaaggtgaacagaaatcacaaggtcatccgaaagcgggcgactgatctggcttcactccgacctactacagctacccccaaggcaagtgagacaaatgaaatccaatctcttagagcttacatagatgaacaacgagaacaaatgcaacagatcatagggggtgcaaaatga

SEQ ID NO: 22770 - DNA, 294 bp, Zea mays
  Peptide Sequence Number=SeqID_64549
atggccgtcgccgccgccgctccagcgtctgtggcgccgtccccggcgcccaaggccagcgacgacaggaaggcggtggtgcccgtggacgcgtcggagctagagaagcacgtgctggtggtggacgacagctccgtggaccgcatcgtgatcaccaggatcctgcgtggctccagttatatcacatatcattttcagcagttgaaggtagtcgtcgccgcgcacttggaggtccatcaggtcgacaccgacatccaggtgtgcctcaggtgctcgataaaacgcctgccttag

SEQ ID NO: 22771 - DNA, 633 bp, Zea mays
  Peptide Sequence Number=SeqID_64550
atggaacaacaatatgcttaccaccccataggaggcaggttgccaactgatgctgatggtgcactcctcatgctccaatgttcaacatttagtgatggatcagttcctaaattaacatctaccgagcacaacataggatggacagattgttataactacaaaaggttcgaggtcaagtccgagcccccgggtcggacaaggtggagaccgtcggctgaggccagggctgagtccgagccctggggtcgggcgaagcggagttcgtcgtccttcggagctgagcccgagtccgagccctggggtcgggcgaagcggagttcgtcgtcttccggggctgagcccgagtccgagccctggggtcgggcggagcagagttcgtcgtcttccagggctgagcccgagtccaagccctggggtcgggcggagcggagttcgtcgtcttccggggagtccgagccctggggtcgggcggagcggagttcgtcgtcttccggggctgaacccgagtctgagccctggggtcgggcggagcggagttcgtcgtcttccggggctgagcccgagtccgagccctggggtcgggcggagcggagttcgtcgtcttccagggctgagcccgagtccgagccctag

SEQ ID NO: 22772 - DNA, 630 bp, Zea mays
  Peptide Sequence Number=SeqID_64551
atggaaaataatggcacacagccagatgctattgtctgttcatccctcatggaagcattgaataagggaggtcaacctgaaagggtccttcagttgatagaattcatgaagcaaaaaaagattcaattgaaccaaaaggcttattttgagataatatcttcatgcaccatgttacgagactggaaaacagcaagtcaaataattgaacatttggattcctctctctcatctatttcttttggcacactcaaccatattttaaattttcttggaaaatgtggcaggacagagagcatgatgaagctgttctataagatggtgacttcatgctctactgtgggcctttctacttatacgattctgctgagaaatctcttaattgtggggaaatggagaaagtatgttgaggttttgcagtggatggaagatgctggagtctgcccaacactctatatgtatcaaagcgtgcttccatatatctggagagacaacaatgcattgagagagaaggcacttcaagaacttaagaaacgacatgattctatagttgataaaagctggcctattttgttggtgcacgagttgatgggtgaccaagatgactatgctaccgtgctacggatttactga

SEQ ID NO: 22773 - DNA, 516 bp, Zea mays
  Peptide Sequence Number=SeqID_64552
atgaatgaggaaaaagtgcacacaaaagacccgtgttggtctgtggggacaatatatgatactagagagctgacagaactggtattggtgcggtgcccattttctaggacattacttagtacttcaaaagttggtcctcgtcatgaggggagcattagtgggagcaatgatcacataggagacttggagggtagagtcgagcatatgactgtggagctacaccatggaggtagggagcgagtgtgtgctagtcgccacatcactgagttgttagaattagaagtagaacttatgcagtgggagattgtagtacatgatcaggctattgactgggctttacacccaaacataccacacgaagttgccgagatgggtgttggcgcagtagaagcaggtgaaggaggaccctatggagagctagacatctttggagccccttcttctaagaacattgtggatgatcgccctcctgaagctaatagcggatctggagcgactaaggatgtggaggactag

SEQ ID NO: 22774 - DNA, 732 bp, Zea mays
  Peptide Sequence Number=SeqID_64553
atggcccttgggcaatgtgggcaaccccatgaagctcatcaaggaagatggagagtcatggtggtgggagggggcaaagatgttggttatagtgaaggatacatggatgtactagagtgggtggtggtggtggacccacgagtcagccctacatcaagctcgctcgtgcgtttctgtgtcactggcgtgttggacccgatcctctgctcgttcatcctctcgccgacgatatcaccagcgccaggccgcgccgcctctgccccaccgtcggcaggccgcgccgccgccacggctcggcactgggttctgcacagttcttccttggctgtttcgatttcatcctacctcgccgcacgcgcgggggcacacaaggtcgtcgtgctccacctcgccgccacctcgtcctcaccagcttgctccctacgcgccctgacccgggccacgaactggcgcggggagacggcgttgcacgacgccgtgcggggcggccacgaggccgcggcgcgcgcgctggccaccgcggacccagatctcaccgaggcatgtgttcttctccgcaactataactggagtgttagtaaggtgcatgatgaatggtttgctgacgaagagcgtgttcggaaggtggttggtttaccagagaagcatattgaaatgccaaatgacagagaaattgaactggaacagagcggctccatcctttgtttggttgaagagtcactgaagaggtga

SEQ ID NO: 22775 - DNA, 399 bp, Zea mays
  Peptide Sequence Number=SeqID_64554
atgtcgcgctgctccttcctacaccttggctgccccttcttgcctatgctagccacccgcccaaccgctccttgctcttcagtccaagctgtcatcgccacttcgcgcttccagtctggcgccggcgacggctactgcgacttcgacagggaaccaccaccgtcctctctaattggcaacggtgacggtgatgctgacgcgatcacctctatcctttccaatgttgcaacgcttctcgccgtcgtcaactgcctgcttgtgctgaacctcatcggcgacggcgacttggatgggacaaccacgatttctgataatcccgatggaggtgacattgagcatctatcttccacccggccagacaactgcggcttcggagacggaatccttgacccaaagtga

SEQ ID NO: 22776 - DNA, 231 bp, Zea mays
  Peptide Sequence Number=SeqID_64555
atgggaggagggaagacccgggcgcgctggcggcgctcgggggagtctggtcgggcgggggcccgcacctgggcgctcctggcgtgcgcggcacggctcctggcggcgctcgcctgggacagaggaaggaagggcggggccgggcgggcagaacggcgctctggcggcgctcccctgggcgcggcgaggcagaggttgttcaccagtggcccggtttgcctaaaggtgtaa

SEQ ID NO: 22777 - DNA, 627 bp, Zea mays
  Peptide Sequence Number=SeqID_64556
atgggttggcgcgagacggagcacgaagggggaaacaaggagacaggcgtaaaggggaaacccgcggccttcgtgtttgtcctgcgcccaggtcgggtcgagtccgagccccgggccgggcgaggcggagaccatcgtctgaggccaaggctaagtccgagccctggggtcgggcaaggcggagttcgtcatcttccggagccgaggccgagtccgagccctgggtcgggcgaggcggagttcgtcgtcttccggagccgaggccgagtccgagccctggggtcgggcgaggcggagttcgtcgtcttccggagccgaggccgagtccgagccctggggtcggtcgaggcggagttcgtcatcttccggagccgaggccgagtccgagccctgggtcgggcgaggcggagttcgtcgtcttccggagccgagtccgagacgggggccgagccctgggggtcggatgaggcggagcttcctatggcgcccgaagccggacttggctgctgtcagcctcactctgtcgagtggcgcagcagtcggagcgacgcaggcgacgctgtcctcttgtcaggccgatcagtggagcggcgaagtgactgcggtcacttcggctctgtcgactga

SEQ ID NO: 22778 - DNA, 810 bp, Zea mays
  Peptide Sequence Number=SeqID_64557
atggcgcagagcgtcgacggacatgacaactcattgccggcgtgcaaggtggagcccagggatcacaaggtgcgctatgccatgtcacgcgcagaggaggcttgcgcaaaaccgcgaggcggcccggaaaagccggatgaggaagaaggtgcgttggcgttcgacctggagtacgcgcggtggctggacgagcaccagcaccacatgaacgacctccgggtggccctgagcgcgcagatcggcgacgacgacctgggcgtgctggtggacggcgcgatgctgcactacgaccagatgttccggctcaagggcgtggccacgaggacggacgtgttccacgtgctgtcgggcatgtggatgagccccgcggagcggttcttcatgtggctgggcgggttccggtcgtcggagctgctcaaggtgctggcgcggcacgtggagccgctgacggagcagcagctggtgggcatctgcggcctgcagcagtcgctgcagcaggccgaggacgcgctgtcgcaggggatggaggccctgcagcaggccctcggggacacgctcgccgccgccgccacgccgtgcgccgccgacagcgtcaccaactacatgggccagatggccgtcgccatgagcaagctcgccaccgtggagaacttcctccgccaggcggacctgctgcggcagcagacgctgaagcaggtgcgccggatcctgaccacgcgccaagccgcgcgcgcgctgctcgtcatcagtgactacttctcgcggctccgtgcgctcagctccctgtggctgacgcggccgacggattga

SEQ ID NO: 22779 - DNA, 450 bp, Zea mays
  Peptide Sequence Number=SeqID_64558
atgagcgcaccagccacggtgagcagaggctgcgcgcgacgggattttatccccgagctaaagcagcacggcgtggaagaagcaagggcagaggagcagggagaaggaacggctgtagcccgcggccctgggctggggagctgcaggccggaaccagagtacggcgagctatttgaagaatcccagaagcggcggcggcagataagaacggccagggatgaggccgacggtcaacacaatgaaagaaaatccgagaacgaagcagagaagggagctcgacgcgagctggagccggaaaccgagcagggaggcagagaccttcacggcgcggtgcagggaggtggaacgagcggccgccatgggagggagccgtccgtgggagcagagcagaggatttgctgcgcaaagaagaagaacgcacggctggagataaagattgctaagcgctga

SEQ ID NO: 22780 - DNA, 300 bp, Zea mays
  Peptide Sequence Number=SeqID_64559
atggcagagaaggagctcgacggaaatgagcgcaccagccacggtgagcagaggctgcgcgcgacgggattttatccccgagctaaagcagcacggcgtggaagaagcaagggcagaggagcagggagaaggaacggctgtagcccgcggccctgggctggggagctgcaggccggaaccagaaacccagaatttttagcgatagcaaaagagtcgacagtaattgcgacagttgattcgattcaaaaatctgataaatttacctgcggtctaaacatctggttccacagccacgaatga

SEQ ID NO: 22781 - DNA, 822 bp, Zea mays
  Peptide Sequence Number=SeqID_64560
atgggagaagcggcagaccgcgagcggccgccgtggcgctgcacggtagccgtgcaggccgcgctctgcctcgcgctctacgcggccttcagcctcggcgagccgcagctcatcccgcggggcggggtggacgcactcgggcggggcgcgcgcggcggcggcgtcgccttcctcagcgtcgctggcggcgcgcgcggacccatcgaccaggagaggctcctgaggcagccatgcgtttccacaggttctaccgtaatagatgtcaggtttgatggcctacacatgcctgatccaagattgatggagaccacagcaaagctttatgaagtcaagttcgtgctggatgttactcaactgggagcggatgatccactctggcaaaatggttccatgtacttccaggctctgaacatcccgtggtactccacttcatcacatgggcggacggttggtaactttttgaagaaagtgaagatgccctacgatcaggttctagatattattggtctgggcacatggcctctgcaggaacctctacatggtggcaggataagcacttcttacaagggacaaattaaatggttggatcgattactagcactcactgaaagcaattgtttaaaaaaagctgcattagatttttgtcattttgcctgtttcaacatgtttgagtttgtagctctagcagtccgaacagctggatttaatatggaaatttatatcctgcagggtaaaacaataatgttcattcatcaaatcatagagcatactggtacaaggagctgggagcatagtccatctgatactcttgtgaaatcataa

SEQ ID NO: 22782 - DNA, 1329 bp, Zea mays
  Peptide Sequence Number=SeqID_64561
atggactctgctgccggcgcaggccgccaccgcgttcgaatcgcagtcgtcggcgacgtggtaccctctatctctcttgacaatcatgtactccttaggagggaggggacgccagaatatgggtttggtgcggatgtagccctttgttatgccatgttggtttccaggttcaagggattagaagcaaggaggcgagagaggactttgagaaccggggttctgcacattgacttgattgttgcggttttgggagtcccaaggaagcagccgtacaagatatccaaccagcggctgagggagctgggcttggagttcacaacggcggcgcaggccctgtacaacaccatccacaatgattgggcccttgaggaagattcaaaggcgcttcgatttcttcagccggatttagtgctttttacaggcgattatggaaatgagaatgttgaacttgtcagaagcatttcagatcttcagttaccaaaggcggcaattcttggcaatcatgattgctggcacacacatcaattctcagagaagaaggtcgatcgtgttcggcttcagctcgcaagccttggtgagcagcatgttggatacaaatgtttggacttcccatcaattaagctgagcgttgttggtggacggccattttcttgtgggggtgataggctacttagaccaaggcttctctcaaaatggttgtcgtatcacatggctgattatcagggttttttttatggtgtcaatgatatggctggaagtgcaaagaagatatacgatgctgctgcaggtgcaccagagggacattctgttgtattgcttgcacataatggaccaacaggtctaggttcaagaatggatgatatctgtgggcgggattgggtacctggtggcggtgaccatggcgatccagctatttcatatgcgacatgcttgaataaaaaccacgtagatcttgagcgagccatctccgatttgcaaagggaagccagagtttccatcccgctggtcgtttttgggcacatgcacaagagcctggcctacgggagaggcttgaggaagatgatcgcctttggagccaaccacatcatatatctgaacggagcagttgtgcctagagtgaaatttgcccaaacaactcctgggcacgagcaaaatcaacccgaaggatcgggatccagagctccaacgttgcgcgcgttcaccattgccgatctctatgaagggcgtgtggagaagatctctgaggtctgggtactggtgagtggcgccaggaccgaggtcgaggaggaaatcgtcttgtacaagcatcctcgagagcagcatatgtga

SEQ ID NO: 22783 - DNA, 303 bp, Zea mays
  Peptide Sequence Number=SeqID_64562
atggcgttggcgttgggccggggcgccgagctcggtgtgctgtgcctgtgcgaagccagagccaggccgccagccgccaggtgccgcactggcaactcggccagtgtggccacggcccacggcagcccgcgccagtacggggggcgcgccaaattccgcaggatccgcagttattgcccacatcctctcgtttttgacctgctggctgctgctgctgcatcagcatctgcatgcccggccgcgcgccaacgtcgcccatggctcgccggctggcagcgagttcaagctgctcctacctactag

SEQ ID NO: 22784 - DNA, 249 bp, Zea mays
  Peptide Sequence Number=SeqID_64563
atggcgcctttggcaaggcctactgcctgtcagactcactctgtcgagtggcactgcagtcggagtggcgcaggcggcgctgtccttctgtcagactggcctttgcagctttatgctgatgggggttaccagctgagaattaggcgtcttgagggtacccctaattatggtccccgacagctgcaggatccaaggacacgtgtgtacccaaagctagctagctctctcgactctggaaggtggaaataa

SEQ ID NO: 22785 - DNA, 1725 bp, Zea mays
  Peptide Sequence Number=SeqID_64564
atggcgtcctcccgcacctcctgggccgacgtcgccgacgccgagcccgccccgcctcccccggtcgccgcccccgccgccgcatccaacggccccgcgcgttcctcctacgttccgccccacctccgcaaccgcccaccagccgccgccgccgccgcgcccgcctccgccgccccgccgccgcgctccaccgccggcctcctcacccgcaccggcggcggtgcagcttcggtcccgttcgacgagcaccagaacacggggatcaacttcgacgcgtacgaggacatcccggtcgagatgtccggccgcgacatcccgccccccgtctccaccttcgccgacattgacctcggcgacgcgctcaacgaaaacatccgccggtgcaagtacgtccgccccacccccgtgcagcgccacgccatcccgatctcgctcgccggccgcgacctcatggcctgcgcgcagacgggctccgggaagaccgccgccttctgcttccccatcatcagcggcatcatgaaggccccgtccgcgggaaggccgcagcggggcggcggcatggggatgaggaccgcttacccgtccgcgctcatcctctccccgactagagagctctctatgcagattcatgaagaggcgaggaagttttcgtatcagactggtgttagggtagttgtcgcttatggaggagcgccaattactcagcagttaagagagcttgagagaggtgttgacattcttgtggctacacctggccgattggttgatttattggaaagggcaagagtatctctacagtcaattagataccttgctcttgatgaggcagatagaatgcttgatatggggtttgaaccacaagttagaagaattgttgagcaaatggacatgccacttccaggtgccaggcagacaatgctgtttagtgcgacgttcccaaaagagatccagaaaatggcatcggatttcctggataactacatcttcctggctgttggaagagttgggtcaagtactgatttgattgcccagcgagttgagtttgtgcaggaggcagataaaagaagccacctgatggatcttcttcatgcacaaagagatacaggaaagcaaactctcacgcttgtctttgtggaaaccaagaggggcgctgattcattggaaagctggttgtgcatgaatgggtttccagctacttctattcatggagatagaaaccagcaggaaagagaatatgctctgaggtccttcaagagtgggcaaactcctattttagttgcaactgatgtggcagctcggggcctcgacattcctcatgttgctcatgttgtcaactttgatctccccaatgatattgatgactacgtacacaggattggaagaactggaagagctgggaagagcggacttgccactgccttcttcaatgataataactcatcactggcaagatctcttgctgacctaatgcaagaatctaaccaagaggtacctgcatggctattgcgctatgcagctcgtccttcttatggtggtggtggtggtgggaggaaccggcgatcagggggagggagccgctttggtggccgtgacttccgcaatgattcttcgtcatttggcaaggggggatcccgtggtggtggtgactactatggtggaggcagcagtggtggttatggtggtggcggacacggtggagctggggctccgagtgcctgggattga

SEQ ID NO: 22786 - DNA, 756 bp, Zea mays
  Peptide Sequence Number=SeqID_64565
atgtcgttttcgttttcggagttaccgttttcaatctcatttccgagaaaaaaatatgaaaacaaaaataattttaatgtttaccgattatttccgaccgtttttatcctcgttataccggctctggctggaggttggacacatcgtgatcgtgaagccttcctctccctgtcatctgcgcttggcgggagaggcaggctcgttttcgtcttcttctgctcgaaagaaagagaacagcggaacagcagaggctgcaggtcttccaattccaacctcaaggtcaaggtggaaacgaatcggaagccggaagggaagccagtacagtacgagaagctcccagattactcacgaaggctcgccatgccgccaatcaaggtaggtagtctgttccgtccggctcttcaagtcatccgccgctcgattcttgatgtcggcagccgcgtgcagggtgaacaagatcgatttcgaggagagataaacccaatggcacaagtgcctgtaattgtggatggaaggtttaaactgtttgaaaggctgaaactgacagcctcactggtcaccagcagtctggaagggggcacacagggagacgctgtggccgtgactggcaaggcgcggacaagctccggaggccggctacaacccaccgccacggacgagctcggggcagactgggaacagtggaagctaggaagcctgggaacgacggtaggaggtgggagcctgggaacagtggaagctaggaacggtggctag

SEQ ID NO: 22787 - DNA, 546 bp, Zea mays
  Peptide Sequence Number=SeqID_64566
atgtacatctcgttcctgtcgtctgaaacacggagagaaacactcatgctttcaaaaagcttgcagccaaacccgacgtgcccttaccacaagaatataacaaggctgcaacttcccctgattttcacaaacaacggtagggatggcaacagttcaggttcgaatcagtcttcaaagttcaacgtcttcaacagacgagagcaggcaactgccaacatgcatgcatatacgcaggtcacgagcacacagccacaccacacagcaactgagcaacatgccaacattgcaacaacacagctagctaacacagccagcagtccagcacggcaacacagccagcacggcgcaggccacaggtgtcagcagcgcgacgtcaagtcccagttgcggttgcggagccgccgagccgcggcgcagaggtgcggccgccgtgtgcccttgcggcaggccggcggtgcgggagtccggacagctggacagaagtggaggctggatcctggaggacagggattgagacgaggccggacgtccgatgtgagcgcttag

SEQ ID NO: 22788 - DNA, 405 bp, Zea mays
  Peptide Sequence Number=SeqID_64567
atgggggcgatagcgggggtgcaggcaccaagctgcgcgcggcggcggcggcgcccgacccctgcatccccgatgacgcgctcgtcgagacgttcggcctcctccccgccaactccgtccaccgcttcaagtgcgtctccaaggcctggtgcggcctcatcacggacccgctccaccgacagcggtttgcatagaccctggcagggttcctctgccgcgtggacagcgcggcggcaccgagagcttgtggctcacgcgccccaacgccatggtcctagagcggaaggagatctgggaggatttgaggttgcagatggcggcggtgggaggaacgcccgcgggattgcgttgattgtggcggcgcggtgtcgacggagcgctgattgcgggcgggtgggaggatag

SEQ ID NO: 22789 - DNA, 1446 bp, Zea mays
  Peptide Sequence Number=SeqID_64568
atggacaacggcggcagctacggctccgccaccgcctccgcctgctgcaacggcaaaattaaccgcgggccgcacgtggcgatgctggcgacgcccgggatggggcacctgatcccgctggcgcgtggcgaagggctggccgcgcgttcctggcctcgctccccgcccgcggtgtcctcgctgtccctcccgcccgtcgacctctccgacctgccccgcgccgccgccatcgagacgcgcatgtcggaggagtgcgcgcgctcggtgccggcgctgacggccgtcctcgccggcctcaggcggagcacggccggccgcctggcggccttcgtggccgacctcttcggcgccgactcgctggacgcggcccgcgccgcgggggtccgccgcaggtgcatcttcttcccatccaacctgcacgtgctcacgctcatcctccacctgccggacctggacgccgccgtgcccggcgcgttccgggacatgccggagccgctgcgcctgcccgggtgcgtgcccgtcccggggcccgacgtgctcatgccgctgcaggacaaggccgacccctgctaccgctggatggtgcaccacggcgccaagtaccgggacgcgcacgccatcctcgtcaactcgttcgacgccgtcgagccgggccccgccaaggtcctgcgccagccggagtcgggcggccccagccgccggtggcccgcggtgtacccgatcggcccgctcatccacgccgacggcgggcggaaggacggcgcgtcgtcgtcgccgtgcctggagtggctggaccggcagccgccccggtcggtggtgttcgtctcgttcgggtccggcggcgcgctgccggcggagcagatgcgggagctggcgctggggctggagctcagcggccagcggttcctgtgggtggtgcggagccccagcgacgggggcgccgtcaacgacaactactacgacgcggagagcaagcgcgaccccttcgcctacctccccgagggcttcgtggaccgcacctgcgccgccggcgtggggctggtggtcccgtcctgggcgccgcagacccaggtgctggcgcacgccgccacgggcgccttcctcacccactgcggctggaactccgtgctcgagagcctcgtctacggcgtgcccatggtggcgtggccgctctacgccgagcagaggcagaacgccgtgctgctctccgacggcgtcggcgctgcgctccgggtgcccgagtcgtccaagcggagggagattatcgcggacacggtgcgcgaggtgatgcgcggggaagggaagggcgccgcggtcagggccaaggtggccgagctgcagaaggccgccgccgaggggctccgcgacgggggagccgccgccgccgcgctggccgaggtggtacaggggtggacgacgacgacaggtggaggagagaaggactag

SEQ ID NO: 22790 - DNA, 357 bp, Zea mays
  Peptide Sequence Number=SeqID_64569
atggaccaacgaccttggaccaacgaccttagggaaggagttgacgacttggccgagtgtgggtatggggtggggatggtcgggcgcgacgacggcgggatggccaaaggcggtcgcggggggttggccgtgcgctggcagggggcgcgaacggtcgagcacggtggcggtgggagtggaagggtgagggcgcccagagaggcacggagcacgggctggacagatgcaggcactggccaggcggcgtctccggcgcaggggcgttgggcgaatgcgaccagggaagtggtgctacgcgatcgggggaggggactgagggcgagcaacacgaacacgaacccaggggatgtggctggg

SEQ ID NO: 22791 - DNA, 213 bp, Zea mays
  Peptide Sequence Number=SeqID_64570
atggcgaagccgaccgttggcagacttggagccgttggcgcaccggacatgtccggtgcacaccggacagtccggtatgcttatccatggtggaaagaaaaagtgattgacttagatttgaaaagaaaagatggcctttgcccattgacgcctgagaaatatcttaaactagaagttaagacagaatattcttctttgaaaaatgtgaaatag

SEQ ID NO: 22792 - DNA, 273 bp, Zea mays
  Peptide Sequence Number=SeqID_64571
atgggcgcatcgcttgcatcacggatgagagctaggatttcagaaatcctaacaaactcggacctcggctcctacgtggccgcatgcgtcgttgtgtacaacaagctctggcatagccgtcgcttggacgtggtccagaccggctgcatcgcgttgtctatcatcaagcagggggacctcatgatcgtcgccaacgtcagtgactctcaggttgttctgggcaccgtatctgacgacggcgtcatcacgctgtcgagctcatcgtccacctaa

SEQ ID NO: 22793 - DNA, 312 bp, Zea mays
  Peptide Sequence Number=SeqID_64572
atggtagaagaagaggttgtctcccagactgagaatattcgagcggagaacaacttttacttcgacatctacggtgtggaccccgaacctcctgcaacacaaggcaagccccgggattttcataaagaaaagacttatgatggtgaatccatcatggccgtgatgggttcaacatctaaaaagaagtatctctgtcaggtatggcacattccaagactacccagcggaaggcgaccggacctcgaggtgtgcctcgacactagttggctcctcgacatgaggggtgcagtagcaggagtaacaatcccatag

SEQ ID NO: 22794 - DNA, 984 bp, Zea mays
  Peptide Sequence Number=SeqID_64573
atggctcgtttactggcacgaaaaggcctgaaatgcgtcctcggcagctgcagcctgcaggccagcagaggcctaaagctcggccacgcggcccatttccagattccagcctacaggcctaaagtgatgttgcccgttggtgttgctgttgccaaatgccaattgccaaatgccaagaaactgaaaccctacgtccctactcccgtgaccggccgacagccgccgtctttcccgtctcgtgtgaccagccaactcccatccccatcccgactcccatctccaaggcggccagccaggctccagcgcgaccggcgagtgcggcagtgcgcgagcggccgagcgcgaccggcgaccgccgaccggagccgcgacctcccctgcgcgagcgctaccacagccgcctctgcgccctgcgtccctgcggcctacgcgagcgctaccaaagccgcccctgcccccacgagctccagcactccagcaaatgtgtattttcgggccaaatgtgtatttcaggccatttttgtatttcgggccgcccgtttaaagcacggcacgtttagtgaaatacgggccgggccgtgggccgaggggtcggcccgtgggccggcacggcacgacccgaatttaatactgggccgggccggcccaaaactaaacgtgccgggccttttcgggcttgggccggaccgggccgggcggcccgaatgtacacctataggcgcagtgcaagtcccgcccaacccggaccatcgagcccagaatctacggctcgatcaaaatgagcaaacagatacactagaaccccatctcatccgttcgctagatgatctacggactccatttcccctggccaaagtgttgtgttccactaatctggtccgcccatcaccggatcaacgatccgagtcgcgtcttcttccttcctccgtccaccgcgacagtgagctagagcatcgccgcaacccagacgaggcacacggataa

SEQ ID NO: 22795 - DNA, 495 bp, Zea mays
  Peptide Sequence Number=SeqID_64574
atgaaacgatacaatgtgtgcatgcgcacgcagaagtcagagcaggtgccagaaggtgcaccggacagtgaacaggacttgtccggtgtaccaccgaactgtctggtggccccattgtcacaagctccaacggtcggaacccaacagcctggtgacgtggctggcgcaccggacagtgtccggtggcgcaccggactatccgatttgcctattcacccccccccctctaggcgactttcaattggtatcaaagcctggtacttcatcaagagcctaaccgctcgaagtgatgtcgggagctcacgccaagaaggagatggtgaccggcgagaagcccgccacaagccacgagaaggctccatcagggagtctgccaacaagaagagggaggaatcacctccccgtgtcaagtcgcaccggagtggcgacaagaagaagaaaatgaagaaggtggtctactacgagaccgattcttcgtcgccttccacctcctga

SEQ ID NO: 22796 - DNA, 357 bp, Zea mays
  Peptide Sequence Number=SeqID_64575
atggatctccctgcacaacctagctttgaagcagtcgcagcgcgagtttgttgcctgtgtggaggttgtggccgtcgtcgctcagatcgacctctgtttcacgccttcgtctccgctgtgtcggggcaacctcatcgaggtcagcgtggcggagacgaccagcgcaacggcggctacttgtgcgggttccctgtgtgcgcgtgcgccggcgccgccgcagcggcgtccgccttctccttcgcgggcatggactccattctccgtccccatgattcccttcctcgcctgctgctaaagatcaattcctgccacaacgccagaggaggtggcgaacaggaggaggaatccactgcctag

SEQ ID NO: 22797 - DNA, 159 bp, Zea mays
  Peptide Sequence Number=SeqID_64576
atggcctccgccgtgaccctgtacggcgccgccgcgttccctgtgtcggggggaaagaacgtgaggtcacgagaatctgaagatcatcctcgtacctggaatctcaagtcccaggcaagttgtgcccttgaccactttttacccaataatgttctttaa

SEQ ID NO: 22798 - DNA, 681 bp, Zea mays
  Peptide Sequence Number=SeqID_64577
atgggtgcacacacagccatagctccagtggtgagcaagatcttctgcagctcctcgcaggccgtgctgatggtgcgcaggcgtcctcctaccgtgaacggcggcggccttgttgttacagaccggaaccagacggccgctttcagggtcgatggctgtggaaccatcggtgctagcgggcagctgatcgtcagggatggcgatggcagcgcaatcctcttcattcacaagaaggtgaaagtttggtctccagctactgcttcaagcagactgactgacgaaactttggtctcgcagggaggcgtcgttcaagcgctgagcgtcaacaactggtggagagggtatctgaccgactatggcgagccaagcaagctggttttcagcttgcaggatcccaagcctgtcctctgcacgaacacgaagggtgacgttcgggtcaccgtggagcccagcgggaggacgaagaggcactgggactacgaggtgactggatccttcgctcagaggtcttgcgccatcaagaaccgagcaggccagcttgtagcgcagattggcggcaaggggatgatggcaggcagggacctgtaccaggtggtggtgcagccgggctatgaccaggcctttgtggttggcattattgccattcttgacaacacgcatggagagtccacgagctgctaa

SEQ ID NO: 22799 - DNA, 327 bp, Zea mays
  Peptide Sequence Number=SeqID_64578
atcgctgcatggttgagagcagaagatcagtatgaaaatgagtcaggcaatcgctatgttgaaagctttaaaagaaagtttgcatcaaaggaattccatgcattaaagaagagatgcaacacacaacatagagagaagtatatctgtcttgtcgcggtaaagaacgatgacatcaggcgaactgtcctgaatagtgttgttggtaccttagatgtatgtgtaaggcatcctctatatggggagaaatttcctgagtttaatcctgaaaaacttcgtgaaggcaaaaagtacgaatgtgatgcgaaggcaaaaagcaggttcgcgtga

SEQ ID NO: 22800 - DNA, 891 bp, Zea mays
  Peptide Sequence Number=SeqID_64579
atggagaggcccgtggagggacaaggacaagggagcgggcggctccggcggcggggagggcgcgggcggtccatggacgagcctgacgacggggtaacatcgtcctcctcaaccgccgccaagaagcagaaccaggacctgcgccacagctgctactactacaaggtgtcgctggcggcggggagctaccgcggcagcagcagggcggcggcgccccgggggccacaggccgccaccacgtcgagctcctccgatcagtgctccagctacggcgggttctcgtcgtcggaggcggagtcgtcgcagcaccggcgcctgcggcccatacgcacgagcctcgccaccaccgcggtggccgtggccgcgcccgcactcgcgccggagaagaagaaggccggcgtcagcatccgcgccaggctgagggacctccgccgcaagccggcgtcccccggccccggcgcgcggctggcggggttcctcaacgccatcttcagcggcaggcgcgcgccgccgtcggcgtcctcctgctcgcgctcctgcctcagcgagacgccgtccacgcggggccagccgaagcggaccgtgcggttcctggacagcgacggcggcggcgagcgccggaggacggtgccggtcggggtggcgccggagctggagcagatgctgctccaccggatggaggtggacagcggcgacgacgacgacgacgagagcagcgacgccagctccgatctgttcgacctcgagaatttcgcggccgttgacccggacggcggcgccgcgtacagtgacgagctgccagtgtacgagacgacgaggctggtgctgggccaccgcgccattggccacgggtacgcgcgcacgggaggagtacccaccagagtggtgtga

SEQ ID NO: 22801 - DNA, 1274 bp, Zea mays
  Peptide Sequence Number=SeqID_64580
gcctcgccaacaacaagctacccgtggtacaccggcagagcccatgctcgccgttgcacgggctgccgtccctaacagcggcagatgtcttgcgtcgtgacacctctctcatccggcgccgtttcgccttgcaatcctctgcggtgtctgctccggcatcagccccggccccgtcgccggcacccaccataatcccagtaaacggctcgtcggacgggaggacgctgacgggcgcgctggactacagcgtgctcgtcagctatggcacgccagagcagcagttcccggtgttcctggacaccttcctcgacgtgtccctgctccggtgcaaaccgtgcgcctcaggttccaacagctgtgacccggcgttcgacacgtcacggtccacgacgttcaccaatgtcccctgtggctcgccggactgtcccacgaccaactgctctggtggctccgtctgtccgtacgacaacccgatcttctccatcgagggcgctttcgctcaggacgtgctcacggtggcgccgtccgcggccgtccacgacttcacgttcgtctgcgtggacgtagaccatccttctgatgacatgccagaggccgggatcctcgacctcagccgcgaccggaactcgctgccatcgcggctgcccggccccgccaccttctcttactgcctaccgcattccccgagctccccgggcttcctctccctcggcggcgacgccaccgtcggagaagacaaccgcacctcgcacgcgccgctggtgagcaacggccaccccgagctggcgaacatgtacttcatcgacctcgtcgggatgagcctcggcggcgacgacctcccgatcccgacgggcacctttggcaacgccagcaccctcctgaacgtggggaccaccttcaccatgctggcgccggacgcgtacacgcctctgcgcgatgccttccaggaggagatggcgcagtacaaccgctcgtcgccggggttcgccggcttcgacacgtgctacaacttcaccgggctagatgtgatacaagtgccactcgtcgagttcaagttcggcaacggcgagagctttctcatcgatggggaccagatgctgtacttcgacgaccccgccgtcggtccttttggtatgacctgcctcgccttctccgccttgaaagacggcggcggtgtcctgtccgccgtgattgggtcgtatacgcaggtgtccacagaagtggtgtacgacgtggccgcaggaaaggttggcttcatcccagggagctgttaa

SEQ ID NO: 22802 - DNA, 936 bp, Zea mays
  Peptide Sequence Number=SeqID_64581
atgtatgcttcaaaggcaactctttcacacctgttctatgtatctgcagcgactgatccaaaggaagctgacatcatctgggtaagcatgcaagtagattcagaagtaaagaatgctgtagggctcacagaccaacaatacacaaaccaatttccttttgaagcttgcctggtcatgaagcaccaccttgcggagaccgtccacaaggcttggggctcacctgaatggcttcaacctacatataacctggaaacccatttgtctccactcattggtgattattgtgtgaggaaacgagatggcatggacaatttatggatcatgaagccttggaacatggcgagaacaatcgataccacagttactggtgatttgtctgctatcatcagacttatggagacaggccccaagatatgccaaaaatatattgatcgccctgcacttttccaaggaaggaagtttgatcttcggtacattgttttagtccgtagtatccgccctttggaaatatttctgtctgatgttttctgggttaggttagcaaacaatcagtacactttggagaagactagcttttttgagtacgagacccatttcactgtgatgaattatatcggaaggatgaatcatatgaacacaccagagttcgtcaaggggttcgagaaggagcaccaagttaaatggctggacattcatgaaagcgtacgatctaccatacgccgtatctttgaggcggccgcagctgtccatcctgagatgcagaacccattctccagggccatctacggtgtagatattatgcttgacaacagattcaaaccaaaggtttttagaggaaagaaggatttatgcattctcattttgtgctctactcagtatggaattacatacgaatgtgtgaatgagcttgcagccatagatagcatgctggcatag

SEQ ID NO: 22803 - DNA, 177 bp, Zea mays
  Peptide Sequence Number=SeqID_64582
atgaagaaaatgttcataccgatgctccggatgtacacgctgcacaaccatatgaagaacaaggtactgcgggagcgctgcgcaaacaacgacgagaatgcaccactggccaaaaagaggcaacagccaacagacaagaaggttatacatatgtcacgttattatgataaaacctga

SEQ ID NO: 22804 - DNA, 1112 bp, Zea mays
  Peptide Sequence Number=SeqID_64583
ccccggccccgtcgccggcacccaccataatcccagtaaacggctcgtcggacgggaggacgctgacgggcgcgctggactacagcgtgctcgtcagctatggcacgccagagcagcagttcccggtgttcctggacaccttcctcgacgtgtccctgctccggtgcaaaccgtgcgcctcaggttccaacagctgtgacccggcgttcgacacgtcacggtccacgacgttcaccaatgtcccctgtggctcgccggactgtcccacgaccaactgctctggtggctccgtctgtccgtatgacaactcgatcttctccatcgagggcactttcgctcaggacgtgctcacggtggcgccgtccgcggccgtccacgacttcacgttcgtctgcgtggacgtagaccatccttctgatgacatgccagaggccgggatcctcgacctcagccgcgaccggaactcgctgccatcgcggctggccggccccgccaccttctcttactgcctaccgcattccccgagctccccgggcttcctctccctcggcggcgacgccaccgtcggagaagacaaccgcacctcgcacgcgccgctggtgagcaacggccaccccgagctggcgaacatgtacttcatcgacctcgtcgggatgagcctcggcggcgacgacctcccgatcccgacgggcacctttggcaacgccagcaccctcctgaacgtggggaccaccttcaccatgctggcgccggacgcgtacacgcctctgcgcgatgccttccaggaggagatggcgcagtacaaccgctcgtcgccggggttcgccggcttcgacacgtgctacaacttcaccgggctagatgtgatacaagtgccactcgtcgagttcaagttcggcaacggcgagagctttctcatcgatggggaccagatgctgtacttcgacgaccccgccgtcggtccttttggtatgacctgcctcgccttctccgccttgaaagacggcggcggtgtcctgtccgccgtgattgggtcgtatacgcaggtgtccacagaagtggtgtacgacgtggccgcaggaaaggttagcttcatcccagggagctgttaa

SEQ ID NO: 22805 - DNA, 1014 bp, Zea mays
  Peptide Sequence Number=SeqID_64584
atgtcggcgcgtgaccgcgagacggccgaggcgctggtgcgcctcgccgcctcgctggacggggcggtgctcggcctcggcacggctgccgtcgccgtcgcgtcgtgggtcaagtacctcgccgtctcggggcagctacgcctcgtcgcctccgcggcgacggcctccatcgccgacgcccgctccctcctctcaggcgacggcgccgagccgcggatcgccgcggtgcggggctacgtgcgggcccatgacaagttcttccgggccccgttctcaggcgaggcgggcgtcgtcacgaagcacacccagatggttccatttgttctggttagtactgaattaggaaatcctacgggagtggtacatataaatgtggataaggcggatcaaccgttgcctcttaccacagtgtttcataaacttatcccacttgagacgactccttacacattgtttcaaactattattggcaacggctatccgattgcgttgttggatgaagaaaaaatactaccgattggtaagaaaattacagcaataggactatgtcaagcaaaggatgcagaaagtgttgagataacatcgtgcccagagatcccctttttcttatctgaactaaccaaggatgagatgcaagctcagctggcttcacgtgctaggatactcttctggggtagtattgttttgggaaccttgtcggtttgcctagtgggccatgccatttacaggggctggacgagaatcaaactacgaagagaggctaggcatgcacgacagatgtttgaggaggctgaagatgctattcacagggatgactctagtgatgatgatgaaataggagacgggcaactatgtgttgtgtgcttaaggaagagaaggagggcagcttttattccatgtgggcatcttgtctgctgttccgaatgcgcattaacaatagagcgtacacctcatccattgtgccctatgtgtcgtcaagacatcagatacatgatgagggtttatgactcttga

SEQ ID NO: 22806 - DNA, 228 bp, Zea mays
  Peptide Sequence Number=SeqID_64585
atggcaatgcaatgcagcacgatactcgctttcctcgtcctcaacgccttcaccagcacggccgccgcgcttcccgcggagctgccaagctgctcggcaacggcgcagcatcaccagaggactgctgtctcaccctgctcggcgccgcatgaggcgacgctcagccagaggaaatggatgcggagaatgcggtcacagaagccacagggagacgatggtgatcactag

SEQ ID NO: 22807 - DNA, 318 bp, Zea mays
  Peptide Sequence Number=SeqID_64586
atgcccccttgccgtgtgcggtgcggatcaggagtcaggacctggctcgggttcgagccggagataactcttggtgctcctccagtggttttgcttgaggagtacgggttcgagccggagataactcgctcgacatcctctcctccccagtgtcaccctgcaacgtttgcctctactacatgtacaccccttaccggctacagtactaaggcgtctacagtcatccgccagatgcacatgagacgccagctcccttccctgcgcgtacagcgacatgacagtgcacgttggagtttagtagtagaaataactatgtaa

SEQ ID NO: 22808 - DNA, 165 bp, Zea mays
  Peptide Sequence Number=SeqID_64587
atgacgatatccacgtcactctttggtttccagccgttcgatcctttccaaagtggattcttttcgagagccaatacctgcaatgccttctcaaacaccactgatgatactgaaccactctcacagtttgaatgtccgcttaaggtttctaatgactcaggataa

SEQ ID NO: 22809 - DNA, 759 bp, Zea mays
  Peptide Sequence Number=SeqID_64588
atgactccctcctccgttgcttttctcttcttctgcgtgcttattattctgcttcctgctcaacatgggcatgccgcctcctcccatgcaagctacaagctagggtcaagacaaatctttttcaagacacccagcaagtcacctgccaactcaaagcaggcctccactgcaaccacctgctcgtccttcgcaaatggcctcgccaacaacaagctacccgtggtacaccggcagagcccatgctcgccgttgcacgggctgccgtccctaacagcggcagatgtcttgcgtcgtgacacctctctcatccggcgccgtttcgccttgcaatcctctgcggtgtctgctccggcatcagccccggccccgtcgccggcacccaccataatcccagtaaacggctcgtcggacgggaggacgctgacgggcgcgctggactacagcgtgctcgtcagctatggcacgccagagcagcagttcccggtgttcctggacaccttcctcgacgtgtccctgctccggtgcaaaccgtgcgcctcaggttccaacagctgtgacccggcgttcgacacgtcacggtccacgacgttcaccaatgtcccctgtggctcgccggactgtcccacgaccaactgctctggtggctccgtctgtccgtacgacaacccgatcttctccatcgagggcgctttcgctcaggacgtgctcacggtggcgccgtccgcggacgtccacgacttcacgttcgtctgcgtggac

SEQ ID NO: 22810 - DNA, 705 bp, Zea mays
  Peptide Sequence Number=SeqID_64589
atggaggaaggaaatggggataacgaaataaacgaacgcagaaaggaaccatgggatttcagggcgtcgtttaggcattgggttagtttggttcagttgcatcttcacgctatagactttgtgactggaaagaccacccaatcagttcaatgcaggatcacactgtctccatttcctttctttgcgcaaaatttggctgagctagcgtcgagcataacttcatgcttggatcgtatgcttattgttcctcaatttcacgcacagtcatttttctctcccaggaaagatgaatctgtgatttccacagatggtggaaatgaggagacagacactgacagcctccatgttgctagaggattgtctcatcctgggctttcgtcaagtttatccaataaggcatcagtggtcccaacccctttgcttccttctggacaatctgatctccggttcaatcgtcttcgaccctcaattgatgaaagtgattgcaaatacaaaagattatttggctgctatgttgctcgtgaggctgtgatcgatgaggaatactggatcgctgcatggttgagagcagaagatcagtatgaaaatgagtcaggcaatcgctatgttgaaagctttaaaagaaagtttgcatcaaaggaattccatgcattaaagaagagatgcaacacacaacatagagagaagtatatctgtcttgtcgcg

SEQ ID NO: 22811 - DNA, 252 bp, Zea mays
  Peptide Sequence Number=SeqID_64590
atgcagggtgggtgtgcgcgggtattgcagctcgcgatcgcggcggctttggccatttgggtgggggtgcggggtgcctgtgttcgtgggatcgtgggagcaaatggcccgtttgatccgtttacacgaaagagatctcttttgtttgatgccaactggtggtggaaagtccatgtgctatcagatttcagctctggtgaaaacatgcattgttcttgtcatttcatctatgataggtcacatgtgaactga

SEQ ID NO: 22812 - DNA, 120 bp, Zea mays
  Peptide Sequence Number=SeqID_64591
atggctcggcgccaaacgtatttaatgtggttagtcatttatgacggggcagtcccagaaaggttccttcaaatagtgcctaaggactggttttatggcaaggaaattggagggggttga

SEQ ID NO: 22813 - DNA, 405 bp, Zea mays
  Peptide Sequence Number=SeqID_64592
atggcgtcggcgtcgcgtgcgctcctcctctcccgtgcgctccaggccggcgcgtctcgccgcgtccccgccctcctgcgcccggtcgctgcggccgcgagcctcctcccagcggtggcggggccggcaggggccgccctcggcgctagggtgcggtgcttcgcgacccagccggcgacgtcctcgctgcgggactcgtccccaaactggagcaatcgcccgcccaaggagacgatcctcctcgacggctgcgacttcgagcactggctcgtcatcatggagccgccgcctggtgacgcctccaaccccgacatcacacgcgacgagatcatcgatagctatatcaagactctcgcccaagtcgtcgggagaatagataaaagtgctctggtgtattacagctaa

SEQ ID NO: 22814 - DNA, 612 bp, Zea mays
  Peptide Sequence Number=SeqID_64593
atggcgacgactctccggctgcgcaaaaagtgctccggtgagcgcgacccggacgaaccagagggggaaaggacgaaccaaaggggcaagagagcgggcgagagagctcgactaaaggcgcaagtgagcagggggaagtgggcgagcggggctcaggctctaaaggggcgagggcatgcagaggtggccggagaacgcgcggacgtgggcacgtccacggcgggggacgtgggcgggaggaaaaaggaaaagccattctggcccaaaccagcccagctcggcccagccaggccgcacgcccgcgcgcatgctgcccctgacaggcgagccctgcctgtcctcgcctctccgccctccccgcgcccgccgtggaccagcgagtgcgcactcgcgcacgtcgctgggatcctcggccacgtagatctgcgcacgccccagctccttttgagcccctgcccgtgcccgcactcactcccctgcctcatttcacgcagtcccgccctcgctcgcgctctgctcatgccgccagacctcgccgaagacccgcgcccgcctccccgaccatctgcttcgcgggaggccacgccgatcgaccccgagctccgctccgag

SEQ ID NO: 22815 - DNA, 369 bp, Zea mays
  Peptide Sequence Number=SeqID_64594
atgggtctagcgatctatccctccggctcctgctcctccgagagctctgtgtcgtggctcaaactgccaccggcgtcgttgtcgtcaacctcagggtctcctccaacagacaggatgcctgtggtggtgcaaggggcatctctggctgaggtgctggggaagactgcttcccagactccacctcctgctaaggcgagggggaagagtcctattgctcttgctcctagcgttggtgctcctgctcctcgtgcaagcaacgatgcagtctctccaggtgactggactgacctggcaccgtgtggcgcactggatgctccgctaagcgagaaggcaaaaaggggatcactgacttatgtgcagtgcacctaa

SEQ ID NO: 22816 - DNA, 468 bp, Zea mays
  Peptide Sequence Number=SeqID_64595
atggccatcgcgccgtcgaagcttcctagctgtgcgctgcctgggcccggcgcttcgtcctcatcaccagctcgcacgcccagaccctcaccgtcgttcctccctctgcgctcagccacaccggaccgtcctgctcgagctcggtccccgccggagctcaccagcgcagccaccctgggtgttgtgccgaactcctccacagcttgcctcctcaccggactcgtcttccccaatgctcgcctcttgcctgtgccgccgcctggtcgagccgctcctcaagcgccgcttgcccccgccactctcctgtcatgtgctgcgcccaggacccgcgctccgagtttgtcgccaggcgccgagcctccctggcgctcgtcccctcgacgcgaggccgtgccctctgtctggtattcaaataatggctcaactggttttcaggctggttcagctggaattcaaaaaccagcttag

SEQ ID NO: 22817 - DNA, 436 bp, Zea mays
  Peptide Sequence Number=SeqID_64596
atgacgcttccaccctcgcccccctaccacttggttcaagccgccctcgcgtcgtttgatgcgattccggcggcgatcgtcagcgcctccaacaccacccgctcccccgtcctagcgtgcgttcgggcgatctcccctctcgcggcgggcatggctggcgttggcggcggggcgcgcagctcagacagggcgggggcggcgcgctcgcccaccaccaccaccaccaccaccaccacggcgatccagtccaccatccagtcgatcaaggaggtcgtcgtcggccactccgacgccgacatcttggacaccctccgcgagtctaacatggaccccaacgagacggcgcagaagctgctgaatcaagggccaattggagaacttgagttattgacttcttgccgttgtgctttgaatcctatattgcaccttaaagaag

SEQ ID NO: 22818 - DNA, 297 bp, Zea mays
  Peptide Sequence Number=SeqID_64597
atgacgtcggcggttctcagctccctacggaagcaaggaaatgtcagcaggatccatgccgcgccgccagctgcgcttctacagggctcaagcacttctccgacggccacgttagcacgtcaagtaggcaatgagatcggttcgctccttgggcttcttgagcccctggaagaccatctttgtgcctggaatgtacttcttggggttgaagaggtagtcgtacagggtgccctcctcctagacgacgaccatgttcttgttggccgtggagtaggcatagccgagggtggtgtctga

SEQ ID NO: 22819 - DNA, 405 bp, Zea mays
  Peptide Sequence Number=SeqID_64598
atgggcaagagcaagaaaggtggtggttcttcgcatcattctgacgacaagcgcaagcgcgagccgactcccccctcggaggacttcggcgactcggagtactcggaggaggagtttctcctccggaacgactcccatgggatcgccgcggaggtatggacttacatccgggccgtcgagcgcgccgggctcgagggctcagatgagtcggagtactccttggtcgaggagaattcctccgacccgtccgaggagggcagcggcggcgacaacggtgatggtgacgacgacggaggcgacggtgacgtcggaggcgacagcggcaagggaggtgacggcagcggcaagggtggcagcggcgacggcggcggcggcagcaagggcagcaataaggccagtggctag

SEQ ID NO: 22820 - DNA, 3621 bp, Zea mays
  Peptide Sequence Number=SeqID_64599
atgacgtcgagattccctgttgcgcttatcgaggttggagctccgctcgggcgaggcggaagttttcacgaggcgtcagacgagccctcccgtgacatgtgccacagccagcggagtggcctcccgcgggattcacagcggagtgggtggtcgaggccgagctcgggcgaggcggagaattcatccgagggccgaactcgccgtcgggcgaggcagagaaaccgcccgagggctagactcggcgtcaggcgaggggtggttttgtatcctaacatggagggcaagcacatattttctattgctcctgatggtcattactctgcaaggattgcctacatgggtctttttattggatcatgctcctttggccactacagacagatctggaaggtttgggtccctcctaaatacaggttctttttatggttggtggccatgaacaggtgctggactgcagatagacttgcaaggtttattggtactctactcttagaaggtttggcctccacactccacagtctagcccctcaacatggagacttgtttctgcaatggtggaaaggagcttcagctattgtctctggtggtctggagccaacaaatgaaaaaagagagaaatggcaagctacaggagccaagggattatcctttttggctgcttctagccgtactgagtgcatgcaagaaatcgtaaaaggccccgagcgattcttggtcgtgtgtttgagcgcgtccatccccacaccgcacatacacgcgattcgtccggcgcccatgcgaatactgctgaaaggagcaacaagggaagaacttaagaagattaagcgtgtgcttcatttcactgtctttgcagcttaccatttgatccttgaaacttcattctttgccgatcaaaaattgtttacgacagacaaaactaccacagggaaagagaagtgctttaaaactaatcaacagctgcttggttcctgttatgataattcaaaaaacagtgacaccatgaataacacaccaacttgtgatgatcagtatcctaatcaggaaaagcttattcatactgaaaaatctgtaccattgcatcttcatgattccaaaactatggcatctgaagattctgctggtgaagagcatattgacagcaaaggcattcagtcatattcatccctgcctgtttcagatccctcgacaaattttatgcaggacatgccatcaccagattgtgctgagtcaaaaatatctggtggttttgatggctcaacattcactgatacttccaaagaggtgcagaagaaggaattgtctagtgacaattttcagggaacttttgatgtaatttgtgctgagagtggagctgctttgaacactcaggatatcttggtatcaatgtctagccaacatatcaggaaccaagctgtttgtgagcagagtcacctgtcgcggataacttattatgggtattttgatacatcccttggacgatatttgcaagatactttacttaatgagaaacacagctgcctatcatgtggtgaatctccagaatctcacatgtactcttatacccaccataatggtactctaactgttcttgtgaaaagacttcccttggagttgacactttctggtgagactcaaggaagaatttggatgtggaccagatgtttgagatgcaatgctaagccgacccatagggttataatatcttcctctgcacgtaatctgtcgtttggaaagttcttggaactcagcttctcaacccactctgctaccaagaagctaccaacatgtgggcatttgcttcatagagactgcctacgtttctttggatttggatccagagttgctatgttcatatactcatctgtagaaatatattctgcttgtaagcctccattgagtttggagttcaataaccgaaacaaaaatgattggcttgacattgaagtgaagaatccaattgcatacttgcatgctaacatcattctattctttaaggtccttcttaaatggaagcagttatttacaacaattgaaaatgtaatacaagacttgagatcaagatactctagtcaagccatgggggaagacaccaacgtttcagtagatgaggatgaggggttacttttggaggtgtccaggatgcttacacaagagaaaaataaagttgaggtttctctgagggagtttagccgaattgccatacctgagagttttgcacatgggatccttggtttgaactggttgtaccagcaacttcttcttgggttctacatttgggatcttcggttgcttcatattctgcagtacactaaagttaatactgcatcttcagacaattccattcatgaaagcacagcaaagaatgaaccgaagagttcagcaaagaaattaaacactataccatttatgaatgatgaacaacctgcagcatccaatgtattgcatcatgttgtcattccaagtgacgatgaaggaaaatggttctggaatcaatttaatcaattggaaatggaatacaagaaagaacttgaaggtggttctttgtataaattttacctcatcaacaaatacaccccatgctcttcaccattggcacaattaaaacatcaaatggacttggggcattttatagctggccatggtggtaatatcttttcaatttctgaggaagaggcttctagcattattgcttatgctctaattatatctgaacaacaagggttctattatgaagctgcatctagtaacttggataaaaatgcttctatgctgccatccatgtcgtctccaaatgagtctttcgaaaacaaccataaattttcaaggtttgcaccaactgaggaattaacatcagggttttatgattcatttctgtcagctttaaaagatctgcaccacgaaatcgatctgaacaatgaaaagatagctctgagaagcaaatatactgtcatttgtatatatgcaaaacaattccatgatcttcggaagatgtgctgcccatcagaacttgcatatatttcgtcaataagccgctgcaaaaactggaatgcacagggtggaaagagtaaggttttctttgcgaaatcaatggatgacagatttatcataaaacaaatcaagaagactgaatttgactcgttcttaaagtttggtcttgagtactttaagcattttggtgcatctcaggtttcaagcaaccctacttgtcttgcgaaaattctaggaatatatcaggttaaggaaactaggaatggcaaggagacaagggttaacttcatggttatggaaaatcttctgtttggacataatatactacgcagatatgatctgaagggtgctcttttctcacgatatattcctgattcagaaaattctgaaaagaacatgaatgtcatggattactccttgcttgttggagttgacaaagagaagaaagagcttgtatttggaattatagattatttgagacaatatacctgggacaaacagctggaatcttgggtgaagacatctcttgttgttccaaagaatctatccccaactgtaattttacctagggagtacaaaatgagattcagggcctttatgtcacaatactttctatcagttccagatgcttga

SEQ ID NO: 22821 - DNA, 456 bp, Zea mays
  Peptide Sequence Number=SeqID_64600
atggcgatgtactgcagcatcaccggatggcgttcgatggacgttggtccggctttggagaagctgaagccgacatgtcacaggacactgcccatcatcgcccgccctttttggggccgccacgacccagcccactaccgcacgctcgcgtggagcgggcagcaccagaggcgaccggacgctgctgccacccgggcgttccattccatccatgattcacctgacacgcagaaacctcgcgtcttctactcgtgctccgcgatctttacagccaaagccctgcctgcccgcgactgcgaccaagggacgagcgagtcgcagactcgtagctgttcgctgctcctcgctagtcgcagccgctgccagctgctcctcgcgaccggaccggcgcagatcattagtactactgattctgagatcgtgttgcccaccggccgggacagggggccgtattaa

SEQ ID NO: 22822 - DNA, 213 bp, Zea mays
  Peptide Sequence Number=SeqID_64601
atgttgcacttgcacctcttctcacctctgcttgccccgccgctgtccggactcctccggcattttgaaaacgaaaaccccgcggtagacgtagaacggggcaccaaaaccgcacccatgaaccgtcgttggcttcgatcgaacgaacgagacgagacacggggcgctacggagctagaccaggctgtggtagtcaggactggagtgaagtaa

SEQ ID NO: 22823 - DNA, 375 bp, Zea mays
  Peptide Sequence Number=SeqID_64602
atgggaaattggagttcggtcgtcgtgagggcctccaagctttgccgagaagcttcgccatggcacagggaacgtttctgtggccccttctggcggattgggctgttcgtggctctggaatcgctcaccggagcaaccccaacaccgcagatccgccatgaccgtggatgggtccctgcgcctcgacgttcaccgagcccattttccggaagtattgtgcgtaggaatcaggttctggcgtggtccggccatggcgccgccgtggatccctggccgctgttctttttggtcgggggcaagaagaagcctggtggaccgttgagagtgagatgggtgatccagattcggttaggcatgagagatgaggggagttga

SEQ ID NO: 22824 - DNA, 777 bp, Zea mays
  Peptide Sequence Number=SeqID_64603
atggcgagcagcgcggggaaccgcttcctgaggcagctgagcgcgagcaacggcgacgaagcggtctgcggcggcctgcagatggaccagcaggagtacggcggcgccggcgtggggaggaggggatcccggcggtggtcgaagaagcgggccgccgccgccgccgccgcgaggggctacggcgccggcagcgggaatggcgtgaagcagccggcctctgccgcggggaagccgggtgatggtggtggtggacgagagctcgggagccaaccacgccatgatgtgggcgctcacccacgtcgccgacaagggggacttcctcacgctgctccacgtcctgccgcgctccggcagcggcaggggcgaggaggcctcctccctcgccaactcgctcggcacgctctgcaaggcctccaggccagagttgttccaaacaaacccatagcaatcaactccaaaggaagtggaggtcgaagcgcttgtgatccaagggcccaagctgggcaccgtgctcagccaggtgaagaagctggaggcctccgtgctggtgctcagccagtgcaggccatctccctgctggttaagctgcagaatattcgactagtatcagatttagcttatcctctcagcttcctgcggagcagcggcgaggagtttgtggagcagtgcatcaaccaggcggagtgcctgacgctggcggtgaggaagcagagcaagggcgtcggtgggtacctcatcagcacccggtggcagaagaacttctggctcctggcctga

SEQ ID NO: 22825 - DNA, 291 bp, Zea mays
  Peptide Sequence Number=SeqID_64604
atgaactggctgggcgaaccagtagccttcttgcctcttctcttccccttcggagctgtgagttggagagagaaattgggggaaagccgccactacggactcgtgcgtacaccatatgcagggttctggtgtcgggtctgggagctccagctcgtcaccgggatgatgctcatggcggcgatgctcagaattggccgggaattcgccgtcgtcggggaacttgcgcgtctagccattgcgaaccgtggccggctctccaaccttcgccttggtcttcgatcgggcggctag

SEQ ID NO: 22826 - DNA, 528 bp, Zea mays
  Peptide Sequence Number=SeqID_64605
atggcgcctcccaagctctatgacggcggcggctctcagctctcttacggaagcaggaccgccatcgcagcaaaatcctcccgagggcctccctacactgaccactcccctactgcccttgcccctttcggtcttctctggactgggcctcaatttccggatctagatcctgcggttctcaccactgcgaccctatatctaatcatggccgcccattcaaggatcaacggacggtggctcttcttcaacatccgcctctctgggacacggcggcgcgcaccaaaggcgacggagaagtccagcaacgtgccacacgatgaacccccacctgattcacgcacccgactcggtctccatgagcacatgcctactacgaatcacgaggctaacccacattcacgaaacgatgcgcccagtcccctgcccacggcggatgcccgattcacggtggcgctaacccagccagacggaattcgccgccgagccgcgcgcctatgcccaaattccgacttcccggtgtgtaattga

SEQ ID NO: 22827 - DNA, 3180 bp, Zea mays
  Peptide Sequence Number=SeqID_64606
atggccatcccggaggacctagaggggacctcgggcgatggcggggtgacgaatcgcgggagtagagggcggcgaaaaggcgcggcgaaggggcgcgggaggggcaggccgcggagcgccgacagatcctttccgccgccggcgatggctggggtggcggtcggggacagggtgctcagggagaggaggcacacgaccaacgttttctgcgagcgcgacacggatgttgacgatgagtgggctaatttctatgcggaaaggttttgttctcaaatttggccctgtataaatcaaaacctcaatgcccttagtaaatttgtttttgaccttgtttacttgcaactaccacttgtgcagcgattatccattcgtgtaatttactcctctcttgatgatgttgagacagttaggtccaaggactcaaggagtggcgatgttttacagactgcaaaaaagaggaagaagggaggtgcagggaaggtttctgtcacaaaaaggtcgaaaagagagggtgaagaacaaaagaaggcatcaccctccaaggataaagattgtgctgaaactaatgggaaaaggaagatgttgactggggataatgccctgatgtgccaccagtgccagaggaatgataaagggagggtggtctggtgtaattcatgcagaaataagcgcttctgtgtgccatgcattgaaagatggtatcctaacttgtcagaagacgaatttgctgcaaaatgcccatattgtcgcaagaactgtaattgcaaaggatgccttagaatgagaggggttgaagagcctccaaagaaggaaatttctgaagaaaatcaaatctcttatgcttgcaatgttgtgcgcttgttgcttccctggttgagaaaactgcgacaggagcagatggaggagaagaaattggaggctaaaataaaaggtgttttggtgaatgagatgaagttggaacaagctgaatataatctagatgagcgtgtctactgcaataattgcaaaacttctatagttgattttcacagaagctgcaagtactgcttttatgatctgtgccttgactgctgtgtggagatccgcagaggtgagattcctggaggagaagagataatgagagtaaagcctgaagatagaggccgagcatatctttttggtactactaactcaaaggatgggagtaaaaggttctccatgaggaggcacagctcatccctggagaatgagccttccaatgtagtaggttctagtgagggggcaaataactctctggagctgtggaaagcagaaagtgatggtagcataccttgcccaccaaaggagctaggaggctgtggcggttcgattttggatctcaagtgtttttttccagaaaagatgctttcaaatttagaagaacgagctgacagaattatgaggagcgaagtatttgcaaaagcagtagccaaaagaagtgaccagtgcccttgttatgaccattcaggaaacataagaactcaggacgtgcgagagactgcaaatacgaaaggctcaagtgataaccatctctactgcccagttgccactgctatcaaggaggatgacttggcgcactttcagatgcactggacaaaaggcgaaccagttattgtttctgatgttctgcatttgacttctggtctaagttgggaaccattagttatgtggcgggcattgcgagagaaaaagactaatggtgacgtagaagatgagcactttgctgtcagggcattagattgccttgattggtgtgagatagactgctcacagctctgttgtcaacaggtggaaattaacatacacatgttttttgtgggatatatgaaaggcagaacgcatcacatgacacactggcctgagatgcttaagctaaaggactggccgccatctagttcttttgatcagagattgcctcgccatggtgctgagtttatcagtgcattgccatttcctgagtacactgatcctcgatatggtccgctgaatcttacagtcaagctacctgatggtgcattgaagccagatcttggaccaaaaacttacatcgcttatggattttaccaagagttaggcaggggtgattctgtgaccaagcttcactgtgacatgtctgatgcggtaaatatattgacacacacagcacaagtgccctatgcgcgttatcaacttgagaagatagaggaaaccagaaagaaaatgaaagaacaagatcttcaggaactttatggtgtttcagaactaaacctatcatcaccttttactgattccaggaatataagtgctgatgaaatgtcaaagacctcatgtaactatggtttggacgtcaatgatgtaccacctgttaataatgaatctgaggtacaaagtggggcaggccagtgttcagattacattgacaaggatagaagttatgctgggatgcataacggggagagaaccggtggtgccttatgggatattttccgaagagaagattctgacaagatacaagattatcttaggaaacatgccacggaattccggcacatcttttgcaatcctgtgaagcaggttattcacccaattcacgatcagactttctacttaaccgaggagcataagagaaagctcaaggaagaatatggtgttgaaccctggacgtttgagcagaagcttggtgaagcggttttcattcctgctggatgtcctcaccaagtgaggaacttgaagtcttgcattaaggttgcgatggactttgtctccccagaaagcgtcaacgagtgcatgaaactgactggagagtttaggcggcttccacctgatcacagggctaaagaggataagctggagatcaagaagattgctcttcatgctctgaaccaagtagtaaatttcttggatccttcctcggagtggtcgaagagttggtttgcccaactcaagaacaaaaaaaaggctggagctgaagaacaggagaagcctaaaaggaagcgtggccgcccatgtcgcaagtccaacgatgaagctgctggcgataggcacagaaagaagggcggccgccaaagaggtcggaagaggggatacggcaagtccaaagatggcgctggcgctgttgatgtgaagcctcctaaaaggcagcgcaatctcctgaaaggctctggcaatcgtgtaggtggttga

SEQ ID NO: 22828 - DNA, 396 bp, Zea mays
  Peptide Sequence Number=SeqID_64607
atggcgatgcctaggggcgcccgcacgcccctgctccatgggcccgctagaggaccaagtggtctgttacaactggaaaatagagataagattccaacaactaaagtagagataagagtggtcaacattggtgcaacagcaattgttactgaggcagcaacagcaatgttcggtgaagcaggcgttagtgcagcaacaggtgtcatgacagttgccatcttacttcttacagaaatcactcccaaaagtgttgcagtccataatgccaccgaggtcgctaggtttgtgaccggtcgcatggctttcactgatcctctatccagttgggcggattgttacttttctgtcaatggggatgctaaagattctaggcctgaaagggagaagctctcctag

SEQ ID NO: 22829 - DNA, 543 bp, Zea mays
  Peptide Sequence Number=SeqID_64608
atggctgctcagacctttgatcttgttcattgtgatctctggacatctcctgtcttcagcctctctggttacaaatactatctggatatgatcgagaatgtcctggaaattaaagatacacatgtgagggaagtaatgacgcctttggtggacgtagtagcaattgatgctatcgcaacacttattgatttcaaaaacttgtgggaaactcatcagtactctagagttcctgtatttgaggagcgcatagataatattgttggaattgcttatgcaatggacatgcttgaatatgttgaagaggttgagaaattgaatgcaatcactgtgaaggaaatcgcacatatgcctacatactttgttccagattcaatgtctgtttggaacctattaagagagttccggatcaggcaggttcatatggcagtggtcctcaatgaatatggtggaactattggtcgcaggagaactgcgtcccattatattaagagaaaaaatgggtggggcaccaagaagagccccaatacaaagcgctccttatag

SEQ ID NO: 22830 - DNA, 228 bp, Zea mays
  Peptide Sequence Number=SeqID_64609
atggcggcggcggcgaggcccagggtcgcggcggcgctgatggcgggcggctgcggcggcctatgcgcccaacccggccttcgcgctcgcgccctgggcggtgccgacgggttggatcttgcgcccaccgtgcctagacgcggccgcgctgggccacgcttggtcggaggccacgagcccgcgccggagttggggagggagggcgccgccgcggggaggggcacctag

SEQ ID NO: 22831 - DNA, 360 bp, Zea mays
  Peptide Sequence Number=SeqID_64610
atggtgctgaacaaagtggtgagagaagactggtcccaacctccacccaacgggaccaaggggccgaggacgttaacacttgatgatggccttcagatagtggaagctaatgcaaggaaggtgggcaaagttctattcaagccaataagcagtgaatgtgttgatgtcgacaacaagggtgtgaaccgcctcatttccaagaagatcatcaagcggaagaagaaaggctctgatgattcctccaatgatgacgagtgtccagacgtaacagagaatggttgccctgcagagttactctcatactcggatgataacagtgccttgttggaagatgcaagcagttctagtgccaaaagatga

SEQ ID NO: 22832 - DNA, 474 bp, Zea mays
  Peptide Sequence Number=SeqID_64611
atgatgttgttgttgttgcttggatctgccaaagggaatcagaggagaaatcaaagttttgtcgaagagagatcatttgcttacagagagattttgctcttcaagaagcttagattcagagctgaagagaaagctagggtctcagtagatgctgacattgtcataaaagaagccatgagacgacttgagtctgccgtcaaaggaaagaaggatctcctaggccgtatggatgctctacaatctcaaatagaaaggccagagactaacacaatacatgtttgtgaagagagatcaaagctctgctctactgctctaaagcacatggaagatggcaatgttgaagaagtttgcgtaagtgatacaaatccaataccggtcacagggaacattgctgagttggatgatgagggagtcgatatccctacggtcggggacagtgggataatccccacacttatgaagtgtctgatgtaa

SEQ ID NO: 22833 - DNA, 402 bp, Zea mays
  Peptide Sequence Number=SeqID_64612
atgcgggggtggggctcgctgcgccactctacgccaagatccgcttcgtggggcggcctcggcctccagcgccacgggcacgacgccaccggtgccgccgagatccacgaacagcgggctcaagcggagcagttgggagcagcttcgattttagctgatgtgcctgttccatctatcaatgaccttgtagatcagattgctgatgtcatcgatttttttcagatcagaaggctggtggccaaggtggccctgcagtgcgatgatgacgagctcgtcgctatgaacgaccccctcatcagcaccaattacatggtatacccctggtctctctatcgcctgatctggtactttaacggactcaccggtccagaattcgttggacaacatggctccgtcccatga

SEQ ID NO: 22834 - DNA, 333 bp, Zea mays
  Peptide Sequence Number=SeqID_64613
atggggcacgttctgccgctggtgtgccccgcatcccgcccacaatcggcgcctccgccgccgcagcccttccttcgcgcagcgcccttccagaaatccaccatcccggaacctccgcgcacaccccgagcccgccccctacccccaccaactgtcggggcctgtgtcacctggccgctcaagcggggaatccatctgtcgggcatcttcctgacctgtggcaaacggtggcgtggcggcaccgagagcgaggagcctggatccaggagtgggcgggagggggccgaggacctgcacctctgcatcgacaacaacctttatctcatgctgtga

SEQ ID NO: 22835 - DNA, 453 bp, Zea mays
  Peptide Sequence Number=SeqID_64614
atgaagcaatatgtgatcacatcccttggatctaaatccaacgaggataatcccgcccgcgatgctatggtggaccttccctcgggcctggtgaaggtcatggactccacacgaggcgcgaaaggtggcactgctgggaattccaccgtggcggcaatggaatggttaggtggcgacgatttgctcacggagtttgcgcaaggtgggtggtcgaggcctcgagggcagaaaggggcaggggtgtgcgtacttatccccatggacccagctcagggtgggagagggtcaactgccccgaagaagctgcgccggcatgcacagagttgtcgcgcgagatccacgattagttggggaagacgacctgacagcctgggcccatttgttcgtgaccagtgttcagcgcgcgagagggagtggatgacggggatggccccacatgccagtggctactga

SEQ ID NO: 22836 - DNA, 222 bp, Zea mays
  Peptide Sequence Number=SeqID_64615
atgacgaagcttcagaactggttcatccttcgtcctgaccctgcttttcatattgtgtacagctttatcccaaatccgaaggctcctgaacatatattacacttgggaaacattgttagtcatgtttttgaggaccttcggaagacgaaggtccccaacaagttccatgttccaattaacattaatgatcttgacatgaacataaataacataacagaataa

SEQ ID NO: 22837 - DNA, 465 bp, Zea mays
  Peptide Sequence Number=SeqID_64616
atggactccgcctcgcccgaccccagggctcggactcaacctcgactctggaagaccgtctccgcctcgcccgaccccagggctcggactcaacctcgactccggaagacggtctccgcctcgcccgaccccagggctcggactcagcctcgaccttggaggatttaccgcctcgcccgacctcgggctcggaccgaccacgccgcagggggggggctcgagcggtttctcgagtgcctctccataaggacctgttcgttggatgaccgctcgggaaaacagtgcaaccatgagggtggtgatgaggaggatggttatgattatgactatggtaatggtaagtggtattctttccgtttggaaagggttgcttttggtgcaatctatgctcaggtaaagaagaaggagaacagtgtcgaggcagatctccgggagttccaggacgtcgatgagttcgaggattag

SEQ ID NO: 22838 - DNA, 300 bp, Zea mays
  Peptide Sequence Number=SeqID_64617
atgcaggaatcccttgcaggaccgccatcgcagcaaaatcctcccgagggcctccctacactgaccactcccctactgcccttgcccctttcgggtatagggcacacttacccgcagctaggaagtcgagataccccgacctcgggcggggcggatctatgtcggcacacgaacgatggtgagaaattcctcgacaaccagcccggtctttgctcccagcgccgcatcgagcacgtccctgagcacctggcgaagcccatagatctatctttcatgctccgaacggccataggtccttga

SEQ ID NO: 22839 - DNA, 2409 bp, Zea mays
  Peptide Sequence Number=SeqID_64618
atgcgggactttatgaccgcatgtgactactgcctctccgactgttccgacggtagccgcagccttgacgacgaggactgcggcccaagccgcgaatgtttccacgtcgagctaggggatccctccgaaggcaaccatctcggcatgccggaggacggtgatctccctaggccagtgcctcgcgctgacatcccgcgggagctagctgtggtccccgttccagtggggggtcacgacccacagctcgagcaagtccgcggggcgcaggtcaggctcgacgagggagcaggagcgcttgagtcgatccgccgggacgtcgggcaggtatgggcgggccaacccccggccggagaaatacgtcacctgccccagggtttccagcaccgcgtcgccaacgacgtcagggtcaggccgccacccgcatccagcggggtcggtcagaacctggcagcctcagcgatgctcctccgcgcgatgccggagccatcaaccaccgagggtcggcgaatccagggagagctcaagaatctcctggaaggcgctgcggtccgacgggccgagagctctgcctcccgaaggcagggatacccctcggaacctcatgccgcgacttcccgattcatgcgggaagcctcggtctacaccgagcgcacgcgcaacaccgcgcctgcggccccgggccacctcggcaacgagcaccatcgtcgcgaccgtcgggcccacctcgacgaaagggtgcgtcgaggctaccaccccaggcgtgggggacgctacgacagcggggaggatcggagtccctcgcccgaaccacccgactaccgcctggcctgccaactgggtggaacggacgacgacaacctcatcatccgcaacctccccccgttcctctccgacactgctcgcgcctggttggagcacctgcctccagggcagatctccaactgggatgatttggtccaagccttcgccggcaatttccagggcacgtacgtgcgccccgggaattcctgggacctccgaagctgccggcaacagccgggagagtctcttcgggactacatccggcgattctcgaagcagcgcaccgagctgcccaacatcaccgactcggatgtcatcggcgcgttccttgccggcaccacctgccgcgacctggtgagtaagttgggtcgcaagacccccaccagggcgagcgagctgatggacatcgccaccaagttcgcctctggccaggatgcggtcgaggctatcttccgaaaggacaagcagccccagggccgcccatcggaagaggctcctgaggcgtctactccgcgcggcgccaagaagaaaggcaagaagaagccgcaagcgaaacgtgacgccgccgacgcggaccttgtcgccgccgccgagtacaagaaccctcggaagccccccggaggtgctaacctcttcgacaagatgctcaaggagccgtgcccctaccatcaggggcccgtcaagcacacccttgaggagtgcgtcatgcttcggcgccacttccacagggccgggccacccgcggagggtggcagggcccacgacgacgacaaaaaggaagatcaccaagcaggagagttccccgaggtccgcgactgcttcatgatctacggtgggcatgcggcgaatgcctcggctcggcatcgcaagcaagagcgccgggaggtctgctcggtgaaggtggcggcgccagtctacctagactggtccgacaagcccatcaccttcgaccaagctgaccaccccgaccacgtgccgagcccggggaaatacccgctcgtcgtcgaccccatcgtcggcgacgtcaggctcaccaaggtcctgatggacgggggcagctgcctcaacatcatctacgccgagaccctcaggctcctgcgcgtcgatctgtcctccgtccgagcaggcgctgcgcccttccacgggatcattcctgggaagcgcgtccagcccctcggacgactcgaccttcccgtctgcttcggaacgccctccaacttccgaagggagactttgacgttcgaggtggtcgggttccgaggaacctaccacgcggtactggggaggccatgctacgcgaagttcatggtcgtccccaactacacctacctgaagctcaagatgccgggccccaacggggtcatcaccgtcggccccacgtacaaacacgcgttcgaatgcgatgtggagtgcgtggagtacgccgaggccctcgctgagtccgaggccctcatcgccgacctggagaacctctccaaagaggtgccagacgtgaagcgtcatgccagcaacttcgagccagcggagacggttaaggccgtccctctcgaccccagtggcgacacctccaagcagatccggatcggttccgggctcgaccccaaatag

SEQ ID NO: 22840 - DNA, 243 bp, Zea mays
  Peptide Sequence Number=SeqID_64619
atgtggccgtgggcagttgagcttgctgctgggcagctccattcctgcatgcgcttgaccatggatctaggccaggagtccgtgtacgggcgaccttggcggcttggcctgccgggtccgaacatgaaggttgataccaatgggaacatgatgaggtccatcaagttgtacagcggtgcgtgcgtgcgtgtatgcaaggagacggagaaggagaccgagatagagcggcagcagccgctctag

SEQ ID NO: 22841 - DNA, 1698 bp, Zea mays
  Peptide Sequence Number=SeqID_64620
atggaggcggaggcggaggcggaggcggcgtcgtcgggacggtggtgcacgtggaacctcgcggcggtggccgcggtgggtgcgtgtctgctcctgatgcacgtggcggcgcgggtggcggacgcgctctggtggcgcccgcaccggctggaggcgcacttcgcgcgacagggcgtgcgcgggccgccgtaccgcttcctcctgggctgcgtgagggagatggtcgcgctcatggcggaggccaccgcgaagcccatgtcgccgccggactcgcacgacgcgctcccgcgggtgctcgggttctaccactactggaggaagatctacggaccgatgttcttgatatggttcgggccgacgccgcggctcacggtggcggacccggagctggtcagcgaggtcctcctcacacgcgctgacgcgttcgaccgctacgaggcgcaccccgtcgtccggaagctcgagggagacggcctcgtcagtctccacgacgacaagtgggcgctccaccgccgcgtcctcaccccggccttctaccccgacaacctcaaccggctggcaccgcacgtcgccaggtcggtggtggcgctggcggagaggtggcgggccatggcctccgccgcgggaggcgaggtggaggtggacgtcgcggagtggtaccaggccgtcgccgaggaggccatcacgcgcgctacgttcggcagcagctacgactccggccgcgtcgtgttccgcatgcaggcgcgcctcatggccttcgcctccgaggccttccgcaaggtcttcgtccctgggtacaggttcttgccgaccaagaagaaccggctgcagtggagcctggacagggagatcaggcggggactcgtcacgctcatcggccaccgcagcgacgaggccgcgcaagacgatgactcggagctgaacgacaagggaagcagcaacggcttccgggacctgctggggctcatgatcaatgccagcgacaagaaggaggagaagaagcaggaggaggcgcgggcgatgcccgtggaggacatgctggaggagtgcaagacgttcttcttcgccggcaagcagacgaccaccaacctgctcacctgggccacagtgctcctggccatgcacccggactggcaggagcgtgctcgccaggaagtcctcgccgtgtgcggcgccgacgagctcccgtccaaggagcacctccccaagctcaaaacgctggggatgatcctgaacgagacgctccgcctgtacccgccggcggtggccacgatccgccgcgcgaagcgcgacgtgacgctcggcggcgtgtccatcccgcgggacaccgagctgctgatcccgatcatggcgatgcaccacgacggcgcgctctggggccccgacgccacgcagttcaaccccgcccggttcggcggcggcgcggccaaggcggcggcccacccgctggcgttcatccccttcgggctcggcccgcggatgtgcatcgggcagaacctggcgctgctcgaggcgaagctcacgctggcggtcgtgctccagcggttccggctcgcacggtcgcccagctacgtgcacgcgccgacggtcctgatgctgctctacccgcagtacggcgcgccggtgatctttcggccggtgtcgtcgcagctatccgtttcagaccggacggagacgacgagaccaccacggcactga

SEQ ID NO: 22842 - DNA, 408 bp, Zea mays
  Peptide Sequence Number=SeqID_64621
atggataacgaagcttacaggcggggaatcggactcgagcacgacgcacgcggatccccggcggcgaatccgagcttgggcgagagcttcaagttttctgagcgcgagggattcgttggggaagctatgcccgaagacgggcggcgacaggtgttcttatgccccccacatccccgcgagagtcggtccattcataacaaattcccggtggatacggagctcgggctcagtcatcgcgagctgttacagggcgcggattcggggaagaaggcggacctgaccagtgggctccatcgcgtcagcgaccgagcactaggcgagcgcgtgggtcagaggggctgcaagtgggacccgcaggtcagcacctatgcgagcgtgaggaggagttattgggctgcgcgggtgtga

SEQ ID NO: 22843 - DNA, 159 bp, Zea mays
  Peptide Sequence Number=SeqID_64622
atggaggcagactacgtaaaaaataagtctttgcttggttacctcgaagagcaatttgatgctcaagcaactgatctaatggaggtggagtttctaggatttgatataagcaagactgtggcactcaagtacatcactggatcacttgagagggattga

SEQ ID NO: 22844 - DNA, 516 bp, Zea mays
  Peptide Sequence Number=SeqID_64623
atggcggccttctcccctggccggcggccttcaccgcctctccgactagccggtgacttccacaaccccttccctagcccggcggtcgacgacggctttctcccccggccagtggcctccaccgcctctctccctagctggcggcttccacagctccttccccagctcggcggccttcatagccccacccaaccaccgtgtgccgcagatccactcataatcggagcaaccgctctcccacgaccgcattttccctggtcagcggactcccccaactcccgcgcaccactcccacgacacaatcggttgcacgacttccacttcgcctgggacaacacacagtcgatgaagataaatagatatccctaccacgactccaaggaagacgaggactacgcgcgtgacagagagctaggacgactgcaaagcctctcaacgtgttgtcaggtccagtggtgttcaggtgctaaaggtccatctacaactattctaagtcgactgtccggaataccatag

SEQ ID NO: 22845 - DNA, 409 bp, Zea mays
  Peptide Sequence Number=SeqID_64624
tgacccaaaggcacatggttgtacacctatcatgcagcaacctgctccaaggggaaatggaagacaaagaccaccaatagagagtcggatgagggatgagcgtggcaatcataggttcgacaggaatgttgattcaccaacacgtgatgggtctggtgaaaatcccgatgatcctatttatgatgtgtttggtgatccagctatgcatggtgccttccatccagatatccctgctcccccggttctaatgcatgtgcctggtgctggattgaaagccaagatatgcctgggcttagcttcaaaacacacccaaatatcaataaggatgtgtttaacagtcagcaaattttgggagcaaaagatccaaataggacctttccgagtggtcaaaaggaaactcctctggtga

SEQ ID NO: 22846 - DNA, 120 bp, Zea mays
  Peptide Sequence Number=SeqID_64625
atgacgccgaggaggaccgacaacaatgaccagttcgtcatcctcaccaccgtcggggtagcttttgtgacgtttgttggtgctgatccgggcgccaatcaccgcaatgaggaccggtga

SEQ ID NO: 22847 - DNA, 252 bp, Zea mays
  Peptide Sequence Number=SeqID_64626
atggccccaggagctgaccgctgtcctttggagcctgagaaccacccaaaccgttccacgaggtacacaccttacttcctggcttataaggccgaggcagtcctccacatcgatcttgagtatggcgccccgaggggctcatggtcgctccagcgaaaacaaagcaaggggcagctagtgacgggcacactaggagccatgatcctgatgcacgaagcattaagggtgtcaccagctcgtgttcgagtctag

SEQ ID NO: 22848 - DNA, 264 bp, Zea mays
  Peptide Sequence Number=SeqID_64627
atggccgcgagaggtccaagaaaacaccggatcatgcgaatcaaggacagaaattccgacgctcacttggaagctgcggcagaaggccaggccaggcctctgcctaggtccgtactgaggccgcccagctcgggtttggcctgggcgcaagccgtctgggtggtgttctgggctttgacacgggcccagacgtcggtggcagtgaggcgtaaggagaggatccaggtgtacaatagggggtgtagcagagtgctacgtgtctag

SEQ ID NO: 22849 - DNA, 774 bp, Zea mays
  Peptide Sequence Number=SeqID_64628
atggatgacgaccttggaagtttgaaatggatgacgaccttggaacctatgggtgtcgctgccggtgggtcacaagtgtatcctgcctctgcctatccgcctgcagcaacagtagctcctgcttctgttgtatctgctggtttacagtcagggcagccattcccagccaatcctggtcatatgagtgctcagcaccagattgtctaccaacaagctcaacaattccaccaacagctccagcagcaacaacaacagcagcttcagcagttctgggttgaacgcatgactgaaattgaggcgacgactgatttcaagaaccacaacttgccacttgcgaggataaagaagatcatgaaggccgatgaagatgttcgcatgatctcagctgaagctcctgtagtctttgcaaaagcttgtgagatattcatactggagctgacacttaggtcgtggatgcacactgaggagaacaagcgccgcaccttgcaaaagaatgacattgcagcagcgatcactaggactgacatttatgacttcttggtcgacattgttcccagggatgagatgaaggaggacggaattgggcttcctagggctggtctgccacccatgggagccccagctgatgcatatccatactactacatgccacagcagcaggtgcctggttctggaatggtttatggtgcccagcaagggcacccagtgacttatttgtggcaggagcctcagcaacagcaggagcaagctcctgaagagcagcaatctgcatga

SEQ ID NO: 22850 - DNA, 837 bp, Zea mays
  Peptide Sequence Number=SeqID_64629
atggcgatggccccaccctcatctgactgggtcattgactatggtgcttcctaccacaccagccctactgcaggcgtgctctctcgctcgcatccacctcatccctcccatccaccattgaccatcgttggaaatggctccactctaccgatcacctcaataggcacctcttcctgtgccacatgtggccccatcgaccatgcttgcaccacacgcggccccgtcatccctgcctgcgccttgcgcggcgccgtcgacccgtcccatgccataggtggccccatcaacgagcgacgctcgcttcgccgaccccaccctcgtctactaccgccacgaggcgccactactttgacgcccactgacctaggaccttcgatgagcacagctcgtttcaccaaccctgtcatcgactatcactgccacgagccggacttgcctgcggtgcccgacatcccgacagcccgctccgatccatctgtgtaccacccggtcgccattcaccgtgaccccgggcatatccacctaatggggacttggagcgacgccgacgttctctaccccgtcgaccgactgatgctggtcactgactggactaccactcctccggacgcctcctcggtccctcctccattcgcactgccctcgccgacccacactagcgtcgcgctatggaggaggactgacctcaaactgctccctcaaccgctacaaggcccgtttgggtccttcggggctttcacccagcgccccggcatggactacgacaagaccttaagcctcgtcatcaagttcgccacctttcgcggtatcatctcccttgcccactcccgggattga

SEQ ID NO: 22851 - DNA, 3081 bp, Zea mays
  Peptide Sequence Number=SeqID_64630
atggagtgcgccgactacctgatcggggtgggcacaatggcgacggcggcggacccgctgcggtggacgaagcagtggaggaaggccaccaacgtcatccggacgtgccacaggctggcccgcctcagtttctcccgcgccatcctgcgccggaccggctcctacgtcgaaatcaagatcgacgacgacggctgcggccccggcgccgccgccagcacgtcgcggtccgacgacgccgctccggcggagttctctgtcgccgcgcacgacgagggcttcaggtgcctggtcaaggacaagcgccacgactgcttccgccgcctcggcggcgccgccgggatcgcgtccgcgctggcgtcggacgcggagaccggcatccgcggcgacgaccgcgacgtgcggctccgccgggaggccttcggcgggaacacgtacccgcggaggaagcccaaggggttctggacccacgtgtgggacgcgctcagcgacgccttcctcctcgtgctgctcgtctgcgccgccgtctcgctgggcttcggcatcaaggagcacggcctcaaggacggctggtacgacggcgtcagcatcttcctcgccgtcttcctcgtcgccgccgtgtccgcggtcagcaaccacggccaggccaggcgcttcgacaggctcgccaccgagtccgacaacatcaccgtcgccgtcgtccggggcggcaggaggcaggagctctccatcttcgacgtcgtcgtgggcgacgtcgtcgtgctcaacatcggcgacgccgtgcccgcggacggcgtcttcatgcagggccacgcgctgcaggtggacgagtccagcatgaccggcgagccgcaccctgtcgacatcgacgccgagaagaacccgttcctcgcctccggcgtcaaggtcatcgacggatgcggccacatgctcgtcaccgccgtcggcacggacaccgcctggggcgagatgatgggcagcatcaccagggagaagaccgaacccacgccgctccaggagcgcctcgaggccctcacctccagcatcggcaaggtcgggattgctgtcgcggttctcgtcttcgccgtgctcaccgcgcgccacttcacgggcagcaccagggatgagcagggcaacccgacgttcgacaggcaccacgtctctttcaacaccgtcttcaccgcgctcgtcggcatcttccagcaggccatcaccatcatcgtggtggccatccccgagggcctcccgctcgcggtcacgctcacgctggccttctcaatgaagcggatggtcaaggagcacgcgctggtgcgcacgctctcggcgtgcgagaccatgggctcggtaaccgccatctgcaccgataagacgggcactctcacgcttaatcagatgaaggtgacggagttctgggtcggcaccgaccgacccaaggcggcggccacggtcgccgccgccgtcgtcagttttctgcgccagggagcagggctcaacaccaccggaagcgtgtacaagccggacaacgtctcgccaccggagatatcgggcagcccgacagagaaggccctgctgtcttgggccgtggcggagctcggcatggacgccgacgcgctcaagaggagctgcaaggtgttgcacgtcgaggcgttcaactccgacaagaagcgcagcggcgtgatgataagggacaacgcgacgggcgcgctgaccgcgcactggaaaggcgccgcggagatggtcttggcgagctgctctgcgtatgtcggttcagacggcgcggcacgcgaactcgacgcgggcaagaggaggaagctccaagagatcatcagcgggatggcggccgccagcctccggtgtatcgccttcgcctacaaacatgtcgacagcgagcactcaaagatcgacgacgaagggctgacactgctgggcttcgtcggtttgaaggacccctgccggccagaggtcaggtctgccattgaggcctgcaccaaggcgggcgtcgctgtgaagatggtcacgggcgacaacgtcctcacggcccgtgccatcgccaaggagtgcggaatcatctcaaacagcgaccacgacgccatcgtaatcgaggggcaagagttccgcgccatgtcaccggaggagcagctggagatcgtggaccgcatccgcgtcatggcgcggtctctgcccatggacaaactggtgctggtgcagcgcctgaagcagaagggacacgtggtcgcggtcaccggcgacggaaccaacgacgcgccggcgctcaaggaggccgacgtgggcctgtccatgggcatccagggcaccgaggtcgccaaggagagctccgacatcgtcatcatgaacgacaacttcgacacggtggtgacggccacccggtggggccgctgcgtcttcaacaacatccagaagttcatccagttccagctcaccgtcaacgtcgccgcgctcatcatcaacttcgtgtcggcgatgacctctggcaagatgccgctcacgaccgtgcagctgctgtgggtgaacctgatcatggacaccatgggcgccctggcgctggcgacggacacgcctaccaaggcgctcatgcgccgcccgcccatcggccgcactgcaccgctcatcagcaacgccatgtggcgcaacctcgccgcgcaggcggcgttccaggtcgccgtccttctggcgctgcagtaccgcggccgggagatcttcggcatcagcgagaaggccaacggcaccatgatcttcaacgccttcgtgctctgccaggtgttcaacgagttcaacgcgcgggagatcgagcgcaggaacgtcttcgccggcgtgctccggaacaagatgttcctgggcatcatcgccgtgacgatcgccatgcaggtgctgatggtggagctgctcacgaggtttgctggcacccagaggcttggcttggcccattggggtgtctgtgtcgccattgccgcggtgtcgtggcccattggatgggccgtcaagttcatccccgtgcctgaccggccgctacgtgagatcttagcaacgaggatgaaaacaatatctaggataatgacacaataa

SEQ ID NO: 22852 - DNA, 462 bp, Zea mays
  Peptide Sequence Number=SeqID_64631
atggcagcagcagcagcagcagtactgttgagttccctgatgggctacctccagctccttcaagaattcaattcgattaaaacgtcaaactttgttctcctgctaaatgcgttgagacatgtttctgttggaccaggcaagaaggacaagctttctgaagaggaaatgcttgcgaagaaggctgaagctgcacagcgccggaggatgcaagtggagaaggacactaaagaaagtgaggagcaagctactagagcacaacacatggcagcaaactcgatccgctgggtcatggggcccaccggaacagttatttcgtttcaacatgcagcagggctccccggcatcttcaactccaagacgcacatgtcaccctcacatcctttgcatgctttgcttgtccgtcaaaatcgtgctaaagtcatgatttcatctaccactttttttggcgagcagctatcctaa

SEQ ID NO: 22853 - DNA, 375 bp, Zea mays
  Peptide Sequence Number=SeqID_64632
atgcccccaagtgtatgctctaaaacacaattaactaggttagaacaaacctggagattgagctatcatgcacgtgatcgtgttatcgctcctattacacaaaccacgaaagcttatgctaaccaagccagggataatcctgtcattgagaacatgggcctaggacagatgggactagcagatcagaggcaggcccccacgtatcttgctcacccccgaggcacgataattgggaggcaaagcgaggaattaaaagctacacgacccaccgtaaaagaagccaccaaggggagatatatcctctggggctcaggggcaactgttggggattggatcctcgggcccacagggggccatgagtcagacagaggatga

SEQ ID NO: 22854 - DNA, 303 bp, Zea mays
  Peptide Sequence Number=SeqID_64633
atggcgagcccagcggcacataggggagtctggcggtggcccgtcaggggggcgcggcccgacgttccggcagctggggaaggtggtcacgactggagggagaggttcgcggcatgggggccaatggcgaagaggttggtggccgtgtcttggggagtcggtggcaggaagaagggggccgtgactgcggcgtcgatggctagggagaacgggctgatggtgggggcgctggtggtcggcgactgtgggagtgcagcgacggttggtggcggccgacaaaggagctgttgccgacgactatga

SEQ ID NO: 22855 - DNA, 1228 bp, Zea mays
  Peptide Sequence Number=SeqID_64634
acctcggcgccataatctatggcgccaaggtctgccacgtgagccgccagtacctcgacgccaagatctatgacgatgagacgtgttatctagcgttcctgatgctcggcccagccacggcactacctatcgggccataccggcacgggcccgacaccagccgtaccgtgccgtgcccaggcactacaggccgtgccatgctccgggccggcccgattagcccggcacggctggccatctatattcccaaggaagctacccgaatagccggccggcgcctcgtcttcttccggaatccggacgacggggcggtacgcgcaagaccctacaagaacctctcactgatcgacgtgctccagagtgccaaattgccaagattggaaaatagaagatacagagatacaaacagagattgcccgataaaacaggtccgccgagccatcagccatgtcgtccacctcggattgacggctattcccgcaccaaggtggttccaaccggagcgtacctcaagtcccgaccttttaccatcggcggtcaccgctggcacatcgactatcaccccaacgggccacgaccccgacaccaaagactacatctccctcttcctcgtcctcgaggagcccgcctccggctcaacagcgaagggggtgaaggctcagcagcgttttcgtttcgtcggtgaggtgccggaagaggaggagctgccggcggtgttgttagcggcggaggaggtgagcaactatgggagccaccgtggatggggggatgcgaggttcgtcaggagggaggattttgagaagtcagagcacctaaagaacgattctttcgccgtccggtgtgacatcgtcgtcgcaatcaacgagttccgcggcgaggacgagacggccgccttcgtgtccgtgcctccgcccgacctacaccgacacctcggcgaactcctgcagaccgggcagggcgccgatgtggtgtttgaggccggcggtgagacattccccgcgcataggtgcgtgctcgcggctcggtcgccggtcttcgctgcagagttctttggcgcgatggaggagagtaaaagcggcagtgcggtccacattcacgacatggaggctcgggtcttcaaggctttgcttcatttcacatatactgacttgttttggaaaacgaatgaagttgaagaggaagaggaagacgatgtcatggctcagcacctgcttgttgcagcagacag

SEQ ID NO: 22856 - DNA, 1983 bp, Zea mays
  Peptide Sequence Number=SeqID_64635
atggaccagctccgccaggtgggcgaggccctcggcggcatccacacgctcatggccttcgccgacgatctccgcatcaacccgcgacaatgccgcctcctcgccgacgcctgcgcgatggccttcgccgccgtcgccgccgaggtgcgcgcccacctccgcttcaacgagcgcctgtccaagtggaagcccctggaggcgccgctccgggagctccaccgcgccgtccgcgacgccgagggctacgtccgccactgcatggagccgcggggcagctggtgggggcgcgccgccgcggccacgcacggcgccgactgcgtcgagcagcacatgcacagcctgctgtggagcgtcgccgtggcgctcgaggccgtcgagctcgtctcggaggtcacggggtccgacccggacgagctcgcccggcggcggctgctcttcgccaaggactacgacagggacatgctggagccggcgctgttcgtgcagaggctcggcgcgcggtacctggccacgcgcgagctcgccgccaggatggacgcggcgtggaaggaggaccggtggctcctgtcgcagtacctcgaggagcggatgagcccgggctcgccggagccggtgccgcggagcaagcaccggctggccgacctcctgaccgcgccgcgcgggcaggtgcacccggcgtccgtgctcctgcagggcgacttccacgtccgcaagcgcctcatgggcaacctcaaggaggtgcagtggatgggggaggccttcgcggtgaagcacctcgtgggcgccggcgccgacgccgacgccgcgtgcgccgaggccgcgctgctcacctccgtggcgcaccccaacgtggcgcactgccggtactgcttccacgacgaggacaagaaggagttcttcctggtcatggaccaggtcatgaccaaggacctggccacccacgtcaaggaggcgaacagcggcaagcgacgggtacccttcccgctcgttgtcgtcgtcgacgtgatgctgcagatcgcgcgcggcatggagtacctgcactcgaggaacatctaccacggcgatctgaccccgtccaacgtgctcgtcaggacgcggcatgccgacgcgcacctgcacgtcaaggtggccgggttcgggcagcacgcggcggcggcggccgcggccgcggccggccactgccacaggcccagccctagggcgtcagcgaaagcatcaaacgccaccagcgccccttgcatctggtacgcgccggaggtgctggagcagcaggaggcggccaagcgcacggagaaggcggacgtgtacagcttcgggatggtctgcttcgagctgctgacggggaaggtcccgttcgaggacaaccacctgcagggggagcacatgagcaagaacatccgcgccggcgagcggccgctgttcccgttccaggcgcccaagtacctgaccagcctgaccaggcggtgctggcacggggacccggcgcagcggccgtcgttcgcgtccgtctgccgcgtcctccgctacgtgaagcggttcgtggtcatgaacgtgaaccccgcccccgcggagcagccagacgcggcggtgccgccgcccgtgccggcggtggactacctcgacatcgaggcgagcctgcagaggaggttcccggcgtggcagcccgggtctgggaacgcggcgccgcgggtctccgacgtgccgttccagatgttcgcgtacagggtggcggagaaggagaggagccgggcggccatcctgcacatcggcggcggcaagggcgcctccgactccagcagcgacggaaactcgctgtgcggggacgagagcggcggcacggcgctgtctgaagccgaggctctgaccgtgtcgagccgcggcgccaccaccacgcggtcgctgccggaccgcgctggcaacaggaaggtggatggcagcagggtcgcctccaggctagcaggcaagccttatgtccatagctag

SEQ ID NO: 22857 - DNA, 246 bp, Zea mays
  Peptide Sequence Number=SeqID_64636
atggcgcaccggacagtgaacaagacatgtccggtgcaccaccggactgtccggtggcccacatgtcagaagctccaacagtcgaaccctaacagttgggtgacgtggctggcgcaccggacagtgtccggtggtgcaccggacttttccggtattacaagacacaagaaaataaattcatatttcatgcaaagagctggtggaagattgtatggaacagtaaagatgtgtcacacccggctttaa

SEQ ID NO: 22858 - DNA, 543 bp, Zea mays
  Peptide Sequence Number=SeqID_64637
atgggggctgggtcccacatgccatgcgaacagaccggaaacagaagaagacaaaccgctgcgtgcgaagcagggaccgagaaaggggttcgaaggctggcccctcagaagggttcgatagccgccccagagcactcgggctccgagcccattactgatcaggggttcgaaggatggcccctcggaagggttcgacagctgctccagagcactcgggctccacgccctttactgatcagggctttgaaggctagcccctcggaagggttcgacagccgccccagagcacgcagagtgagggatgactctaggtacgtctgttacatggccgaggctcgggctacgctcccgaggtccggcaaatcacctgcagcctcgggcgcaacaggaagctccgcctcgcccgaccttaggcctcagcctcgagaagaggtctccgcctcgaccgaccccagcctcggcctcaggagaagtctctgcctcgcccgaccttgggctcggaccgaccgcgccacaggggatacatcattaccctacccctag

SEQ ID NO: 22859 - DNA, 2676 bp, Zea mays
  Peptide Sequence Number=SeqID_64638
atgcccggcataccgagggatgtcgccgagcactcgctggatattcgggccggagcccgacccgtcaggcagcctctgcgtcgattcgacgaggagaagcgcagagtgataagcgaggagatccacaagctaatggcggcagggttcatcaaagaggtattccatcccgaatggcttgccaaccctgtgcttgtgaggaagaaaggggagaaatggcggatgtgtgtagactacactggtctcaacaaagcatgtccgaaggttccctaccctctacctcgcatcgatcaaatcgtggattccaccgctgggtgcgaaaccctatccttcctcgatgcctactcagggtatcaccaaatccggatgaaagagtccgaccagctcgcgacttctttcatcacgccctttggcatgtactgctatgtcaccatgccgttcggtttgaggaatgcgggcgcgacgtaccagcggtgcatgaaccatgtgttcagcgaacacatcggtcgcacagtcgaggcctacgtcgacgacatcgtggtcaagatgaggaaggcttccgacctcctctccgaccttgaagtgacattccgatgtctcaaggcgaaaggagtcaagctcaatcctgagaagtgtgtcttcggggtgccccggggcatgctcctggggttcatcgtctccgagcgaggcatcgaagccaacccggagaagatcgcagccatcaccagcatggggcccatcaaggacttaaaaggcgtacagagggtcatgggatgtctcgcggccctgagccgcttcatctcacgcctcggcgaaagaggtctgcctctgtaccgcctcttaaggaagaccgagtgtttcacttggacccctgaggccgaggaagctctcgggaacctgaaggcgctccttacaaaggcgcctatcttggtgcccccagctgatggagaagccctcttggtctacgtcgccgcgaccactcaggtggttagcgccgcgattgtggtcgagagacaagaagaagggcatgcattgcccgttcagaggccagtctacttcgtcagcgaggtactgtccgagaccaagatccgttacccacaagttcagaaactgctgtatgcagtgatcctgacgaggcggaagttgcgacattacttcgagtctcatccggtaactgtggtgtcatccttccccctgggggagatcatccagtgccgaaaggcctcgggaaggatcgcgaagtgggcgatggaaatcatgggcgaaacgatctcgttcgctcctcggaaggccatcaagtcccaggtgttggcggacttcgtagctgaatgggtcgacacccagctgccaacggctccgatccaaccggagctctggaccatgtttttcgacgggtcgctgatgaagacaggagccggcgcgggcctgctcttcatctcgcccctcgggaagcacctacgctacgtgctacgcctccatttcccggcgtccaacaatgtggctgagtacgaggctctggttaacgggttgcggatcgccatcgagctaggggtcagacgcctcgacgcccgcggtgactcgcagctcgtcatcgaccaagtcatgaagaactcccactgccgcgacccgaagatggaggcctactgcgatgaggttcggcgcctggaagacaagttctacgggctcgagctcaaccacatcgctcggcgctacaacgagaccgcggacgagctggctaaaatagccttggggcgaacaacggttcccccggacgtcttctctcgggatctgcatcaaccctccgtcaagatcgacgacacgcccgagcccgaggcaccctcggcacagcccgagggaccctcggcacagcccgaggcaccctcggcccagcccgaggcgtcctcggttcagcccgaggtaccctcggcccccgagggcgaggcactggatgtcgaggaggagcagagtggggccatgcctgatcgaaattggcagaccctgtacctgcaatatctccgccgaggagagctacccctcgaccaagccgaggctcgtcgggtagcgcgacgcgccaagtcgttcgtcttgctgggcgatgaggaggagctctaccaccgcagcccctcgggcatcctccagcgatgcatctccatcgccgaaggtcaggaactcctgcaagaaatacactcgggggcttgcggccatcatgcagcgcctcgagcccttgtcgggaatgctttccggcaaggcttctactggccaacggcgatggctgacgccactagaattgtccgcacctgcgaagggtgccaattctatgcgaaacagacccacctgcccgctcaggctctgcagacgatacccatcacctggccctttgctgtatggggtctggacctcgtcggtcccttgcagaaggcgcccgggggctacacgcacctgctggtcgccatcgacaaattctccaagtggatcgaggtccgacccctgaacagcatcaggtccgagcaggcggtggcgttcttcaccaacatcatccatcgcttcggggttccaaactccatcatcaccgacaacggtacccagttcaccggcaaaaaattcttggatttttgcgaggatcatcacatccgggtggactgggccgccgtggctcatccatgtcgaatgggcaagtag

SEQ ID NO: 22860 - DNA, 174 bp, Zea mays
  Peptide Sequence Number=SeqID_64639
atgaaggcctgcttgtcatcggtagcccaggcagcgacagggcgctgggcggggcctgggaaggcacgtttggcggagacaccagcgggcaccttgggggcggttggcagcgggccgagggactcgttcttccccaacgacgacaacgcgtcgccggcgctcgacgaatctcta

SEQ ID NO: 22861 - DNA, 1011 bp, Zea mays
  Peptide Sequence Number=SeqID_64640
atgggaaacgccagcggccgcgacgaggacgccgcggctgttgacggcgacggcgccgacgtggaggacggcggaggggactcgtcggagcgcgacttcccatcgtacggtagcggaggagccaaccacgtgcggcgcgcgtgctcagtgggcgtcgtagggggcggcgccgccgccggatcgccacccgggagccccggtcactcgctctcgccgcggatgttcgtgccccaggtcattctatatatggtcctactcttcttgtcatgtggagtctgcaccacaaaaattacagcgttgacacagaactgtgaaaaacaagtgcatatagtgcccgttactcctgtattgcagacccctgtacctccactgcaacgggctgctgatgtaaccccagtgttcaaccagatattgatggatgaacaagaagaatacgatggcccccctcaaaaagaaattcctgctttaattgtctggacccttggaggaaagaatgtatatgttgaaggatcatgggataactggaaatcaagaaaagccatgcaaaaatctgggaaagatcattctcttttgctggtactcccagcaggagtttaccgatacagatttgttgtagatggagaaaggagatgtcttcctgatctcccctgtgaaatcgatgcaatgggcaatgcggttaaccttcttgatgttaatgattatgtccctgaaagtgttgagagcgtggcagagtttgagccacctccttctccagactctagctacagtttccaggcacctgaggacaaggacttcgccaaggagcctcctgttcttccatctcaactccatctcggtgttcttaactcacagaactcggaagaaagctgtgcgcggccgcagcacatagtcctcaatcacctcttcatagagaagggctggggcgcccaccctctggtgtctctcggcctaacccacaggttcgagtccaaatatgtaacagtcgtcctgtacaaacccatcgaacgatag

SEQ ID NO: 22862 - DNA, 276 bp, Zea mays
  Peptide Sequence Number=SeqID_64641
atgaacattgatgatggatacaaggacattatcatcttagctatttcgccagcaaatgcagatttagcaaactctggtgctcttctgttggctcgggttgctgaccctgatgatttagcaaactctggtgctcttctgttggctcgggttgctgaccctgatgatttagcaaactctggtgctcttctgttggctcgggttgctgaccctgatgaaatattggatgtttttactctatatgatcagagcataggaatactaaataagtccacctaa

SEQ ID NO: 22863 - DNA, 282 bp, Zea mays
  Peptide Sequence Number=SeqID_64642
atggcggaggctgtcgcgtctgcgggcaggctcgccatggactcttcgacctccgtctcgcccggccaggtttctgctattctgggctttctgtgggttttcgcagcatgggcgtatgctgaggttctcttccataggaagaatactgcttctattaaaacgattctaagtgctataatggtactccctcctgccagcattacttgtttcttacaaccaaacgcaacagactacaagttaatttggctccctgaaacattaagtaatactgacaggaggtag

SEQ ID NO: 22864 - DNA, 426 bp, Zea mays
  Peptide Sequence Number=SeqID_64643
atgcggatgtgtattttaggaatgtgtaatgcagggtgctccaggtttttaggttgcatcacaaccaaggagcttggaactgtcatgcgttcactgggtcagaacccaacggaggctgaactccaggacatgatcaatgaggtggatgccgacggcaatggcacgatcgacttccccgagttcctcaacctcatggcccgcaagatgaaggacaccgactccgaggaggagctcaaggaggcgttcagggtgttcgacaaggaccagaacggcttcatctctgccgcggagctccgccacgtgatgaccaacctaggcgagaagctgaccgacgaggaggtcgacgagatgatccgcgaggccgacgttgatggcgatggccagatcaactacgaggagttcgtcaaggtcatgatggccaagtga

SEQ ID NO: 22865 - DNA, 654 bp, Zea mays
  Peptide Sequence Number=SeqID_64644
atgctcacggtgtccattctggacgctcaactctcccgctgctgctccgcgcgccatctccttcaaatccacgcgcagttcctcgcgtcgggcctccttgctgacgcctacgccgccagccgtctcctcctcttcaccacctccgcgaccgccgcgcgtctcctgccgcatccgctccaccactccctccaactcttcgggctcgtgcgcagccccaatgccttcacctgcaacactctcctcaaggcggctctgcgccagggctttccccacctctgcttcccgctctacgcctccatgcccgcggcgcccgacacctacacgcacccgctcctcgccgccgcctgtgccgccagaggggacgtgagggaaggcctgcaggtccactcccactccgtcaagcacggattcagcgacaacctgtacctcaggaatgcgctgatgcacatgtactctgcgtgcggctgcgtcgcgagcgcgcgcagggtgttcgacgcgggacccgtgtgggacgccgtttcttggaacacgatcctcgccacgtacgtgcgggacggggacgtcgagcaggctgtcaaggtgtttacgaggatgccagagaggagcgccgcggcaatatgcgtgaagaggggtggcctgtggacgaggcagtga

SEQ ID NO: 22866 - DNA, 414 bp, Zea mays
  Peptide Sequence Number=SeqID_64645
atgcattcaatggacagaacacgtactaactggtactgctacgcgaagacggtcgtgtgggaggcggtggtcaccccggtcggtggtggtgctcggcgagctgctgcagcccagagtgaacaccagcaccctgcacaaactcgagtgcctcgctgggcaggccagggagtagtggagtacgtcaacgagtcgcatgcctacgtgcacgtcaagaacgccgccgaggcgcacgtcagtgtgctcgaggcgcccggcgccggtgggcggcggtacgtatgcgccgcgcacaccctgcaccgcggcgagctccgccgcatcctcgtcggactcttcccagagtaccctattccggcggcaagccttcaatcaagaatcaagatccacaacgttacaagcttacgaaccaacctctga

SEQ ID NO: 22867 - DNA, 309 bp, Zea mays
  Peptide Sequence Number=SeqID_64646
atggagtcgccgtcgccgtcgtcgtcgctgagcgcgctgcggcacaggctgagggccaccgtgtgctgctgcttcggccagggcggcggcccgggcgagcggacgtggtggcgccgccgcgcgggcgtcggggagttccggtacgacccgctcagctacgcgctcaacttcgacgagggcgacctcgacgtggaggaggaggagcaacagcagcagcggggagtccacgcccaccgcggcgacggcctgctctaccacggcttctcgtcgcggctgtccacgccggccgtggtcgtcgaggtcgcgtag

SEQ ID NO: 22868 - DNA, 1045 bp, Zea mays
  Peptide Sequence Number=SeqID_64647
tggtccattgagccagcaccacatgcgaggagctgggaaggaggatagaactgcggccggcaacctccacggcccttctttctcctccgaccgggcgggcccagtcgccagctcagctgctgaatcgccaaggacgatcgagcgcgtgtgcgagactgcgagtggagtgggtgatgatggcgacccttctctgagccttgacctgcgcgtcggcctgccgccgctcagcctccaccaggcgccggtggccgtcgccttggccaggcccaaggtgctcgtcgaggagaacttcctgctgcctcccaagaaagaaccagaggtggcggccgctctcgagtcggagctacggcggatgagcgaggagaaccggcgcctggcggaggcgctggccgcggtggtctccaagtacgaggcgctgcgcagccagcacacggagatggtggccgcgtcgtccgcgtcggagggcgggtccgtgtcgccgtcgcggaagcgcaagagcgagagcgcggacacggcgccggtgcagcgccttcaccagcagcacgcggcggcggacctgtcggaccccagggtgtcgaagctgtacgtgcgcgccgacccggccgacctgagcctggcggtgagggacgggtaccagtggcgcaagtacgggcagaaggtgaccaaggacaacccctgcccgcgggcctacttccgctgctccttcgccccggcctgccccgtcaagaagaaggtgcagcgcagcgcccacgacgcctccgtcctcgtggccacgtacgagggcgaccacacccacggcccgcccccctcgggctcgggctcgggttcgggcgccagcagcaagaacgccgcgaagccgccgtcgccgccgcgccgccaggaggctgctgtcgcggtgactgcggccgcggcggcgtcggagatggtccggcggaacctggcggagcagatggcggtgacgctggcgcgggaccccagcttcaaggcggcgctcgtgtccgcgctgtccggccggatcctcgagctgtcgccgaccaaggactga

SEQ ID NO: 22869 - DNA, 1202 bp, Zea mays
  Peptide Sequence Number=SeqID_64648
atgggagggcacagacgcatagtccagaccgaccccgacctcggcgttccatggaagggcgtggtccactctgttgagctcctcgtccttgcagaggcgtacgcgcaggccgaggagctctccgtcgagcgcgagcatctcatcgccgagctccagttcctgcaaagcgccagccgcgagcgcggggagatctcccaggcctgcctccagcaggaaggagacgcggtggtccagggacaagctgtcgtcgtcggcggcgggggcggggggctgctgcggaggcagcagtcgtcgcggtcgctgtggatgcggcacgtgaaggtcatcgacgtcgtcgtctgcctcgtgttgttcgcggcctggctggcgggggtgcaagggttccagtctcttctaaatgtgagaacaaaaaagcgcagaaccttctcgtcggcgatgggggaactagatgcaaagccagtgaagaagacgacgataagagtgagggagtttgacgtggagagggacctccgggctgtggaggagctggagcgactgtgccaggtcggcctgtctggcgaccaaggctctgaccaccctgtcgccgaccattatggcggcgcagagaagacgacgaggagcagcaagaagaagaaaggcatgtcgctctacgtcgagcagatcggtgacccgtttgcccgggtgcgccatgcgccggacaacgtcatactggttgctgagtacggcgaagaagacgaggttgtgggagtgatcaaggcgtgcaccaggatggtgagcagagggaagaagaagcaaagcctcggcagcagctcaaagcagtttgtcaaggtggcgtgccttcttggcctcagggtgtccccctcccacaggcgcctcggggtcgcgacggagctgatccggcgtgccgagacgtggtgcgcggcgcgcggcgcggcgtacgccaccatggccaccaccgagtccaacgcggcgtcgctggcgctcttcaccggccgcttcgcgtacgcgccgttccggcggccggcgttcctcggccgccccgtgcaccgccaccgggtgcgcgtcccgcgcgcgcaccgcgtgctgcgcctgcccccgccgctcgcctcggccgcctacgccgcgctgctcccgccctcggccgccgagttcctccccgccgacctcccggctctgctcaaccacttgctcaccctcggcac

SEQ ID NO: 22870 - DNA, 1314 bp, Zea mays
  Peptide Sequence Number=SeqID_64649
atggcgccgccgctcagcctccctccgccccaccactccctcccccacctcctccgccaccgccttccgctgcgccgcctcgtcgcggcccacgctctcgccgccgtcgccggccacctgtcgctcccggatccgcgcccccataccatcctcatcgtcgcctactcccgcctcgagcgccctttccccgccgtgctcctcctcttccgctcctgcctccgccgctccctcgcgcccacccgccactccctcccgctcgccatctctgccgccgcctccgcgggcctccgccacctcccgctcgcgctctccctccacgccgtcgcagtttaccgcaacctcctcccgttccagcatgtggccaacgcgctcgtctccctgtacgccaggcacacgcgcctgggcgacgcgcgcagggtgttcgaggaaatgccctccgcccctgacgtcgtctcgtacaacacgctgatgcacgcttacgtgaacaccgggagtgtggccgtcgctcgggaggtgttcgaggggatgcctgtgcgggacgccacgtcctggggcactgtgatcgccggctctgccaaggcggggcagctggaggaagcgatggcactattcgacaggatgctggaagaggggttcaggcctgacgatgtagccctggccgcggtgctttcatgctgtgcgcagctaggggcgctggacaagggccgggaggtgcatgggctcgttaagctgagcaggccccggccgaacgtgttcttgtgcacggggcttgtcgatctctatgccaagtgtgggtgtgttgaggctgctagggagatgtttgaagcatgccaggataggaacgtgtacacatggaacgctctcattgtcgggctggcaatccacgctggccttgtggacttggcaaggcgcatcttccatgacatggagagtgtgcacaatgtgccacgggagctgaaacactatgggtgcatggcggacttgcttggtcgggctggactcattgaggaagccatgaacatggtaaggaagatgcccatggaaggggacaattatgtatggggaggtattcttgctggatgtagaatgcatgggaacgtggaggctgctgagcttgcagctcggcatttgttgcaactgaacccagatgacagtggggtgtattctgccatggctgggatctatgcagctgcaggtaggtgggaggatgtcgtgaggattaggaagttgatggatgaaaggattgtcaggagaaatgttgcatgcagctcaattactacagagctcaaagatggtactattatgctgagctga

SEQ ID NO: 22871 - DNA, 531 bp, Zea mays
  Peptide Sequence Number=SeqID_64650
atgtgtcatcacaagttggcaacatacaagcatgaactcatcggccttacggacatacctctaaggcccttgttccacctgcccaatgagatccatatcgcaatcatggacaatgaagaggtctacagtgacttgactgttgactacttgaagatgttgctcctaaatgttcccgcagctgttgtagctctggcactattcttctttttggatgatttcacgggatttgaaatcacatatcttcttgagttgccggagcctttcagtttcatcttcacatggttcgccgcactgcctttaatattttgggtagcgcaggcgatcactaatgtcatagtgaaggacttcctgatcttgaagggtccgtgtccaaactgcgggaatgaaaacctctccttcttcggtaccatactgtcagtgcctagcggtggctcaaaaaacagcgtgaaatgtgcaagttgtggcactgagttggagtacgactcttcaacccgattgatcacactcccagaaccggctgaggctaaataa

SEQ ID NO: 22872 - DNA, 450 bp, Zea mays
  Peptide Sequence Number=SeqID_64651
atggagagggtgcgcttgagcactgtggacgcctctgtagcctcaaacgtccatgcaaaggcatcattgcgcatcaactatgtcatagcccatagggcttatcaaagacgacatcgtactactagagtaggtggcctagcaatggttgctagtggtcgttggcgatggagtagagcattggtggtgtgttgtggcatggggatcccttcaaaggatgtggtagtcacctctctagaatgccatgtagaggacctcaaagtcccacatgatgggtcccaaggtttagaggtagtcgatgctgaggacgaggagggcaaggagccgatgaccatgggtggaggcatggagggagatgactatggtgttggcctagtcatcatggtccaccttggtgcccgcatccctggatgccacgtcaagcaaatattcagtgaccttaagatagaatag

SEQ ID NO: 22873 - DNA, 747 bp, Zea mays
  Peptide Sequence Number=SeqID_64652
atgcaggagtcgaaggagccctcgcctctaggacgacgtgatcaccaaaggcaaacgcaagtaagcgaggctgcattggcacaaaggcttgaccaccgaggcttgatccaggaagcacgaaggataacgacccccctcgtggacgaaggcgtacaagacttggagatacgaagagttgtcctctactatgaactggccacgtggtcccacctgctacccccctacgtggtacaacattcggtgtatgtaggtctagaggcgaaggccgccgccctcagcaacggcatcagcgtcttcccctccctcgtctcgtcaatcccctcgcgccctctcctccgcgggagcgagcagctgctgctccacaaggcggtcgcgccgctttgggagcgcctgtgctccaaagcgaagctttacccaatggaagggcgccgctcaaatgaagtatcatctgccgaagctgtcttggtgggagcattgtcgtctggtgtcaatgctcccacgtggtttgtgctcaagattacgtttttgctccttgcattgtgttttacggctatgcttgctctagcattttcgtcgaagaactttgtaatcgttgcacatgttcttctgctggtgactattggaaccgtgctatttgtgctgcttaacaggtttctggctgaagttgggctcgtgcctgttgaacagcagatgaaggagatgggcatccacaaaacagaagccacagatgaagacaagagaaattaa

SEQ ID NO: 22874 - DNA, 1332 bp, Zea mays
  Peptide Sequence Number=SeqID_64653
atgtttttcgacgggtcgctgatgaagacaggagcaggcgcgggcctgctcttcatctcgcccctcgggaagcacctacgctacgtgctacgcctccatttcccggcatccaacaatgtggccgagtacgaggctctggtcaacgggttgcgcatcgccatcgagctaggggtccgacgcctcgacgctcgcggtgactcgcagctcgtcatcgaccaagtcatgaagaactcccactgtcgcgacccgatgatggaagcctactgcgatgaggttcggcgcctggaagacaagttctacgggctcgagctcaaccacatcgcccgaccctacaacgagactgcggacgagctggctaaaatagcctcggggcgaacaacggttcccccggacgtcttctcccgagacctgcatcaaccctctgtcaagaccgacgacacacccgagcccgagaaggcctcggcccagcctgaggcaccctcggctcgacccgaggtactctcggcccccgagggtgaggcactgcgcgtcgaggaggagcgaagcggggtcacgcctaatcgaaactggcagatcccgtacctgcaatatctccaccaaggagaactgcccctcgaccgagccgaagctcggcggttgacgcggcgcaccaagtcgttcgtcttgctgggagacgggaaggagctctaccaccgcagcccctcaggcatcctccagcgatgcatttccatcgccgaaggccaggagctcttacaagagatacactcgggggcttgcggccatcacgcagcgcctcgagcccttgttgggaacgctttccgacaaggcttctactggccgaccgcggtggccgatgccactagaattgtctgcacctgccaagggtgtcaattctatgcaaggcagacccacctgcccgctcaggctctacagaccatacccatcacctggtcgtttgctgtgtggggtttggacctcgtcggccccttgcagaaggcacccgggggctatacgcacctgttggtcgccatcgacaaattctccaagtggattgaggtccgacccctaaatagcatcaggtccgagcaggcggtggcgttcttcaccaacatcatccatcgctttggggtcccgaactccatcatcaccgacaatggcacccagttcactggcaggaagttcctggacttctgcgaggatcaccacatccgggtggactgggccgccgtggctcaccccatgacgaatgggcaagtagagcgtgccaatggcatgatcctgcaagggctcaagccgcggatctacgacgacctcaacaagttcgacaagtga

SEQ ID NO: 22875 - DNA, 612 bp, Zea mays
  Peptide Sequence Number=SeqID_64654
atgtcgggggcgatcaccgatggaaggccgcagttgggaggatgtcgggggcatgagcacggcgcacgtggcgatgatggaggttttcctaggatggcgcgatcgggatcctgggattgcgcgacccagaggggcgaagggggaggatgtcgggggcagaacatggtacacatgtggacgcctacaatggagacttgccagttccctaggccccgctacaggttcaggcgacgacggtgcctgctagtgcgggggtggaggctcgtggcagcacaaactgcatgtgctgacttggtggcggaggcggaggccggtgctgtcccagtggtggaggcttgtgctgcccatagcaatgacgcgtcggggtgggcgacgccagtggatggaagggggataggggcgcgacagttgtggctcgccatcattggaagcgtggatggaaggattgcgccgatggaaggatgtggggaggatgtcggggggcggtcaccgattgaaggccacggttgggaggatgtcgggggcatgaacacggcacatggggcgatgatgggggggcggatgatggaagttttcctgggattgcgcgatcgggaacctgggattgcgtga

SEQ ID NO: 22876 - DNA, 573 bp, Zea mays
  Peptide Sequence Number=SeqID_64655
atgggaatatccatagagggaggagtagggacagagaagggggcgccgagtctttgccctagggaagttgacagggtgcaggttcgaatacctagcttcgatgggggagatggggatctgaccatggagcttacgactgcatgcgcccatgatagaggaatgggaacaggagtgctgagtggggggaggagagcgttggcaagctcatgtagaaagttgggtgccgagtgggggaatggagtagagggagccgagctgcccattagaggaggaagaaggggacgtcgagctcacaaccatggaggagcagaggggtccggcttgtcctggcaggtggtgagctcggccatgggagaaatggcgcccgcgccttggggaagaatggatctgtgcttgggagcttctgctgctagcgcccatggaagcgaggccaagcagggggaacctcggccatgggtgattacgccatgggaggctctgagcagggggcaccgacgaggaaagtgttgctggggaatgggagctgctactccctgctctgaacagatcggaggggagctcagcgtgtgctga

SEQ ID NO: 22877 - DNA, 426 bp, Zea mays
  Peptide Sequence Number=SeqID_64656
atgggcggcgccgcggtgctgctctcgaaccggcggtccgactggcagcgggccaattttaggatattcagagacaaacatgatgagctgctgagcattagagaacacccagagacaaacacgacaagctgtattttggtgattgagtgccaacacaagtgcttttgtgttaatctatacaaagtggtggacaaagtgcaaatcatgtcaaaagtgctggaaataggaaaaattaagttagagaagagatggcttcgttcagccaaagtctactcagtctgggtgcaccggactgtccggtggtacactggacagtgtccggtgcgccaggctgactctggtgaacttgctgctctcgggacttcgacggcggtgtatgactattattcaccggactgtccggtggtgcaccagactgtccggtga

SEQ ID NO: 22878 - DNA, 1017 bp, Zea mays
  Peptide Sequence Number=SeqID_64657
atggaggggattcgccgattcgccaagtcaatcgccgccaagtcgggagagagagggagcagggagcgagcgggccgtgccgtgccggcccacgtgcctggccagcagcccaggcacggcctgctccactgggccgtgccagcccgggcccattccatacgtgctgggccgggcgcgaaccgggccaaaaaaaacaggcctcgggctgggttaacgggcccgtgcctcatgtacatctatatgcacaacgagacggccacgggcgtcaccaacgacctggccgccgtgcgcgcgctgctggacaagcacgcgcacccggcgctgctgctggtggacggcgtgtcgtccatctgcgcgctggacttccgcatggatgagtggggcgtggacgtggcgctcacgggctcgcagaaggcgctgtcgatgccgacggggatgggcatcgtgtgcgccagccccagggcgctggaggccagcaagacggccaggtccgtgcgcgtcttcttcgactggaaggactacctcaggttctacgacatgggcacgtactggccctacacgccctccatccagctcctctacggcctccgcaccgcgctcgacctcatcttcgaggaagggctggacaacgtcgtgaggaggcacaaccgccttgggacagccaccaggctcgccgtcgaggcgtgggggctcagcaactgctgccagaaggaggagtggttcagcgacaccgtcaccgccgtcgtcgtgccgcccaacatcgacagcgccgaggtcgtcaggcacgcgtggaagcggtacaacctcagcctcggcctcggcctcaacaaggtcgccgggaaggtcttcaggatcggccatctcggcaacctcaacgagctgcaacttctgggatgtctgagcggtgtggagatggtgctcaaggatgtggggtacccagtgaagctaggtagcggcgtggcggccgcggcggcgtacctgtcaaactccacgccgctcattccatctaggatctga

SEQ ID NO: 22879 - DNA, 234 bp, Zea mays
  Peptide Sequence Number=SeqID_64658
atggagtcgtcggttatggcggcacagaccatggagtcacaggctatgatggcgcagctgtccatctgtgtacttgattgtgatgataaattgaagccagtaattggaacgtcatttggttctctagaggaggtggaagaattgtacaagatatatgctcttgagaattttattggctgcaacattccagaacatatcgaaatccatccaccatccgatgttcactcccagtaa

SEQ ID NO: 22880 - DNA, 213 bp, Zea mays
  Peptide Sequence Number=SeqID_64659
atggagcagggcaccaaaagcgatgacactagacaccgagatgctgctgctgggcattttgtcgaacaacacgcaagcatgacaaggtccaaaatggagatcgacggtgttctgtcggggagggcgtgctatggaggagcggcgaagaagcagcacgatgacggaggaacttcaaggcgatggacaacagcaactatgcacaaggagcagtga

SEQ ID NO: 22881 - DNA, 222 bp, Zea mays
  Peptide Sequence Number=SeqID_64660
atggcgagcgagagagtgcgaggaatgagagagagctcgggtaggggagaaagagaggagagggcgctcggttttatagggaatagaagggagaaggagagtcggctagggagagaagaacggttggcgtcttcaagaccattgatgcgtcggtttctctccatggctttaatggagagcaaatgggagagggagaagaaacggtcacgtgaagctccttaa

SEQ ID NO: 22882 - DNA, 465 bp, Zea mays
  Peptide Sequence Number=SeqID_64661
atggaggcccaggcccacacgtcatgtaaccggtgcgccggttactacgtgcgagaaactacactgccactcgcgccagtcccgcacctcctcgactgcggaaccagtgccgcaactcgagggaaccctgcgcacggcccagcagtgccaaccaggcacgccggtcacggggcaggcggcacctttggcaggcaaagagggcgacgcttcacctccgccataatgaccgcgtcaaaaagggaccgggaaaggggatactccgaaagggatccttctccacgaaggaaacgggccccgagcccccctactgatcagaggttcgaaggctggcccctcggaagggttcaacagccacctcagagcactcgggctccgcgcccactactggtcagaggttcgaaggctggcccctcggaagggttcaacagccgcctcaggccactcgggctccgcgcccactactga

SEQ ID NO: 22883 - DNA, 189 bp, Zea mays
  Peptide Sequence Number=SeqID_64662
atggagcagatggcgcatgatgaggaggtcgacgaccttggggacctagagagcatagtgtcgctggtggtggatgcgagggcagggattgaggagcagccggcaccgccgactgatgttggcgagggccccgtggaggcctccgcgccgactggtgaagacacttcggtggcggttgagagcacctag

SEQ ID NO: 22884 - DNA, 135 bp, Zea mays
  Peptide Sequence Number=SeqID_64663
atgggcagcgcgtgcgccgtcagtctgcggcgtggagcactgggctctgttgggggctggaagaaacactgttggccgttcgatcttcaacggatgaccagtgttagatctagctcataccgaaaattcatatga

SEQ ID NO: 22885 - DNA, 342 bp, Zea mays
  Peptide Sequence Number=SeqID_64664
atgggtcggcgcgaggccgagcgcgaaggggggagagaggtggccggagacgggcgtgagagaggtggaaatctcgcggccttcgtgttcgtcccgcgcccaggtcggcatgagtcagcttggggtagggtaatgatggcgcctcctgtcgatgtggccggtccacgccctaggttgggcgatgtggaggctcctccgaagtcgaggtcgagtctgtcttccgtggccgaggtcgagtccgagcccctgggttgggcgaggcggagaccgtcggctgaggccagggcggagtccgagccctggggtcgggcgaagcggagttcgtcatcttccggtgcttag

SEQ ID NO: 22886 - DNA, 327 bp, Zea mays
  Peptide Sequence Number=SeqID_64665
atggagcttgagggggacctagagggagatggggcgcgcgtggtaccagagcaggagggcgcgccaccacggcaaggtggagaacgagcagaggcgccgagtggagggccacgacgaacaaagaagcttgcgcgcaaccatggaagacgggacttggtggggcgcggccttagacggagctcaactcggagccgagaccaggggcacacgacggcgaactgggcgcagaagatggaggccgagggtggcgcgcggctatggttggggcgagctgagggggccgccatgggagaagacgagggcgcacacagagaggagcgcgcgtga

SEQ ID NO: 22887 - DNA, 189 bp, Zea mays
  Peptide Sequence Number=SeqID_64666
atggatcggagctgggagagagggacgcagggaggacgccacggctgggagctgctcgcggcagcaggcgcgggaaggatcgagctggaggaagatgacgcggtggagaagaaaatagactgggcagcgggattttatcccccggcggctggagatcttttctcccctgagcggcggccggatggctga

SEQ ID NO: 22888 - DNA, 261 bp, Zea mays
  Peptide Sequence Number=SeqID_64667
atgggagaccccacggcggcacctgctttctctctcctctctctggtcgcgcgacgtctggatggttatagggaaaagcgaccaacaagtgggtcccaccgaacggtgacagaagtggttccaacgcgcgatgatgactcggtctcgcagacaaatgggccccgtgtgtcatccacgacgtggcgccaggaatggaaattgggctgcgcggcaggaaatcctggtgggctggaatctcaagattgggcccaagcgcggccg

SEQ ID NO: 22889 - DNA, 393 bp, Zea mays
  Peptide Sequence Number=SeqID_64668
atggcctccgctcggtgcgccccctctctgatcgaccgtgcccatgccgccaccatctgccagggccgccaccaacgacgagatcgagtgctccgccgacccctgcagccgggatgcccgcggtgtggtcttcgctgggtgaccggggttcaccggtccgcgccgcgcgttctcgaagctcggtggagcttgcgggatttgtcatcggggcttggagtgccgcggatccgcttctcatcgtcgtcagggcaccttgttgcgttaacacgcgatgaggtatctcccattctgttccccttttctctgcttcgtttagcatacctccggatggtgttcgggatcttgggaatcggtggtcatacaccggccatggcgtggccgtgggtaggctag

SEQ ID NO: 22890 - DNA, 552 bp, Zea mays
  Peptide Sequence Number=SeqID_64669
atggcgggctcgtctaacggcggcgatgggacgcaagccgcggcctggtgggacgacgtgaacaactccacgctgtggcaggaccgcaccttccacgccctcgccgcgctatacggcatcgtcgcagtcgtagccctagtccaactgataagaatcgagtgccgggttcctgagtatgggtggacaacgcagaaggtgttccatttcctaaacgtcattgtcaatggcgtgaggtcaaccgagtttgtactgcggcgggatgtgcaacttgtacaccctgagcgtttccctgttgagtcaaaaggccgccggaaaaaattgaatgaggttggctatgtgaccaccatttgctttggttgcttcttgatcagatgcataatgatgtgcttgagtgcttttaacaaagatgctgatcttgatgttctgaaccatccaatcctgaacttcttttactacctgctggccgagattgcaccctcatctttggtgctgttcatcttaaggaaactgccgccaaggcgtgggattgcacaataccatccaatccattag

SEQ ID NO: 22891 - DNA, 1179 bp, Zea mays
  Peptide Sequence Number=SeqID_64670
atggctgagaaggaggaaacaaagggccgctgccctgcctgccgcacacgctatgacaaggatatgatcgtcaagatggccgccacttgtgacagggttatccagagaaatctggtgtacataattgggctacctgcgcatttatgcaatgaaagcgtacttgagcgcagggagtactttggtcagtatggggaagttttgaaggttttagtttcccgtctgactgggcctccctctcagcaggcatcagcaaacagcagtattagtgttttttcccttaaggacaggcctggtgcagtggtgagaggcctttccactgagccaaagggcctgggtttgacgcagcctctgcgcaaaaatgtagggttaaggattgcctcggttattacttccccagacccgactcatgcgggagccgtcagcactggttatcggatcccgcatcgtggaatgcttgccaaagggaggaaggtagctggaaggcgtgaagaaatgtctgcaaattatgcgtttggaccacaggatgatgatgcgattattaaacacaggcttctgactaggacaacgaccaccaggggtgaaccgccactaaagaagcttcagaagaagttcatgtcctttgcaactgagatcgagaaggatgcagataacataagtgactgtgaaagactgtacaaggcctttctacatgaaattaacacctttgagctacctcttctgaaaagcaaggctgtggttgatgcaaacattagggagaaagaaagctttaatgagctgcaggttgagattgagcggcagatcttgcatgctaagactgatattgaggaccttaagaagcaacttgagcagagcaagattgagaggcagcacaaagaagagtgtgaagccatccggaagctgattagtttgcagcctccacggtcagaaactgaaaaactcattgcagaccttgagaaggagataactgatttgaaggcggagaatgtagcatgcataaggaatttggaactgaggaagaagcattttgcccttattctacatgtggttgaggaattgcagatctcgattgaagatgagcagaagagtatagcagatgagctgagagctattgctggagagcagaagatgagcatggaagaagggagcgtcggtgcttcagattccatggttgttgactga

SEQ ID NO: 22892 - DNA, 1836 bp, Zea mays
  Peptide Sequence Number=SeqID_64671
cggctgcctccagtcctccgccctcccgctccagcggggctcgccattgatggagtacgagcgcatccacgggccgctcccgcgccatcaggtgcccgccttgccgcgatccccgcctcaattcggtgggttgtcggttcaattcgccttctgtttcaccattccgattctgcctccgccacatttcaccctttctctcgcgctcgcggtgtcactgactgaaccatttcttcttccgccctgctctgccccccagtccgggggattctctccagctaagctgcgagcaatgcttcgcgggatagagaaacgccagcgcaacaacggcgaggactcgtctccggaggccaacgactccggcgagctcgacgaccggaggagcttggaatgctccacctccaccgagatgtcgagcaacagcggccacaggtcaagaaaccgtgccccggacgacgacagcttcgactcggagagcagctcgtcggggccgccgacggtgaagaggtcggccgcggtggccgcgttgctgccgcccttctctcggccaacgccgtccaagtgggacgacgccgagaagtggatctccagcccgacgtcaaaccgtactggccgtacggggcctaccgctggagctgtgccgaagaagtctgcattggccttccctgactatggaggccgcccgccagccgttgctaaggtggtagcggatgtgcctaccaacgctggaccagatggtctcgcccatcctgatttacttaagcctggacacaatgcttcagtagttgttgacggaacagcacctgcagttaggtctgtctgtatgagagacatgggaacagaaatgactccaattgcgagccaagagccttctcggaccgcgactcctataatcgcatctagtccaacctcctctcggacaccaaccccgcaacgcaccgcagaattcagtgtgagtaatatagatcctaaaaagatcgagatgcctgaagaggaggaggtacagatgagtacgagacaggaaattatggatcttggtgaaaggttagggaagaccactatagccgcatgggcaagcaaggaagagaaatctgccgcacgtttcacggataccacagcctacaaggctgccgatatcggtagggagaatcgagccgcagattggcaggagacggagaaggcgaagtatcttgcaaggtttcagagggaggaagcaaagatccaagcttgggaaaatctgcagaaagcgaaaattgaagctgagatgaaagggatagaggccaagatagagcggaaacgggcgcgcgagcaggacaggctcgccagcaagctggcagccgtaagccaccgagcggaggcgaagagggagaccgcggaggcgaggcggaaccaggaagccgcgaggacggaggagcaggcggcccggatccgatacaccgggcatacgccttcgtccttctcctgctggtgctgggtggcgccacctgtcctcgtccaccttccacccctctcgcccggggctataaatgatacaccggccggcagcaaccaccctatggagtcgtcggcggcgatgacgatggaccaccaccgcgcggcgccgtcgctgtcgacggaagagaaacggcggatcgagcgggtggcccggtgcgtggcgcgggaccgggacggcggggacctcacggagaagctgctgctgcggctgctcggcctcacgcgcaacgcccgccgctggggcttcctcgcgccggaccacccgctccacccctactacctccagcacaaggtctccgagcgctgccggatcctccgcccgcgccacgccgccgccgaccggcg

SEQ ID NO: 22893 - DNA, 240 bp, Zea mays
  Peptide Sequence Number=SeqID_64672
atggctgttgcaggtattggtttgtcttctcagcctcaacgaacctatgttaggacaaggaagcgttcaataaatgcagaagctcaagatattggagaagatgacagtgatgctcaagaagatggtgctgctgcagtacaagcagaagtagaacaacaacaaacacaagaaacagctggagatacggatgaagatggtgttgctgctgatgcattttgcttggatgctgatctgctctag

SEQ ID NO: 22894 - DNA, 525 bp, Zea mays
  Peptide Sequence Number=SeqID_64673
atgagggccagcggcgggcggatctgggccggctgctggacccgcgtgcgcgttgccgtggctggcgccgccgtgggggagccatggccatctgccggcggtaggcgcgccgggggctgcgccggcgagcaggaggagggagccgacgtggtggagcgggtgttgggccgtgcccgcgccggcgttggggagggagggcgccgccaccatcgcgggaggtggggcgggcgggataggtgcgcaagggggaccgccgtgcgcggcggccagcggaggaggttgggggcaaggcacacgaacgcgcccgcgccgcgagcggggaaggcggggaggccagggctgccccagccagaggccgatggcggaggttgggagcggggagtagaggagagggggccagcggctcggatgtggccgcccctgtgctcaatgtattgcacagagaaggagttacaatatagacttaaccctaatcctaatgggccggcagcccaacagtggtgccggcccacacacacagtctaa

SEQ ID NO: 22895 - DNA, 867 bp, Zea mays
  Peptide Sequence Number=SeqID_64674
atggttgttgatggcaacaagtcaagaattacacactcaaaaacaataaaaaagcctgagcatcctatcacacaagcatctgctcttaactttgataacattatcgcacctctaagggggtcattaagccctagaataacagaagaccaccaacaggcactgaaggaaccagggcatttgctgaatagtttcaatgaatccagctatactataaaccaaaagaaaaaggaaaagaaaggacatgtagttggcttcctaattaaacagagccgtgcggttcccacgaacccgctcatcctacgcgacgagcagctcaagatcctagaccgccgccgccgcgcccagcgccacgcggcggggcccgtccccacgccgacgccggccacctccaccgcgctccgctccccgtcctttctcaccacccccgccggatccgtcgccggcggcgtgggaggtcccgacgccgaccacgacgacgacgtagcggccgcggtctccctcgacggcttcttccgccgcttcaccagcgaggacaacgactccttctcgcgcatcctagacaaggtgaaccagcgccgccgcgagcgctacgcgcacctgctggagccgccgccgcctaccgaggcggggagcaaagcgtcagagggcgccaagcgcgacaggatcacggacgggtacggtacatcggggcagccaccgagtacgctcgagggcgccaagttcacggcaaagaaccagctcatgtactacccggctgaccagggggaagcgcccctcacggaggaggagcgcgcagagcggctcagggggatgaccaaggagataaacaagccgaacaccaggctacatggcagagccacgggctga

SEQ ID NO: 22896 - DNA, 409 bp, Zea mays
  Peptide Sequence Number=SeqID_64675
atggagtttaggtcgtcgaggatttactcgagccacgtgcacgagatgcaacgtttggggtattttggaatggagttgggcgggcaccgggggctgaagatgtccccgagatggaggaagaagattggtggattgattgcccaatttgggtcttgcacattcacgccgaggactgggaagacgtcggtcgaagttgttgaaattgttccgtgtgccaagaacaagtgggatcggatggtgcagagccctgccttcaccattgatctgcgagggtgggatgcagtcgcctttgttaaggaggtggagttggaggctgttaaaattgttggaattgacggggacatgcgctgggcctggggaggttatgactttgctcgaactccgggaaacatcttcacaaatgttaaag

SEQ ID NO: 22897 - DNA, 456 bp, Zea mays
  Peptide Sequence Number=SeqID_64676
atggttgggggcaaaggtggcaagggcaagtacgacaggaaggaccaaggcgggaagcgaaagcgtcatccaacacctccgtcggaggacttcggtatctctgacttctcagaggagcagttctccttcaagggcgaggagtatctgcccccggtcctcctctcgtcgtcctccaagggcttggacgacttaatgcagctctcggcgcggacagggctcgaaggatcgtattactcgaaggaggaggactcctcagaggatgactcgttggaagactccgaggaggaggacagcggcggcgaggatgggagcggctacgacggtgatgatgagggtggcagcggcagcgataagggcgacgacggtagcgacgatagtggctacgatggcggcgatgagggcagcaacagcaagggcggtagtggcaacgtcggtggcaaggaaccactgatgtaa

SEQ ID NO: 22898 - DNA, 528 bp, Zea mays
  Peptide Sequence Number=SeqID_64677
atgtcggttgttgacggtgtactcgaggatattattcctgaggactttctgcttaaattatctgagatcagagttattgacgtccgtatagatcacccgaacgaagtatcttctactagtctgctagccgggccagaggtaaacctgtcagtctgccatggtacttcagctcctgagggtccttcaggccccaagggtgctctagcccccaaggttgcttcaatgggtgttcatgttgggtcgccgatgcctcagactgatgatgttgtagtaacaagttctgttgtgcccattggtccagccgaccaaaccaccttggaggtcagatgttctagcactaaaaacctaatgggtgtttctagtgctgaattcccaatgggtgtatctagtgttgaaatcccaatgggtgtatctggtgctgaaatcccaatgagtgtcacgcttagcctgggggataggatccttcaacgcttgtacctgctcaaaccagggcttctgctaatgtcactgcctctaggggcgccttaa

SEQ ID NO: 22899 - DNA, 552 bp, Zea mays
  Peptide Sequence Number=SeqID_64678
atgcaagccaactcagggcagaagaagccaaaccgccgcgcgcggtgcatacaaccgcccagcggttacaagcgaccctccacttttgcccagaccaacgggcgaaagggtgggcagccatgcaggcggcatgcaaccgcgccaagtgggcgcgctcctccgactcccaacacgcccggcatggaggcccaggcccacgcgtcatgcaaccggagaagcgggcgacgcttccccttcgccaaaatgaccgtgtccaaaaagggaccgagaaagggggataccccgaaaaggatccttcctcgagaaggaaccatgctccgagcccccctactgatcagaggttcgaaggctggccccccggaagggttcaacagccgcctcggatcgcgtgggccctacacccactactggtcagaggttcgaaggccggcccctcgaaagggttcaacgaccgcctcaggctactcgggctccgcacccaatactgatcaggggttcgaaggctggcccccgaagggttcacagccgcctcaaacgccgagcgagggatga

SEQ ID NO: 22900 - DNA, 870 bp, Zea mays
  Peptide Sequence Number=SeqID_64679
atggcggatttgagccgccctagcgacgccatcgcaatcactcgcctgcccgctcgcccgctgcgcgtcagcctcgcctcacccctgggcagtcgcgaagggcgctggaacacgacgacatccgcgtcgaaccctaacccctctacgcgtacgccacgggaccccaccctggcgctcgacctctgggacgaggacaagttcgagggcatctccgtgctggaagcgatcccctccgacgactccgtcgcgccggccgaggccgaccagtcagatccctccatcgaggctcctgccgagacgattccgaccgcgaagaggagcccagctgagctcctccgcgcgttctccgtcgagatcgcgtgcgtcagcttcctgatctacttcgtgctcaactactttatggggaagcggcaaaacgagaacatcgcgctggcctgggccaccaagttcaccacgagggactccatcttcgacaagaacttcagccttcttggcacaggcgacggcaaggatagcggtcacattgttaaggattcaaattcagataatattgagaaagtatgtcatttgtgctttggtcttcttgatagagtatttgagcgtattcaagttttgactgttgacccctcacagtcaaattctgaatacctgtactatcccgctcaacatatccaaaacattgttgattctgttcttcggcatcctgttattaccctgtctttgtcatgctctttatccaattgccaaaatttagcatatgggagtttggaacatctggaagaagctttggctatttttgcgacggaaaatctgcaccttatagatcgtttcgttctaaaccttttgggtaattgtatgaccatttgctaa

SEQ ID NO: 22901 - DNA, 376 bp, Zea mays
  Peptide Sequence Number=SeqID_64680
ctggcccaacggcgaggccgagggccgcggcctgctcaaggtgctcgtgtgcatctatggctggagtgtcaagatttttttcgaccacgccgacgaggacagcaccttcgagtgcatgacacgccacaaccagggaccccgccgcttcgcgaatgtcgatctcgacagaagcaaactgaccgctgaactaaactgtcctactgctcatttcaacgaatcatggagaacggagggcgtggacgacatgcggggccgcccacctctgatgggggcggagcccgtccttgctaccgtcgatgcgtgggacgcgaccaagggcgaggacgcgacctcgacgacgcgcttggaaaggggaccgggatgcgacgagcgctga

SEQ ID NO: 22902 - DNA, 486 bp, Zea mays
  Peptide Sequence Number=SeqID_64681
atggcctcgccgctgctcaagtcgcactctcagctcgccgccgccgccgccctgcactccctgggcaagttccatgaccacgggctcaggtccggccgttctaagagatccggttcagcgaaggtgggcgccttcccgtcgctggacgtggtgccgctgatggtgacgatggtggagcacgtggacatgtcgcgggactacgtcgtgaccaagtccatctggcatctcagcgacgcagccctcaagagcgtctcttgcttgcgtgcatgggtcaaatcgaaacaggatcccttctacgacagcgagacgtacaggagccagggtggcgacgggaccgtgcactggtactacgacaggcaagaggacctggaggcgtctgcgagggaggagctgctgcgggaggagctgctcgaggagattgagcagagggttgggggcctcagggagctggaggaagcgagcaaggaggagcagctcacaaagtga

SEQ ID NO: 22903 - DNA, 732 bp, Zea mays
  Peptide Sequence Number=SeqID_64682
atggaggttgccgaggcgcccgacgaggacggcctggacgagcgtggcgtggcgctgcacctgcacctcccgaggctgctggccggcgtcgtctccggcgccctcactggcctcttcgctctcgctggagctctgacgggggcggtcaccggcgcggtggcgggcagggcttccgacagcggcggcgttctgcggggagctgggctgggggcggtcgccggagccgtcctctccatcgaggttctcgaggcttctcgcgcctactggtgctcggaccggctgcggctgggctcgcacggcgcgtcgtccatggctaatttcattgagcagcttcttcgtgcccggtttgtgcaagagcagtttacaacttcaggatatgcatcatatcgctggcaggtgagcatatcggattttggtcacgatgacctatacgacatattcggggacatctcatcgaaagggctcccacaagagtcgctgaagaaactaccacactatgtggtcactgaccagacgcgcgcggactcgttcggccagatcctgtcctgccctatctgtctacagtgtaggcactgtgtttggaatcaagtgttcgatatttctggaacagattccgcgcgctgttctgcccgtgccggcaatattattgctgctctcgttcttgcagatgcagaccctgtgtttggcatcgagtgttttggtgactggtctgttttcggtcctcagggccat

SEQ ID NO: 22904 - DNA, 399 bp, Zea mays
  Peptide Sequence Number=SeqID_64683
atggaaactgtcctcttctggttcctacagcagcaagttggcctaccaagttttttttcttgcggactatcaaattttcctcatggaaataatttggaaaggcggagtggatggcaccagaagtacttcggaatgaacgatcggatgaaaaatgcgatgtttttagctacggagtcatattatgggaactttgtacactactacagccttgggaagaatcgtcgccttgaaatcccagataacatcgatcctgctgtagcagagataatagtgcaatgctggcatacggatccaaagttgcggccatcatttgcagatatcatggctgcactaaaaccactgttgaagaacttgaccagcaatctagcccctaagagagtgcaacaaacagatgagtga

SEQ ID NO: 22905 - DNA, 516 bp, Zea mays
  Peptide Sequence Number=SeqID_64684
atggcaccgcgccgggggtcgggcgagctgcacaagcagtgggggcccacgccgggggccaagcgcgctgctcaagcagtgggccacgccgggcagcaccgcgccgcgccgagcatgccgcgcgcaggggagcgcgccgggaccacggggtcgccgtgccgggcgtcggggcgagacacggccgcacgcgccgcgggggaggaggggctgcgccgagtggcggggcgaggcacgccggggcgggcgcgcgcacgctccagggcaagcatgtcgggccaccgtgagctggggcgggcgcgctatggccgggaggaggggcgagaccgcgcgcgccgggcaagctgccgcgcggggaaggggcctcgcgcgccggagcgagctgccgcgcgcgagggggccgagcgcgctagggtgagccgtgtgcgccggggcgtccgcgccgagccggcgggcgccatggccgctggggccaaggaagaagaagggttctggggcaaggtcatgcaatgtggctga

SEQ ID NO: 22906 - DNA, 2472 bp, Zea mays
  Peptide Sequence Number=SeqID_64685
atgtgggagggatgggagctggacacggcgtggggttatgggagccggacacggcgatatctcaaagctcagtttgaggatgagttcgcatccggacctttacacaatttcaatgcccttggctatgacgacaaaatattggatggattttatgatctgttttatgttggaaatgggccagcagcagttactatgccctcttttgctgagctacgagtccagccattttcacataaagtcgattgggaagctgtgttggtccacagaggtgaagaccctgagcttatgaaacttcagcaggaggccttaatcatgaatcatgaacttcattcgagaacttcagaatctgtgggcaatgctttggttttggctgatggccttgatgtaccttgccgtctcctgaaaggaaagcgatacactggatcagatgatggagctttgaacattgtgaaatttaaagacggaagaaacctgcttagaaacccactcccaccatacaataaacctccgattttgaggctgtggagacatgctctgaagattgactttactgaggatatggaaccaaaattctctggcaaagacacaactaaccagcagataccatgggaatttattgttgatcttgtgtctgatcctggtacacttattccttcagatgtttctgttttgtccacagaattagacaggaatttcgtctctgataatcaacactttggccaagatgataataccaatctgttgggatcttctcttagcggtgtatcgagctcagcgtatggttcttttgagtatgagttacttgaccgaagatccacttcaagcaatgttggtccttctgatactgatggacctacaactaatctgacaagcaatcaacaaaatatgtcctcaaattcattcgataaactatcagttagcacattcacaagtgaaaataggcctgtcagtaaagaatctacaaatccagattacattattgttggaaaaaacaaagaaaaatatactgcggccgttgattcttcatcatcttcaccctctacaccagatatgggcagcgctccagctgtccggagaatgaaagtgaaggacatttcagagtacatgattaatgctgccaaggaaaatccacaattagttcagaaaatccatgaggttttacttgaaaatggtgttatggcaccacctgacctgttttcagaagattcaatggaagaaccaaaggacctcatcgtgtatgacaccaccctgtttcaaagcaaggatgaaatgaaaaggaggatgaatgagcttgggtcaagggaatacacagatcgtggtcatgatccattgttgcctcatcatcctggacatgaactccaaccaaaagtggctcctcaccgagcacctctggagtcacttaagcctgttgagggtttgggcatttaccacccacatgatatcagagatatagcatctccgtttgtttctcagtacgaaccttctgcacctcctcaggaagcttcatcccaacttacaaagcaattgcctgtcacagctgctgctgttgcaactgctgcagtggtggcatcctctatggttgctgcagccgctttatctaccaatgacgtaaactttgacgtgcctgttgctgctgcagccactgtcactgcagctgcagttgttgccacaactgctgctgttagcaagcaatatgagcactcggatcctggcaatcagctgtttagcgtaccaagtacttctcaaggaaataaatcagttgagaaagctggaggtgacctttgggacaaacaccatgttgaaactgatcatggccaagataattgtctggaccaagaagttcctcaggaagccgaacgaacctctgataaatcaaataaatcaagtgggacagaggatgtgaaatctgatcttgctttggacaatgttgcagagtttgagatccaatgggaagaaatttctattggtgaacggattggccttggatcgtttggagaagtttatagaggagaatggcatggaacagaagttgctgtcaagaagtttttgcaacaggatatttcaagtgatgctctggaagagtttagagctgaggtgcgaataatgaagaggttgcgccatcctaatgttgttctcttcatgggtgccatcactcgtgtgcctaatctttctattgtcactgaatttcttccaagaggcagtttgtttcgtttgattcaccgacccaacaaccagttagatgaaaggaagcgcttaagaatggcacttgatgtggctcgtggtatgaattatctgcataattgttcaccagttatagttcatagagatctgaaatccccgaatctactggtggacaagaattgggttgtgaaggtttgcgattttggtttgtcaagaatgaagaacaataccttcctgtcatcaagatcaacagctggaacagtgtatccaaattgcttgaagtgtgtctaa

SEQ ID NO: 22907 - DNA, 291 bp, Zea mays
  Peptide Sequence Number=SeqID_64686
atggaggtggtgtcaagcgagggtcaaaaaagacttttggtgtggccatccatgatgctaatttcgccgtcacccgccggacagacacggaggtacaggagcgagggggaaagtgggatggtagtgggggcatcatcggtgtccggcgccgcggcttccggaggtacctctgttcctaactacgtggtggatgagcctaaggaggacgcgacagcgcaggggcatgatctcaggcggttcaggggcctcgaggttggttttcctctcctttcacaatctgagaatctctga

SEQ ID NO: 22908 - DNA, 1005 bp, Zea mays
  Peptide Sequence Number=SeqID_64687
atggcgcctctcagccacacagccccagcctacatcccgacgaagagaggcgcgccatggatcccgccgccgccagcctccgggcttcctacgtatatcagctggatgcccacgccgccgccacggttcttaccgtggccgcacctggcgccacctccgcctccgccgctgccttgctggagcgtcccgcaggtcccttgcgccaccgccacggggatggtgcagcgcccgctggcctgcgttgcgagcgccgccgccgggaacgcgaacgaggcggcgacgaaccagccgtccccacgctccgtgctcgcggtcaccagcccgcccatctcgccgacgacgtccctcccgacgtcgttcccgtaccggctggcgccccctgcgccgccgcccaccgcaggccacgccgctccaacgccgcctcccaccgccaagcggagcgtggctgcccgtccacggcacgggcgacggtcgagccgtgtccgccgcacccgcagcgctcccaagcctcggcgtctgttcgatcctacttccgagcttaccagtttcatgatccgaaacatccctaacgatttcacgagggcgaggttgattcatatccttgaccaacactgctccatcgaaaacgagaagatcgcgccgggcggggtgaggtcgcaatacgatttcctctacctggtggtagatttcaggagccgtgcaaacaaaggctacgcatttgtgaatatgacctcgccggaggcggcccgtcggctctggacgcacctccatggacacctgtgggcttttaagagcagcgcgaagacctgcgcagtcgactacgctgatttacaggggcaggacaacttggtcagccatttttctgggtcgcgcttcgattgcgacacagacgagtacctgccagtgcgctttgagcctccgcgcgacggcacacggcctgccgagggagccatgaatgtcgttggtcggcggattacccgttcgcgtcccagtgatgagaactaa

SEQ ID NO: 22909 - DNA, 719 bp, Zea mays
  Peptide Sequence Number=SeqID_64688
gtaccacatgtgccactgttttgacaaaagcaatatttactgaggggtgcaaatctgttgcggctggaatgaatgcaatggatttaaggcgcggaatctcaatggctgttgacgctgttgtgaccaatctgaaaggcatggccagaatgatcagcacttcagaagaaattgcacaggtgggtacaatatcagcaaatggggaaagggaaattggtgagcttattgccaaggctatggagaaggttggcaaagagggtgtcatcactattgcggacggtaacaccctttataatgagcttgaagttgtggagggtatgaaactagacagaggttacatctctccgtacttcattgccaactcaaaaacccagaaaggtgaattggaagacccattgatcttaattcatgacaagaaggttacgaacatgcatgctgtgaaacaaaagcctctactgattgttgcagaagatgtggaaagtgaagcattgggcactttgattattaacaagcttcgtgcaggcatcaaggtctgtgctgtcaaagctcctggttttggggaaaacaggaaggcaaacttacaggaccttgcaatccttactggaggagaggtaataactgaagaactaggaatgaaccttgagaattttgagcctcacatgctgggtacatgcaaaaagactgtcacggtattctcacatgatcttacagtgttgtgctag

SEQ ID NO: 22910 - DNA, 447 bp, Zea mays
  Peptide Sequence Number=SeqID_64689
atggccccgatcgacctcgggcgaggcggccgcgcctcaggcactggctcgggggccgcgccgggcacaccccggctcgtgatggttgtcgtcgaccccgtccgcgagtcgacggcggcgctggagtgggcgctctcccacgccattgtcgagggcgacgacatcctgctcctccacgtcaacatgccgtacccgcacaacggggccgcgggcagatccgggccctcacgctcctcgtctggcgggagcaccgggttccccgatcgccgcgctcctaggcggaggttaagaagcccgagcgggtcgtcgagccgcgggcacgacagcacggcggagttcttgatcgagcatagcaagtgcctgtgcgtaagcgtccagaagaagggccagaatgccggatacctgctcaacaccaagacccacaaaaacttctggctactagcatga

SEQ ID NO: 22911 - DNA, 1638 bp, Zea mays
  Peptide Sequence Number=SeqID_64690
atgacgacgccatgcctgggcgccgcggccttaagcgccagctggacggcgccctccctgacgggggcgtttctcgatctgacgctcgcctgggcctgcctctgcctcgccgcgctcgccgccgtcgccgcgcgcctcctcgcgctcctcggcctcccgctcccctgcacctgcgcgcgcccgcacctgccctgcctcctcgccttcctggcgcgctaccctccccgcgccgtcggatcccttcacgccgccctccgcgcccgcttccccttcgccggccccaccgacgacgaggcacgccttcagaaaggggtggaggaagagggggaggaggaggccatcgacgcgccgaaggaggaaggggattttcgtcgccgcgtggaggcgcgcgccgagctgcagatggagctcgagaaagagcgcagcgccgcagcgtcggcggccgaggaggccatgtccatgatcctgcgcctgcagaaggagaagtcggcgcttgagattgaggcgcgacagcagcgccgaaccgctgacgagcgctgcgccttctacgaggacgaggtcgaggagctccgggacatcgtgctcgtgcgggagcgtgaggtgcgcgcgctgcgcaaggaggttgacgcctaccgacgcctgctcggttttagcgctaccgaggaggacgaggaggaggatgacgagcaggagatggtcacgccgcatagtttccccatgtacgaaggagagcccagctcgtccaaatcggtcgatgcgaatcggatgcaacattttgggaatgattctgggttcagcttcaagacgccatcaccgcgtgaacaaccaacggtgccgcctcttactgcagggcaaatcaatgtgggaagcgatgattgtgttgctgttcagacgccggccaaagttcccgtggttcaatcaagactggagctagatagctctgaggatgaggacgaggatgaggatgatggagcagagacggtggaaatcctccccctatccgcccggagccaagatttggatcaaggtagccatttccatgctgatactgcacaaggtatggaatcgacttgtaccaaggaacagacagctcatgcatttcaggaaatcgagtgtccaggtatagacaagattgttaatgaccagataggaagcaagaatgatgccaatgtgtatgatgtgcatgtggtcgatgacatacgcttctcaacagaagtcaagggcctgattggccgaagcttctcagaggcaacaatgcaagcagagagattacagtctcgagctgttgcagatgatctccttgagaaaagcctgaatgccatcaaaggtgcacaggacaagataagaaatgcagctaatgaaaggaggcagtcattacagttgcaactcttagaggacatagctgatcaacttcaaggaatcaaggatgctgcagaagcagggaggcaagtggaccagtcaacggtggacatcaaagagagatttgggaagtttaaggatgtacttgatcctggatgccgttttgtgccgtggatcattggaaaccgcgtcgaaggcagcattcttcagatcttttgctcaccttatctaataatgtttttgaacgcttatttgtttaagcatcctgtcgcaggataa

SEQ ID NO: 22912 - DNA, 222 bp, Zea mays
  Peptide Sequence Number=SeqID_64691
atggcccctagagctagaggagcccctagaccctcctcctccgtcgtcgtcatccatgtgctcaaccgggagctcaccgacgagatcaggtgcaccgaaatgcgtgatcttggcaccgaaatcccaatgggtgtcgcgttgaagtctggttcttttagtctgtatgcccttatgcatgttaatcctatagtttctgtgatatcctggcccctgggatggtga

SEQ ID NO: 22913 - DNA, 231 bp, Zea mays
  Peptide Sequence Number=SeqID_64692
atgaatcagctgaagaaacaatcagcccaactccgcgagagattgtctcctttgatgcggtttgaagtcatagtgctccgaaagcagttggttgacttagagaattctcaggcttcacataatgctgttgcttcaaagagatattctgacctcgaggacaagttggcacgctgccagttggagctccaccaagtaacagtttttcttgacggagcccgagtggaatcttga

SEQ ID NO: 22914 - DNA, 336 bp, Zea mays
  Peptide Sequence Number=SeqID_64693
atgatggtcgcggaacggcgatggtccctggtgagcggcggcggagctcggctggtcgcgtgcgcagggcgagagagctcggctgagggcgcaaatgagcggggcgagtgggcgagcggtgtgcgggcttctaaagggggcgaggggcgtgagaaagtggccagagaacacgcggtcgtgggcatgtccacgacagggacgtgggcgagagccaaacaacagctctggtcaggtgcaccggactgtccggtggtgcacccgacagtgtccggtgcgccacgctggtccgcggtgaactcgtcgctctcgagtttcgacggcggcgtacgactataa

SEQ ID NO: 22915 - DNA, 369 bp, Zea mays
  Peptide Sequence Number=SeqID_64694
atggggtccgtcaaggggtcgtccgttggctcgtcatggctagagcagtggccccttctctcctcgggctcttgggagagtcgtaaagtcctttgtgcaacgccgagggctaccgaggccgaggtggagctgctccggtctcggcttgtcaagtccaatggtctcgtgatggccttgaaggtcgagcttagggagctgcaactccatttgggtcgagctctggatttcatcggggcacgtggctcttctctggtggagcgtgtagacgacgtcccatgccgtgttcgaggcatcgttggtcttggtgctcgcggaggtgcccccgcaacactgctagttggagaacttagaacatgttgcgatctttag

SEQ ID NO: 22916 - DNA, 438 bp, Zea mays
  Peptide Sequence Number=SeqID_64695
atggcggaacctaacaagggaggttgggccacgtcgagccctaggttgcggaggctaggggttagcgtggccagaatgatgatgcctaggaccatcatcgccccccacgtcatccgccacaataaatacgagacaaccagtgttgagtacctaggaaccaggattccagaaaattcaaggggagccagaacctaccaggccacccttcgaataatgtttcagcttaaggaactagacgaacgacaagggacactttctggtaagagcccgaacccatcccgaaatggcaagggattgcttttcggtaaggacccaaacttgttaggaattcctttcgcagggaccgaagagcgaaaaactcatggcaaaacaaccatgaattctagagttgaaaggctggtccgcgaagggctcgcgaccgctccagcgaaaaattga

SEQ ID NO: 22917 - DNA, 1833 bp, Zea mays
  Peptide Sequence Number=SeqID_64696
atgattggtcctcctcgcccgccgccggcgcccgcgggggaggaagacgatgaggacggcggcggtatcatgatcgggccgcctcggccaccgccgccctccgctcgcggcgagggggacgacggcgacggcatgattgggccgcctaggccgccgccagcggatgatgaagacgtcgatgatgatgaggacgacgacgaggaggagatggaggatgatggggagggtggattcaatcggatccctcttagcaacgaaattgttctgcgggggcacaataagccagtggcggagccacacacgaatcacaagctcgggcaccacacacagagcgaagaagggagaggagagcatttcaccgagcagcgagcggtcgggcctgggcatggacaggcctcactgcctcaggcagccgtcggcagggtgtggccagtgcctggtggctgggcggttgtctctgcccttgctgttgaccatacaggatccagagtgctctctggtagctatgattatacagtgcgtatgtacgacttccagggtatgaattcaaagcttcagtcattcagacaattggaaccatttgagggccatcaagttcgtagcctaagttggagtccaacgtctgatcgattcttatgtgttactggttcagctcaggccaagatttacgacagggatggacttacactaggcgagtttgttaagggtgatatgtatattcgtgatctgaagaatacaaaaggtcacatctctgggcttacaggtggtgagtggaatccaaagtcaaaagaaaccattttgacatcatctgaagatggctccatgcgtctctgggatgtgtctgattttacaagtcagaagcaggtcatcaaacctaagctggtacgaccaatgcggattcctgttacatcatgtgcatgggaccatgaagggaaacgaattgtgggtggcataggggatggttctatacaggtctggaccataaaagctggatggggtagcagaccagatatccacgttgagaaaacacacacagaggatattactggggttaagttctcaacagatggacagagccttctgtcaagaagtatggatagtactcttaagatatgggatttgagaagaatgaaaactcctttgaaagtatttgaagatctgccaaatcactacgctgagacaaatgcagcatttagctcagatgagcagcttatttttacaggaacatctattgaaaaagatggtgacaatgggggattactttgtttctttgatagaaagaaacttgagcttgtatcaagggtgggaatttcagcacattacagtgtgataaggtgcctctggcatccaagaatcaaccaggtgtttgcaacagttggagacaagaaagaaggtgggactcatatcctgtacgatccttctattagtcaaaggggagctcttgtatgtgttggacgagcaccaaggaaaaagtctgttgatgattttgaggtgcaacctgtcatacacaatccacatgcattgccacttttcagagatcaaccaagtcgtaagcgtcaaagagagaagatactgaaagacccactcaaatcccacaaaccagaagcacctgttaatggtccaggttttggtggaagagttggtactacaaaaggcagtttgctgacacagtatctcttgaaggagacctggatggatgaagatccaagagaagccattttgaagtatgctgatgctgcggagaaagacccaaagtttattgcgccagcttattcccaaacccagccgaaacctgtttttgcggagtctgattcagacaatgaagagaaataa

SEQ ID NO: 22918 - DNA, 189 bp, Zea mays
  Peptide Sequence Number=SeqID_64697
atggcaaggggaaacctttgtacgggcactaagaggctgtttgggagggctcccgagcagctccagctctggctccttgccggagccctcccaaacaaggtgccaaaaacagctccgcctcaggagcaggagccaattcggggacagaagcccagagcacagaaaactggctccaagctgctccgcgac

SEQ ID NO: 22919 - DNA, 126 bp, Zea mays
  Peptide Sequence Number=SeqID_64698
atggatgaagttgtcaagcaaatgtcaccattacaagatgtaaacgacatggcatctgcttcgccaaggcctcgctcaactcagcgcgcaaaagtaggtgttgcctgccgatacccggagatgtga

SEQ ID NO: 22920 - DNA, 182 bp, Zea mays
  Peptide Sequence Number=SeqID_64699
ctggatattctgtggcgacgccactgcttaacttcgatcctccatctttcaggtggccccttatgagcgccctgcactcagcaagggatacctcttccctcagaacgctgcaagactgccaggctcaccacacttcaatgcatccaagttttcagtcatcaaacctcatacaagagctctag

SEQ ID NO: 22921 - DNA, 270 bp, Zea mays
  Peptide Sequence Number=SeqID_64700
atggaggcgcaggatgacggtggcggatctcgtgcttctgctggcgacgctacacggccagtacgacagcaatgcggccacatcatttctctctccaccaaggcgaacgctagtttcccacgtatggtcatggaagcaaggaacccagcagcaggcttatgtagccgtaggatggagtccggcaccgagatcccagaccgagaagatccgaatccggcggtgatggcttcggcgggcgaccaggaggtcgttgcttcgactgagagctag

SEQ ID NO: 22922 - DNA, 207 bp, Zea mays
  Peptide Sequence Number=SeqID_64701
atggcaatgcggcccacatcatttctctctccaccaaaggcgaacgctagtttcccacgtatggtcatggaagcaaggaacccagcagcaggcttatgtagccgtacgatggagtccggccccgagatcttagaccgagaagatccgaatccggcggcgatggcttcgacgggcgaccaggaggtcgttgcttcgactgagagctag

SEQ ID NO: 22923 - DNA, 324 bp, Zea mays
  Peptide Sequence Number=SeqID_64702
atgaaggcccccaacactgattctcgaggcctttgctcctcctctgacccccacgagccactaccaaccaagagactcgagggtggatggaaccgcagtttaccgtcgtgcgtgaacctcgggctcggcgctgccaagctatcggcaaccgtttgggtgggtccgcggagtctggggggagtgcgtgaattggggcatcgggagggggacaggaccccgtattccgccaccgccaccatggttgaccagctcgccaccgccttggtcggtgcggaagaagatgagagtgtgaatcgtcgatctagcgtggatggtgtagattag

SEQ ID NO: 22924 - DNA, 1011 bp, Zea mays
  Peptide Sequence Number=SeqID_64703
atggagcggttcttgaagagaaaattaccacagccagcgagcgatgaagggacttcacatagagatcaaggtgcatcaaccatcaatgctcaaactcgtccttctttgatactgtcaccaagagatgtcaatttagatgaacttgcttatgatccggctgatagaaagagaataacagaatatcctggcctaaagctacaagaagagataagaagaaggtatttggttagaggtcctcatagaccacaacctggtttcaagtatcctcaaacaatcatagcaaaaaagccacgacgctttaacccagaatggtttgaacaatatgattggctagaatatagtgaaaaagtggataaagccttttgcctatattgctacttatttagagattgcattgaaggtcaggctggaaatgatgcatttgtgacaaaagggttttttggatggaacaataaaaaaagacttgacactcatgtgggtgggataggtagctatcataacgaagctgtgaaaagatgtaacaatttgctgaatccaaaccaatccatcgaatttgcactgaagaagcaacaagatattgcaaaagaggagtactttattcgattaagtacttcaattaatgctgttaggtacttgttgcatcaaggattagcttttcgtggccatgatgagtctgaagagtctgataataaggggaattttcttgagttagtgaagcttttggcagagcaaaatgaaaagataaagagggttgttctaaaaaatgctcctgacaatcatcagatggtggctccatgtattcaaaaggatatcactaattgcttttcagagatcatagtgagttctattattgaagaaattggtggtgatgtattttgtttgttggttgatgaatcggctgatgtttctgataaggaacaaatggctgtggttttgcgcttcttgtctcaagtctatattgatgcattattttccaagtataaattgagttggaaacagtcagaggccaag

SEQ ID NO: 22925 - DNA, 570 bp, Zea mays
  Peptide Sequence Number=SeqID_64704
atgccgtccattgcggcgcagggaggagccgcttctgaagcgaggtcgtggaccgtccgtgctcccagtgagagcaccgtcaggcagccgtcatgctgggcatggcgtcggcggcgacctacaacgtcggcgagccggcccgggtcctgggacctgcgtaccaactacggcacctgggtctcctccaagaggttccacccgggtgaccagaccgtgttcaagtactcgccccaggcgcacgacgtggtggaggtgaacaaggcggactacgactcctgctcaatcgccagccccgtcgccacccacaactccggcaacgacgccatcgccctggcctcccccggcacccgctacttcatctgcggcttccctggccactgcgacgcgggcatgaagatccagatcaacgtcgtgcccagcgccaactccctcggccccgccagcgctcctgccgccaactctcccgtctctcccccgcccatgtccgcgccctcttccgccgctaccaaggccaccggtttcggcgcccttgccgccgtcatgatcgccgcaggcctcatggcttactag

SEQ ID NO: 22926 - DNA, 765 bp, Zea mays
  Peptide Sequence Number=SeqID_64705
atgcagaccaccaggcgaagcactgggaaggagctcaccgtggacgtcgtgcgcaggaagcttcaaccccgacacagggtggcctgcggcggcgctatgccaatgggtaatgatggcccctcctgcgacgtggtgtgtccgagccctgggtcgggcgaggcggaggctcctccgaggtcgaggtcgagtctgagcccctgggtcggacgaggcggagaccgtcggctgaggccagggccgagccctagggtcgggcgaggcggagttcgtcgtcttccggggccgaggccgagtccgagccttgggtcgggcgaggcgaagttcgtcgtcttccggggccgaggccgagtccaagccctgggtcgggcgaggcggagttcgtcgtcttccggggccgaggccgagtccgagccctcgggtcgggcgaggcggagttcgtcgtcttccggggccgaggctgagtccgagccctggggtcgggcgaggtggagcttcctatggcgcccaaggatagacttggctgctgtcagcctcactctatcgagtggcacaacagtcggagtggcgcaggaggcgctgtcttcttgtcaggccatccttgcattaaatgctcctgcgatacggtcggttggtgtggcgatttggccaaggttgcttcttggcgaaggctgggccttgggcgagccgaagctttgtgctgatgggggttaccagctgagattaggagtcttggggggtacccctaattatggtccccgacagtag

SEQ ID NO: 22927 - DNA, 570 bp, Zea mays
  Peptide Sequence Number=SeqID_64706
atgggagatgcaggggcagggagaagtggatcccgggctgccggagttgaggaaggcgagctcaaggggctaagtgccatggaggctagtggccatgggggctttgcgtctcggcgtccatggagggagaagcagagagtattggagcaagggccgtcgaatgaaggagctgtcccggggctaggggagcgccctgcgctagaaggagaagggggcagagctctgagtgccggactggagatggcgagctgcgccataggaagctccgcctcgcccgacccagggctcagactcggcctcggccccggaagacgacgaactccgcctcgcctgacccaaggctcggactcggcctcggccccggaagacgacgaacttcgcctcgcccgaccccagggctcggccctggcctcagctgacggtctccgcctcacccgacccaggggctcggactcgacctcgacctcggaagacagactcgacctcgacctcggaggagcctccgcctcgcccgacccagggctcggaccgaccacgtcgcaggaggggccatcattaccctacccctag

SEQ ID NO: 22928 - DNA, 1640 bp, Zea mays
  Peptide Sequence Number=SeqID_64707
atggggaggagaagagatcgaagcggccgtggacgcagcgcgaggaggcagcaaagcagctcgttcggaagcgactccagtgaaagccgcaagaggtcactgccacggggggtcgtatcgatcggggccatcagccttgctggaggtctcgtgctcagcgccgtcaacgacctcgccatcttcaatggatgcacaacgaaggcaattgagcatgctgctgacaaccctgctgttgtggaagcaattggagtgcctatagtcagaggaccgtggtatgatgcttctcttgaggatggtctgctttcgtttctgcggcatcacgactggaagatcctattgctggaggctcatcttgaagcaccatcagatgatgaggaccagagaaagctggttaagtcccacaccagcgatcacgctgttgcttcgtccccggctacctcttcgtcctctgccccctcgtcgtgccgaaacaacgatcgccgtgctccccccgagcggcaggcccccggcgaggagaagagcaggaggaggaacgacagcgtcgacaacagcaacctggtcgacctcgtcaacgacatcgtcgccgagtcagtgagctaccgtcacaggcgtgtggccgaggatatcctcaagatggaaaaggcgggcaaggtcacggcgcgcgccttcacgtacgccgagctgtccgaggccacgggcggcttccggccggagtcgctgctgggcgagggcgggttcggccccgtgtacaggggccgcctggggtcgtcgtcgggcccggaggtggccgtcaagcagctggaccgcaacggcatgcagggcacgcgcgagttcctggtggaggctctcatgctcagcctgctcaagcactccaacctggtgacgctgctgggcttctgtaccgacgccgaccaccgcatgctcatctacgagtacatgccgctgggctccctggaggaccacctgctggacctgcccccgggtcgcgcgccgctcgactgggcgacgcgcatgcgtgtcgcgcagggcgccgcgcgcggccttgagtacctgcacgacaccgcgcggccgcccgtgatctaccgcgacttcaaggcctccaacatcctgctcgacaccggcttccgcgcccgcctctccgacttcgggctcgccaaggtcggccccgtcggcgacaagtcccacgtttccacgcgcgtcatgggcacctacggctactgcgccccggagtacgcgctcacgggcaagctcaccaccatgtccgacgtctacagcttcggcgtcgtcttcctcgagatcatcaccggaagccgcgccatcgacaccaccaggccgccagagaagcacaacctcgtcctctgggccgccccacggttcaaggacaagcgacggttcgccgagatggccgacccgctgctcaagggcgcctaccccaccaaaggcctctaccaggcgctcgccatcgcagccatgtgcctccaggaggatgccaccatgcgccccgccatcagcgacgtcgtcaccgcactcgactacctcacggtcgcaggcggaggcgccgctgccaacgaaccaccggctcccaatcccaaccagcagcagcaacaaacagacattatcggccacgccggcgagcaagc

SEQ ID NO: 22929 - DNA, 1719 bp, Zea mays
  Peptide Sequence Number=SeqID_64708
atggggcccatcaaggacttgaaaggcgtacagagggtcatgggatgccttgcggctctgagccgcttcatctcgcgcctcggcgaaagaggtctacccctgtaccgcctcttaagaaaggccgagtgcttcacttggacccctgaggccgaggaagccctcgggaacctgaaggcgctcctcatgaacgcgcccatcttggtgccccccactgccgaagaagccctcttgatctacgtcgccgctaccactcaggtgaggccggtctacttcatcagtgaggtactgtccgagaccaagatccgctacccacaaattcagaagctgttgtacacggtgatcctgacgcggcggaagttgcgacactactttgagtctcatccggtgactgtggtgtcgtccttccccttgggggagatcatccagtgccgagaggcctcgggtaggattgcaaagtggacagtggaaatcatgggcgagacaatctcgttcgcccctcggaaggccatcaagtcccaagtcttggcggactttgtggttgaatgggtcgacacccagcttccagcagctccgatccaaccggaactctggaccatgtttttcgatgggtcgttgatgaaaacaggggcaggcgcgggcctgctcttcatctcgcccctcaggaagcacctccgctacgtgctgcgcctccatttcccggcgtccaacaacatggccgagtacgaggctctggttaacgggttgcgcatcgccatcgagctaggggtccgacgcctcgacgctcgcggcgactcgcagcttgtcatcgaccaagtcatgaagaactcccactgccacgacccgaagatggaagcctattgcgacgaggttcggcgcctggaagacaagttctacgggctcgagctcaaccacgtcgcccgacgatacaacgagactgcggacgagctggctaagatagcctcggggcgaacaacggttcccccggacgtcttctcccgagacctacatcaaccctcagtcaagaccgacgacacgcccgagcccgagaaggcctcggcccagcccgaggcaccctcggccctcgagggtgaggcactgcgcgtcgaggaagagcggagcgagaaggcacccaggggctacacgcaccttctggtcgccatcgacaaattctccaagtggaacgaggcggtggcattcttcaccaacattatccatcgctttggggtcccgaactccatcatcaccgacaacggcacccagttcaccggcagaaagttcctggacttctgcgaggatcaccacatccgggtggactgggccgccgtggcccaccccatgacgaatgggcaagtagagcgtgccaacggcatgattctgcaaggactcaagccacggatctacaacgacctcaacaagttcggcaagcgatggatgaaggagctcccctcggtggtctggagtctgaggacaacgccgagccgagccacgggcttcacaccgttctttctagtctatggggccaaggccatcttgcccacagacttagaatacggttccccgaggacgagggcctacgacgaacaaagcaatcgaacaaaccgagaagactcactagaccagctggaagaggctcgggacatggccttactacactcggcacggtatcagcagtccctgcgacgctaccacgcccgaggggttcggtcccgagacctctag

SEQ ID NO: 22930 - DNA, 513 bp, Zea mays
  Peptide Sequence Number=SeqID_64709
atgacgagaggagattgcttgctgtcgtccaacgccgccaaactggccatgaaggccaccacgcctaccacggctgtccacgcgctgggcagggccgccactgcgccgggcacggagtccccatgcgatgcgcagtcctcccctgacgccatggtcgtcgacttccctcccctatcatccggggtgttaaagcaagcactggccatggccgcagcttccaccagactggccacgcctgccgccccaccaagcacagacttccctggcattgcacgatcttctgtcaccatgaccacgaactcctctcccatgtccgccacgatagaagcgcacaacctggagacgccgatgtcggacagcaggctacacacggcggcgctggcctcggacgagccggtctccgccctgcccacaatcggctatttgacccaacagcctagccatgactgcctacccgcggccatggaagtcgtaccaccatccactgcgattgcgctagcgaggtctttgtga

SEQ ID NO: 22931 - DNA, 1212 bp, Zea mays
  Peptide Sequence Number=SeqID_64710
atgaaggacgccaagcccgcgaaaacaccaatgggaactgacggacatgtagacctcaacaaaggagactccgattatgccaggtgcaaggttgataggaagagtacatcagggacgtgccaattcctaggaagccgcactaagcacatagacatccggtatcacttcctgagagaccaccagcaaaagggggatatcgaggggaaggacgacccaagacaggaggaggaggaggaggaggaggaggaggaggaggaggaggaggaggaggaggaggaggacagtgccgccatgaccggaggaggggaggagcaggggaggtcgctgttcggcgtgtctctgacaaacaggcctaggtggcagcagttcatgatctgctcctcgggcttcttcttcggctacctcgtcaatggcatctgcgaggggttcgtgtacctggcgctgatacggctgcaggggttcacggtgaagcagatggtgaacccgtggcggacctacgtgcgcctctcggcggtgctcatgggctccaatggcctcaccaagggatccctcgccttcctcaattaccctgcacagatcatgttcaagtcaaccaaggttctaccggtgatggtgatgggagccttcatccctggtctgaggcgcaagtacgcgttccaagagtacgtgtcggccgtgatgctcgtcgtcggcctcatactcttcacgctcgcggacgcgcagacgtcgcccaacttcagcatggccggcgtggccatggtgtccggggcgctcgtcatggatgctttccttggcaacctgcaagaagcaatcttcaagatgaacccggacacgactcagatggagatgctgttctgctccactgtcgttggccttccgttcctagcggtgcccatggtgttaacaggagagctcgtgacggcttggacttcctgctcccaggtctccgtgctctccctcatcgcgcttttcggtgcagcaaccacagccatggtgacgacggcgaggaaggcggtgacgctgctgctgtcgtacctgatattcaccaagcccctcacggagcagcacgcgacggggctcctcctcataaccatgggcatcgtcatcaagctcctgccggagaacaaggagagacgcccgcgccggctgcccaagaatgacgacgacgacaagccccgggagagcagagaagcgggggaggaaacagcatga

SEQ ID NO: 22932 - DNA, 495 bp, Zea mays
  Peptide Sequence Number=SeqID_64711
atggccaacggaaaccacggcgacggctacaaacaccggcacatgagatggaagacttcaggttctgatcttaaggccagggtcactacagtgaacatcatagttaactctggaatgaaactccacttcaagcttcagaccaccgacgtggtgtggcctagccctgctaccctctgtcgccgtccagtcaccgacgactgctcaaagctccactgctccagtcacctgcgactggtccaagctccagtcacctgcgccgccgcggcgtctccagtccaccggaccaacagcagtgaccctcagtcgagatgggctcgtcatttgaagtttgatggtggctgtggacatgctaataatgttgaggtcatattccctgagtccaatgtggtcggcagtgcaagtggaagtgcttttgttcctcctaagctcaagatattggagaagatgacagtgatgctcaagaagatggtgctgctgcagtacaagcagaagtag

SEQ ID NO: 22933 - DNA, 204 bp, Zea mays
  Peptide Sequence Number=SeqID_64712
atggatcccgccgccgccggcctctggacttcctacgtatatcagcaggatgcccacgccgccgccacggtttttaccgtggccgcacctggcttcacctccgacgctaccttgcttgagcgtctcgcaggtcccttgcgccacagggatggtgcagcgacaaatggtcactcgaaatttgaaaaatcgtgcatgcaaaaatga

SEQ ID NO: 22934 - DNA, 384 bp, Zea mays
  Peptide Sequence Number=SeqID_64713
atgaaaccaatcatcacccagacccgaactagtagccaaggtccagcaggtaaccgtaaacacgcagtctatgacgatgaggcagcacacagattacgcgcatgcgtagagccatcccccgatcagatgacgaccatcggcgtggaccaaccaccaacaccagcgccaaatgtcggtggcgagcagctaggaggatatgacagccgaggacaacggcgacaacgtgcgccgcccgtcgcccaagaaggacatggaaccctcgacgcccaagaaggaggaggagccccaacgccaaaggaggaggaggactacatcagtaaggaggaccggaagatatttcgaaagatcgctagagtcctcctccacgaagacaaggatgcctag

SEQ ID NO: 22935 - DNA, 615 bp, Zea mays
  Peptide Sequence Number=SeqID_64714
atgcgtgtctacgagggcggcagcggcaaaataaacgacttcgcggacaatgcttcatccagcgccgcttgtctggcagttggcatagacagctttcccgagtgtgcactcggcaacgagatgactctcggtatcgacagcggttccagagcggcgtacactcggcattgcctagtgagggcgaaagccttccctggggagttgctacaccctactaagggctacaattgccattgcactgtcacctgttggttttcgcaatgtaggaacaaaccacaaaaagtttggttggaaaaagaaaaaaatggaaataaactttgccaagtgtccactgcccaaagtgggattcgttgggggccttcctcttccgaaggaggcttcggctttgggatgaaggttttctttcatgataaaggcatgctcgatatgaagatacaacccgaagaagatagggatgaatgcgaagctatggctcggtatattgatgaagatcaaggacgaaaccaacctaaggaggaaaagactacttcgtccctcttaactcgcattataattaagagtaaaagtcatggggatggatgtaatcttgtccgggctgcgtcccgtgcctattga

SEQ ID NO: 22936 - DNA, 264 bp, Zea mays
  Peptide Sequence Number=SeqID_64715
atgctggacgaggtcgcaagatgggacgacctcgtcgcaggccttcgtccgatgacgtatgagacgaaggaggccttcatcttgggaacctttggcagaaagagggcggacttcttgtggcactttgctgaaggtgtttatgtcttgaggaccttcggcggagtagaagacccccaacagtgcccaacctcaccacacttgaagcaagtggtgacagtaccctgtcctgcaggtctcgccggggtgccggtgggggcaacctga

SEQ ID NO: 22937 - DNA, 483 bp, Zea mays
  Peptide Sequence Number=SeqID_64716
atggatttcgtttccatagaatggctaagtagagtggaccacttcatcgagctcctgggcttgcgcaactgtgctggatgcagattttatcgtgcagaaggacgtgggaacgtctgggatgcaaaaggcgaccatgaaaaaaatgttgcatttggccccccatatgcattgcttcaaggaacactggaagttgatggtgtgcccttcaagaagataccaagagaagcatgtccggcggtgaaaagagggtccgttgcctgggtagggtcagggccagagttcctgatcagcttagcggaccacgaggagtggagggacgcctacaccgtgttcgggaatgtgcttcccatggacatggcgatcgctgaggagatgacactgctgccgacaagcacagacgtgtggagcaacgtgaaagtgaaggtgctgaaagatcctgtctacttcaaggtcaagagaagcagcaatgctagcgctgtctag

SEQ ID NO: 22938 - DNA, 426 bp, Zea mays
  Peptide Sequence Number=SeqID_64717
atggcccagacatccctggttgctgccgccaaagctcacgagacctccctcggctatcgcagaacacagatagcaccgcacagctttaacgaatggctggcgaaaggtggcatctggatcccgagggacagcgtcaacggcaaggtgaagcaggtggtgaatgccaggctccacaacgtccagcgcggccagcttgacctccctctgtttgtgatggctagagatggtaatgtgactgggatccgatccccgatttgcggggaaattcttccattagaagatgtggatagagaagttccttctcccacaaggaaaaattattcactaacgggtaaacggggacaggatggggaagcattctccatccccgttccctgcggaaacccgttaaacatatacatgacgtcgttttcttgtaatatctaa

SEQ ID NO: 22939 - DNA, 846 bp, Zea mays
  Peptide Sequence Number=SeqID_64718
atggcgggagccgacgacctgaaggtgctgggcctgtggacgagcccgtttgtgatccgagtccgcatcgtgctcaacctcaagggcctggcgtacgagtacgtggaggacgacctcagcaacaagagcgcgctcctgctcagctccaacccggtgcacaagaccgtgcccgtgctgctccacgcgggtcgccccgtaaacgagtcccagatcatcctgcagtacatcgacgaggtctgggcggggaccgggccggccgtgctgccgcgcgacccctacgagcgcgcggccgcgcggttctgggcggcctacatcgacgacaaggtgaagtccgcgtggctgggcatgctgttcgagtgcagggacgagggggagcgggcggaggcggtggcgcgggccggcgaggcgctcgggacgctggagggcgcgctcagggggaagcccttcttcggccgggcgacggcgtcggcttcgtggacgccgtgctcggcgggtaccctcggctggttcggggccgtcggcaggatcatcggccgcaggctcatcgacccggccaagacgccgctgctggccgcgtgggaggaccggttccgcgccgccgacgtggccaagggcgtcgtgccggacgacgtcgacaagatgctcgcgttcctggagaccctgctcgcgaactactactcccaagtgactgtactgagagcgaactactgctccaagaagacgacgaggtggcagtgctgggtgtcggcgtgcggcacgttttacatcgaggaaggtgctggtggtgctcatccgcaggccgccggcgagatgggtgggactctagctcccacgctatcgctctag

SEQ ID NO: 22940 - DNA, 534 bp, Zea mays
  Peptide Sequence Number=SeqID_64719
atggacgagggagcacactacctggtcctggtcatcatgtgtgtcttcgtcgtcaggcaaactctcatgtatctggcacccaccgagatcggcccgctggagatgagagtaatgggaagctacaaggaaatttgctccagaaatttcacaaaatcaaggagatggcttgactttgtcaagttagctttctatacagacacaagcttggcatgtatcgagcttgtcaccaccgtcatcggaagtggctgctcttatgtgtgttgctgctattctgctgttccagacaacaaagcagacccgattacggaagggacaaagaacgcttggaaacacacagtctacgacaattgtgctagacctgacatggggggagggagattcaacctcggacaccaagagagggatgctgaggatctcatggccatcgacgtcggggagctgtccagctattggggaggtgctgccacgatcgaggagctacgtcgtggccggggatgtgagctaccgctggatcgtctagaaggagggcgttag

SEQ ID NO: 22941 - DNA, 545 bp, Zea mays
  Peptide Sequence Number=SeqID_64720
aaaaaaaggggaccacggggtcgtcgggccaccgggtgcccatccgggacttcctcgagtacgacctggacgactactccggctggctgcgcgcccgcctggacgcgccggggcgctgggaccggatcaaggcctgcctggccgccacgcccacctgcaccgacttcaacgccacgtacgccacggcgcaggacctcttctcggccgcccccaacaggatgagcccgctgcagtccggctgctgcaagcctcccaccaagtgcggctacaccttggtcaccccgacgtactggatcagccccatcagcgccaccgccgaccccgactgcgccgcctggagcaacgaggaggccaagttctgctactcgtgcgcctcctgcaaggccggcctgctccagaacctgcgaggggagtggcgccgcgcagacctcatcctcgccgtcgccactgccgcgctgctggctgtctacgccatgggctgctacgcgttccgcaccgccaagaccgacgaactctttcgccgctacaggcagggctatacatga

SEQ ID NO: 22942 - DNA, 345 bp, Zea mays
  Peptide Sequence Number=SeqID_64721
atggctgctgctaccgtagctcctccgtggacctccttaggccctgacatctctaaaggccctgtttggaagtgtaggattttttgcagttttgaaacaatactatggtattggctgtcagttggggcacagccatcagatcctgtgcagagtattctctttcgtgccggacttctgccaccacctccattgctagctatggcacggaagggtgggccacgtgataggcgccccattcatccaatgactgggcgccctctggatctcgagggtgtcgcaattattgataattccaatgctcctgaaggcgatactgaagtgcctacagatgaggtggctcaataa

SEQ ID NO: 22943 - DNA, 237 bp, Zea mays
  Peptide Sequence Number=SeqID_64722
atgaactgtaggccggaccggtctagtgtcttgtctttcttggaccggttaataaaaccgcaaatatattttactggtggatttgttaaggataccgctaatagaagtcctcacactagtggttatcttaagcttatcatcagtgtaaacaagggatttgcaccgttggattactgtcgttttgtggtaggagtagctgctaagtacctcatcctcagtcttgtctatggtatctag

SEQ ID NO: 22944 - DNA, 261 bp, Zea mays
  Peptide Sequence Number=SeqID_64723
atggctgtcgtcgcctacctccctgtgccctgctcctacttcgtggtcgtgtcgtgtgccagggctatccgcagcttgcctgcaccaagtccgggcatgtccatcgccgttcctcgtgcagctcgctgccggctactgtcaacctcgcccatggtcgtcaatccgcccatccgcgtccgtgacgtgctcgtcatccccagcgactcgtttcctgctgcacgctacactgagcccggtagccgtattccatcagcttattag

SEQ ID NO: 22945 - DNA, 321 bp, Zea mays
  Peptide Sequence Number=SeqID_64724
atggaggagtccttcacggcagcgcgaagaacagggcggaatggatttgtggactgtgccgatggccagagttgggatgaggttttcacggcgggtgtaaccgcgctagcgaggctcacccgcgtgggcagagccacgacgatggtccggtggccgccgactaaccacgtagcgccacctcaacgttttgacgccacaccgcggaagatttttaccgcggtcgcagacccatcccccagccgcggtggcaatcttatcgccggcaaattctttctgaagttcgatgaacagtgcaccacgtttcagttaaaaatcgcctaa

SEQ ID NO: 22946 - DNA, 498 bp, Zea mays
  Peptide Sequence Number=SeqID_64725
atgtctcagacaaacagagaattggccatgcttatcacaaataagattggattcacaccagagtttctagggcgtgtgaagcttgtaacctcctttgcatccctgctctgtgttgggctctacaactattttctgaaggaagttcctctaaggaaaatatttatcgtgacaaccattatatgttcagctcttgggatgacacaggtgcttcttgcttcatttatgccagtcttggtgttagctggaaaattgtgccctccaggaatggaagccactttatttgcaactttgatgtccatttctaatgctagaagtgttactggtggtctggttggtgctggtctaactcggatatttggggtcaccagggacacctttgggaacctacctctattgattgtcgtctacaatcttagttcgctgctgcccttacctcttttaggtctcctgccagaggaatcaggtgacacagacaatggagaaacaaagaatatctga

SEQ ID NO: 22947 - DNA, 99 bp, Zea mays
  Peptide Sequence Number=SeqID_64726
atggcggttgacagcgtgagtggatgggttgatagcgcttgcaatgggttgatagcgcttgcaagtggaggttatgcatggagtgatttgattgggtga

SEQ ID NO: 22948 - DNA, 1371 bp, Zea mays
  Peptide Sequence Number=SeqID_64727
atggcgtcgtcgctcaagttcacggtgcggagggggccggcggtgctggtagctccggcgtccgcgacgccacgggagcttaagcgactctcggacatcgacgaccaggacgggctgcggctccacgtccccatcatccagttctaccgccagaacgcgctcatgggagggcgggaacctgcgccggtgatccgggacgccatagccagggcgctcgtgccctactaccctttcgccgggcggctcagggagctagaaggtcgcaagctcgccgtggattgtaccggcgagggtgtgctgttcatcgaggctgaggctgacgtccggctcgatcacttcggggacgagctgcaaccgccgttcccatgcctcgaggagctcatctttgacgtccccggctcgtccgaggtcctgggctcgccgctcctcctcttccaggcacgtgacggcgtccttgtctctgctcatcctcgtttggaaaaaaaaataagaattaccgccgccatgcggctagtttcacgtgtgacgcgcctggcgtgcgggggcttcatcctgggggtgcggctgcaccacacgatggccgacgcgcaaggactcgtgcagttcctgggcgccgtggcggagctggcgcggggcgcggcggggccgacagtccggccggtgtgggggagggagctgctggaggcgcgcgacccgccgcggccggcctttgcgcaccgcgagtacgacgaggtgccggacaccaagggcagcatcatcccgctcgacgacatggtgcaccgctccttcttcttcgggcgccacgaggtggcggccatccgcgccaacctcccgccggacctccggtcccgcgcctctaagttcgacctccctcacggggctcctatggaagtgccgcaccgcagcgctcgccctggacgccgacgagccgccgtcgcgacggcaggtgatctcgtcgccaagccgctcgggtacgccgtagagctggtgaagcgggccaagggcgaggtgaacgtggagtacatgcggtcggtggccgacctgatggtgctgcgcgggcggccgcacttcacggtggtgcgcgcgtacctggcatcggacctaaccaaggctgggttcagcaacctggacttcggctggggcaatccggtgtacggaggacccgccaatgtcggcgtgggcaccagccccgggatggccaccttcctcgtcccgtgcaagaacgccaagggcgaggacggcatcatcgtgcccatgtgcctgcccggccccgccatggagacgttcgtgaaggagatgggcacgctcgtgagcctgcccgcggagcagaagcaggacccgatgctccccgtcaacaggtccgcgctctga

SEQ ID NO: 22949 - DNA, 336 bp, Zea mays
  Peptide Sequence Number=SeqID_64728
atgtgggtgctcactggaacgagctcagaccagagggggccctgtgccgaccaaggggagtggagggcgctgtgcagggggcgcggccaaaggaaaggggcgttgtgcagggcgccgactgcacctagggaactcctgtggcaagggacagagggacgagggatgggcgctgtgggctgctggagaaatcagggcgccatggctggagcagaggtagctgcgcccatggagcagggatggaactcggctgccatgggaggaagggagcttcctgcgcgctggggaagaaagctccttgcttgcagccgtgtgggagaaggaggcagaaagctgtga

SEQ ID NO: 22950 - DNA, 429 bp, Zea mays
  Peptide Sequence Number=SeqID_64729
atggagatgaaacagcaagctgccctcccacctgccatggagaagtttgacgtcacgccatcgccggcaccggcggcagggcagccacgagcgctgccgctcaggttctacgacctcgttttcttggccatcccgcccgtacaacgcctgttcttctacgacagggccgacctgctcgacgtctccgacttcacgctgggcgagctgccacggttcagggactccctcgccgccgcgctacaccacttctacccgttggcggggaagctaacgtgcgagctggtcgacgaggaggccgccgcgccgccggagggaccgagggaccagggagcgccgggaggaggaggaggagagatcgagggagcagggagcgtcgggtggatggagcagccgagcagggagccagccagccagggaccaccgggatga

SEQ ID NO: 22951 - DNA, 210 bp, Zea mays
  Peptide Sequence Number=SeqID_64730
atgaccgcaacaaaagcatttgcaatggcagtggtttgcggcgggcgtatcgtggcttgcggggttcacggcggcgggcgttcgctacggcgggcggggttcgcggcaggtcgcggcgggcgtatcacggttggcggtgggctgttcgcggctttcacaggatgcgaagaggattggactaagacactgaggatgcaacacctcaaatga

SEQ ID NO: 22952 - DNA, 300 bp, Zea mays
  Peptide Sequence Number=SeqID_64731
atggtgcgagagtttccagtgaggcggggtttcggtgcaagcgctgctggcgtaggcgcgggcgtgcaggtcgtgggtggccatgcggcgaccaacatcctgacgctgctatctaaggtgtggcccaagaaggtcgaggagctcaccgccagggtccacaacaccagcaccaccggtggtggaggccaaggtcggcgtcgggtccgccacgctacacggttcctcgaggcgtccctacgcagcctcgacggccacgacgacgtgtacgagtgcgcgggtgagcggtcacaggggtgctag

SEQ ID NO: 22953 - DNA, 174 bp, Zea mays
  Peptide Sequence Number=SeqID_64732
atgcaatcaccaggtgatttatttagattgtccagtgaaatccttgagttcaataggacctttccttccttactctttcatctaaatgacatcctaattgggaaaatgtatacctccaaaacaagcataatgctgtcaaggctggagagcggaagtagctcttccactacatga

SEQ ID NO: 22954 - DNA, 246 bp, Zea mays
  Peptide Sequence Number=SeqID_64733
atgagagaccggcggaagttgcgggtggcactcttcaattcagcaaaggagaacaccctcaggttagacgggcggtcaatgaagctggggtactgtgtcctccttatcgactcggcgctcatgtcggaaacattcaaggaggtgaagtctgaaccggagcggacatcacgctccgttgatatgcagaaagtggagataaattggcgtgactatcaatacttcacatttgaacgagagctcaagtga

SEQ ID NO: 22955 - DNA, 222 bp, Zea mays
  Peptide Sequence Number=SeqID_64734
atggctaactcagcggcacctggtggaatgaggccgttcctgcaggccgtgtctgcagtcctcgtggaggcgcggacgtcgctccgtgtcgctcagatggagggcagtagcctgaatccgcgtcggcgtcaaactccgccgcggtgttgccgagcgccgccgtggtcgggttctgcatcgtgggcaggctccctccgtacctcaaatcccggtgctaaataa

SEQ ID NO: 22956 - DNA, 108 bp, Zea mays
  Peptide Sequence Number=SeqID_64735
atgagtcgtcctggtgcagcgaagcttgctggagagcctgcgcacagcggtgccgacgagggggcgctaatgcgaggcagttccattttggtgtgtgctagaacctga

SEQ ID NO: 22957 - DNA, 363 bp, Zea mays
  Peptide Sequence Number=SeqID_64736
atgggcaagaacaacaagcgcaagagtgagccgactcctccatccgaggacttcggtgattcggagtacttagaggaggagttctcctttgagtctgaggggtcctcggctcccattcctctgcagtactcctcggacgaggaggactcgtccgaggaggacggcggcggcgatggcgaggacgacgacgatgacgacgacaacgacgaaggcggtggcggcggtgacggtgacaacggcggcaagggcggcagcagcgacagcaaggatggcgacggcgacagcagcaggagcggcggcggcagcaacaggggcagcaacaggggcggtagcggcagaggcagcaacagggccagtggctag

SEQ ID NO: 22958 - DNA, 324 bp, Zea mays
  Peptide Sequence Number=SeqID_64737
atggatggaggtagttggtggtacgggaacgtccgcacgctgaacccagtcatgtcacaggcgacgtccatatccgctagcctcgggctaaccatctcagctaatcatgctcttgaaagtgagtcagactccgacagcgaatcgttgtatgaggtagagggagttccatacgagcgaggctatgagctcttttctactagtgtgatctattggtaccttcttattcgcttcgtctcaatggatctgttacctcgctcgtatggaactccctctacctcatacaacgattcgctgtcggagtctgactcactttcaagagcatga

SEQ ID NO: 22959 - DNA, 180 bp, Zea mays
  Peptide Sequence Number=SeqID_64738
atgcaggatgctgcacgtcgtgcactttcgcagtattgctcattgttcagtggggtggctgatggtcttaacctgaagtattacccccaccgctcgactggcattactggaagtgtgattgtctcaccaatgtctgacaacaggcaccaaggtggaaggcgtgcccatccagagaagtag

SEQ ID NO: 22960 - DNA, 255 bp, Zea mays
  Peptide Sequence Number=SeqID_64739
atgaagggacattgggagttgactgatgttgagttgctatctttgggcaatgcgacgcctagtggccttgttctccacagtggaaacatcctcggcctcctccttgcactggggatgtctgaccattctgttgactgttctgatggtactgctgttactattgctgagggaactgtctcagatactgttgttgatgctgaggttgatgttggtgttggtgctagtgctagtgtccctgggggtgactctgcttga

SEQ ID NO: 22961 - DNA, 183 bp, Zea mays
  Peptide Sequence Number=SeqID_64740
atggcggcggctgaagccgctgggcaactgcccagcgcccgcgaggcggatgagcgcgtccacgctctgcgcactggtggttgggccgtcgtgggcgctgcgcgctgggctacagacgctgccagaaaaaagataaggaaggcgacaaaggagagagtaacacctgaatttggtgaatattag

SEQ ID NO: 22962 - DNA, 453 bp, Zea mays
  Peptide Sequence Number=SeqID_64741
atgggcgggggcagcaggttggggaggaagaacaaggcgaaggccgggaagacgaacgagacatcctacaacggcaaaaataatgatgaatacggggaggagacgcctgctcccacgccctctgccgagaatggggtggcacagagacggaggcatgaggggagagaaaaaagcagcatggcaaacgaggtggcggcaactgaggcgagaatcatgattattgtgtggagcaggaccgtgctgggccgcccgtttggccatctacatgcgaaggggtgggatctagattccagagaggaggaagacgaccctgtgccatcgtggaccgtctggtgcgacacagggaaggtgtcgctcctgtgcccaggtcacggaccatccaacctagagccgctgaccgccgcacagagggcactgctgggcggtacacccctagtgattggtgttgcctag

SEQ ID NO: 22963 - DNA, 198 bp, Zea mays
  Peptide Sequence Number=SeqID_64742
atggcacagggtcgtcttcctcctctctggaatctagatcccacccctgcgggagagatcttagggcgctttgggtcaacaagtcaccctgaacgtccccagacgacgtggagtcgacaaggaattaagaaacagtcgaggtacacgagcttccagatacaacggtcaaccaacaatcgcagtcatgggggcttctag

SEQ ID NO: 22964 - DNA, 171 bp, Zea mays
  Peptide Sequence Number=SeqID_64743
atggcgcttggtgagaaggtggtgagcgacaacgacaagaacaacgataaggactctacttctaacgtatcacgttccactgatgaactcgctactgagaccaagtatgccaccctactagatgagtgcgatgagttgagatctagatctagcctattaggtgcgtcctag

SEQ ID NO: 22965 - DNA, 183 bp, Zea mays
  Peptide Sequence Number=SeqID_64744
atgacagaggaaaccacactcaagggcatcagtagagctcccagacttcaagggatgcaacaaagctcttacaggccaccgggctacaagaggcagaggaggcagaagctttggaggaagatggttgacaaggacataaatgtccttttactcgggctgcgtcccgtggctataaatagatga

SEQ ID NO: 22966 - DNA, 618 bp, Zea mays
  Peptide Sequence Number=SeqID_64745
atgccgcggctggagcctggccgagtggccgaccatggcgccgaggctagggcacgccgcgctcgctggccatcgggtcgccacgccgggcagaggccgcgccagcaggggaacgctgggctggccgcgagccacgctgactgcgcgctgtgggccgcgagccgccgcgtccgaggctgccggccgcgcaggctggccgctgggggctggccgcgccgagatcgcgcgcacccgtgccgggacgccacgcccggggatgagggagagggtcggcgctggcgatttgggagaggagagaatgagcgcgtcctggtgcttgagtgggagatcgtggggaagcatggagagaagatgaggaagggagagagatgggcgggcggcggcttggtgggtgggacccacccacaggcggcggtggcgctatggttttggggggaagggcgcactgcgccaggtgggcacactgggccgcgcgaatgggccgggggcgggccccaagagatggaggctgatggagttgaagtattcttcatcattaattctgaagatttcttgctagtgcgatcaggttttgccaccttttgtttctttcgaagggcgaattttgttcctaagtga

SEQ ID NO: 22967 - DNA, 426 bp, Zea mays
  Peptide Sequence Number=SeqID_64746
atgtcagcgacaagcggaagcacgatccaagtcctccctcggaggacttcgccgactctgagtacggaggaggaggtttcctctgagtccgaagggtcgctggccctcgcctctccccctacgtcgtccgatgactcggacgactcccaggggatagctgcggaggtgtggatgtacattcgctccatcgagcgcgccgggctcgaggggtcggatgagttggaggtctcctctgatgaggaggactccttcagctcgtccgaggagcggagcggtgacgatagcgacgacgagggcggtggtggaggcggcgacagcgacgacggtgacgacggaggaggcgatgacgacggcggtaggggcagtgaaggcgacgacagcggcagcggcggtggcaaggccagtggcaatgcgccactggtttaa

SEQ ID NO: 22968 - DNA, 486 bp, Zea mays
  Peptide Sequence Number=SeqID_64747
atggctgcacgtgttcaagacttcgtcaccatccgcttcggttccatgtgggttgatgttcccatgggtcccattcaagcttccaacagtgctggttcactccaaaccacggccacgtcgccggctgtagttgctcatgaccaagaggtcaattccaaagctgaagaggggttcacccccgtcatgtccaaagttgccaagcgacgggcaagaagagttattgccaaagcaagggtggcggccaccaacgaatgcgctgcaaattggcacaaggctacacctactaactcaactcctgattcatccaagtacaagggcgccaagccctccagcttcatgatgacgcctaagctgttccaccctatcacactgggggagtggcccatctgtgctagaaaaggcgccaccaaccaagtcaacagtgctgatggtgtcttcatcttctccaaaggaaaaggaagcgatgccacctgctgtcactcatga

SEQ ID NO: 22969 - DNA, 432 bp, Zea mays
  Peptide Sequence Number=SeqID_64748
atgactccttactctctggtatatggaggagaagcagtcctgccgttggaggtgcaaattgcctctttaagagtcgttattcaagaaaagctcaatgaagacgagtcagtgaaattacgcctaagggaactagacaacctcgaagaaacacgactacgtgcgttgcaaaacttagaggcataccaagctagaatgtctcgagcttttgacaaacgcgtaaaaaggtcgttcaaagaaggggatttggttctcgcggtaattcggcctatgaatattactcataagatgcaaagcaaatttgaacctaaatgggaaggcccgtacattgtaaaagatgtatactctagcagcgcttatcggatcatatctccggatggcgaatattgtccaccgccagtaaatgggaagttcttaaagcgctactttgcataa

SEQ ID NO: 22970 - DNA, 444 bp, Zea mays
  Peptide Sequence Number=SeqID_64749
atgttcctcaagactacccagcaggtggttcaaatggttctccatgggctagatgttactacgcttagagagccggggcgatgcgccgacctgcgacgtacatcagccaatctcccagtcaattttcctagtattgccaagatcaaggctatgctggagcaactagttgttatttctgagcaactgcagcttgcctactctgcgttggacgcaagctctggagaagtagatcaagctgttgaggggtttaagcaagaacttttggctaagagcaatacactccaggttattgccgaggagatagcttcagttgaaaagaaggaagctgaaatttctgcagaaattgaaaaacttaaactcaccctgctggaacagggggagaaaaagaaacaactctcagaacttcaatcagctcaggatttagaagtgaagcagcaggaatag

SEQ ID NO: 22971 - DNA, 318 bp, Zea mays
  Peptide Sequence Number=SeqID_64750
atgaccaagactgaaggcctcaatacagagaacttcgtcaagacaattcgtacaacgatgatgaatgccaagaggctgtttcggtctggggcaccgtactgtctggtggtgcaccggacagtgtccggtggtgcaccggacagtgtccggaaggagatcgggcaccgggacagtgtccggtgtgcaccggactgtccggtgcgcccgatgacagaaggcaagatcagccttccagaattgctctcaacggctcctagctgccttggggctataaaagggacccctaggcgcatggaggacaacaccaagcaaccttag

SEQ ID NO: 22972 - DNA, 198 bp, Zea mays
  Peptide Sequence Number=SeqID_64751
atggccggactatcttggttcaacctcggacacttcggccagccactgaagaacccgacagatatagaggaggagatggcattaataggacacctaacacacatctcggacatccctaggaggaaagccgacagaatgatgttaggcaacctgagattttcacccacaaacttaatggatggttgccagaagaggtga

SEQ ID NO: 22973 - DNA, 1065 bp, Zea mays
  Peptide Sequence Number=SeqID_64752
atgaacctgcccaggcggctctcttcaggtttcttcatggatggcaagttttatgtcattgggggcgtgtccagtcagagggattcattgacttgtggagaggaatataaccttgaaacaaggacctggagaagaatatttgatatgtaccctggtggaaccagtgcgtctcaatcgcctccttttgttgctgttgtgaataaccagctctacgccgctgaccagtcgacaaatgtggtcaagaagtattacaaggcaaacaatgcctggaacatactgaagccattgtctgttagagctgactcatccaatggttggggtctagctttcaaagcttgtggcaatcgattgctggtaatcgggggccatagaggacctcgtggcgaggtaatattgctgcattcctggtgccctgaaggtggggaagatggtgctgactgggaggttctctcggtgaaggaacgtgcaggcgtctttgtttacaactgtgcaataatggggaatgactacttctctggggagtcgaagaaacactcagatgtgttctgtgatatttcagaattagatttctttccatatgctacatatttggatagtgaagaacttgaactgaaggagcatgtggaatatcttcctggagcacgcctagctcctatagatgggcttcggatcatcggcctgtacgggaaggccgggatgccaggccacgcgctacggactttccaggagatggggatgtacgggtgcccgcgcaccgcaaagtcactcaatgccaccatgaaggtcctgctgcgggcacggatgtttgatgaggctctgtcgctgtttgaggagggcccagagaagtacgacgtcgaggtggatgacatctcgtgtaacgcggtggtgaagatgttctacgacatgggggacttgcgtgcggcgtaccgggtcatgcaggggatggagagggctgacactgtccaagcagaggatattaaggagatatgcaagcttttagtggtggtatcaagagaagctgtaaaagcatatgttggtactgctattgtctttacgctgatttaa

SEQ ID NO: 22974 - DNA, 501 bp, Zea mays
  Peptide Sequence Number=SeqID_64753
atggacgtgccaagccgcttccttcctagccggccgtcgtgggtacctgggtctcctcctaatttgatttggaactgctgcgcctcagcctcgatctgtcgcatcccggctcatcgccgcgcgcgcgcctgcttcctgtgcgcgcagccgctccctccccagccgcaaagcaccccgttaagttctcctccgccgggttgtcgtacatgcgaaactgctcgcgatcggcatcgattcaaccgctcgaccctgttccctggccaccgctcgactctgagctctggttcctgcgcgctgttgttcccctcgcagcctgtggaggtggacctcggcagtgtccccatcgccgttgaactcccatacatgttcctctctgttcgcttgtcgttggttccggccaggtctcgcgcgcgtggttttgaagctctgcgcgttcgtcgtgccgcgctgtgtgctagtgttctcttccggcagaactcgccgtcgaccatgttcaagtga

SEQ ID NO: 22975 - DNA, 264 bp, Zea mays
  Peptide Sequence Number=SeqID_64754
atggctaccgctggtgatccacctcttcctattgatgttgagtctgtaccctctgctctgctcaatggaacatgttcattcaagccatctctcactcttcctctccctgccatcgtctttattatacaggcagcaagccaagggaatcgaagtgttccatatgatccatccaaggacccgttgagaaggccagctaagcccaaggatcgagcatggaagtatgcattttggtcaaaattggagaagaaggatgtcagggcctaa

SEQ ID NO: 22976 - DNA, 699 bp, Zea mays
  Peptide Sequence Number=SeqID_64755
atgtcgggagatcacgccaagaagatggtgatcggcggtgagaagtccgctacaagccacgggaaggctccatcaagggagtccgccaacaagaagaaggatggatccccttcacgcattcgaccacacaagagtggcgagaagaagaagaaaatgaagaaagtggtctactacgagaccgactcttcatcgccctctacatccggatccgactcctcgtctgtcacttctaagcgccaagagcgcaagaagtatagtaagatccccctacactatcctcgcattcctaagcatactccatttctttccatcccattaggcaaaccaccgacatttgacggtgaagattattctaggtggagtgatatgatgagatatcacctaacctcactccacaaaagcatatgggatgttgttgagtttggtgtacaggtaccatccgtaggggatgaagattatgatgaagacgaggtagcccaaatcgtgcacttcaactcccaagccaccactatactcctcacctctctaagtcgagaggagtataacaaggtgcaaggattgaagagtgcaaggagatttgggacgtactcagacgtgcacgaggagacgagtgaccagatcccagcggagacatcgaggggagctcggcgcttctgctcgcaagggaggaccacagagtgtcaacggtcagactggtga

SEQ ID NO: 22977 - DNA, 657 bp, Zea mays
  Peptide Sequence Number=SeqID_64756
atggtgtggccggcgggcggagggcagcaggatggttgggcagccccgccggcgagcgtgcgcgcacgccgtgccgcacagcttcgggctgccgtcgctgctcgccgaaggctgcggcggtggggtgcccgtgcccgtgccggggagggcgatggcgccgagacagtcggcgccggtgcgcgtgccggcggcgtggccggcgggcgggtggcgcgcaggcggcaggaaggccgacgaggacgaggaggacgacgaggaggtggtgccgccgcacgtggtcgcggcgcggcgccacgcgcggtcgtcatccgtgctggagggcaccgggcgcacggtcaagggccgcgacctccgcagcgtccgcaacgccgtgctccggcagaccgggttcttggacctgtgaacgtccgcaggcagccgacattgttgtgtgtccagccatatacttctgtccccagcgaagagcctctggttgacatggttgacctgacaaacccttcatggatagatgcttcttcagtgaatgagcctccggctgatgtggttgatctgctacatgcttcaaacgagcctttggtcaatttggatggtctgccaaaccatccagatatgtcttttggtgggagcagtggagaacataccgacagtcttatataa

SEQ ID NO: 22978 - DNA, 900 bp, Zea mays
  Peptide Sequence Number=SeqID_64757
atggggaaaataataagaagtcataaacaaggcattgatattgaccaccctacgaaaagaaaaagaaaactatatatttttgatacaaaaaatgaaattgagaatagaattagggctctaacaaatgaagaaccaggtgagcatccaaatgatagacctgatattattgtccgtgttttccatatgaaactacaacaacttttggatgacttacaatcaggaaagatgaaatcaaatgataaattggaagacatagctaaagatccaaagtatagaaaaacaatactaactgaatggtttaatgcaaataagcaatatgaagatgcaaaagaattaacatactatgagttccccaaacaatggcgttgggatggagaaaaaagacaatggaagaaaagacaacatggtttcaaaattggaaggctctattatgtaaaccctgctgaaggtgaaagattctatttaagaatgcttctaatgattgttaaaggaactgggaaaacatttctatggaatgccattgtatcataccttagagctataagaaagattgtccttacagttgcatcatcaggagttgcttctttgctacttccaaatggatgtacaactcactcaagatttcgtatacctatagatttggatcaattgtcaatgtgtgatataaaaagaggaacaaatcttgcaaaacttcttattgacacaaatcttattatatgggatgaagctctaatgacaaataaacaatgctttgaagcatttgatagatcccttagagatataataggagaaacatatgaaaaagctcttgacattccttttggtggtaaagtggttgtgctaggtggcgatccaaaacaaatattacctgttatagaaaatggaacaaaagaacaataa

SEQ ID NO: 22979 - DNA, 1566 bp, Zea mays
  Peptide Sequence Number=SeqID_64758
atgaactcaacacgccgagcttcaaaagcggcaaagtcaacaatcaattaccacaggttttcattagatgagcaccacttatttgagccagatgctttgattaccaaggagcgagatgccaatcatcaatcaaggcaaagttctcaatcttgcagaacatatgcatacagaagattgaccactccccagtttgtatctgcattgtctggaatctggaatcttgttggccagcctgaatcatctggcacagctcaaagatctagtattcatgggatttcgagtagggaagaccctgtgtgctttagcagggaccaacaaggaaatatactgacaccttgctgtgtggaaaactctagtggtctgagatctcaatactgtttctctacaccaaaagaaatttatgaggatcttatttacgtaaagaagaagatgttaacgctgacaccattcaataacattgttggtgcatcatccacatggatgcatatgcattccacaaataaggttgaaggtgcgcattatttgcaatttggaactatatactctgtgcaagctgaaaagatggaaaaaatcgagacttctcagaatagcaaaagaagcatgtgtgaggaaacttgtgctagttccaacaatatggatattagggacaatagctattcaaatcaaacaagacacatgcctaacgagctatttactatctcaaatgaagaagctagcagtacacatgattgtgaaagttctcggcacaatactgaatgcaatctagaaaaaaatcaagaagattctaattttttagcttgcccagtacatgaaatggaaattgccaaagaggtgaggataatgccagggagtcaggttttcagtaaggcgtgcacagatgctcagcttgacaaatcaaagcacatgtcttgtctggtgggtgatgctgttgttcttaattcagcaaatgcagatgaaagtgcttgtagggaggacgtgtgtctgcagctttctctagacaagtgttcacaagagctccaaccaacttttcagcatcgatttgatggtgctgttaccataaacaggcatgctgtggcaggagcattagctgggacagcagtcagtgtttctttgcatccaattgatactgtgaaaacgataattcaggctaacagttatggacagagttcagtctaccatacactaaggcgcacccttattgagagaggacttgctagcaaacttgcttgttctgcaccaatttctgcaatttataccttaacttatgaaacagtgaagggggctcttctgcctgtttttccaaagttctatgcttatgagagtctgaagcagtctctgttgaaatcagcacctgatagggccaaactcaattctggccaaacggtgtataagcttttatgtggaggttttgctgggtcaactgctgctctctgtacaacaccgtttgatgttatcaagacacgagtgcaattacagtgttttcactatctgatttcagatccgtatttgacaatatccgacattatccgtatttgcaaagaaaacaagtatcatgaatctatttaa

SEQ ID NO: 22980 - DNA, 346 bp, Zea mays
  Peptide Sequence Number=SeqID_64759
ggtgtacgtgggcgagatcatcagcgagggcagcgagcgggagttcctgcagacgaagccggcgccgtacaacgtcgtgctcgaggacggcacgtacaagggcgtgctcaagctgggcctcaagttcatctccagcgtgagcctggagcagtcgagcgactgcgtgcggtgccctgcgcctgcgcctgcgcctgcgccgacgaggcagacgagcgccgggcacgggctgtttttccttctcaactccttcgcgctgccgagcatcccgtggaggaggctcttctccttcgccagtcgctgggcctggaaccatggacaagcgccgagagagaggtgtggaaactga

SEQ ID NO: 22981 - DNA, 2793 bp, Zea mays
  Peptide Sequence Number=SeqID_64760
atggaggagtgggagccgctgcggagcgcacgatgcagccccgccgccaccccaagctccctgctgcaggacgagctggccgcacacgaggtgttcgtcgcggtgcccgaagaggtcagcgacgggaggagcacccttctgtgggcgctgcgcaatctggtcaaggacggatccaagcttgccatagctcatgtccattattgccctgcgccagcgatcgcccagacagcttgtgatttccgttacatttcagacaggagtcataccagcatgaaaccagaagaaatcaaggagtacagaaagcagaagcgagcaaaggccgagaagagtctagatgcgtatgtgcagatggcaaaggctgttacatttcaggttgcctgtgcgaaagtaataatcgagacggatgatgtagctgaaggacttgaggagctcatctctcttaataacgtaactgagtttgtcatgggagcagctgcagaccgacacttctctagagaaatgaacacgccaaagtcgatgacagcgctcaagcttttcaagacagcagctccatcatgcaagatgtggtttacttgtaaaggtcatttgatatgtaccagggaagcaaatgaaagccttcctgccatacttgcatcacctgaaaaaagcaacgcgccgctgtcaccggcgcacaacgtttcaagtcaaatgggatcaatggcaaccgagttagaatacaaagaatcaagccacaaaggatacatttcaagctcatcggctgcagcagaaatgacggaatgggattatctttttggagttattggcgatacacatgaaacaacacaagtggtgcattttacaactcaggaacctgatagcacctacttgttgctagcatcaacatataatcaggaagacgaacccagtgtacatgaagaaaagtatgagaagcttcaagattcatgcattgaagctaagttgttaaaggatgaagctgatgatgatgaatctaacaaaatccggaaagctgaaatggacctgctttcagcacttcaaagagtccagtgtgaccaaaatagcgaaatctccttgcagattaaagagttggaagattcatatattcacgaggtgagccagcgaaaagaaattgagaagacgcttgctagacaaaggttggagattgatgaaatgaggagacaacggtgcacgctatctgataaattacatgattcggataagcataagcttgtacttgaacaacgtataacacaaattaagtcagctgcaaaagatcacgtggaagagattactgaacattttataagacaatcaagtgaggaatctaaaaaacaccaaaaagtcaaaatgggtctgctttcaacacttcaaagagttaaggaggttgagagtttgctacagaatgagaaggcacagcgggaatatatggaggagaaggtatcaagacagagaacagagatcgaagaaacaaggaggcaacgagataaactgtaccatgacttgcaagatttaaaagagcagaagctcaaactggaacaagttggtatgtctgaagaaactaacagaagaagaaaagctgagagagatcggctctcataccttcaaaggattaaagacctggagcaccagcacatacatcaggtgaaaaagcaggaaacaatggaggagacaatgacaagacagaaggaagaaatccaagcatcgaaaagaaagctacatgagacacatggcaaacatatgtctgagataaagtccgccgtgaaggttcatgaagaaaagctcgccgacagcaagcagcttctccaagagctccaagcgaagcatgacaagctactgcgtgagagagacaccgcagctatggaagccaaagagtcacgccaaaagaacaagcaaagagccttagggacgactgaaactgcgaacaccgagttctcgattgtcgagctgcagaaagcaaccagaggattcgatgcggaactcaagatcagcgaagatggatttgcaagcgtctacagaggtttcgtccgcaacacagacgtagcaataaagttgttccattcgcgaagcttaaaagggcaggcaagattttaccaagaggttgctgtcctcagtagggtgaggcatcctaacattgtcacgctggtaggagtatgtcccgacgacttcgcgctggtgtccgaattcctcccaaacggcagtctcgaggattggctctcgtgcaagaaaagcatgccgcctctgacatggaaggcgcgcacaaggatcgtcggggagatatgctcagccttggccttcatccactcacacaagccatatccgatcgttcacggcgatctgaacctgggaaacatcctccttgacgccaatttcgtcagcaagctgggaggcttgggcatctgctgccttcttctaggtggtggtgaagacgacataacggccaccagcctgcgaagccgcccttcagcagcagaccgtagtaagggaacactccgctacacggagcagggcggtggattcaagtcggcagcggagctcatgctgtggtccgacgtgaactcgttcggcgtcaccatccttcgcctactgacagggcgatcgcagcaagggatcggtgagatggtggaggaagcgatggagaaagggaacttgcactcgatcatcgacgcctccgcgggggagtggcctctcgtgcaggccagccagatggcgcatcttttgggcttaggtgcgtcaccctgggctcggggcgccagccagatctcgccggggaggtgtgggaggaggtcgagcaactga

SEQ ID NO: 22982 - DNA, 2742 bp, Zea mays
  Peptide Sequence Number=SeqID_64761
gaggtcgttgccgcgttcgacaccaatgaaacaaggaaacgcaataaggagatccctccctgctgcttctctgtacgcgttacccccaaacccctcagccatcttggcgccctgcggatggagggcggcagcggcgctgcgcacaggccgtgggatacggcgtcgcagctgcagtacagcttcaggacgtccgtgagcagcctcagcgaggtggaggaggaggaggcgagcccgccaccggtggcggtggaggacagggtcttcgtggccgtccccgaggacgccaagaacggcaagagcaccctgctgtgggcgctggagaacccagccaaggactgcgccggggttgtcgtcgcccacgtccactgccccgcgcagatgatccccatgatgggggcaaaagttcatcacagcacggtgaatccacaacgggtcaacgaatacaggaagaaggtgcgagcggaggtggaggagaaactagatgaatacgtccttgtgtgcagaagacaaaaggtcagctgccagaaagttgtaatcgaaatggatgatgctgtacgagggcttgagcagctcatcactctccatggcgtcgctaagcttgttatgggagcagcagcagacaaacactactccaagaaaatgaaatcactgaaatccaagacggcgctcagactgacggaggtggcggccccatcgtgtaagatatggtttacctgtaaagggcgtctcatatgcaccagggaagcgaacacaactgttcccgccatgccaccaccatcacctgcactcacgagcgcatcaagatcatcagtaagcagcgttgctagccagctgagatcaatgttactcagtcgctcagagagtgacgggtcaagctcgaacggaagtccaaggcatgacctgaccaggtcgcgaacagaggcggggctgctgctgtatccctctcacgaaaccgtcaacatcggtacgccgtctcggctctatgaatcctacggcaggaggccgcctacgacagcatcagtgagttccagcgattcctggaacgaattcgggaggagatcgcagaactcgtggcacgatgatctatcgagaaacgacggtgcggccaccactactgtcgtcgtctccggatcagcgatgcaagaacctgacgacgagaacttctcgtccccttctcatgagctgatggctcaagtaggtctggactctggtgccgcacaggaaaacccgggcgtcgatgctaacatatacagaagactcacggaggctctgagtgaagctgagcgctgcaggaaagaggcataccaagagtcggccaaacgcctgagagctgaactagacatggcttcggctcttgagaatgtaaacgagctgtatcagcacgaggtaaggcagcgcaaagcgatcgaggaaacgctggcgagacaagcgcaggagatggaggaaatgaagagacagcacggtgtggcatccaaggagctgcacgacgtcaaggagcagagactcgtcctggagcggcaagtaacagagatggcgtctgctgtccaaggctacgaagagaaggtggcagctgctgaaacgctgaacaccgccgagttctcctattctgagctggaacaagcgacccaaggctttgacgaggggctcaagatcggcgagggtggcttcggaagcgtctacagaggcttcctccgcaacacagccgtcgctgtgaagctgctggatccggaaagcatgcaaggcccgtcagagttcaaccaagaggttgctgttctcggtagagtgcggcatccaaacctcgtgacactgataggggcgtgccgggaggcgctcggcctggtgtacgagtacctccccaacgggagcctggaggaccggctggcgtgcaccaacgacacgccgccgctgacatggcaggtgcgcaccaggatcatctgcgagatgtgctcggcgctcatcttcctccactcgaacaggccgcacccggtagtgcacggcgacctcaagccgggcaacatcctgctggacgccaacctggtgagcaaactaggggacttcggcatctgccgcctgctgatgatgagccagtccaccaccactaccaccatgcccgtcgccaccacgaagctgcacaggacgaccaccccgaaggggaccttcgcgtacatggacccggagttcctgtccaccggcgagctcaccccgcggtccgacgtgtactcgctcggcatcatcatcctgcggctgctcacggggcggccgcccaagagcatcgcggaggtggtggaggacgcgctggagcgggggcagctgcacgccgtcctcgacgccgccgcgggggactggccgttcgtgcaggccaaccagctggcgcacatcggcctgcgctgcgcggagatgagccggcgccgccggcctgacctcgcgggggaggtgtggaaggtggtggcgcccctcacgatggccgccgccgggcggcctctgccgttcgcgccgtcgccgctggatgacgcccgcgcgccgtcctacttcgtctgcccgatcttccaggaggtgatgagcgatccccgcatcgccgcggacgggttcacgtacgaggccgaggcgatcacggggtggttcgacagcggccgcgacacgtcgccgatgaccaatctcaagctcgagcactgcgagctcacgccgaacagggcgctccgctccgcgattctcgagtggcggcagcagcagcagcggagataa

SEQ ID NO: 22983 - DNA, 147 bp, Zea mays
  Peptide Sequence Number=SeqID_64762
atggtaggtcttgtggagtgcaaggtgtacgcgtacaaggtcggtctggatgtgatcaagttgctggagcgcatgcagattcgacaagagttatgtctacagctggaaacattggttagtcctatgtaccggtggcaatggatgtga

SEQ ID NO: 22984 - DNA, 138 bp, Zea mays
  Peptide Sequence Number=SeqID_64763
atggggtgcgcaggcgccgttctccctgccggcagcaccgtggtcgaccccttccaccatctgcatcgtggccacgccgacgagcccgccaccatgcgggggcttgccaccgctgcctgggtcgttgtggggagcagg

SEQ ID NO: 22985 - DNA, 309 bp, Zea mays
  Peptide Sequence Number=SeqID_64764
atggccaacctgccagacctccaacaaacacgaggcacgcgacgagtttgtctctctccccccaacctgctcgacatgcaccgcaacaatggtggtgccaccgccctcgcctatttgctgcaatccaaggagcaaggggaagaagcagcgacacgatttttataccctcggtacgggagcgctccagtcgaggaagagaacggcccccgtgagatcaccgtggtggttcagatacgggcatatggctctactcgagcccgcggggagctagggataagtctgacctgcctggccacaggtcggcactag

SEQ ID NO: 22986 - DNA, 387 bp, Zea mays
  Peptide Sequence Number=SeqID_64765
atggcgtgctctaagaagattcttgctgttctcattgttccaatattgttagctcttcttgcttcgaccatgcatgcaagccaaggcagtcgtgccctatttggaggggaacaatgctcgacatctaacaattgcaatgagcagttgtgtggagcaacatgtgccgtcttgggggagaatggtattgggatcattgtaacctctacaaaacatacctcggttgcacgtcttgatgccgactcgaggttgattattggaaactcctttgatcttgttggaaatgtgaaaatgtttggttgtggaagaaacaaaacagatgatggtgaaaaggatgatctaactaatccaagtaatccaatgtacatcaagaagcttttggttgtttaa

SEQ ID NO: 22987 - DNA, 192 bp, Zea mays
  Peptide Sequence Number=SeqID_64766
ggtgagaggctccaacttgtggagattcctcgcaaacgggaagaatacttgttaggggccttcttctccgccgaaggtcctctaagcaaaaacaccttcggcaagacgatatgcaagcaggcacaacacgaagttatcaaggatataaatgtaattttaaccgggttgcgtcccgtgcctataaattggtga

SEQ ID NO: 22988 - DNA, 1173 bp, Zea mays
  Peptide Sequence Number=SeqID_64767
atgtacgcttgttcaagtgccttcttgctgctcgcagtagctgcagtttctatgatgatatctaaacgtagaagatccatcaggcatcaagaagttgaggaggttgatgatgaatttgaccacatattagatcttatgatgggtgaataccggaagaggaagaatgaagaacaacgtaaaagacgacgaggttcagtttttggacatgaggtatatgatcgcagtagaggagaacatgatttaaaattatttaatgaatactttgctgagcgtccaacatatcttgagaagtatttccgacgacggtttcggatgagtcgtcctcttttcatgcgcatagctgaaggtgttaaacaacatgatcgctactttcatcagaaaagaaatgctgtcggtgctcttgggttttcctgtcttcaaaaggtgactgcaacttttagacagcttgcttatggtgttccagcagattacgtagatgagtatttacggattggagaaagtactgctatcgagagcctacggaaatttgtcagggcagtgtgtgaggtttttggaccagagtatctgagacctccaaatgaatatgatacaactaggttgcttactattgctgaacaacgtggatttcctgaaatgcttggtagtgttgactacgacgtaccaggggaaccgtggaaggagacgagacgcagcttgcaggacgaccgatcggggattccgaggatggtgacaccgaagggagacgacggatggcgggcggctgcagctgcaggacgatggatcagggactccgaggatggcggcaccgaagggagacgagacggatggcagctgcagcctggaagacggcggatcaaggactccgaggatggttgtacgaaggggagaaagggctttgtgaaatgtcagtgggggttgagatacgagggaacaaacgacctgctggtctctgtatatggtgattacaccctggggtccagggatcttcatgcacaggaagatgatatctgcttggctgccgttatcaacgagtacttcgtgcagatcccaccctgccactctgcaatttttcaccagtgcatctccatggggcgcactatggagattgacatcctttgcatcgaagagctagacccttcagagatcatgtggattactcccctgaagggttga

SEQ ID NO: 22989 - DNA, 576 bp, Zea mays
  Peptide Sequence Number=SeqID_64768
atggcgaggctgccgctacgccgcgcagattacgccggtgctgctgcgggcatgaacgacgatggcaatgacaacacactggggtcacgcaggatgcgcacgaggttgcgccgggcatgcgcaagcgagtcgcgggcacgccaaccacatgcaggccgtgccgagggcacacacacgggccgcaccggacgcgagcgtgaggccacgacgggggcacacggaagggtcgcgccggacgcgaccgcgaggccgcgctgggggcacacgcacgggccgcgccggagcacagcctggctgcgagcagcgggtcgcgctgacgtgcgcgccaggtgcaccaagcgagccgcgccggctgcgcgccacgctggccgcatgagtcgcacgaagcaggccgcgccgggcacgcagggccgcgcgcaacggctgcacctgcaagctgcacggccgagtcatgcgcaacagctgcgcaggccgcgcacagacgggagctcgggctgcatgggcgagccgcgcgcaacagggagggccggcgagatgtcgtggctgcgcaagagagggaagaaacggggccaatga

SEQ ID NO: 22990 - DNA, 228 bp, Zea mays
  Peptide Sequence Number=SeqID_64769
atggtggaggggacgctccggacgggttggggctactccggcgagcaatcccggccacagggagggggaatcgggtgcgccggggccagttcgagctctggcaagggaggaggaacacctagagccaaaacgcgggtcagcggtggttgcaaggtggatattgctgacagggcaggcccacgacgcagaggcacgggcacatgcgcaggggaaacggttcggcgctga

SEQ ID NO: 22991 - DNA, 396 bp, Zea mays
  Peptide Sequence Number=SeqID_64770
atggctgccgacacgtctacgcaccacggacgcgagcaatatttcctctatcacggacgtgaagtttccagacacgaattgtttatccaatccagctttgatcgttctcccttccgctatcccctcacacgtcgccacctacctaagttccggatccattgctttccttccaacctcttccagcccgctgcgggggagcacgcgccagtcgagggcggccgaacacgcgacaaagatggaggcttcggcgcctatgctggctaccgtggatccgggggcaaggggcggaggattgggaggcggcgactcggcttcgcttgcatggcttcttgctgcctacttctactcgcgctcgcaccaaacagaggagcaaggccgcaactgatgcccccgtaa

SEQ ID NO: 22992 - DNA, 372 bp, Zea mays
  Peptide Sequence Number=SeqID_64771
atggcctcctccggtcagacccacgatgctgagccagctagatgcgcgctattatggacccccggtccctgcattcgaagccaccgcaggagcacagtaccgctcgcagttgttggccccccgctgtcgccaccaccaggaccattctgcatcctccacgtgcccccggcagccagctgccagagggcgccacccatggcgccggagcagcagcactttagggaccgatggagcagtagagaggcgacgacgcggcgaagcagcagaggcgatagcgcggtggcgagacagagaatgcgaggcgtgcgcaagcggagggtgactgactgggtgagaaagcgaacacaagtcgtatccaatgcaatgaaatga

SEQ ID NO: 22993 - DNA, 186 bp, Zea mays
  Peptide Sequence Number=SeqID_64772
atggaggctgagccaaagaaggttttgactccaatgccttcgtcagagacctcaaagaaggacgagcgaataactccggtaataagtgccttcttttttgaggatgttaaagaggagggtgacaaagctgagaccgttgtagaggctctggagaaggttaccgcaacaatgaaggttctactctag

SEQ ID NO: 22994 - DNA, 504 bp, Zea mays
  Peptide Sequence Number=SeqID_64773
atggcatcaaggatgggaatggtggctattatgtcactatttgtttacgctattgttgttccaacgtcagttaatgctaatgcgtggcagactgatgataaaccaggtgttaatagaaacatggagatgcaacaacaacaaggtggatttattggccatcgtccaagacttgcatcttttaatagggcatcaaatcaagagggtgatcgaaaaagaactgtgcctagcgggccaaaccacaaacataacaacatcccatcgcatacccctcatcatccaccatcatatgtccaagctctttatgaagatgatagaactataacatctcctgcttcgcagtctagattctatggcatcaaggatgtgaatgatggctattgtgtcactatttatttgcgtcttgctgcttcaacgtcagtcaatgccaatgtgtggcaaaccgatgagaatgcttttgctagtgctaagaaaccgagtgtcaatagggatggtaatggatcgtga

SEQ ID NO: 22995 - DNA, 729 bp, Zea mays
  Peptide Sequence Number=SeqID_64774
atgggttgccgactccgacacgccgtcccacccaacccgatcgcacggatacaggagtcggtgcaactgaaacggtgcggagactggcgggtagggcacgaaggagacggtgaagaatgcgctgtcgcggtgggggcggaaggtcggggaggcgaccaggaaggccgagggcctgtcgcgcaacacatggcagcactgtgggcgactctgctctgttcatcaactctctctaactatatacaccatcgccgatcagactggttgaggacggcgccgagcatcgcggaggccgcggtggggaggatcgcgcaggggaccaaggtgctggcggagggcggccacgacaggatattccgccaggccttcagcgccccgcccgacgagcagctgcgcaagtcctacgcttgctacctctccacggccgccggcccggtgatgggcgtcctgtacctgtccacggccagggtcgccttctgcagcgacagcccgctgtcctacgaggcttccggcggcgacagaacggagtggacccactacaaggtggcgattcctcttcaacggctgcgggcggcgagcccgtcggccaacaagaccaagcccgcggagaagttcatccagctggtgtcggtggacagtcacgagttctggttcatgggcttcgtcaactacgacggcgcggttgcgcacctgcaggaagcgctgagcgggttccgcaacctgcaggcgtga

SEQ ID NO: 22996 - DNA, 372 bp, Zea mays
  Peptide Sequence Number=SeqID_64775
atgggcaagagcaagaaaggtgggagttcctcacaccattccggcgacaagcggaagcgcgagctgactcctccctcggaggacttcggcgattccgagtactcggaggaggagttctcctccgagtcagaggaggtgtggacctacatccgggccatcgagcgcgccgggcttgagggctcggatgagtcggaggtctcctcggacgaggagaactcctcggactcgtccgaggagggcggcggtgacggcgatggcgagggcgacgacgacgacggaggcgacggcgacgacaagggcggcggaggtgacggtgacggcaaggacggcagcaaaggcagcagcaagggcagcaacaaggccagtggctag

SEQ ID NO: 22997 - DNA, 162 bp, Zea mays
  Peptide Sequence Number=SeqID_64776
atggctacgccggattggagagggacacggaatcccgcggcctacacggagaggatgattgcgttgggttgctcacataagcaactaagtgggccccgtgtcatgggtcctacctgtcggttgaggctgatatttgacacgggcacacgggacacggcttaa

SEQ ID NO: 22998 - DNA, 246 bp, Zea mays
  Peptide Sequence Number=SeqID_64777
atggacggacggacggagttgggtgaccacgctagtagctacgacagcaagcggaggtggggtgggggtggcctcggcgcgcgagaatggtccatggcgacggacgacggcaggcaggcagcccttaatgacccacgggtgcagctgcatgcgaacagcagtcaaccaaacacacagatagatagcatccagcagtactccgcttgccgggcatccgcggcggtcgctacgttcatcgacaagtag

SEQ ID NO: 22999 - DNA, 2016 bp, Zea mays
  Peptide Sequence Number=SeqID_64778
atggcgtccatctccggagcggcggcggcgccatcttccgctgcgtgccggctgcggctgcgtaggcacatcctgctgcggccctcgcacctccgcctccgcgcgccccactccatcgccgacctctcccgctcctccagctcctctagttccgccccgacccgggcccagccgctgggctccaggccggagaacggcggcggcgtccgcgcggtggagaaggacccgatcaagctgtgggagcgctacgtcgagtggctctaccagcacaaggagctcggcctcttcgtcgacgtcagccggatggggttcacggaggacttcctgcgccagatggagccgcggatgcagcgggccttcgccgccatgcgggagctcgagaagggcgccatcgccaacccggacgaggctcgcatggtgggccactactggctccgcgacccggccctcgcgcccaactccttcctccgcagcaagatcgagaccacgctcgacaggatcctcgccttctcccaagatgtcgtctctggcaaggtcgccgcaacattttccatttttctatttgcttacatacctgcaattgcttctgctgcagatttcgaattgcatggcatgcttggagtgcaccatttagggggcaagtactccaacaggcatggtaggtacattgtgcaaccgatagatgctatgtatcttattgagacttttggcactttcctttttgtgctgatgtattataacaagggatttcgtataagatttattgacaacaccgatcctgctgggattgatcatcaaattgctcaactaggacctgaactggcaactactcttgtaattgtcatttctaagagcggaggcacacctgaaacccgcaatggtctactagaagtacagaaagccttcagagatgcagggctgcaattctcgaaacagggtgttgcaattactcaagaaaattctctgttggataacactgctagaatagagggatggttagctcggtttcctatgtttgattgggttggtggtaggacttcagaaatgtcagctgtgggtttacttccagctgcattgcagggtattgatatcaaggaaatgctagctggtgcagctttaatggatgaggaaacccggaacactgtggttaaagaaaatccagcagcattgcttgcattatgttggtattgggcatcagaagggataggcaataaggatatggttgtacttccttacaaggatagtttgttgcttttgagtagatatttgcaacaacttgtcatggaatctcttgggaaagaatttgatctggatggcaaccgggtaaatcaagggctatctgtatatggaaacaaaggaagcactgaccagcacgcttacattcagcagctgagagaaggtgtacacaacttctttgtttactttttatcgaggtcttgcgtgacaggcctgctggtcatgattgggagcttgaaacctggagtcacatgtggtgactatttgtttgggatgttgcagataacagaagtatacgatattttacagggaacacgttctgctctttatgcaaatgaccgtgaatctatctctgttactgtgcaagaggtaactcctagagctgttggagcactggttgcactttatgaacgtgctgtggggctttatgcttctttggtgttgaggctgggaaaaaggcagcaggagaagtgttggcccttcagaaaaagggtgctgactgtattaaatgaggcaacctgcaaggacccttgtgagccattgactatagatgaaattgcagatcgctgccattgccctgaagataaacacaacgcttttcccccctctataacacatgcccaacgtttgcttcctcagattgagatgatctacaaaatagtccagcacatggctgctaacgacagagcaatcatagcagaaggcagctgtggctctcctcgcagcgttaaggtgtacctcggtgaatgcaatgtagacgaagacttgcaggccgcgtag

SEQ ID NO: 23000 - DNA, 279 bp, Zea mays
  Peptide Sequence Number=SeqID_64779
atgacgcatgagggaaataggtacacactcggcgcagattctgataacagcaatgaaaattgcaatttgcttgcaaaaaggtggaaatccagtttcattccgttcgccgctgctgatgtagctggacgagcctatacatctgtgcctggccggcctatgggaagggatggtggccgtagtggtatggcgcggggcattgaacgacgtgggaggcacgccgacgcattggtgctagtgttggcgagcaaggtaatcgacatctttgatgccctcgagtag

SEQ ID NO: 23001 - DNA, 630 bp, Zea mays
  Peptide Sequence Number=SeqID_64780
atggcgtccggccaatgtaaccccgtcacgtgcccaagtattggccctaggtgtcccaaacacctcaccagagcccggggccggcctcggtgcgctcgattacccctccccgcggccagtattaatcaccggagtaccctcgacccgcccaaaacacccccaccaccgttcaaccaccttgagtcccgctctcacggccaaaaccccaccaccgagtttgccgggtacccctcactagccttggccagctccggagaccacagaccccctggaacccgtgctcacctcatctccagcaacttcaccgccgcaggagagagcggcattgccaaagtcgttaaccccttgggcgctggatcacaaccgctcgtccccgatccaacggtctggatctctggatattggttcgcgttggcacctctacccttgggccccgctcgtcggttgcctacacccctagtgttgggcctgaccggtcagccccgccctcaccccgagccgctaaccaccctcgaccgcctgggactcgggctgtttcctgagtacctctccgtaaggacctgttcattggatgaccacctaggaaaacaatacaactatgagagtggtatgggactgaaagtcgcctag

SEQ ID NO: 23002 - DNA, 261 bp, Zea mays
  Peptide Sequence Number=SeqID_64781
atgtcgcgcgcgttcgacgacaactatatcaaggattgtggcatcatatcggcgccggaggtgacgcagaggatgaccgacagcaatgactactcgccattgtcgggaacggttgaatgtacatcctcagtgttgcaggctttggtattatttggtgacttcaattcagagtaccgcagtaaagaaataaaagaaaatgttgacaaagctgccatatttatcgagagtaatcaaaacaaggatggatcctggtttgtatga

SEQ ID NO: 23003 - DNA, 384 bp, Zea mays
  Peptide Sequence Number=SeqID_64782
atggctatgcctaggtcagccctacgccccgacccctctgcccgcgcgtggccccggcagggtgcggccctcggcgcagcgaccagggtgcggccggctcggcctgtggcacagttgcccgtgcccagcgtggccgtctgtagccctgctcacgcgacaatgcgttttctgaggccctgcgcgctccgatgcggccagctcggccccggcgtgcccgtgggctcgaacgcgcgcgccccatatcgctgtctcgcgtgccacgatgcagaccacgcgctcgtcgtcaccgtcgttcgcgagagcagtgtctcgccgcgagaattcgtcgtcgcgctattgtcgtcgctgcatagcagggtctatgtcgctctagtcgtcgccgag

SEQ ID NO: 23004 - DNA, 423 bp, Zea mays
  Peptide Sequence Number=SeqID_64783
atggtttatgtagagggtcatagcactcatgttgtacaaactgcttgggcgatgctagctttgatttatactggacagatggaacgggacccaacaccattacatcgagcagcaaaagtattgattaatatgcaactggagacaggagactatgctcaacaagaacatgttggtagcaccaactgctctgtatacttcaactaccccaactatcgtattttgttccctgtttgggctcttggagagtatcatcgcaaatggcttgtgaaatttaccatctttgcaagacgagcacttagaaccgtttgcaaaaatcaatatttgctagcggatgccttaagtcaaccgcctgcaaagataatttttttaccggagactgagttaagtcaaccacttgtaaagattgatcattgcaagcggtag

SEQ ID NO: 23005 - DNA, 219 bp, Zea mays
  Peptide Sequence Number=SeqID_64784
atgccgattctactggttttaaatgaagtggacgaccacgcgaacatggagtgcaaatactcaccaaagatggcgcgcacaggagggttggccactgaggagtgcgagtgcatggcggaacctatcctccgacgagcaatccacgccacaccgaccacaaaacttgcgtggcgagactacggatgtcctcagggtggtgaggcgaagctcccacactga

SEQ ID NO: 23006 - DNA, 438 bp, Zea mays
  Peptide Sequence Number=SeqID_64785
atggcggtgagttgtgtgtgcgcgacggctgacgccccggacccatttggtggtgaactgcgcgacagcaagcctgtgcggtggcacacccaggcaccaggcaacctgctccctcgcgcaggtccgaccctcgcccgctaccacgcccaactcaagtgcttctctctctcccagacccgcgaggcggcgctctcggcgcccaatcagcatccggcccagccccctccgcgcgggatctccgcccttgaccgcggttcccggcgtccatggttgtgcccaggtcagccctgcgccccgacccctctgcccgcgcggcgcgcagccagcgcgcggccccagcagggcgcggccctcggtgcagcgaccagggcacagccagctcggcccgtggcgcagctgcccgtgcccagcgcggcccaggaacgtagctcggcgtag

SEQ ID NO: 23007 - DNA, 297 bp, Zea mays
  Peptide Sequence Number=SeqID_64786
atgggtgaaatgtttaccgagatctcttgggtcatcctctacgcgagcgggccgcttctcccatccagccgcgcacggcgtcgccggaaccggagaagggagggaggaagggagcgcgagatggacaaggccaataagctcagcgccggagcgggggagaaggcgaccaagagcaggagccacgggtccacggcgctgttcgtcgcggtggactacgcgttcctgctcgccttcgccggcttcctcgcctacctcgtcgggtcgcggatcctcccctccgccgccggctccgcctag

SEQ ID NO: 23008 - DNA, 258 bp, Zea mays
  Peptide Sequence Number=SeqID_64787
atggagggaatggaaatggttgcatttttggctgctgaagtaggaccaagagttgcagcatcgtgtgcaagtgcaacattatcaattttgacatgggatgattccaggatgcatgcagaaggcatcgatgctatgggtcatgctactcaactgaactatgcagcagcaacaaagtccaagctttttgtagaccaggaggagcatgaatttcagaggttatctgccaccatcataaatcatcagggcctgttgcaataa

SEQ ID NO: 23009 - DNA, 108 bp, Zea mays
  Peptide Sequence Number=SeqID_64788
atgatcaaagggcgtgagagactccagcttgtggagattcctcaaaaacggaatcaaagtatagagaagaatatcgtgacactcaagtttgatctttggatcacttga

SEQ ID NO: 23010 - DNA, 969 bp, Zea mays
  Peptide Sequence Number=SeqID_64789
atggccatccactacctcctccgccgcggggtctccggtggctcactgctccaccctatccgcggtctcttcctcgcctccaaggagcttgggaggcgtccgttgggctctgcggcggcgggagacgcagcggccgagctgaggggcgcgcgggaggacgtcaggcagctgctcaaggccacctcctgccatcccatcctggttcgattaggttggcatgatgctggtacatatgacaagaacattaccgagtggcccaagtgtggtggagctaatggtagcttgagattcgaagtcgagttgaagcatggggccaatgctggtcttgtgaatgctctgaagctgatccaacctatcaaggacaagttttcaggtgttacctatgcagatctgtttcagcttgccagcgccacagccattgaggaagcaggtggccccaaaattcctatgatctatggaagagttgatgttattgcccccgaacaatgcccaccagaggggaggcttcctgctgctggcccaccttcacccgcggaacatttgcgtgaagtattctacagaatgggcctgaacgacaaggaaatcgttgcactgtcaggagctcatacacttggacgtgcaagaccagagcgtagtggctggggtaaatcagaaacaaagtacactaaagatgggcctggtgcacctgggggacaatcttggacatctcattggctcaagtttgacaacagctatttcaaggctatcgaagaaagacgagatgatcacctcctagttctgcctactgatgctgtgctgtttgaggattcctcattcaagtctcatgatgacttttcatacttggagatctatgctacaaaatatgccaaggatcaggacacatttttcgaggactacgctgaagctcatgccaaattgagcaatcttggggcaaagtttgacccgccaaagggtatctcactcgagtag

SEQ ID NO: 23011 - DNA, 201 bp, Zea mays
  Peptide Sequence Number=SeqID_64790
atggccacccacacggcagcgacgacaagtgtcccaacagcgacggctcctgaggtacgctcgatcgaggacgggcggcgtgataagggtgcacagcaggcggcgtgcccgtcgtctgctcctccgcgcccgccccattcgctggacacgccggtcggccatgttcgcctcctcgcccggcaacaatcatggcgccgctga

SEQ ID NO: 23012 - DNA, 2421 bp, Zea mays
  Peptide Sequence Number=SeqID_64791
atggcgcacctgctgctgcacggcactctggatgcgaccatcctggaggccgaccacctcaccaaccccacccgggccaccggcggcgcccccgggatcttccgcaagttcgtggaggggttcgaggactcactcgggctcggccagggctccacgcggctgtacgcgacggtggacctcggccgtgcgcgcgtgggccggacgcgggtcatcaccggcgaccccgtgaacccgcgctggtacgaggtgttccacatctactgcgcccacttcgcctccgacgtcgtgttctccgtcaaggccgcgcagcccatcggcgccacgctcatcggccgcgcctacctccccgtccgggacctcatcgctggccaggagatcgagcggtcgctcgacatcctcgacgccagcaagaagcggctcccgcacgggcccaagatacgcgtgcgcctgcggttccaggacgtgtccgccgacccccgcgggtggggccggggcgtcggcggcgcgcggtaccctggcgtgccgtacaccttcttctcgcagcggcccgggtgcagggtcacgctataccaggacgcgcacacgcccgacgcgttcgcgcccaggatcccgctcgccggaggccgcctctaccagccgggcaggtgctgggaggacgtgttcgacgccatcagcaacgcgcgccacctcatctacatcaccggatgggacggcagccggccgcgccccggcggcgaagccactctcggcgagctcctgaagcgcaaggcgagcgaaggagtgcgggtgctcatgctggtgtgggacgaccgcacctccgtcgagtccctcgggatgaaatgggggttcatgagcacgcacgacgccgagacggcggagtacttccgcggcagcggcgtgcactgcgtgctctgcccccgcaaccccgacgccggcagcagcgccgtcatgggcgcgcagatcgcctacatgatcacgcaccaccagaagatcgtcgtggtcgaccacgaaatgccggcgaagcgcagcgaccgccgccgcatcctcagcttcgtcggcggccttgacctctgcgacggccgctacgacacgcagttccactccctgttccggactctggatacagcgcaccacaaggatttccaccagcccaacctcgccggtgcgtccattgacaacggcgggccgagggagccatggcacgacatccactccaagatcgaaggcccagccgcatgggacgtgctctacaacttcgaacagcggtggaggaagcaagggggcggcattgatctcctcgtcaacctcaaagctatggcggacctgatcataccgccgtcgccagtgatgttcccggaagaccaagattcatggaacgtgcagctattccgctccatcgatggcggcgcgtgttttggcttccctagcaccccagaggccgcagctcaatctggccttgtcagtggcaagaataatgtcctagacaggagcatccatgatgcctacatccacgccatacgccgtgccaaacacttcatctacatcgagaaccagtacttcctcggcagctcatttgcgtggaaagccgacggcataaagccagaggagattgaagcactgcatcttgtcccaagagagctctcgctgaagattgtgagcaagattgaagctggcgagcattttgcagtctatgtcgtcctgccaatgtggccagaaggccctcctgctagtgggtcgattcagggtatactggactggcagaggaggaccatggagatgatgtacaatgacatctctgttgcgctcgaggcaaagaggatcgacagggacccgagggattaccttacattcttttgcttggggaacagggaggtgaagatggatggtgagtatgaaccttcaggtcgtccgcttgatgggacagactacgctcgggcgcagaatgcacgccgcttcatgatctacgttcactctaagatgatgatagtcgacgacgaatacatcatcgttggatctgccaatatcaaccagcgctcaatggatgggggcagggactcggagatcgccatgggcgcgtaccagccgtgccacctgaacaccaaaggccaggtcgcccggggtcaggtccacggcttccggatgtcgctgtggtacgagcacctcggcatgctacacgacgatttcctcaacccgggaagcctggagtgtgttcgaagggtaaaccagatggcagacaggtattgggacctctacgctggcgacagcctcgacgccgacctccctgggcacctgctcaggtacccagtcaccgtcacgaaggagggcacggtgacagagctcccgggggccaagttcttccccgacacacaggcgcttgtgcttggggcgctatcgaagctgcctcctattctcactacatag

SEQ ID NO: 23013 - DNA, 378 bp, Zea mays
  Peptide Sequence Number=SeqID_64792
atggccatagccgagcatgtggagagccgggcaggggagggtccaagccgcgccagcatgttgccgttcccagcaaggggtttcgccgagaatagagaaagagaaaaaatgggtagacgagagcaaccactcaccgagcgatggctacgagagctgctccagcgtgatgcgatgacagcagggtctggcgtggtgtcagtatcgggcagtcggggtgggctttgcttgtgcagtggccccaaggcagatgtattcctgctcgatgacgacgcgctgactgcaagcgtggggaagatagaggaagtgtccgccagcctagcactcgacaacgaggccaccggcgggcccctttgtcagtttctttgccgagtgctctag

SEQ ID NO: 23014 - DNA, 813 bp, Zea mays
  Peptide Sequence Number=SeqID_64793
atggcgcctcctgttgacgtggtcggtccgtgccctaggttaggcgaggtggaggctcctccaaggtcgaggtcgagtctgtcttccaaggtcgaggttgagtccgagcccccgggtcggacgaggcggagaccgtcggcggatgccaggcccgagtccgagccctggggtcgggcgaagcggagttcgtcgtccttcggggccgagcccgagtccgagccctggggtcgggcgaggcggagttcgtcgtccttcgggaccgagcccgagtccgagccatggggtcgggcgaggcggagttcgtcgtcttccggggctgagcccaagtccgagccctggggtcgagcggagcggagttcgtcgtcttccggggccgagcccaagtccgagccctggggtcaggcggagcggagttcgtcgtcttccggggccgagcccaagtccgagccctggggtcgggcggagcggagttcgtcgtcttccggggccgagcccaagtccgagccctggggtcgggcggagcggagttcgccgtcttccggggctgagcccgagtccgagccctggggtcgggcggagcggagttcgtcgtcttccggggccgagcccgagtccgagccctggggtcgggcggagcggagtttcccatggcacctagggccggacttgactgctgtcagcctcactctgtcgagcggctcagcagtcggtgcgacgcaggtggcgctgtcctcttgtgagaccggtcagtggagcggcgaagtgactgcggtcacttcagctctatcgactggagggcgtgcgtcaggataa

SEQ ID NO: 23015 - DNA, 711 bp, Zea mays
  Peptide Sequence Number=SeqID_64794
atggtgcctcctgttgacgtggtcggtccgtgccctaggttgggcgaggtggaggctcctctgaggtcgaggtcgagtctttcttccaaggtcgaggttgagtccgagccccctggtcggacgaggcggagaccgtcggcggatgctaggcccgagtccgagccctggggccgggcgaagcggagtttgtcgtccttcggggccgagcccgagtccgagccctggggtcgggcgaggcggagttcgtcgtccttcggggccgagcccgagtccgagccctggggtcaagcgaggcggagttcgtcgtcttccggggctgagcccaagtccgagccctggggggtcgggcggagcggagcggagcggagttcgtcgtcttccggggccgagcccaagtccgagccctggggtcaggcggagcggagttcaccgtcttccggggctgagcccgagtccgagccctggggtcgggtggagcagagttcgtcgtcttccggggccgagcccgagtccgagccctggggtcgggcggagcgttgtttcccatggcacctagggccggacttgactgctgtcagcctcactctgtcgagcggctcagcagtcggtgcggcgcaggcggcgctgtcctcttgtcagaccggtcagtggagcggcgaagtgactgcggtcacttcggctctgtcgactggagggcgtgcgtcaggataa

SEQ ID NO: 23016 - DNA, 2238 bp, Zea mays
  Peptide Sequence Number=SeqID_64795
atgagatttgtagaggacaatggtgtctttctctacaaaattgcgggtctttctatggatgcctcagtatctttatgtgaaaggatatttaaggagtcctgtaaggatggcggcaccgtcgtttcatccggcctgtgcagttctatagcgaaaatggctggtggcatgccgttggcagtaatttgtttgtcgtcggcagttgcagcgcaggcgcagctagcaacagaagaagacgtcgggcgagtgcatgacccgccggattggtttcgtatggcagaagctcgggcactagcaggactgacaaatattccatgcttgaagccattggcagatagcttgtgcctcgcctacaatcaactttcagtccatctcaagacttgcttgctgcactgcagcagcctgtgtcctccctatcacatatttgggacggatgatctcgtcaggctgtggatagctgaaaggtttgtatacgatgagggagatgctcgaagctatgtggatcagcttgtcagcacgggaatgatttcagtacaatcttgctcctcggatctgttgattggcccgaagaaagttcagatgaacaccatgatgctgcacttccttaggtgcattgcatcacatgaaggttattgcattgcttcttcggattgtggatctggcatgtcatctctgctcgttggaccaatccggcggctatctatccagagctgcaagaacaaggtggagatttcaaggttacatgcttcggatattcgctccctttatgtttttgaccgcacgtggacaaccctgttcaagaacttgacaaaccttcgagtgttgcagcttctgggcaacaatcttaggaatgaagatctgacggctatatgtgggctgccccaccttacttacctgaatctgagcgggacactggtgaatctgctcccagaggaactagggagactgaagcttctcaagactctgattgtaagaggcactggaatcctgcgtctaccagtgggaattggggagctgatgcaattggagactcttgatctaggtgacaccatggtcgtggagctaccgagccaaatagtgaagctgcataacttgaggacactggacctaagaaactcaagcttgtgtgagctccccaacgaaatcggcgacctactgctcttggagactcttgatgtaggtgacaccatggtcgcggagctaccgagccaaatagggaagctgcagcgtttgagggctctgggcataagcggcacaggtatcgagaagcttccagcggagattggagagctggagcatttggaaattcttgatgtaagttgcacaacggtcgccgagctaccactaccgacagccggaggatcgatggcgatgctgcagcaactgaacatttgcaacacagagatccgagagctaccttgggaatcagggcggcgctcggtccgtgtgctgtgtggtgacagcgacgctcctcatgtgtgcaacctggctgacctttctgagggccttttgcaaccatctgtcgtcgtcgttctgtttgatcgtttcggttcgatctgggtacctgtgcctttcccgagaattaaggttcctgggaagcataggagtgtccctcagtttgtcgcgtcgatttgttacctggaaatcagtctgtggaagctggaggaggattccctcaagtctctgcgggagatgcccaaccttcgaggtctagcactacgggttgatgttctccccacaaagcctgctatatccatcctagggttccgaaagctggagagcctctgtatcgattgccgtgtgccaaggataaccttcgagaaagaagcaatgccagagctcacatatctcgagttcaagttctatgcctgccggccgacaactgaacacaacatgggcatcgctaacctccagagactccaaagagttgttttccggagcgcctcttggtacacaagcgacccttcggcgggcattcatgcagttattaacagagtgagagaagaagcaagggagcaccccaacacaatcatcctaagcgtcaatggcaacgtcgaatcttaccatgagaagaaagctgcggcagcagcagcacaagggatcaagccaagcctttccggtgatgtttctcggcgcagcgattcccgagctcgacagtcggctgctcctgctgggtttgatctgaatgtccctactgctgataacgacaataatgttgttgccgatgactgggatgcatga

SEQ ID NO: 23017 - DNA, 2532 bp, Zea mays
  Peptide Sequence Number=SeqID_64796
atggattcgacagggagacggggaggcggtggcttagcgagaatagagacaaggaaaccctttccgaccctcggaggccgggggcaaaatctccgtgctgcctcatggatcgggttgaggtacctcgtcgtagtagatgatgtgtggcactgggagcaatgggaaatcataaggaaatcccttccgaagaataatctgggaagtaggataataacttgcactcgtgttgaagcagtagccatgaaatttatgatggagagtgatgcgtgtctctacgaaatggctggcctttctatggatgccgccgcagctttgtcgaggaggatatttgaggatggcagcgtgcgtgcaacatcggaactgcataactcttggtctgcttctatagcaaaaatgtccggtggcatgccgttggcagtaatttgtatgtcgttggcagtcgcgcgcgcgcagctgacaccagaggaggcagttgaaagattgacaaatattccttgcttgaggccattggtagagagcttgagcctcgggtaccatggccttccgctgcatctgaagacttgcctgctgcattgcagcatgtatcctccccagcacatcttggacagagatggccttgccaggatgtggatcgctgaagggtttgtctatgaggaggaggaagctcgaagctacgttgaccagcttttcaaaatggggttgattcggcggtgctcttctgctcttgtgccgtctccaaagtttcagatcgacgccatgatgctttatttccttaggtgtagatcacaagaaacattttactatttgggttgcggtcgtcgtcggaatggcgccggacgacgggtgcatcatcggctatctatcatctctgcccagaagaacgggccggcggggggtacttcaacactgccacacgtcgacgtcgtctcgaataataatactcgctccctgtatgttttcgaccgctcatggagggtccctttcaacgagtttgaacggctgcgggtgctgcaccttcactgcagctccaggaacgctgatctggtggatatatgcgggctggtgtggctgagatgcctcagtctcagtgggtcaccgatcaccatgctcccaaagcaaattgggaggctgcagcttctaaggactctggatgtaagcagcacaggaatcctgtgtgtaccaggtgagattggggcgctgcagcaattggagattcttgacgtgagcgacacgatggtccagaagcttccggcggaaatagggcagctgaggcgcttgaaggctctgtacgcaaggaactccagcctcagagagctgcacactagccagatcagagagctgcagctactggagacgcttgatgtaagcaacacggtgcttgctgagggtggtggtctcatgatgttaattggagatgatgagaacttgaaggtcgtggacgccgcaggtggtggtggaatgctgatgatggccgaggggggagggtcaactgcgaccgtagccactggtgccctgggccccgtcctagcaaagctgcgcaagaacgcggcggacgacgacggcgggcgatatcttggcgacatagagttcatcatatcagagctcgagtccctgcactccttcctcacaaggatgtgggagagtagtgagggcggcggcattgacgagaatgcggcatgccagagctggatggcggaggcacgagagctgtcctaccacattgaggacgacatcgatcgctttatgctcgatttggagcatggcggcgacaggacgacgacgacggcaccttttaggagaatcaagctacgtatcaaggggctggtggaccggtaccaagaggaatggaggatggctgctgattgccgtatcaaggcgccccaacttggtcctccgtcccggtactactctcgcaaggatgcctccgagttgttggagatcgacgacaaggaaactgaggtcaaggaattgcttcaagagcatgagctgttatgcatcttcggatttgcaggaatgggtaagacgactctagccaaccaagtgtaccaagcaataggaaagcaattcgaatgccaggccttcatgtccatctccccacgcatggacgcgtcgcagatcctgacaactttttatgcccaagtaacggctcaacaaagagaaataatagccgcgagtgattcattgtcggaccaacaatttatgatcgacagcatctcaaaattcctcttcaacaaaaggttggtcccttggatcccatgggaacaacctcatctaggctacaaaggccaagacatggcagatgtaacaccccgtccactcccggactcgtggtatttactcctggcatccatcaaggaccatatatcatccccacaaaccaacatgagtttttttgtgcacactttgtactcactcatgcgcacccgagaagacttcccggtcgattacccatccaagattgctctaggtcaagcacgcctaacccccgagctactttcgagacaggcttccgaaaaagatgcaccttgttga

SEQ ID NO: 23018 - DNA, 2310 bp, Zea mays
  Peptide Sequence Number=SeqID_64797
atgcccggcataccgagggatgtcgccgagcactcgctggatatccgagctggagcccgacccgtgaagcagcctctgcgccgattcgacgaagaaaagcgcagagccataggcgaggaaatccacaagctaatggcggcagggttcatcaaagaggtattctatcccgaatggcttgccaaccctgtgcttgtgagaaagaaaggagggaaatggcggatgtgtgtagactacactggtctaaacaaagcatgtccgaaggttccctaccctctgcctcgcatcgaccaaatcgtggattccactgctaggtgcgaaaccctgtctttcctcgatgcctactcagggtatcaccaaatcaggatgaaagagtccgaccagctcgcgacttctttcatcacacccttcggcatgtactgttatgtcaccatgccgttcggcttgaggaatgtgggtgcaacgtaccaacggtgcatgaaccatgtgtttggtgaacacattggccgaacggtcgaggcctacgttgatgacatcgtagtcaagacgaggaaagcctctgacctcctttccgaccttgaagtgacatttcgatgtctcaaggcgaaaggcgtgaagctcaatctcgagaagtgtgtcttcggggttccccgaggcatgctcttggggttcatcgtctccgagcggggcatcgaggccaacccggagaagatcgcggccatcaccagcatggggcccatcaaggacttgaaaggcgtacagagagtcacgggatgccttgcggctctgagccgcttcatctcgcgcctcggcgaaagaggcctgactctgtaccgcctcttaaggaaagccgagtgcttcacttggacccctgaggccgaggaagccctcgggaacctgaaggcgcacctcacgaacgcgcccatcttggtgccccccgctgccggagaagccctcttgatctacatcgccgcgaccactcaggtggttagcgccacgattatggttgagagacgagaagagaggcatgcattgcccgtccagaggccagtctacttcatcagcgaggtactgtccgagaccaagacccgctacccacaagttcagaagctgctatacgcggtgatcctgacgcggcggaagttgcgacactacttcgagtctaatccggtaactgtggtgtcatccttccccctgggggagatcatccagtgccgagaggcctcgggtagaattgcaaagtgggcggtggaaatcatgggcgaaacgatctcgttcgcccctcggaaggccttcaagtcccaggtcttggcggacttcgtggctgaatgggtcgacacccagctcccaacagttccgatccaaccggaactctggaccatgttcttcgatgggtcgctgatgaagacaggagcaggtgcaggcctactcttcatctcgcccctcggaaaacacctactctacgtgctacgcctccatttcccgacgtccaacaatgtggctgagtacgaggctctggtcaacgggttgcgcatcgccatcgagctaggggtccgacgcctcgacgctcgcggtgactcgcaattcgtcatcgaccaagtcatgaagaactcccactaccgcgacccgaagatggaagcctactgcgatgaggttcggcgcctggaagacaagttctatgggctcgagctcaaccacatcgcccgacgctacaatgagactgcggacgagctggctaaaatagcctcggggcgaacaacggttcccccgaacgtcttctcccgagacctgcatcaaccctccgtcaagaccgacgacacacccgagcccgagaaggcctcggccgagcctgaggcaccctcggcccagtccgaggtaccctcggctcggcccgaggcaccctcagcccagcccgaggcaccctcggttcggcccgaggtaccctcggcccccgagggtgaggcactgcgcatcgaggaggagcgaagcggggtcacgcctaatcaaaactggcagaccccgtacctgcaatatctccaccgaggagagctacccctcgaccgagccgaagctcggcggttggcgcggcgcgccaagtcgtttgtcttgctgggggacgggaaggaactctaccaccgcagcccctcaggcatcctccagcgatgcatccccatcaccgaaggtcaggagctcctacaagagatacactcgggggcttgcggccatcacgcaacacctcgagcctttgttggaaacgccttccgacaaggtttctactggccgacggtggtggctagagatgtcaatgggtaa

SEQ ID NO: 23019 - DNA, 1731 bp, Zea mays
  Peptide Sequence Number=SeqID_64798
atgggatgtctcacggctctaagccgcttcatctcacgcctcggcgaaagaggtctgcctttgtaccgcctcttaaggaaggccgagtgcttcacttggacccctaaggccgaggaagctctcgggaacctgaaggcgctcctcacaaaggcgcctatcttggtgcccccagctgccggagaagccctcttggtatacgtcgctgcgaccactcaggtggttagcgccacgattgtggtcgagaggcaggaagaggggcatgcattgcccgttcagaggccagtttacttcgtcagcgaggtactgtccgaaaccaagatccgctacccacaagttcagaagctgctgtatgcagtgatcctgacgcggcggaagttgcgacactacttcgagtctcatccggtaactgtggtgtcatccttccccctgggggagatcatccagtgccgagaggcctcgggcaggattgcaaagtgggcggtggaaatcatgggcgagacaatctcgttcgcccctcggaaggccatcaagtcccaggtcttggcggacttcgtagccgaatgggtcgacacccagccaccgacggctccgatccaaccggagctctggaccatgtttttcgacgggtcgctgatgaagacgggagccggcgcgggcctactcttcatctcgcccctcgggaaacacctacgctatgtgctacgcctccatttcccggcgtccaacaatgtggctgagtacgaggctctggtcaacgggttgcggatcgccatcgagctaggggtcaggcccctcgacgcccgcggtgactcgcagctcgtcatcgaccaagtcatgaagaactcccactgccgcgacccgaagatggaggcctactgcgatgaggttcggcgcctggaagacaagttctacgggctcgagcttaaccacatcgctcggcgctacaacgagactgcggacgagctggcaaaaatagcctcggggcgaacaacggttcccccggacgtcttctcccgggatctgcatcaaccctccgtcaagatcgacgacacgcccgagcctgaggcgccctcggttcagcccgaggtaccctcggcacagcccgaggcaccctcatcttggcccgaggcgccctcggttcagcccgaggtaccctcggcctctgagggtgaggcactacgcatcgaggaggagcggagcggggccacacctgatcgaaattggcagaccccgtacctgcaatatctccgccaaggagagctacccctcgaccgagctgaggctcggcgggtagcgcgacgcgccaagtcgttcgtcttgctgggcgatgagaaggagctctaccaccgcagcccctcaggcatcctccagcgatgcatctccgtcgccgaagggtgtcaattctatgcgaagcagacccacttgcccgctcaggctctgcagacgatacccatcacctggccctttgctgtgtggggtctggacctcgtcggccccttgcagaaggcgcccgggggctacacgcacctgctggtcgccatcgacaaattctccaagtggatcgaggtccgacctctcaacagcatcaggtccgagcaggcggtggcgttcttcaccaacatcatccatcgcttcggggtcccgaactccatcatcaccgacaacggcacccagttcaccggcagaaaattcttggacttctgcgaggatcacaacatccgggtggactag

SEQ ID NO: 23020 - DNA, 375 bp, Zea mays
  Peptide Sequence Number=SeqID_64799
atgaacgatctagagattcgtcccgacggctccgcggtggtgaggaagacggtgagaaattggaacgattatggggctccctcctaccagcagatgccttgggagcatgcgatgcatcagtcagaatcctctgtgccatatagagtggcccgagcagcggtgagcaggtggttcatcaatggcggccctcgcagttggtggtggtcaaaggaatgtggggaaaggggaggtcgcggccatggatttatagccggggatggggacatccatggccgacccaaccccgagatcagcgcgggattgggggggtctgttgcggcgaactcggcggaagatagctccagtcgcagcaccattcggttgagatggcgatga

SEQ ID NO: 23021 - DNA, 186 bp, Zea mays
  Peptide Sequence Number=SeqID_64800
atgggcatcattgtgagggtaatccttgagctgaaaggtccctcttgggagaagatgttaaaacataatattcaggatctaccgaaggtgttctctttcttttggatcttcggctacgaagcatacccccaacaaccacttttagttgtttatctccaaaaaacctatactcgagtatatctttaa

SEQ ID NO: 23022 - DNA, 2232 bp, Zea mays
  Peptide Sequence Number=SeqID_64801
atgcccggcataccgagggatgtcgccgagcactcgctggacatcagagccggagcccgacccatcaagcagcatctgcgccgattcgacaaagaaaagcgcagggccataggcgaggagatccacaagctaatggcggcagggttcatcaaagaggtattccatcccgaatggcttgccaaccctgtgcttgtgagaaagaaaggagggaaatggcggatgtgtgtagactacactggtctaaacaaagcatgtccgaaggttccctaccctctgcctcgcatcgatcaaatcgtggattccactgctgggtgcgaaaccgtgtctttcctcgatgcctactcagggtatcaccaaatcaggatgaaagagtccgaccagctcgcgacttctttcatcacacccttcggcatgtactgctatgtcaccatgccgttcggcttgaggaatgcgggtgcgacgtaccagcggtgcatgaaccatgtgttcggcgaacacattggccggacggtcgaggcctacatcgatgacatcgtagtcaagacgaggaaagcctccgacctcctttccgaccttgaagtgacatttcgatgtctcaagacaaaaggcgtgaagctcaatcccgaaaagtgtgtcttcggggtaccccgaggcatgctcttggggttcatcgtctccgagcggggcatcgaagccaacccggagaagatcgcaaccatcacaagcatggggcccatcaaggacttaaaaggcgtacagagagtcatgggatgtctcgcggctctgagccgcttcatctcacgcctcggcgaaagaggtctgcctctataccgcctcctaaggaaggccgagtgcttcacttggacccctgaggccgaggaagccctcgggaacctgaaggcgctcctcacgaatgcgcctatcttggtgcccccagctgccggagaagccctcttgatctacatcgccgcgaccactcaggtggttagcgtcgcgattgtggtcgagaggcaagaagaggggcatgcattgcccgttcagaggccagtctacttcatcagcgaggtactgtccgaaaccaagatccgctacccacaagttcagaagctgctgtacgcggtgatcctgacgcggcggaagctgcaacactacttcgagtctcatccggtaactgtggtgttatccttccccctgggggagatcatccagtgccgagaggcctcgggtagaattgcaaagtgggcggtggaaattatgggcgaaacaatctcgttcgcccctcggaaggccatcaagtcccaggtcttggcggacttcgtggctgaatgggtcgacacccagctcccaacagctccgattcaaccggagctctggaccatgttcttcgatgggtcgcggatgaagacaggagccggcgcaggcctactcttcatctcgcccctcgggaagcacctacgctacgtgctacgcctccatttcccagcgtccaacaatgtggctgagtacgaggctctagtcaacgggttgcggatcgccatcgagttaggggtccgacgcctcgacgctcgcggtgactcgcagctcgtcatcgaccaagtcatgaagaactcccactgtcgtgacccgaagatggaggcctactgcgatgaggttcggcgcttggaagacaagttctacggtctcgagctcaaccacatcgcccggcgctacaacgagactgcggacgagctggctaaaatagcctcggggcgaacaacggttcccccggacgtcttctcccgagacctgcatcaaccctccatcaagatcgacgaccctcggcccagcccgaggtactctcggctcagtccgaggcatcttcggcacggcccgaggcaccctcagcccggcccgagccaccctcggttcagcctgaggcaccctcggcgcccgagggtgaggcactgcgcgtcgaggaggagcgaagcggggtcacgcctaatcaaaactggcagaccctgtacctgcaatatctccaccgaggagagctacctctcgaccgagccgaagcttggcggttggcgcggcgcgccaagtcgttcgtcttgctgggagatgggaaggagctctaccaccgcagcccctcaggcatcctccagcgatgcatctccatcgccgaaggtcaggaactcctacgagagatacactcgggggcttgcggccatcacgcagcgcctcgagcccttgtcgtaa

SEQ ID NO: 23023 - DNA, 1017 bp, Zea mays
  Peptide Sequence Number=SeqID_64802
atgaagggcatcataccggtgataacgtcgtggagcagtccgtccgcggtgcaggcagggttcacggcggagcgccaactccaacccgacgaatggcgtgatcacagccctaccctagtggttcttctacctctcggcgatggtggcggtgttcgccgcggccggtggaggtccgaggatgcgggcgattctgttgaaggagctgctacgcagactggcaaggagggcccacctgtaagtgcttggttcgacgcgcacacgaagatccgtgttggctggtgcggcggccgagttgccgcgcggcccagcgccacgcgcttcaccccccctcgcggcccacctggccagtgccccgcgcgacctagccgctctctccccgcgcgcgacccagcctcctcccaggcacggcacaaaagccaggcgtccttggcccatcccctgcgcacggcacgacacataagccaggcgcgggtgcatggtcgacgcagccgccatgcgttccggctgccgtttcttcaaccaccgcccgtgaatctcgcgcccacgacgagagaattgcccacgatctcgctgtgctgtgctaatctgcccggaaacaatcccattcgagtcgcaagcgttttaccctcttccccaaaccgcatggtgccgagcttcgagaccgttccctaccagagctcgccggacgtgctacgtttgcatcccgtccccgtcgagcctggcgtgctgctcggcccgtgtctgctcgcagcacgcgcggcgcggttgctcgcggaggccccggcgaccctatgtggcctgcttgtggcgtccccggcgcggctgctcgcgtcagccccatgtggcctgctcatggcacggctccctggctcggcacgaccccctgctgcctgcgcgcgcgtccaaagttccggcacggtgcggccgaccccggcgcggtcctggctcgcggccagtgcccccggcgcggcgtggctcgcggccagcgcccccaacgcggtcctggctcacggctag

SEQ ID NO: 23024 - DNA, 669 bp, Zea mays
  Peptide Sequence Number=SeqID_64803
atgcaggatgcccccaaacaatcatgccatctagtggtaaatgaattattgactccaagagcgacctttgtgagcgaggaagatggcagcgggtacaggccacgtcggcagtttcctttaagtggtgtgggatattatcgtggattcaccccgaatgatgagctacagggactcgagggtgaatttgaggcgagcctcgtagcccctatggattcgtctgtcgaggcatgcgctgtcgtacccctggtgggccgcccgattcgtgggtcgtcttccggaggacttgggaccttctttgggtaccgtgttcccaggacgttcgcagccgacgcttacgctgagccgctgaggattcctgaggtcgcagccgcctctcgcctaccatcgccgggcgagattgccgaggaacaacctaatattaatctagaagatcagggtcttccatcagatgaaaattttgacatcaacatggatgataacaatgtgagtggtcatgagcctatatttaattcatatcctactgaaaatgctaatgttgatgaacaatcggattttattgaggacatctatgatccaaggaatcagaataatcttgataacaagtcaagggacatattagtacagaagggggctataagagaagaaaaatattgtatttcctttggatga

SEQ ID NO: 23025 - DNA, 1155 bp, Zea mays
  Peptide Sequence Number=SeqID_64804
atggcggacgccgtgggggcgctacctcctcctcctctgccgccgccgccggagtgcgagtccgggaggtcctcgccgtcccacgccgcgtcgccggagttcgagttctggatggtgggcaggaacccgtccccggcgctgctcaccgccgacgagctcttctccggcggcgtcgtgctcccgctccacaccctccaggcgccaggcgctccggacggcgacggcgcgcctcagcctcaagccgacgcggacgcggacgcggacgccgcggcgctcccgctgcctgacgcgcaggcgcaggtggaaggggaggccgcgcagccgctcgcggagtccgccatcgcgccgacgccggacctccccgcggtcacgttcaagtggaaggacatcttcaaggcgggcgccggcgccggcgccgagggcaaggagcgcaagaaggtggaacggcgcgtgagcagcgtcagcgggaacgccgagctgattaacatcaacatatggcctttctccaggagccgctccgccggagcaggtgccggcaccttgagtagggccaagcccaatccgaatccaaacccaaaccccaaccccaacgccgccgtcgccgccagcggcggcgccagcgttaacgccaacaccaccgccaatgccaccgccccgagcgcgccgccggccccggcgccggtcccgcgcaaggtgagcagcgcgccgtgctcccgtagcaactcccgcggggagtcctccgggcctgtgccgaccatccccaccgccactgcaactgcagcgccagaagcagcagccggagaagaagacgccgacgcggccacccaggttcaggcggcgccactgaccgccgccggcacatccagcgccacgtccatgttgaggagcgccgtgtggaagctgaggcgcaacaagctgcagcaaaccgccgccgagcagaagcaggtgggcggcaagaagaaggcggccccggcccaggaacccgccgcggccgcggacgcggacgcagatgcagccagcgacgacaaggcgtcgccgagcgtggccgcgccagctgccgggtgccggaacaacgtggagggcgccggcgaggaagggaacccgccgcaggtgctcttcgggctccggaccttcttctccaagaaggtgtactga

SEQ ID NO: 23026 - DNA, 720 bp, Zea mays
  Peptide Sequence Number=SeqID_64805
atgatgcgcttgcaccggaaaggagggggaggaagcggccgccggtcggatcacgtgctgcagctgccgcagccgctcgctgtggaagctgggtgctacagccgcccgcgctgcgccccatcgaccctgactgacgacgccgagatcgtgtctgtcggaccacaaaacgcaaagaagggtcctgcacctctcacatgcatgcaggccgggcgcgttctgagttctgaccaagtcgtgaacagccgcatcgcaatcggatcgccgtctgaaaagattctcggctgtgagagacaccaccatgcaggacaggaggaggcaccgccctcaccatcgctttggcgcagcgagagcgaggcaggcaaggcaaaggcaaaggcaaagggcaaagcacgtcagcccgagcaggttcggtacgcggcgccgggggagggggatcgtgctcgtgtcagctctctgaccaagctctctgcatcggcgccatggaattccgtgccggccttgtccacccctttccctttgcttccggcttccggcttccggccgtcccacatcggccctctctttcgagagggaactcctttggataattctttgagcatttgttatttttcatacatggagaattcggatttaatgctccgcatggaccgtggatcatatgttctgccaccaaacagtaccccaaagggtcaatgcttggatctggaatctcagcactga

SEQ ID NO: 23027 - DNA, 204 bp, Zea mays
  Peptide Sequence Number=SeqID_64806
atggccgtgcctaggaagggcggcgctggtcactggggctggggaagggggtcacggtggggaggagagtcgagggttgagggggtgccggtcacatcgaggtggatactaaagtattcaaataaagtcgtattggaaatggttgccgtcaagggaatggaaccagatcggtccacgcctccatgccatcctgccaccacgtga

SEQ ID NO: 23028 - DNA, 222 bp, Zea mays
  Peptide Sequence Number=SeqID_64807
atggcgaagatagttgttggagttcttggtgtcgaaggtggtcatttgagttcaccggaggtggacgccaatgttggtgctgacgcgagagcaattacaatccagcgtgaacagtacgagggtacttttcatctatttataggcaaccataaggattcagatgttggtgaaacaaaaacagtggagtggagtacaagcagccagaaagcgagggcgctataa

SEQ ID NO: 23029 - DNA, 2868 bp, Zea mays
  Peptide Sequence Number=SeqID_64808
atgtccgacatcccggtcattcaatatgctgatgacactcttatcatcatgaatgcgtctcaaagggacttgttttgtattaaaggaatcctgcactctttctcgcctgcaactgggctcaaaatcaactttcacaagtcttgtctattgccgatcaacctcgacaccgtcaaagctagtcagttggctgcaatttttggttgccaagttgggactttccctttcacctacctgggtttgccgatgagtctcacaaaacctaaagtaaaagattatattcctctcattactaaaattgagagaaggtcgaacgccaccagtacttgggtgtcgatggctgggagattcacccttgtcaactccaccttttcggcgatgcctatcttcgctatgtgcacccttaagctgctgtattccgtgatcaataccattgaccacattagaagggattgtctatgcagaggcaacaatgaatctgctcatcggaacccccttattgcatgggaaaggcatgccatacctgggttgatcttgtctggaactcatattatgcctcaggccggattcctcatgcctctcaggtcctcggcctcggcgccccggatcgatgccgctgccatcgcctgggcatggacaccagtgcgccgtgcatccggtcctgagactgaattttggaccccagacaaggaagcagccatgggcaccgtcctggtggcgcctgagccgccgcagcgacagcatacgacagatccataccaagggccatcggacccacactcaaggatggcagaatccattccgctggcgctagagccaatgatggcaatgtcccggcaggccggcatagctgcgcttgcgtgctctcatcgcaacgcaggggttggggggaaaagatatatggagcttactaaaggtgcagctgacaattaccaccgatcttggtggaaaagacatggagttgttcttgatggagagatcgcagctctgttctttaagcatggaaattatgacctggctgtgaaatcctatgagaaagtttgtgctctctattctgcagaaggctgggaagagctgttggcagatgttcttcctgatcttgcagaatgccagaagattcttaatgatgaagctggttatttggcttcttgtgtaaagttactatcgctggacagtggcttgttttcatctaaagagcggcaaggtttccagtcagaagttgttcgacttgctcacagtgaaatgaaacatcttgtgcccctagatgtctcgtcactaattacatttgctggaaatgctggtccaccactagaattatgtgatggagatcctggtacactatctgtagcagtttggaatggcttcccagatgacatcacactggagtctctcagtttaaggttgtcagcttcttctagtgcagatgaaggtatcaaggcaattaaaagttcagattctcatgttctagtaccaggtagaaatatcatctcttttgacattcctcgtcaaaagcctggctcctatgtgttgggtgctctcactggacagattggcaagctgtcattcagatcacatggattttcccaagatggtccagttgaaactgatgaatttatgagctttgagaaaccgacaagacctgttttgaaggtgagaaaaccaagggctttagttgatattacacctgctgtgtcctctgctttgcttatgaatgagctccaatggattggattaatcgttaagcctatagactattctttaaaaggtggaatattgcatatcgatgctggcgctgaactgaaaattgaggagtctcagatgattgaaatagaaatttacgtaagtgatatggagtgtgctaattctgccaacagctccatcaaagctggaaaggttgaaaaggtacctattgaaaatggaaagatagaacttcctgattgggctagtgatgtgactactcttgtttggtttcctgttcgtgctattgatgacacaattgcaagaggagaatccctagtgtctcagaaacagagcgttgtagatgggatgagaatgattgctctcaagcttgagtttggagttttccgtaaccaagtgtttgaaaggaccattgcagttcattttactaacccattccatgtaagcacacgcgtcgtggacaagtgcaatgatggagctctacttctacaggtgatattgagttccggagtgaaggccacactgcatgtaaaggatgtacggttagatcttcaatctggatttgatcacttgggcaaaggagatggacggccagctttgagtttattccctctggttattgctccttcttccaaagctggaattttattcatgttacggttaagtggtacaaaggatgtggacgacgcagaaaatgcagacagcacgctgaatatcacctacgggatatctggtgacagaaaaactggagcacattctcctatacctgtcaaatctggtgattctgaagaacttgtgttcaagattgcactcagactgaagcgacctgtcctggatccatgtgtagcagttggattccttccattttcaactgactgcctgagggttgggcagttagttaatatgaggtggagggtcgaaaggctgaaaaccccggaggatgcatccatatccattgacgaaatactttatcaggttgaggcaaacccgcagaactggatggttgctgggaggaaatgtggtcacgtatcgttgtcaaatgagcaaggttcaaggatggagatcacggtgacatgtgtgccactggtgtctgggtacgtccacccaccgcagctggacctgccggaggtgggtgaggcaaacattagctgcaacccagcagggcctcacctg

SEQ ID NO: 23030 - DNA, 1107 bp, Zea mays
  Peptide Sequence Number=SeqID_64809
atgtctttcttcttaaaaaagggcccatatgctattggtgtagttgaaccaatggcacagggagcagcaggtggtgctgaagctagaccttttataacctaccataactcacttcaaagagatctttacttgaggattgcaacagagctgcatttgaaaaggatgttggttggaggacttgagaaagtctatgagattgggagaatattccggaatgaaggcatttctactcgtcataatcctgaatttaccactattgaaatgtatgaagcatattcagactatgaaagcatgatgaatatggccgaagaaattgttactcgatgtgctatggctactcatggcaagcttaaggttgactatgagggaactgaaatctctctcgaaagaccatggaggagggagaccatgcattctcttgtcaaagaagcaactggaatcgactttaacagctttggacaagacgttgaatctgctaaaagagctgtgaggggactgccaggtttcgttgtagggaacagtgaaagtacttcactgcaagcctgttcatctgttggacatgttctcaatgaggtgtttgaaacatttgttgaatctactcttgtacaaccaacatttgtccttgactatccagttgagatatcaccattggcaaaaccacatcggagtcatgttggccttactgagcgattcgaacttttcatttgtggtcgtgagattggcaatgcgttttctgagctcacagacccaattgatcagagaagccgttttgaaaatcaaataaaacagcacaatgctaagcgtgctgcaatggctaaggaggtcaaatctaccgagggtgaaggcgacgacgattactcgtatgaagtttctttagacgaggacttcttgacttcattggaatacggaatgccaccggcatcaggaatggatatttttatagaccactttgttggagtttctgtaaggtgtcgagaggagcctgagcccggtagtgacttgaggcgagccagtaaaaaaaacttcatccattttcagttcgttttgaaggagagaaaaaaggcttttgttggatcgctgattgcgtggctacctgtgactgagtag

SEQ ID NO: 23031 - DNA, 1353 bp, Zea mays
  Peptide Sequence Number=SeqID_64810
atggccgtctttggtggaggtcccgtgcttgtcgccgtcgcgctggcatgcgcgggcctcgtcgtctggctgcggtcacggagctcctcttccaaggagatgggggacatcccgggcacgatggggtggccggtggtcggcgagacgttctccttcatctccgacttctcgagccccgcggggatcctgagcttcatgcgcgaccggcagaggcggttcggcaaggtgttcaagacgtacgtgctggggcgggtgacggtgttcatgacggggagggacgccgccaagatcctgctgtcgtcgggcaaggacggcgtggtgagcctcaacctcttctacacggggaagcaggtgctgggccccaccagcctgctcaccaccaacggcgacgagcacaggaagctgcggcggctcatcggcgagccgctctccgtcgacgctctcaagaagtacctgggcttcatcaacgaccttgccgtgcagacgctggacacgtggcacggccgcagcagggtcctcgtgctggaggaggcatcgtcgttcacgctcaaggtgatcgccaacatgctggtgagcctggagccggagggcgaggagcaggagaagttccgggccaacttcaaggtgatatcgtcgtcgttcgcgtcgctgccgctcaaggtccccggcacggccttccaccggggcctcaaggccaggaaccggatgtacgcgatgctggactcggtgatcgcgaggcggcggagtgggagtgagggcgaggcggccgccccgagcgacttcctgcagacgctgctgcggaagcacgccggcgacgaggccgacaagctgacggacgcgcagctcaaggacaacatcctcaccctgctggtcgccggccacgacaccaccacggcgggcctcacctggctcgtcaagttcctcggggagaaccccgacgttctggacaagctacgggaggagcacctggagatcaaggagagcctcaacggctcgtcgcgtctcaggtggtctgatgtcaacaacatgccttacacaaacaaggtgatgaacgagaccctgaggagagcaaccatcctgccatggtactcgaggaaagccgcacaggacttcagcatcgacgggtacgcgatcaagaaggggacgtcggtgaacctggacgtggtgtccatccaccacgacccggccgtcttcgccgaccccaaccgcttcgaccccaacagattcgacgaaacactcaagccgtacagcttcctggggttcgggagcgggccgcggatgtgccccggaatgagcctggcaaagctggagatctgcgtcttcgtccaccacctcgtctgccgatacacgtaa

SEQ ID NO: 23032 - DNA, 2355 bp, Zea mays
  Peptide Sequence Number=SeqID_64811
atggatgaagctagacagccattgtccagaaagatcccgcttccttcaagccaaatcaacccctataggatgattataataattcggctagtggttttgtgtttcttcttccactaccgagtgatgcatccggtgcctgatgcatttgctttatggctcatatctgtgatctgtgaaatttggtttgccatgtcttggattcttgaccagtttccaaagtggtttcctatcgagagggaaacctatcttgaccggctgagtttaaggtttgacaaggaagggcatccttctcaactcgcccctgtcgatttctttgtcagtacggttgatcccttgaaggaacctccattggtcactgctaatactgttctatctatcctttcggtggattatccagttgataaggtttcatgctacgtttctgatgatggtgctgccatgctgacatttgaagcattgtctgaaacatctgaatttgcaaagaaatgggttcctttctgcaaaagatatagccttgagcctcgtgctccagagtggtacttccaacagaagatagactacctgaaagacaaggtggcgccaaactttgttagagaacggagagcaatgaagagagagtatgaggaattcaaggtcagaatcaatgccttggttgctaaagcccaaaaggttcctgaggaaggatggacaatgcaggatggaactccatggcccggaaataatgtccgtgatcatcctggaatgattcaggttttccttggtcaaagtggtggccatgatgtggaaggaaatgagctgcctcgattggtttatgtttcaagagaaaaacggccaggctacaaccatcacaagaaggctggtgctatgaatgcattggtccgagtctctgctgtactaactaatgctccttatttgctgaacttggattgtgatcactatatcaataatagtaaggctataaaggaagcaatgtgttttatgatggatcctttgcttggaaataaagtttgctatgtgcagtttcctcaaagatttgatgggattgatcgccatgatcgatatgctaacagaaatgttgtctttttcgatatcaacatgaaaggtttggatggtatccagggcccaatttatgtgggtactggatgtgtcttcagaaggcaggcattatatggctacgatgctcccaaaacaaagaagccaccatcaagaacttgcaactgctggccaaagtggaagaccaagaagaagaccaagacctctaaacctaaatttgagaagataaagaaactttttaagaaaaaggaaaatcaagcccctgcatatgctcttggtgaaattgatgaagctgctccaggagctgaaaatgaaaaggctagtattgtaaatcaacagaagttggaaaagaaatttggccagtcttcagtttttgttgcatccacacttcttgagaatggtggaaccctgaagagtgccagtccagcttctcttctgaaggaagctatacatgtcatcagctgtggatatgaagacaaaacaggctggggaaaagatattggttggatttatggatcagtcacagaagatattcttactgggtttaagatgcactgccatggttggcggtcaatttactgcatacctaaacgggccgccttcaaaggttccgcacctctcaatctttccgatcgtcttcaccaggttcttcggtgggctcttggttcaattgaaattttcttcagcaaccactgccctctctggtatgggtatggtggtggactaaagttcctggaaaggttttcgtacattaactccatcgtatacccttggacatctatcccgctcttggcctattgcacattgcctgccatctgcttgctgacagggaaatttatcacgccagagcttaacaatgttgccagcctgtggttcatgtcacttttcatctgcatttttgctacgagcatcctggaaatgagatggagtggtgtaggcatcgatgactggtggagaaaacgagcagtttttgggtcattggaggcgtgtctttcacatctctttgctgtgttccagggactcctcaaggtcatagctgctggcatctccaatgcgatcaacaacggatatgaatcatggggccccctgttcgggaagctcttctttgcattttgggtgatcgtccatctttacccgttcctcaagggtctggttgggaggcagaacaggacgccaacgattgtcattgtctggtccatcctcctggcttcgatcttctcgctgctttgggtccggatcgacccgttccttgcgaaggatgatggtcccctgttggaggagtgtggtctggattgcaactag

SEQ ID NO: 23033 - DNA, 966 bp, Zea mays
  Peptide Sequence Number=SeqID_64812
atgggtccgatagcaattttacgagggaacgtatctgttgctcaaaggggtgctagcataccttctgatatcgtcatcagcaactgctcgagcaactccaacaacaccgtttacaagttgcaacagctggaactggcaagaattgcaaagatacgcaggctactacagcctaactatctggattttgtctgcctctgcaacggcttggagctccacgtgagctcctgcacggcggccgggaagatgaccgtaggtttcctcctgctctcctccaggtacgggaagtcctcggtgaagtgcaggccgcggctctcgcgcctggccagcgcgctcctgacgacgagcttggcgcagcagaagaggttgcgcatctcgcagacctcgacgcccttcagccgccccgttgagcgcacgatgccgacatactcccacatcacctactgcagctccatcctggcctgcctcgtctgccccacgatgtccgacagcgcgccgtcgcccagcgccgaccgtggcagcgtcagccgtgcccacctcgccgccagcgacggtcgtggagaactctcgcgctctggagagattttgcgcccgtggatccgtcgtaagaaacagactgccgtaacaacaaggattactgggctaaaactgactcggatactaaaattccgaatttcaatggattataatactacaattccaattgctctgttcgggataccaatttttagaagcccgaatgttcgggatatcacggttccaaaaaagctcctcctcgagcgcgtgcgcagcggctctcctccccacaggcagtcgcgcggcggcctcatccccgccggcgagcctccactcccctccgccggcgaggtcgtcctcaccctcggcctatggtggcagaccgtgctcaacattgccgccaagaatgcgactctcctcgccgcactgctctatctcggggacctcgcctag

SEQ ID NO: 23034 - DNA, 726 bp, Zea mays
  Peptide Sequence Number=SeqID_64813
atggaggcgctgcgggcgtggagggcctcctccaatctcatcggcttcgcggcctcccgcgccgccgcctccgcttcaaggccccttggcctccgtatccgctgctgctccgcggccgccgccaccacgaacccgccggcgcagcctcaggaccgccgacgccgtagtgcctcctcatccgcctccacctccgaccgcgactccatccgcgccatccgcctcaaaaaagttgatgagctcagagggaagggttatgagccgtacgcgtacaggtgggacaggactcacacgaccaaggcgcttcaggaacagtacactcatcttatgaacggtgaagtctgcgaggacgtgtcggtgtccgttgctggccggattgttgcccgaagagcatttggaaagcttgtttttatgactgtaagagatgatgcggggactgtgcagctttattgtgagaaagacagccttacggaggaccaatttgagcaactaaaggcgtttattgatattggtgatatattaggtgcaagtggatccattaaaaagacagagaaaggggagctatctgtttatgtgaaaaatttcgaaattctcacaaaatcattactcccactaccagataagtatcatggattaactgatgtggacaaacgttatcgtcaaagaacccatctaatacaacaacaacaacaacaacaaagcctttttgtcccaagcacgttggggtag

SEQ ID NO: 23035 - DNA, 339 bp, Zea mays
  Peptide Sequence Number=SeqID_64814
atgaagaaggttgtctactacgagaccgattcttccatgccctcaacctccggcgtcgatgataaaatgaggcaccagctaacctcactccacgaaagtatttgggatattattgaatttggagcgcaggcacctcaagagggcgatgaggattacgacttcgatgaggccgcccaagtaaggcacttcaactctcaagccacctccatactcctagcttccttgtctagagaggagtacaaaaaggtgcaagggttgaagagtgccaaagaaatttgggacgtcctcaaaacggcgcctgaaggggacgaagtgacaaagatcaccaagcaggaatga

SEQ ID NO: 23036 - DNA, 627 bp, Zea mays
  Peptide Sequence Number=SeqID_64815
atgaaaccccagcctactaagctctttcctataagtgcccagctccttccctccaaagtccaaagtgagaagaagaagaagcactcaacaagagctttcaagaagcttgtagttgtgtttgctttgttcaatctactgagaaacagcaaaaagacatcaccaagacttattagcaagaaacagttgagaggcatgggagtgatggacgaagcagagccagtgaagaagacgatgctaagagtgagggggtttgacgtggagagggacctccgggctgtggaggagctggagcgtctgtgccaggtcggcctgtctggcgaccaaggctctgaccctgtcgccgaccttgatggcggcgcaaagaagacgaggagcagcaagaagaagaaaggcatgtcgctctacgtcgagcagatcggtgacccgtttgcccgggtgcgccatgcgacggacaacgtgatgctggttgctgagtatggggagaaagacgaggtcgtcggagtgatcaaggcgtgcaccaggatggtgagcagagggaagaagcagcaaagcttcagcggcagctcaaagcagtttgtcaaggtggcatgccttcttggcctcagggtgtccccctcccacaggtga

SEQ ID NO: 23037 - DNA, 240 bp, Zea mays
  Peptide Sequence Number=SeqID_64816
atggcgagtgctaaaccgcgatgggagcaccgaagggtggagatccacggcaaggcagcggcactgacggctccgacgagtaattacacgcatcggagagtgagggagggaactagaggtggaaggggtggttccttacctcaaggcgagtaccgaggtatccttggtggcgacaacggtgtggcggtgggcctagaaccacagtggcggctctggggctgcatgggtaacgacggatga

SEQ ID NO: 23038 - DNA, 228 bp, Zea mays
  Peptide Sequence Number=SeqID_64817
atgggggaagatgaaagagaaatgatctcccctcgggtgcttgagccagccatcctacagaaggagccatcctcgaggaatgatgtacgacgaagagttaaaggagctcctagaaaccagctacacttcccacgttggacgactgttgggtcggccctggtgaggacactccgaggcgggacgcttaccacaatccatggtcagtcagggggttcccaaagggtttga

SEQ ID NO: 23039 - DNA, 345 bp, Zea mays
  Peptide Sequence Number=SeqID_64818
atggaggagatttggcgtggggaggatggcgctgaaatcgcgtacgggtgggcgcggatccggagcaccttctgctatcggagacggggcgctgatatcgcgttcgggaactttggcaccttctgctattggggaggagtgcccacgccgccgcacgcgcagatcacgcccatcgccgccgcacgggcagatcgccgcacgcgcagatcgtcgcggccgcaatcgacgctgtgggatggggatccgccatggaacagcgtgcgcgagatcgtcgctcatcctgcgcgcagagagcgggccgcgagagggagggggccgacgctgtgggatggggactttccttga

SEQ ID NO: 23040 - DNA, 681 bp, Zea mays
  Peptide Sequence Number=SeqID_64819
atgggcggcccagccggccagataagggtgcagttaggccgccagcggccatggaggcgtttcgcggcggcgcgcggcatcccggcggcgggcgcgggttcctcccggtggcgcggtcctagcagcgaggccaaggcacgggcgccccctagtgcacgagcgcacggcctcaacagcacgcaggcgcgcgacccccggcgcataggcgtggcctcagcgacggcacgggcgcagtccccgcggcggcacgcgtgcgcggctgggcgcgggcgcggcacccggcctcacatggcgcaggcgcgcgacccagcgtgggcttggccagccaggcgcgtccctgtgcgggcacgcggcctcgccacaggcgtgcggccccggccaggtcccggcgcggtctcgacgctcggtgtgccgctgttaggcgggcgaggcctcgacggcacgggtgcggctggcatggccccgtccggccgtgggtgtccccggcgtgggcacgggcccagcagccccggtggcgtggcgtggccccaacagcccaagcggagcgggcgcgagactcctctggcgcaagttctggcgggcagcgctaccaccgtctgtccgcaagattgcagcacacatgtgtgcaagaacagcgccattgcagatgaggaccgacagatacataacaaaactgagtaa

SEQ ID NO: 23041 - DNA, 1041 bp, Zea mays
  Peptide Sequence Number=SeqID_64820
atggattgccagctgttgggtgtccagtgttgttggaggacgaatttactactctgccgcatcctctgcaacgacgtactgctgcagcaacccgtgcccgtgcctgagactgagaggctgagagcaatggtgggtgggcttcggtcagtgagctttcggtcttgttgcgtgaatgatgctgctgatgccatggcgacagcgtcggagcgggttccggagttcctccggagcacccggaagtccgatgggtccgatccacagctacaggctacagctgcagacgcgcgcaggggcaagactaggaagccgcgtatccagaaagaccccgcatcagcagacttgcgtataacaaggcctggagggctggaggaggtgattaggacaccagtccgtgtccgtgtgccagccacctgcgcagcaaaagacactgcccactggcccatcaccatcagcggccggactgcgcaagtgacgagaggagagacgcaacacgctagactgtctagacacacattatcagattcgttctgcagtacaataatgggagcctgcaactcgtgcgaggccacggcggtggcggcggcgccggggccggcgacggcggaggcgagggtggtgctcgcggacggcgcgctgcggcggttcccgggcggcacgcgggcgtcgcaggccgtgaaggcggccgccggcggggcggccccgacggcctcgtggttcctgtgcagcgcggacgggctggagctcggcggcgccgtggcgcccgtgcggccggaggaggcgctgcagcccgggcagctatacttcgtgctccccgccgcgatgcggcgccgcccgctgcaggccgaggagatggccgcgctcgccatccgcgccagcgccgcgctggccggcgaccacgacggtccgctcgtgttcccggaggccgccgcggccgcggccgccggcgccggggcgcggtgcggcaaggcgtgccggaggtcgaggaggggcggcagccgcggccgggacttcgcgccggacctcggcgccattgccgagtaa

SEQ ID NO: 23042 - DNA, 615 bp, Zea mays
  Peptide Sequence Number=SeqID_64821
atgacggagaggcaggtgcttgccgaggtcgaacgagtggtgcttggcgtcgctgacgtggtgtgcgccggtgtccgacctagatcttgggagttggaacctgctgcacgtgagttgggtggaggccatggcgggcggcggaggtgggtggagtgcatcgtcggtagcgaacgcggcaggctggatgatgtagccgcgggcgcaggcggctgggcggggaagcatcggccgggggtggagtgcatcgtgggctgcgacagtttcaatgccgagacgggatcgatggaggagacatcaagcggaggcgccatccacgccggtcatccatggatccgggggcgggggctctgcccgcgcatggctggtgctggcgtgcgcgagatctgggggcgagggagcggtgggaatgtgcggagcggagggtgtggacgtctacactattatcttaatagtagtactagaacacatgttgatacccggacaggaacatcccgcatgaagtgttcaagtgccaaagaatgtcaaaggaccaagtatgctgcaggaaccaatgtacaagttgctcctattgccatccctgctgaggttcaagacattccagtccaacacacttag

SEQ ID NO: 23043 - DNA, 456 bp, Zea mays
  Peptide Sequence Number=SeqID_64822
atggtggtgaggtggtggccgtcactggagaggagtaggaggaaggcgagcgggagcatgaagacgatgttggtccccgcctcgccgtcgtggcccgtcgatctctcacgctgccacggctccctgctccctcactctcctcatggctacgtagcaggcgtgtgcgatgggcgggcgccggggtggggattgcatcgcggggtgggtgcaggggcagcattcacggggacgggcggaggaacgggtccatgttgtggtggtacccgccattttgcctcactcctatggatgttgctctccaggacaggccttcaagaggataatgctaaaactataaaaaatcagaagcacactcatgtagttcctccacataaattcgaaccagtcacaatgtacaagctctactcccctttagttgcactcatgctaaaacaccccaatgaagtttttaaatag

SEQ ID NO: 23044 - DNA, 111 bp, Zea mays
  Peptide Sequence Number=SeqID_64823
atggccgatgaatttctcaacagaatgatcgccgccaccacaaacgacactccaccggggccgtttgtctccgcgccgcaattgctgatctgtccataccccttcgcctaa

SEQ ID NO: 23045 - DNA, 1578 bp, Zea mays
  Peptide Sequence Number=SeqID_64824
atgccggaaccatcaaccaccaaagggcggcggatccggggagagctcaagaatctcctggaggatgccacggcctggctggagcatctgcctctggggcagatctccaactgggacgacctggtccaagccttcaccggtaatttcctgggcacgtacgtgcgccctgggaactcctgggatctccgaagctgccgccagcagctgggagagtctctccgggactacatccggcgattctcaaagcagcgcaccgagctgcccaacgtcaccgattcggacatcaccggtgcgttcctcgccggcaccacctgccgcgacctggtgagcaagctgggtcgcaatacccccaccagggcgagcgagctgatggacatcgccaccaagttcgcctctggccaggaggcggttgaggccatcttccggaaggataagcagccccagggtcgccagccggaagatgttcccgaggcgtccgctcagcacggcaccaagaagaaaggcaagaagaagtcgcaagtgaaacgcgacgccgccgacgcggaccttgtcgccgctgctgagtacaagaaccctcggaaacctcccggaggcgctaatctatttgacaagatgctcaaggagccgtgcccctatcatcagggatccgtcaagcacacccttgaggaatgcgccatgcttcggcgccactttcacagggccaggccacctgcggagggtggcagggcccaccacgacaacaagaaggaggatcacaaggcagaggagttccccgaggtccgcgactgcttcatgatctacggtgggccagtggcgaatgcctcggctcagcaccgcaagcaagagcgtcgggaggtctgcttggtaaaggtggcggcgccagtctacctagactggtccgacaagcccatcaccttcgaccagggcgatcaccccgaccgcgtgtcgagcccagggaaatatccgctcattgtcgacctcgtcatcggcaacgtcaggctcaccaaggtcctcatggacggaggcaacagcctcgacatcatctacgccgagaccctcgagctcctgcagatcgatctatcctcggtccgggccggtgcggtgccttttcacgggatcatccccgggaaacgcgtccaacccctcggacgactcgatctgcccgtctgcttcgggactccctccaacttcagaagggaaaccctcacgttcgaggtggtcgggttccgaggaacctaccacgcagtactggggaggccatgctacgccaagttcatggccgtccccaactacacctacctcaagctcaagatgtcgggccccaacggggtcatcaacgttggccccacgtaccgacacgcgtatgaatgcgatgtagagtgcgtggagtacgccgaggccctcaccgaatccgaggccctcatcgccgacctagagagcctctccaaggagacgccagacgtgaagcgccatgccggcaactttgagccagcagagacggttaagtccgtccctctcgaccccagcaacgacgcctccaagcagatccggatcggctccgagctcgaccccaaatag

SEQ ID NO: 23046 - DNA, 243 bp, Zea mays
  Peptide Sequence Number=SeqID_64825
atggaggcggtgggcatcgacctggcgctgggcggcggcgctgcgtccctccccccctcccccgcgcgcagcagcagagcaccacagcgagcaatggagacggtgggcgtcggcctggcgctgggcggcctacatgtgcccaccgggagaaagaactgcgagggcggagcgcctccctggctaatgggcagcgaccacctgagcggcaaccgctgtgtactgagtgtttctcctctattgtga

SEQ ID NO: 23047 - DNA, 288 bp, Zea mays
  Peptide Sequence Number=SeqID_64826
atggcccaatggcacatttccctttcaagggcgcgcgtcaggataaggtgtcaggccacctttgcattaaaggctcctgcgatacggtcggtcggcgtggcggcttggccaaggttgcttcttggtgaagtctgggcctcgggcgagccgaaggtgtgcccgttgctggagggggtcctcgggcgagacctttgtgctgatgggggttaccagctgagattaggagtcttgaggctttgtactgatgggggttaccagctgagattaggagtcttggggtacccctaa

SEQ ID NO: 23048 - DNA, 561 bp, Zea mays
  Peptide Sequence Number=SeqID_64827
atggcggcctgcacgactgtcgactccttggtgtggcaggacaccagtgcaaacactgcagtctctgcccttggcgagatgcccacaaggatctttgttacaaagattcatagagagacataccttactaataatgaggcgatcgtaggggaatttgaagtatattcttgccaaatgatatccaccgagcaaaccattaaggtgccttcagaaacctccacgttgcttcaggttgtcacctctgttgaggatgttattttggttaaggatgtatcgtatgatgaggaagctaccttggttgcgcaaagtacttttgtggagtccatctttcttaccaccatcgaagactgtccttctcattctatggttgaggaaaatacgaaacctgttttggtggaggacggatcagatgatgaggaagctaccttggttgcacaaacgacatttgagggcccaatctttcttaccaccatcaaagatgcatttttggaccctttgctcggcgccatagcctatggcgccgaggtaacacagctcggcgccataggttatggcgccgag

SEQ ID NO: 23049 - DNA, 309 bp, Zea mays
  Peptide Sequence Number=SeqID_64828
atggcgcggtcggtccgagcccaaggtcgggcgaggcagagacttcccctgaggccgaggccggggtcgggcgaggacgcgattcctcccgaggtcgaggttgaggccgagccctggggtcgggcgaggcggagaccaccttccgaggccgagcctcaccctagcgggtggcacagcagtcggagcggggcgagtggcgctgttttcctgtcaggtcggtcagtgaaaggcgaagtgactgcggtcacttcgaccttgtcgactgaggcacgtgtgtcaggaaaaggtgtcaggcaatcctcgcattga

SEQ ID NO: 23050 - DNA, 3402 bp, Zea mays
  Peptide Sequence Number=SeqID_64829
atgagcggcggcgggctggaagtgcaggttcacgtggtgggcggcgcccggagctgctttgccgcgctcccgcttcacctcatccacgacttggagcgcacctcagccaccggcgacctcccgcccgtcctcgcgctcgaacttcgcggtcccgccggcgcccgctggtccctcgcctggtccggcgccgcttcccgatccagcgccatcgaggttgcacaagagttggcagactgcatctcgctgcctgatggaactatagcacagttgagcgtagctcgttctctggccaaagctgactcgatcagtattgaaccctacagtgaggatgactgggagatactggagagccgtgctgatttggctgaagaaacaatcttgaagcaggttggcatcgtttatgagggcatgaaattcccattgtggttggatggacataatattgtgaagtttgttgtcttgtcatctttccctgagaagacagttgttcaacttgtaccaggcactgaagttgttgttgcacctaaaaaacgaaaagagaagccttctcaggatctacaaaagcaaagtgcactgaaagaacaagtcaaaataaaggcactcctgcgtgttcaagcagctgataggaagtatgcacatacattcaaatatgaaggtgtcgagataggtgtggttgtcagctatgctgtgctaattcatcctgatacagctgcaagtatttcagttggcaatctccaattagtcgctgtttcacctaaatcatcaaagaaaggactacctctaaaaggcaaagaagttggacgaaaaaaaggaatttcagtaactaaagaaaggtcccatgaagccattgtttatatcttactttcagactctgttgcaaaagggcatgttatgcttccgtactctattcgtcacttcataagtgctgatgtacattcatgggtatatattaagacatattcagccaacatcaaggaggatgaacctctagtgacaatatctcctttaaagttcaagatgcatgtgaaagatgctcatgatagcagtaaattagtcagtcaggaagtggacacttcgaggataaccagaattccttcagaaaatggtgatttcttccagaaagctcgttacagtgaaaacaaaaatattcgaggtgcagatattgagagcatttctgaatcagtgtcaaggcagaaattttttattaagcattggcttattgggcaccttaaagaaatgggcttgcatgctagccatactgagatgaattcaatagtcttgccaaccaatattttgctccatttggaagcgacagataaagaaggaaccaaaggagttgaattcttatactttctaaagcttacatctgaaaattctaatttcaacgattcacaacttaatattgagactacttggagtgttccaaccagcaatgctgatgatcttgaactgcattttgggaagttcgagcttggcgagcctgtatcttttgattccctagtggacagtggttccagtgatggtttcaagctgactcggtcttctttaggctggatggagaatgcaatgtcagatgtgacaaaaaggttatctgtgctcttatcagcaactagcctaaggttatttaacagaataaagttcccctttcctggacatgttattgtatatggacctcgaggttctggcaaaactgctttgaccagggcttctgcaaaatactttgaggaccataaagatatcttggcgcacataatatacattgattgttccaaacttgcacttggcaaggctaaggagacaaggcaagaaattgaagacagcatgtctgaagcactgcttcattcaccttcgatcatcatatttgatgatctggacagtgtagtttcagtctcctcagatcctcaagtgtctcaatcatccagttcttctgattcacttgttcaatatttggctgacattatggatgagtacaaggataagattcaaaatacatgcgggtatggacctatcgcgtttatggcttcagttcagtcacttcagagtcttcctcaagacttaacctcttctggaagatttgatttccatattgagctttctgctcttgcagtacctgagcgcaaagcactattgcaacatcaagttgaggagcatgatttattgtgttctgaggaagttctgtcagagatagcatcaaaatgtgaaggttatgatgcatatgacttggaaattttggttgatagggctgtgcacactgctgcttatcgctttcttctgccttctaatgcttgtcacaactctctgaaacgaactttgttgatggaagatttctttaaagcaatgcatggcttccttccagtcgccatgcgtgatcttaggaaatatgctcctgatgataaagatggtggttgggaggatgttggagggctagatgaagcagtaactatcattaaagagactcttgaattgccgtcaaaatacccaaatatctttaccagggcacctgtgcggttgcggtcaaacattctcctgtatggaccacctggatgtggtaaaactcacattgtgagagctgcggctgctgcttgttctttgcgattcatttcagtcaagggtccagagctattgaataagtatattggttcatctgagcaatctgttcgcgacttttttgcaaaggccgttgctgcagcaccttgcctattattctttgatgaatttgactccattgcaccccagcgaggaactcatagtgcaggagtttctgatcgtgtagttaatcagaaaacaaaagaacaatctaagcctgcgttttttgtttgtaagcagttcttgacggaactggatggtgtggaaaccttaactggagtattcgtatttgcagctacgagcaagccacagctaatcgatgctgcgctcttgcgacctggaaggtttgatcgtctagtcttttgtgatttccctcgatgggatgaacgtttagaaattctgaaggtgcattctaggacggtttcactggcaagtgatgccagtctcgaagatgttgcttctctgaccgaaggatttactggtgctgatctcgctgctattctaacggatgctggactagctgcaattcatgaacttttggacaaccaggagaacggtgttccagaaaccgaaccgtgcatcagcaaagaacttctcatgtccgtcactaggaaggcaagaccttccacaccagcagacgagaagatgcggtatgatagggagtttggtgaattcgtgtcatccaggaagtctatttcgacaaaggtgacctcattcttatttttaaatcctcaaaagtcaaaccatgatatttccattgaaaaaccccaatatctagttactttttttggctacatgatgaaattcattggataa

SEQ ID NO: 23051 - DNA, 240 bp, Zea mays
  Peptide Sequence Number=SeqID_64830
atgtaccctgcagatggaccgatgctcaaggcatcagttgctccattcacacgagacttctcgccgccgctccaggccgccgccgctcttccgccgcctctccaggccgccgctcagccgcgccaggccgccgctcagccgccagcagctccaggccgctccaagtcgctcccgctgtccgccggccactacagagacaaccctgcctctagctttacttcactggtgattggtgagtaa

SEQ ID NO: 23052 - DNA, 246 bp, Zea mays
  Peptide Sequence Number=SeqID_64831
atggaccatgaagaagggcggggaattgacgggtacatttatagcgcaggggacggagtccgcgtcgaggacaattggttggcaaggaagggaaagattctgacgacgcgcccccgcggaaatcgcgcacaagttggcgcgctccacccgaaaagaaaagataagagtaatcagagtaaagcggaaatagatgagaaaaagattaagaaaagtttagaaagaattagagtagcaaaggtaaggtag

SEQ ID NO: 23053 - DNA, 237 bp, Zea mays
  Peptide Sequence Number=SeqID_64832
atggaccatgaagaagggcggggaattgacgggtacatttatagcgcaggggacggagtccgcgtcgaggacaattggttggcaaggaagggaaagattctgacgacgcgcccccgcggaaatcgcgcacaagttggcgcgctccacccgttcaagtttacaatattcaattcaaattcaaatttcctttctcatttcaatcctaagtttgattctgaatttcaagcatatatttga

SEQ ID NO: 23054 - DNA, 1272 bp, Zea mays
  Peptide Sequence Number=SeqID_64833
atggatctgcgcggtcgggacaagaccacgtttgtgcgtgaagtcgtggccgaggccgtcaagattgttgggaagtacgcgccgaagacagatactttgaggagttgggatattcgcggttccaacgctaggttgaaccgcgtttttgagctgaaccatttgtcgtatggcgattacccagagggagactctgctgacaccgctgatcaccgagggaagcaaacaaggcccttggccgatgaaggcccctcacgggataaggctccgggtgcggccgccagaaagagaaaattaggtacaacacctgaggatttggggctgagggtttctggtcattttgttggggagttgctagagatgtgcgcagctcccggtagtgatggagaaagatcgccaggacgtgcagtgaaagaaacgttgggcccccgtcaggttgggggacccaaggcgggaggtgtaggtggcgcggcccagcgtgaagtccaccgcctcaagtgccggggccgaaggagtctccacggagctgtccgtggacgactacttggtgggcggtgtcgccatgttcgacgcccagacggggctgcgactgctggggcagagtctggccagctggcggttgtgccggcggcatcgtctgccagctctgtggtcgcggcgacgggaatgaagggtgacacgggggtctcagaggacccgtgggctagattttgcaccgatggtgaaatcgcctccgatgccgctgctatgggcgtggccacctcagtcgtgcagctgctgaaatacgcgaccaccttcgcggaacgtattgcttcgggggcgttgaccttggagtttgccaccgaaaggcggcggcttgagggaaggattgagcgcctccgcacgcaacatacagaggcgatgagggacaagtcgacggtggagaataaaagccgcaatctgcttgagaagctttcggcggcagaaaaaaagttaaagccgcgcactaaggctgatctcaccctcaagcgcgctaccgacaaggagtcggagctaaaaagcctgcgcaactattgcgagaagacagagacctccacccatgccggtgttgagcgggcgcacacgctattcgtggaagaggagctggagtcactcccgttcatcgtgacaggcctcatgtcctatgcatatcttgtcacctgcgagggggcagcgaatgccttctcccacgaaggatgtaggcacttcgaagtcttcgaccgggcgagcgaggacttcgaccgcagaattttctag

SEQ ID NO: 23055 - DNA, 453 bp, Zea mays
  Peptide Sequence Number=SeqID_64834
atggagcgtgctgaggacgtcgtggaccttggaggtctggccggcgcgccgcccgagtctgcggaggacaatctggtgctgccctcggatgccgacgctctgaaggtggtggctgagccggcagtcgaagaccccacgcccgccgccgggccttcgcagggttttgggcctgcgcacgcaaccgctactgacaatgctaattttgtggcggcttcgatcgtggttgctgaagataattctgatgattctgtgtctaagttttttgagtctgaagattctgggagttcggttgtgtggacggaagagtcctcggatgaggacttggattattttgcggcactggatgtggctgcggcggaggcttctccgtgtgtgatgggtgttgaagttctttctggtgcgagtgctaggcgtaggcggcgaagggcggtggcgaaacggagaattagtgag

SEQ ID NO: 23056 - DNA, 2043 bp, Zea mays
  Peptide Sequence Number=SeqID_64835
atgccgggcaccagccccacgttctgggtcggggacagggtggtcatctccgacatctcagccgcggcgctggaggtcttcggcggcagtctgtgcatcacggaggccgggtctaccctctggtgctcgtccgtcgcgggagccgggccggggcccccgccgccgtccgccgccgcagccgcggtgctcctcggcaacggcaacctggtggtgagggaccaggccgacgacgcatcgtcgcgggtgctgtggcagagcttcgactaccccggcgactcgctgctccccggcgcccggctggggctcgccgcgggaacgggggccaacgtctcgctgacgtacagggacttctcgcacaacggcagcctcagcgtggacccgagcaggaggaacggcttcgtgctcagcaccgacgggcatcccagcagcctggggaccttcccggactggatggtgacgtcacaggacaacggcacctcgctggtgctgaaccctcctccggacagctctaacctgaccgagttcttgcagttcagcctggggcaagtgagcctgatgcggtggagcaatggagaatgcagctgtgtccgcggatttgagccttcctatccagcggagtggagcctcggatacttcgcaaccggttgctcgagaccgagatctcttccgctgagctgccagacgaacggccagactgaacaagacgactcctttatcctgctagacaagctgcaggggctcccgtataatccccaggatggtttagcagcaactgatgaagactgcaaacaagcctgtctcagcagatgctactgcgtcgcgtatgcgtatcactccggatgcaagctgtggtactacaacctgtacaacctgagcttcgcttccagaggacctcctccatacagcaaggtttatgttcgttggggctccaagctcaggcccaagagtggtctgcgcacagggctgattgtatccatggtggtcgggtcagtagcgttggctgccgtgatagtgatactggcgctcctatggcgatcccggacctggagaggtgtatttacttgcagtcgcagagagtttgaagcaggaggttctctcgcgttctactcttacgcgcagatgaagaaggctacaaggaacttctccgacaaactcggcgagggagggtttggaagcgttttcaggggaacaatggcaggaccaaccgccgtcgccgtgaagaggctcaaacgcagcgggcaggcggacaagcagttcagagccgaggtgcagacgctcggggtgatcaagcacgccaacctcgtccgcctcctgggcttctgcgttagaggagacacgaggctgctggtctacgagtacatgccgaacgggtctctggacgcgcacctcttctcggagagatccgctcgtctgagctggagcctccgctaccagatcgcgctcggcatcgcgaagggcatcgcctacctccacgaggagtgcgaggaccgcatcatacactgcgacatcaagcccgagaacatcctgctggactcggagctccgcgccaagatcgccgacttcggcatggcgaagctcctcgggcgcgagttcgactcggcgctgaccaccgtccggggcaccatggggtacctcgcgccggagtggatctccgggcggccggtcacgaggaaggcggacgtctacagcttcggcatcgtgctcctcgagatcgtctcggggaggaggagcacggcgaggctgaggtccgggtccgggagccaccggtacttccctctccacgcggcggcgcgggtgagcgagggagacgtgctgtgcctgctggacagtaggctgggaggagacgcggatgtggaggagctggacgtcgcctgcagagtcgcctgctggtgcgtacaggacgatgagggcgaccggccgtcgatggggcaggtcgttcgcatgctggaaggcgtcgtgagcgttgcagtccctccgatcccgtcttcctttcagaacctcgtggagggcgagggcagcgtcatatactctgacgaagaatga

SEQ ID NO: 23057 - DNA, 969 bp, Zea mays
  Peptide Sequence Number=SeqID_64836
atggaggaagaggaggtgttcgtgacggtgaggcggacggagcacgtcgacgtcacctcccgggcggtggtcgtggctgcggggcgcgccgccgtcgcggggcccaggacggtgcgggtcttctgcgacgactacgacgcgaccgactcgtccggcgacgaagcggaggaggaggaggaaaagaaggccgcgcgcaggagggtgaagcgctacgtgcaggagatccacctggagcgggcggcaaaggaggaggaggaggcgacggccgcggcgtctctgggggcggtgctcccggggccgaagcggaagcggaagcccgacggtgaggcctcggagccccggttccgcggcgtgcggcggcggccgtggggcaagtacgcggcggagatccgcgacccgtggcgccgggtgcgggtgtggctcggcaccttcgacaccgccgaggaggccgccaaggtgtacgactcggccgccgtccagctccgcggccgcgacgccaccaccaacttccagcagcaggtggaccccgagcgcctctcacagccggcggcgtccaagagcgccgcgacatcgacatacgactccggcgaggagtccgtgacggcggtggcgtcgccgacctccgtgctccgctcgttcccgccctccgccgacgccggcggcacacgcagcaaggctgccgcgaggaacccggagaccggcgattcgaccatcgtgttcggctgccccttctccttggccagcgagctcccggcgctgtacaccgagttcgacctgctggccgacctcccgctggacttcctcgccgacgccccggaggtggaggcgctgtccctgccgccgttctccgcctgcacacccgaggaggaggaggagtgcccgtccgacgcggtgaggtggcggcaggtggacgaattattccaagacatcaccgacctgttccagatcgacccgctgcccgtcgcctag

SEQ ID NO: 23058 - DNA, 600 bp, Zea mays
  Peptide Sequence Number=SeqID_64837
atggggcccgagcaggaggaggccgtgctggagaccatctgggacctccacgacaaggtcagcgacgcgatccacgccctctcccgcgcccacttcctgcgcgccgttcgccgccgctcctcggcctccgcccccggcctcgtggacgtcaagggcgggggtctgggtctcggcgcgcgcggcggagacgaggtcgtcgccctggcggccctggctgaggaggccaggagcctgcacgccatccgcgccgcgctggaggacctcgaggaccagttcgagtgttttctcgccgtgcagacacagcaacagaccgaacgagatttcgcgatggcgaggctggagcaaagccgcatcatgctcgcgataaggctcaaagagcatcacgggagaaaccacaaggtcatagacgaggcgtctgccttcgtccgcgatgtctaccaggacgtctggccttccctgtcagctaccaaggccgagagacgcgccgacagttcaggtaacccggcgaagggtccgagcttcctcgcgcggatggtacaggaggaccaccagcgagaggagctcgtcgtggctgggatcatcatctccgagaggcggtag

SEQ ID NO: 23059 - DNA, 342 bp, Zea mays
  Peptide Sequence Number=SeqID_64838
atggaggagggagggaaagccaggtcaggagggggggctcacgagaaaacactcgaactggtcctcgaggtcctccagcgcggcgcggatggcgtgcaggctcctggcctcctcagccagggccgccagggcgacgacctcgtctccgccgcgcgcgccgagacccagacccccgcccttgacgtccacgaggccgggggcggaggccgaggagcggcggcgaacggcgcgcaggaagtgggcgcgggagagggcgtggatcgcgtcgctgaccttgtcgtggaggtcccagatggtctccagcacggcctcctcctgctcgggccccatcgagatccctag

SEQ ID NO: 23060 - DNA, 344 bp, Zea mays
  Peptide Sequence Number=SeqID_64839
atgtccatttcgagcactagtgcgctggggcagagatcactggtgagctcgcctggtggcgatggcggcgccgccgtctgcgagctggctgggccattgattcttgatccctccaccgtgaacactcgtgatgaactgtgccaacgtgtgcctacattgtttgatttaccagttccggccgcacctgagcccgcaactgctgcctctactccgcctacttcttgtgccgacttcgccagcctcgcagggtaccgatttcctcctgctttgtcggtcaaccccgggaacgcgtaccgccttgccaatgaacatggggatgaacttcctgaaccttggaatgacat

SEQ ID NO: 23061 - DNA, 399 bp, Zea mays
  Peptide Sequence Number=SeqID_64840
atgggcgttatggcaaagaacaagaagaaaaagaaagaagaaatttgtccaatagtaacaaatggtgcctccacaggtaaagccaagagagatataaaaactggtgctattgcagctacaccccccgctttgtcaggtcaaagatacttgttctcgatgagtgaagattctggtattacgcctcgaatggagcattacgagtgcatgattgagttgtttagggctcagaagagtgtcaccaacgacgtcggtgggccaggccaggccaaagaaaactgtctctttaacgacgtggtcacggggatacgatccgacaagagagatgctgaagaatatgccctcctcaaggggtcaagcactcgatcagaactaaaccatcctgcggcactcacagcatga

SEQ ID NO: 23062 - DNA, 444 bp, Zea mays
  Peptide Sequence Number=SeqID_64841
atgaggaaaacgaattgtggagctgtaggcttcaaagtaaggggaggaccgagattatatacccagcagcagcgcgggatcgaagggcttgcttggttggaaggtaagttggtgtgctattgccttctcggtatcgttttcttcaagaagggaaggaatcgggggttccgggcaagactgtttggctctatgttcaggaaaggaatgccctcagggaagaaagaggaaagtagcatagcagagaaaagaatctctgttctcagtctaagcagaaatgaacagataccattctccagagccagagatagtagcttaattagcttaggtttcaattctaacgcacgagaagaaaaacgaaaagcatgggacttccagtacgatagggccggacctcaatggtcctttatgtctgaagcggatgtgagcgtggtcaatcgaatatga

SEQ ID NO: 23063 - DNA, 1104 bp, Zea mays
  Peptide Sequence Number=SeqID_64842
atgactaatggatctaatacaagtaatgctaatggtgttccgattccgagggtggggggttcaactgggatttatgaggaccacccaggtctgaacccgaccgatgaaatggtggtggaatatcaagccggtataagggagcaaatgagtgaattaatgaggatggacggggagcaccccgaagttgtggctgccgccaaacctcgaggatttaagggcgcatggaagaaaagtgaagctttcaagtacggagtgtcgaatgacgcggatcttcctggaggaggaaacccagcgggaagctcaagaggagttgacctagcgaatggaaatgaggcggggagttccgcaggagttgacctgatgaatgtggatgatgctgcaggttttgcagcagagagccccctggatcaatttggaattcacccaattctggatctgaatattgaatgtcgattcctcacaatcgctctttgtgatgctgcggaaccatggcaattaggatctcaagacgcagcaacacctatgatgcaaggaatcattgacttacatcacgatatctttttcttcctcattctgattttggttttcgtatcacggatgttggttcgcgctttatggtcgcgttgcccagtttgggctgctcgcgttttcactctgttgagtgtaacaacagcacttttttattattcttctttgatgaccacagcggaatgggtaatgaacctgatcagaatgcgggggggatccactgcgggcaaccccgatggaacctctagcccgtcctcgtcgtttttccaggggctttctcgggagatacccggggcacctgtggaacctaggcaagaggtgcagcagccggaaatggctttagcggtgcctaatccatcaattcagccaactgatcggggagagccgtcgagtgctccgcttgggccggaccagccagaggacagcagtgcaccttcaaggccgcttaccgagcaagatatcaggactatggaacagttattcgatattgaagaagaattgaaaccaatcattattggtttttacaatgaattggggtcgaagaaagtgggcgagttgtgcccacttggtggatga

SEQ ID NO: 23064 - DNA, 1074 bp, Zea mays
  Peptide Sequence Number=SeqID_64843
atggccaaattaatgcccggcagggatcaccaagagattctagttgcagccgaacgaatacatggggggagtgctaatataggatttcttcgatcacagctccgggatttagtagcaaatggcactgaaagtgaagccttcaagtacggaatggctgagctagcgaatgagaatttagcggcaaatttcgctgtgatgcatttagcggagagtcctttggatcaatttggcattcaccctctcgctctcgctctcggtctcgggtccgggaaaaaggaaaggaagacaagttatgtaggcagtagccgttccaaaaatgcagcggtaccacaagtgctcattcattggtccaacctagaagctacttgggaagactatgaattgattgcaatttcccatggtgatctaatatcttttaaagaaaatgacgcgagaacccgcggtgaagaaataaggagatctttctatatcgacatatcagttggaaaaatcataggcaaattcctaccggtcagaatctggagaagaacaaaaacagaatggttccgcttactcacaactcagaggggatgccgcttactactaaaatccgggtttttgcaagagttgtgttcttatatgcaagaagaagacttagaaagaacaaagaagtttggatccgcaaaagtatgcttaggcagttccttcgctgagcacaacagaatgaagaggaatttgtttcatttcaaatacttcttcttatggaaaagaaggaaggaggaagaggaaggggtagaggagatcctcaaagttatcgagcaaaacgaaaaccgaaaaagagcaataagcccttttgtttacacaaacaaattatatagaaattcgacctattgctccggatccccgtttactattactaggaagataagaatcaaaaggatcgaactacctactcattattcagaggtgaatcatagaacactaaaagctgtggtatcttatggacctaacataggtcacatccctcacgacataagattgaaagatccaaaccttcctcttcggagcggaaacggacctggccaaaacatataa

SEQ ID NO: 23065 - DNA, 423 bp, Zea mays
  Peptide Sequence Number=SeqID_64844
atgggcccgaatgagccaagagctacacaccaggcgaaaattgggaacgctaggcccgcaaggcccaacaaactattccactcaccaacatggacggatgggatctatatcgtggacaaggataggtcgaggctgatccggctccccgtcggcgagagccggccgccctcgtcggcgctgcggctgcttctcgtctccagcgcaagggacagcgagagccagcagccgtcgcggtcgcggtcgtggtggtggtcgtcgtgttcggaagcggccgccgacgaccagcagggatcgccaccgacttgttgggccacggcggccttggtgggcggtgtctggaggctgcggtgggtgagagccgtgccgaccatctgcatgcatgcgtgcaagccatcatctttcgttttcgtcagcattgggtaa

SEQ ID NO: 23066 - DNA, 840 bp, Zea mays
  Peptide Sequence Number=SeqID_64845
atggtccaaactgccaaggagggcatgatgaataatgctaccagttccgaagtttatgtcaaaatgcaagatgttttcataaaaatggaccacggaggcgacactgtttctgctcacaaagaactgaaggacctgaaggatgcaattattccagaagggaatggatcaagaacagtgcctgaagtatttgatcctgaaaagcatgtagatgcttacttgcctgtccgggtgaatgagcagagagtaagcaatctgttgcagtccctgttgattactggttgtattggagttacaccgctcattcagaagataccaacatcagtcctctggggttacttcgcctatatgtccatcgacagccttcctggaaaccagttctgggagaggatacagcttcttttcatcacgcctcaaagacgctacaagtatgccttgttagctatacacttcatcccgaaatattttgatccgagccacctgagggaattagatgcagccgagtacgaagaactgaaaggttttacacctgatccatcagtgtgtgaggacgagtctgttcgcagcggagatgctcagcctggatatgcttccgaaatactcgaggaattcacgactcaccgtggagagctgaagcgcaggaactctaccttccatgatgggagactacttcagcttaactctgtcaagatgacgagagagctttctcgggttccttcttggcttacaagaatcctggaagaatacgcggtttctgaatccgagctccaattaagcatggggaacatctggcttaggagcgccttctccgaagagaagagctcgaaaaatcgcacagtataa

SEQ ID NO: 23067 - DNA, 576 bp, Zea mays
  Peptide Sequence Number=SeqID_64846
atggatcggtaccagcgggtggagaagccgccgcccgagcccgccgccatcggcgagaatgaggtccgcatcaccactcagggcctcgtccgcaactacgtcacctacgccacctccctcgtccagagttgcctactagttgctggcggcgtccttgtggtgcggtatgtcacagttctgcgatttgcttcaccttatgtgttgtatcgcatcagtttcttgcgagccttttcaaatcaggaaaaacaggtgaaggaaattgtgttgaaggctatgggacaggctataagcaaggcagtggctattgctgagatcataaagacttttgtgattcgtgcctctaccgaactgcagaagaggattcctggtatcaagctcctctacattcggatcttaagccacaaagatatcagcaacctcagcaatatcaacagtaccagccaagacaacatcaagttcaaacggattcatatggacgcggccgaggcagaagcaggggccgaggaaggggctggggtactaggggtgggtacggcggaggctatggtggatatgaatatgataacaaccaagtag

SEQ ID NO: 23068 - DNA, 951 bp, Zea mays
  Peptide Sequence Number=SeqID_64847
atggggcaacaacgcacgttggtgtatagcttcgtggcgcgaggcaccatcgtcctagcggaccatgctgaggtctccggcaactttgcctccgttgctgcacaatgcctacagaaactccccgccaacaacaatcgcttcaactacaattgtgatgggcacacattcaactaccacatttatgatggattcagtaatgcaccttgttcttgcttcgctctctctctcccacacgcttataagtcaacaaatgtgatcctattgcctatgcaagttttacttgatgacacaacgtactgcgttgttgctaccgagtcagctggtcgccagcttccagttggatttattgagagagtcaaagaagatttttccaagaaatatagcggaggtaaagccaaaaatgctagtgccaatggcctcaagcgagaatacgggcctaaactcaaggagcacatgaggtattgtgaccagcaccctgaggagatcgacaaacttgcaaaagtgaaggctcaagtcacagaggtcaaaggagtgatgatgcaaaacatcgagaaggtattagatcgtggcgaaaaaatcgagctccttgtggataaaacggaggatctccgatcacaggttcctcatatatatgatctcatgcatgtgcaatccattggttccatcgatctgactatcaccaagctcaccgctttagtttcccccgtaggcacaagatttcaggcaacagggaacaaagatacgacggaagatgtggtgggaaaacatgaagatgaagctcatcgttttcggcatcgtggttgcgctgatcctcctcattgtcttgacagtttgcaaggacttgaattgctggtgatgtggaattatagagccgaaatctcacatgttacgactgatgtattgtacctatgcttttccttcagtttgatgttgttttgttcatgcagataa

SEQ ID NO: 23069 - DNA, 1269 bp, Zea mays
  Peptide Sequence Number=SeqID_64848
atggcgcctccagttgacgtggctggtctgcgccctaggttgggcgatgtggaagctcctccgaagctgaggtcgagtctgtcttccgtggacgaggtcgagttcgagcccccgggtcgggcgaggcggaggccgtcggctgaggccagggcggagtccgagccctggggtcgggcgaagcggagttcgtcgtcttctggggctgagcccgagtccgagccctgggtcgggcagagcggagttcgctgtcttctgggacttagcccgagtccgagccctgggtcgggcggagcggagttcgccgtcttccgggacttagcccgagtccgagccctggatcgggcggagcggagcggcgctgtccttctgtcaggccggtcagtggagcggcgaagtgacggcggtcacttcggctctgccggctggggggcgcgcgtcaggataaagctttatgctgatgggggttaccagctgagaattaggagccttgagggtacccctaattatggtccccgacagataccgatggcactcctccttggcttgctgctgctagtagtagcttcgcccgcgatcgctgatgacgactccggtatctactaccagctggctcttatgtggccaggagcatactgcgagcagaccagcgctgggtgctgcaagccgaccaccggcgtctcgccggcgcgcgacttctacataacgggcttcaccgtccttaacgcgaccaccgacgctgcagtgacgggatgcagcaacaaagttccttacgaccctaacctgattaccggcatccaaggcctgaatcagtactggagcaacatcaggtgccccagcaacaacgggcagagcagctggaagaacgcctggaagaaggccggcgcctgctccggcctcagcgagaaagactacttcgagactgccctctccttccgtagccggatcaacccactcgttcgcctcaaagccaaaggtatcgagccggacttcgggctctacggcctcaaggcgatcaccaaggtcttcaagagcggcatcaacgcgacgccggtgatccagtgcagcaagggccccttcgacaagtacatgctgttccagctctacttctgcgcggcggggaacggcacgttcatcgactgccccgcgccgcagcagtacacctgctccaaggagatcctcttccaccccttcaagaagtggatgctcaagcagcagctcaaccaggacgacgaccctttccagctgcctggcgtcgccatggacaactga

SEQ ID NO: 23070 - DNA, 909 bp, Zea mays
  Peptide Sequence Number=SeqID_64849
atggccgcaccaaccgtcttacgccctctgcaacggacctttagaatcaggactccatctgtgcctaacctgccccttcgcacaggaggagtcattttctggggagctcttggagatgctcttacttgggaaagcttttcccttccacaacaggttgatttgaacaacatctctagcattagagagtggtgggagcagacggaaactctcttctcacaagatcgcaaaagggcgttcaatggtgtggtcatctatactatgtggaacctttggaaggagcgcaatcgaagaatctttgagcattgctcgttgtcaccactccagatcacagggagaggcgttgcagaggttcaattaccagcagttactcacagggtctacctagatgtagaaattgatggccaacacataggtagaattgttattggtctctatggggaggtcgttccaaaaacagttgaaaactttagggctctttgtacaggtgaaaaaggtgtcgggtccaatggcaaacctcttcactataagggaacaccattccatcgtattatccctggcttcatgattcagggcggtgacatagttagaggcgacggtaaagggagtgagtctatatatggaggcatcttcccagatgagaatttcactgtaaaacatacacatccaggggttgttgctatggcgaattctggacttgattctaatggatctcagttttacataactactatcaagacaagctggttggatggggagcatgttgtcttcggcagggtgatccaaggaatggataccgtgtacgccatagaagggggcgctgggacttacaatggcaagccaaggaagaaggcggtgatcaccgacgctggtgagatacccaaggagaaatggggtgatcaggaagcgtag

SEQ ID NO: 23071 - DNA, 546 bp, Zea mays
  Peptide Sequence Number=SeqID_64850
atggtggtcgacctcgccgccggcgtgcactactacgccgccgtcttccaccgcgccccggcaggggccgcgccccgcgccaaatggcgcatgtacgccgtgtacgcggcctgcttcgcaatccgtgaacaaggtggacagcgacaacgtacacaaggcgggcatggtgatgaacgggttgtccatcagtgtgtacgcatcagagacgttggggtgtgcggcggccatgtccacagacggttgatgagcaagatgctcgggcgcaatggggattcaccgctgatcaggttcggcacatacacatgcggcgcgtgcgccgtgtcgggcacgctcaagtgggacatggccactgtcatggagtacaagggcctacctctgcagcaggtcgtcgactactatgtcagggacatggccactgtcatggagtacaagggcctacctctacagcaggtcgtcgactactatgtcaggggcacgatgcagaatatccgaagtcaactattatcaataattagccgatataaactatttacaaatctttactaa

SEQ ID NO: 23072 - DNA, 363 bp, Zea mays
  Peptide Sequence Number=SeqID_64851
atggactgcactacgccaggcttcgctcctaaccgcagggcgtggatctgggatcgcgcggcttacattagatcaggggatgcgttgggtcttagccgtaggatcgtgatcgggcggccactatttggtaccggttcgggagagattagatctaatctggaccgccagtttcaaatcgaacgaccgagaaccaagaatacccccttcaccatgcttatttgtaaaagagcccctggcctaccatttattcaacccgtggtccactgcgggagtagattgagtctctggaaacttacgcttgagcccctgcgctttccagaattcatgcgcccagtccacaactctgagaattcagttatttaa

SEQ ID NO: 23073 - DNA, 132 bp, Zea mays
  Peptide Sequence Number=SeqID_64852
atgtcgagcacgttggtgggtaatttagagttgcgaattgcgatgctagttggaggtggacgcagcagaacaaagagaactaatgagaagcttgcccatgacgttgtcgaagaagaaatcgactctcgctag

SEQ ID NO: 23074 - DNA, 129 bp, Zea mays
  Peptide Sequence Number=SeqID_64853
atggcgacagtgcggatggtcatatggatgaacgcgttccgactaaccgacggtgtggatgaccaaattgaggctggggaaaggttcccatgttcaccagaggtctacaatattaatgtggtgacctag

SEQ ID NO: 23075 - DNA, 393 bp, Zea mays
  Peptide Sequence Number=SeqID_64854
atgccgagagccttcccacggcacgctttgaaggctaactcagacggctcacttcaaggcaaaccttctctccacagcactagacctctcaagagacctaggatccgttctctctctcgcgaagcttgtaacccctactacaagcaccccgcttattcactccgcatactgagatgcaatgatataaacttgcagctgcagttctatgaaagccaaaaggagccaggtcagggaagacccagttggctcataccctatgtgtctccactcaggagttatggaatagtcaggctgactgatcctgtagggatggatgtgcttaaggattgtgatgaaagtgggttccacactcaccgagagacaaccaacggcagtccactgtccagtctatga

SEQ ID NO: 23076 - DNA, 219 bp, Zea mays
  Peptide Sequence Number=SeqID_64855
atggctcatggtgctgaggtaacatatctcgctatcatagcctatggcgccgaggtatctggtgagctgacaactaggtacgcgctggcagctgatgtggcctacctcgatgccacggtatgtggcgccgagctaggagatggcgtcggccgtgtgatggtcattggcccctacttgctgccggccactaccgctgtcgctctaacaacacgacgctag

SEQ ID NO: 23077 - DNA, 252 bp, Zea mays
  Peptide Sequence Number=SeqID_64856
atggctcatggcgctgaggtaacacgtcttgtcgctatggcttatgacgccgagcgcacgtcgtcgcggccctcgcgggaccgcctccgcctctcccgggtaggccgaggtcgtccgcccgcctctcagactgctttcaacccctatcctccccttagtgcatgtaggggctacagggtgacgctaaagcgtacatcgcttatccctagctcctccctatctgtgaaaaaattgataatagtacaccgctag

SEQ ID NO: 23078 - DNA, 2733 bp, Zea mays
  Peptide Sequence Number=SeqID_64857
atggatcctgcgaaatcaaatcaaaagaggttgagtggggtaactggatttggatttggactcagtcagttgcgaagggggtcgtgccctgcaaagcggaagctggatttggatttaggggggaccgggcgttgtaagcctcctcacattcagaagcgcggaggaggaaggagaagagatggctcagttgcggtggagtggatgtgccgccgtgccggcgctgaggaagaaaacgggcgggcgaaaagattggtgccactagattggatcttggacaaggaggaggaagagaaggaggaggaggaggaggaagagatgctgcagcgggcagcgagcaatgcatattcatggtggtgggcaagccacatccgcagcaaacagtcaaaatggctcgacaaccacctccaagatatggaacacagggtgaagtgcatgctcttgctccttggggaggaggctgattccttctcgaagagggcagagatgtactacaagaggcgacctgaggtgatcactcaggtggaagaagtataccgtgcatacaaggctctggctgaccggtatgacatcatgtcaggggagctacacaaagcaaaccacaccattgccactgcctttcctgaccaagtccagtatgcaatgctggaagaggaggaggacaacatcccaaaggcgttcaccccagtggatccacgcaaaatccacaagtcaactgtcgatgggttgatgatgaagaagaataagaagaatcctgggcggtccatggacgatggaggagaaaagaccactcctctggtggcagtcagtaaggagaatgcacgggaagagatcagcaggctacagaaagctatactggtcatgcagactgagaaagaatttatcaaaagctcctacgagagtggcatcgcaaagtactgggaccttgagaaggagatcaacgacatgcaggaacaggcttgccacttccaagataagtttgatgaaagcgccgtgatcgaggatgacgaggccagagccctgatgacagcgactgccctcaagtcctgtgaagacactatcgtcaggctgcaggagcagcgcaaggcatctgcgcagcgcgcggtgggagaatcggaaagggtcagggttctaagagacaagttcgaggctataatgaacaagcatggcagatctctaccagctgtttctctggaggaggagagaaacactcgaaagaaccactgcccggaggagacgatggaaagtgtccatgtcaaacaagaagttgcggtagacatagtagctgacaagatcaaggaacactttgagaggggctgcgacatctccatcgcacaagtcacagagaggatcgatgaagtcgtcaacacggtcgttgacttggagctcatggtttcatcacaaacctctcagatagaccggctttgtcaggaaaacaaggagctggagagttccctgcaaagcctggaggatggatcagcagatgaactgaccgagaagcttatcaggcaagcagaagaggagcttgtcagggctcaggctctcgaaagctccttccacaaagacgagagcacaatccgttccaatttcgtagaagcgataagcaggttccatgacgtgtcggagttgctgctatcgccagtttgcgattctgcacacacgtcccatgacgtgccggagtcgtctatggaggagattgctgaacaaccccatgcagaggcagacaatgcactcgtggcagccaaaagtgaatcatcatcatgcatggagatggagcaacagctcgacgttgcccaagacaaaatttcatgtgacgatcatgggacctcactgcttgaggacgccaagagaaagcttgcagagatggagcaaaagaaccaggattgcctgaatgaaatccgggcactccgagaacaaatcacgagctgctcctgctctcgccggggtcacaggaggagaccttccatttcaagtgacgcctccattagcctgctcaagggcccgacgctgtcgaccatcgctgagaacgcctcacctctccaagacaagttcagaagggacatagacacgctcttggacaacaacctggagctgctgatgaagttcagctcgtcgctacagcgggtgcaggagttccagagcaagcacgacggcttgcagcacctcatcaaggaccaagacggcggcaagcaggacgggacgacggagaagcagctgagggccttcaagacggagctgcaggtgtggtcggagcagaacgcgatgctgcggggggagctgcagtgcaggttcgcgtcgctgtgcgacatacaggaggagatcacggcggcgctggacgaccaataccaggccgccaagttccagggggagatcctcaacatgcagcaggagaacaacagggtgtcggacgagctgcaggcggggctggaccacatcaagggtctccatgcggaggtggagcaggcgctggccaagctgcacaagagcgtcagcctgccgccacagcaagcaggggacgacggcggcggcgactccagctcgcctgcccatggtggcagcagtagcaacctggggctcgtaccttccaacaagtccaatgttccgttgcagtcgttcctcttcccggccaagcccaccccggccaagcccaagaagacgtctctgctggcccgtgtcacgccagtgctcccgaagcagccggtggacatgaggtttctggccaagctgccaaggtag

SEQ ID NO: 23079 - DNA, 567 bp, Zea mays
  Peptide Sequence Number=SeqID_64858
atgggcggcatagccggcggaggggcggcacagatccgggccgccgactttggtggagaagcccctggtcggtacctcgacgactatgtcacggctgccaccatggcagcgcatgactcaagcgacgaggaagaggattttagcagattgggagtaacttatttagtggcatacgcagcttatcacatgcaaaatgtgcctcccaatgaacaatgcgaaatgcagaatacatacctccgtgagaagggtgacagagaccgaaaagagggagtgagccagggaagcggggcgacgggcgagcagcgccgcagcagagcaggcgaggggggagggggccaggccaaccgtgggccggcggcgtcgggtgagccaagggacgcgggtgcccagggagcgggggcgactggcgagcaccgagcaggagaggcgagggagcaggacaaggcggcgagcgactggcgatggcgagggaggcggaggcggcctgggtgcctggcggaggacggctgtggtcggagcgtatcagcagcctgcactgcgcttgagcctgaaggcgtgggaggctag

SEQ ID NO: 23080 - DNA, 1323 bp, Zea mays
  Peptide Sequence Number=SeqID_64859
atggcggcgtttgggggggtgggctgcgggtgcggttgcgacgacggattgatcggggtgtgcgcggccgccattgctgacggcggattgatcggccgaaaacctctccgagcatcacagcgaggcaggcaggcatcacaacgaggcgtcagcgcaactcaggcaaacaacggaacggaaaccccggccgtcactgcgccagagctggagacagagatcatggtgcgggcatgggggcggcggacggcgctgcctccgctcctcatccttggcctcctccgcctgcactactcctcgctggtcgtcgcccaagaaggacaagaaaaagaccctgctactttgttcgcacaagcctcagggatgatggacctgaggaagtatgatggggcgcttggcctgctaaatgctgtgttggaaattgacccaaatcattctgaggcttataggcagcgtgcatccgtgcttcggcataaatgcagatacgaggaagctgagagggactataacaaacacctggagctaagtcctgggtctgcttcagtggtgaaggaattatcccagcttctgcaggctcaaaattcattacaatctgcttatggccaattcgattctggagacttctcaaaagtcgtggaatacatcaacaaaattgtgctggttttttctccaggttgcttaaaggcaaagcttctcaaggctaaagcattgctagcactgaaagactactcaagtgttatttcagagaccggattcattctaaaggaagatgaagacaacttggatgcactgctattacgtggtcgtgcctactattaccttgctgatcatgatgtggcctccaggcactaccagaaagggcttcgtcttgatccagagcattccgaattgaagaaagcatatttcgggttaaaaaatcttttgaagaagaccaagagtgcagaagataatgctgccaagggtaagctacgtgtgtctgttgaggactacaaggcagctctagcaatggatccagaccatactgcttataatgtacatctttatcttgggctgtgtaaaactctggttagacttgggagaagtaaggaggcaatcagcacttgtacggaagcactgatcatagacagtgaacttgttgatgcgcttacacagagaggtgaagctaaacttctctcagaagattgggaaggagcagttcaggatttaaaagaggccgcccagaaatctccacagtacaatgaaaagctattgctagtgcaacataaggttgaaaaaggcgctgtagttttgtcaaggcagaaaagttatgcatcaatggccatgtaa

SEQ ID NO: 23081 - DNA, 630 bp, Zea mays
  Peptide Sequence Number=SeqID_64860
atggcggctctcggcccccttacggaagcaagaggacgtcagcaaggactcgacagccccgacagctgtccttccgccaggcttcagcgctcctccgacggccacgacaccacacgaaacgggtgccaaaacctctccggctgccacgatggcatggacctcccggtctcgaaacgccgacagttgacgcgccaggtaggggagttccccgaggtccgcgactgcttcatgatctacggtgggcaagcggcgaacgcctcggctcggcaccgcaagcaagagcgtcgagaggtctgttcggtgaaggtggcggcgccagtctacctagactggtccgacaagcccatcaccttcgaccaagccgaccaccccgaccacgtgccgagcccggggaaatacccgctcgttgtcgaccccgtcatcggcgacgtcaggctcaccaaggtcctcatggacggaggcagcagcctcaacatcatctacgctgagatcctcgggctcctgcgtgttgatctgtcctcggtccgggcaggcgctgcgcctttccacgggatcatccccgggaagcgtgtccagcccctcggacaactcaaccttcccgtctgcttcggaacgccctccaacttctaa

SEQ ID NO: 23082 - DNA, 1302 bp, Zea mays
  Peptide Sequence Number=SeqID_64861
atggaattaccactagacgtgcaaggcggtggaagccgtctcgatgtagacaaacgcatcgagcagtaccgtgcagtcgccggtgtccttcacgtcctcgtgtggttcgtcctagtactccagatgcagcacctccaaggtgttgatttactgaaaaatgtccatgtgcaagcaatcgtcgggccacagacatctactcaagctaaatttcttacagagcttgggaacaagacatcagttccaatcatttccttttctgcaaacagcccgtcccggtcatccagccagaccccatatttcatcaggacagcatggaacgactcctgccaagctgaagctattgcctcacttgtccagaaatacaattggagggaagtcattcctatcatcgaggacgatgattccaacactagatttatccctgatctcgttgatgccctgggacatgtcgatactcgtgttccgtacaggtgcaagatccatccttctgctggagaagatgagataaagcatgctatatcaagcttaaaagaatattggacaagtgtctttgttgtgcgcatgtcatatcagttagcccttaagtttttccagcttgctaaggatgagggaatgatgggccagggctttgtctggattacagcatatggtttgacagatatcttcaatgtagttggttatcctgcacttgatgtgatggaaggtgttgttgggattgagccttatgttcaagaaactgcgaaactaaacaaatttaggcaaagatggtgtgagaaatataggtcagaaaatcctggtacatcaattaatgagtctataacgtctggtctgtatgcgtatgatacagtatgggcaatagcattggctgcagagaaggccggatatgttaattctgattttgtgctatctgaaacaaacaatggttccactgatttcaacaaaataagtacttctagggctgctaaaaaatttcatgctgcattcttggaggttaatttcacaggcattactggccaatttgtcattcaagatatgcagttccacagttttataagatctgaagatggtatccccaagggtttctgcattgacatatttgaggaagttattagtaaactgccctacaaagttcccaagcactatgtggagtttggaaatggaaaaggagaaagtaatggaacttatgacgaactcgtctacaaagtttatcttaaggaatttgatgcggtagtaggtgacataacaattttagccaaccgttctctatatgtggactacactctcccttatactgagtccggg

SEQ ID NO: 23083 - DNA, 276 bp, Zea mays
  Peptide Sequence Number=SeqID_64862
atggctactgttggtaccccaatactggggtacccactcctgctggatctaggcgagacccctatggttgtccgtagccatggggtgacgggagccgccaggcatggcccgttgcgtgcttctggtgtggggaccacccgtattgaatgcgggcaggatacacgcatctccacacttgtggtcggtagcatgcacagtccgcaaagcatgggccacgctaataacccacacattactaaggcaataccattgactcgctgcgtcgcacatgggtga

SEQ ID NO: 23084 - DNA, 141 bp, Zea mays
  Peptide Sequence Number=SeqID_64863
atggcccggttggttcatgatatgagggtgttcaatgaggcaaatcacaagtatggccacaagttcccacgtccacctcaaggtaagttctatcttgttgactcagggtgcccaaatcggctgggttgttttgcaccttaa

SEQ ID NO: 23085 - DNA, 525 bp, Zea mays
  Peptide Sequence Number=SeqID_64864
atggatatgtacacaggttcaaggtgtggtacaagaagggctgaattctctcattattcttgggatctggaccttatggacaaggagatgagggagagcagcaggcagcagcagagcagaggaactgaggaagaagaagagcagaggaaacatgggtcaaaaagagagcgcaagttcttggctccagcagaaacccacaatctcatctcgtctttaaatccatcctctagtggggccttcctgggctttaggtactcgactactcgcttttgcttcgaaccagcgctggaggccgcccatccacttgttgtcgctgccctcgacagcccagatccatccactgccctaactgcccctcacagtgaatcacctctgcggctgggactgggagtgaggggtcccaaccactcccactgcgacgtagaccgtcggcctctgcgctgcgcctcacctctgcggccactccgcaagaccagctcaaagatcagtcatgaaggcttatgtgtgaacttattctatatttga

SEQ ID NO: 23086 - DNA, 258 bp, Zea mays
  Peptide Sequence Number=SeqID_64865
atggaggagaagcaatggagacaagaagagtacgtcagacggcgtctgcgcacggagacgagctcgttcgtgcgcaacccggggctgtgcactgcagagcgtgcccccatcgtccgtcagcggcgcgcggtcgttcttctggctaggacggcgggactcgaagaagctgctggtgtggctggtcatccgcctcactctgctgatcctggtggtcctctacaaggtggccatggcgaatggaaagctggtcggagctaa

SEQ ID NO: 23087 - DNA, 288 bp, Zea mays
  Peptide Sequence Number=SeqID_64866
atgtgtgatgatgtccaactatgtaatcgctgtgtacatggcccgtcttacatacactgcaccggggtagctgacggcctcgacctgaagtattacccccgccgctcgactggcagtaccggaggcgtgattgtctcaccagttggtgtgggcaatcccagattgagcagcatggtcaacctggtcgttgtgctcaacactaagctagaccatgcccttgacgagttgggcaaggcttgggtggagattgcagaaatgtgtgttgagcgtgcagagcgccgccattag

SEQ ID NO: 23088 - DNA, 669 bp, Zea mays
  Peptide Sequence Number=SeqID_64867
atgcggtcgaattccgctaggtctgttgagattgccgcgccatccgcggggagggtgaacctagccacccgatcccacgcacaagcgaggagggagatcagtcaagcggggtccacagccaacgcgcaacggcccctggtggccggaccgattttggtgcgatgtctccgccggctccctcgtaacaaacaggacgagcttgatttgggccctcaggtcaggatgatgcacatgaagaatgtgtcagtgccagggggaggagatgatgaggaccctcctcgccccttcaggcaggtcaagggcaagactgtgtacttagagcagcaggaaggccgcaagaagcagcgtctggatagagcagctcgagcagctcttgcagtggcagcggcaacagagcagggcaccctcaaggcctcacgcctccagtttggatcctatcgtccaacccctgaggacccaatgcctataccagatccagtgctagacactcaggctgaggatacggtgttccaccagtttgagacccagggcacagctatccctgatgatgatgttgatgatgattttgggatcccaccttcgcctcctgtgcctccatgctcacatgatcacgaggctgggagtccagtgctgcccctactacccctcctgctgttgaccctgctctag

SEQ ID NO: 23089 - DNA, 633 bp, Zea mays
  Peptide Sequence Number=SeqID_64868
atggacatgaaaatcactttccttaatggaccaatcaaggaggaggtgtacgtggagcaaccccctgacttcgagtatgataggatgcaaaacccatcaagacatcgatgggaagaaatgaagatgaggacctcaacgggggagccggtggccctgctggacagcgtcacttcccactgggacctattcgtcagaggcataccggatccctccgtgcggaccgcacccacctcgcgcgagaagctcaccggagatctcggagctcgcaagaccaccgagcacctgcacatcttaaagccacgtccccatcacctgaagcccttgaccatcttccgtcctctagaactcaaaagggccagccgccattacctgggagagcttgaagggggcaaatgggtggcgccacctcaaaaccatgggaaacaccaccatattcgcaagtgcttggacggggagatcggcgggctctggtcgcaaaggttcaccggggtagcatcaattgctcatcagactcaaaggaccacggtggatccgcccatcgccgcgaccagcaccaatcaggcgtccatccgtggtaagatgtataccagcgtgttcgtcatattccgtactccgtataaccccgagtcgtga

SEQ ID NO: 23090 - DNA, 987 bp, Zea mays
  Peptide Sequence Number=SeqID_64869
atgaacaacctcctcacggattcctttgagctccctcggcgggactcctcaagagacgcagatattgaaatgggaatgcatcaggctgatgcttcagacaacttgaaagatttcttgaagaagactgcaaatgaggaatccaaagcagttacaaaagcaagttccatgaaagaaattgcctctatgcttatggttagaagcaacaattcttttttcacagcaattaagcagcggatggagaaagatattgatgaagtggggaaaattgctcgtcaggcaaagacaaaagttgatgaactggaaagagataacctatcgaataggcaaaaacctggatgtggaaagggttctgccgtggaccgatcaagagagcaaactactggagcagtgaaaaagaaattgaaggaacggatggatgattttcagaagggcttcaagtttgtaaatcattgtgaatatctgccgattgccgacaaaattatggagaaaattaaaatatattgtttgtatcataccttgagagaagcaatcaggcaagagtatcgagaggttgtcgaaagaagggtttttactgtaactggtaatcgtcctgatgaagagacaattgatgacttgatagagaccggaaaaagtgagcaaatattcaaagatgctatccaacatcagggaagaggccagatactggacacagttgctgaaatacaggagcgacatgatgctgtaagggatctagagaggaagcttttggagttgcaacagatatttatggacatggcagttcttgtcgaggctcaaggagacatgatcaacaacatcgagacacatgtctcgaatgccaccaaccacatacaacaaggcgtgagcgcgctccagaacgcgaagaagctgcagaagaactcgaggaagtggatgtgctacgccatcatcttgctgctggtgatagtggcggtcattgtcgtcgcggtcatccagccatggaagaagtga

SEQ ID NO: 23091 - DNA, 3660 bp, Zea mays
  Peptide Sequence Number=SeqID_64870
atggctgcttcgccctcgccgtcgaccgcgaccgcgaccgcttctccctcagcgtcagcggcggcggtcttggctgtaaacggggagcgggttgagctccgcgagggggacgtgaaccccggcaccacgctcctcgagttcctccgcacccgcacccgcttcaccgggcccaagctcggctgcggcgaaggcacgtcaccccgccctcctcctccctctccccgcgctcttccgtttcgcggatgcggcgcgtgcgtggtgctcctctccgcctacgacgcggcttcgggcgcggtgtcgcacgcggcggcgagctcctgcctcacgctggtgcacggccttcatcaccgcgccgtgaccaccaccgaggggctcgggggcggcggccgcctccacgccgtgcacgagcggctcgcggggtttccacgccctcgcattgcggctttctgcacgccccgggggtgtgcatgtccctcgccgccgcgctcgcggggggccgaggccgaggccaaggccaaggcggggaggaggcccgccccacccgaggggttcgcgaggctcacggcggctgaggcggagtgggccgtggcgggaaatctctgccgttgcacggggtaccgcccgatcgccgacgcctgcaagagcttcgcggctgacgtggatttggaggacctgggcctcaactccttctggaggaagggggacgcccatgcttccaagctgccgcggtacgacgaggggagcatcggtgtgttcccggagttcctcaaggctgagatcagagcttcttctggggttgaccagtacacaccgccggcattgctgggaagtgccaccacttggcaccggcctcggagcgtggaggagtactataagctggtagattctgagttgtttgaccaaagtaaaacaaaggtggttgtggggaacacagcttcaggcgtttacagagaaacagaggtgtatgataggtacatcgacctcagatgcatcccggagctgaattcggttagtaaggaagccaatggtgttcaaattggagctgcagtaacgatttctcaggcaattgagattttaagagtagaagctggtggctgcaatgatgtaatcttctgtaagattgctgatcatatggaaaaggtggcgtctccatttgtccggaacactgcaagtttgggtggaaatttggtgatggcacagagggaccagtttgcctctgacatcgcaacgatccttcttgctgctgggtcatcgatatgcatccaggcatcatcaaaaaggttgactgtcatgatggaggacttccttcagatgccaccttgcgatcacaagacactgctattaagcatttgcattcctcgttggactcctattggtggcctattttctggtgataaaaccatggctgggacagaaagtaagacaggaacttctgtgctgtttgagacgtaccgagctgctccacgccctcttggcaatgcagttgcatatcttaattctgctttcttggctcaggtctcttcagatggaacttcaagcagattaatattgagagagatatgtctggcttttggtgcatatgggagccaacatgccatcagggctaggaatgttgagaaactgttagtgggtaaacctattactacatcggtgctacttgaagcatgtagacgtctcaaggaaacaattgttcctaaagaaggcacaaggcatgctgcttataggtcaagcttggcagttgcctttctgtttacttttctttacccagtaactgaaggaactttgaagactgtaaaggaagttcatcttaatggctatgcaacttttggcaccaatggaaatccaaattgtggacccgatgcacatgttgatgtttcacttaaaaaggtcattgatgtgaactccggttcatgtaccaatgaacgcattcttgaatattcaaatcagattattgaaatcaataaagactatttccccgttggcataccaaccaagaaggttggagcagaactccaagcctctggtgaggctgtatttgtggatgacatccccgctcccaaggattgtgtttatggagcatttatatatagcacaaaacctttagcccatgtgaagagcatagaactcgacctttcactcaagcagcttaaaacgctgggagtagttactgttaaggatattccagaatgtggcagcaatgttggggccaacactatatttggacctgaacctctgtttggtgatccagttactcagtgtgcaggggaacctcttggtgttgtgattgcagaaacacaaagatttgccaatatagctgcaaaaaaagctgttgttaactacagtactgagaacttagatgctccaattttatccatagaggaggctgttaaaaggtgcagttatttcgaaaccccgccgtttcttcttcccctgaaaattggtgatttctcaaaaggaatggcagaagcagatcagaaaatctattctgaggttaaactcaattctcagtactacttttacatggaaacacaagctgctctggcaatacccgatgaggataactgcatggtagtgtatagctcaagccaatgccctgagacagcacagaatgtcattgcaaagtgccttggtttaccttgtcacaacgttcgtgttattaccagaagagttggtggtggatttggaggaaaggctgttagatcattacctgtggcaactgcttgtgcacttgcagcatttaagttgcaccgtcctgtccgtatgtatcttgaccgcaagactgacatgatagtgactggaggaatgacaaaagatattagcctcataatccctcataatttcattgaggcactgaagaaatataattggggtgccttttcttatgaagcaaaggtctgcagaacaaaccttgctacaaagtctgcgatgcgggggcctggagaagtacaaggttcttatgttgccgaagctataattgagcatgttgcttccacgctctccgctgatgctaatttggttagacgtaaaaatcttcacacggttgagagccttgctttgtttcacagtgagtgcactgaagatgccatgggttatacacttcactctatatgtgatcaagtgactgcatcagaaaactatcagcatcggcttgaaataatccagtctttcaacaaaaacaacaaatggaaaaagaggggcctctcttttgtgccaatagtacacaaagtattatctcgaccgacacctggaaaagtgtctattcttaatgatggatctgttgctgttgaagttggaggcattgagttaggccaggggctttggacaaaagtgaagcagatgacagcttttggtcttggacaactctgtcctaatcgaagtcaagagctgttggagagaataagagttattcaagcggatacattaagtaacgtacagggagggtggaccactgggagtaccacatcagaatctagttgtgaagcagttcgtctcgcatgcaatgtcttggtcaacaggctgaagccagtcaaggagcaatctcaagaaaagcaagacaatgtttcatgggatgaacttatttccaaggttattagtcaatttctttcttacaaactatcttttgaaatgactggtgtgatacgagggtgtcctcctgattga

SEQ ID NO: 23092 - DNA, 189 bp, Zea mays
  Peptide Sequence Number=SeqID_64871
atggaggaggtcgacgaggacatgcaccatgccttcatggtcttctacgccgatgaccacagcctcatcatgctcatcaagctcgcatgcgtcctgcgtagcctcgagggaggtgggttccagaccgacaccatggccaccgtgaacaccctggagagctccacccccgtggtggatgggaagcagtag

SEQ ID NO: 23093 - DNA, 228 bp, Zea mays
  Peptide Sequence Number=SeqID_64872
atggcccatgcccacgatcagcgtcgcgagatctgcctgtcgccgttgtggggtgacgcgatctggacgcagggcagtggttgcaagggtgcatcgcagggcgtttccaaatcggagtacatgtgcggctacagtctcgacgccaccgttagggagcagagggagcggcgcggagcatgggggagcggagggagcgacgccgagacgtgggcgtggggcggcccatag

SEQ ID NO: 23094 - DNA, 1002 bp, Zea mays
  Peptide Sequence Number=SeqID_64873
atggccgccgcggggatgttctgctggtccacaccaagtgcgccgtccacaccaagctcctcgccaacgacttcctcctcttttccatggccgcgagctccgctagacaccgctgtcttcgaccctgctgcgccaacaaggtccacgcgcccaggccatctttctcgcccccatcctactcacatcctccctgcccccgtcctcgacgctgactgttcgaagaagagggaaatcgagcgccagatggccacggccaagctattcgcggaggaacagctcgcagaggttgtcgccctcaagagaggcatcttcgtggggactggttgttttgctgagaaaaaaataccgatcatggagatacatggagccaaatgttatctgatataccagcttccatcgcttgggtttttcttgttggctacctgtaatgaatcagtggttagcaccttctgttggtttatccaaggccggaggaaggatatcaatattatcaaaaaagcatttataagctaccagctcctggcttcagcttcaaccatgcacatatctctgtccgcagaatttgactactcggttgggccaacaattgccagaggaaggatctcaatattcgatggtgtacagaagagtttaccggttgtttcacccatcttgttattcactatcttgatattcaccatcctgatcagaatgtggccaccaatggccaccatcgagtttttgacatcacacctgagtggtctgaatcagcagtcttacttgtcctatcaggttcaaaatgctgggctggaaactattggactaagaccggcaaattctccaagtctgtcaactaattcaggggtttatgagcaattcatgcagaagtaccatcaaccacagactcaaaattcacttaggttgcaggcatcttcagatcctcaacagtacaaggatcagagccaaaaatccgttcaaggaacacaggctgtgctggatccatatagcttacttggatgttga

SEQ ID NO: 23095 - DNA, 1458 bp, Zea mays
  Peptide Sequence Number=SeqID_64874
atggggcagaggcagagccacagcaagcgggacgggagcagccacgggcggcggtcgcgctcctttcagcagcagccgtcggcgcagtggggcgccggaggaggagggtactaccagcaggacccaagcaccggctactacggcgcgccggtgccacaacagggaggagggtactaccaacaggacccaggcaccggctactacggcgcgccggtgccacagcagggaggagggtacgccgcgccgtaccgggacaagcccgccgccgccgccgccgttgctgctccggcgccgcaggctgcgaagccgcggcagctggatcgccggtactcgcggatcgccgacgagtatcactcggtggaccaggttactgatgctctagctcaagcaggacttgaatcatcaaatcttattgttggcattgatttcacaaagagcaacgagtggacaggcaaattctcgttccatggacgcagtctacatcacattagcaacacaccaaatccgtatgaacaagccatctcgattattgggcgaacactatcgaaattcgatgaagataatctgattccatgtttcggatttggagatgcatcaacacacgatcaagatgtcttctgtttctctcctgacgagaaaccttgtaatggatttgaagaagctctcgatcgatatagggaacttgtaccacatttgcgcttagctggaccaacatcctttgcaccaattattgagatggctatgaccattgtggagcaaagtggcgggcaataccacgtcctattgataattgcagatgggcaggttacgaggagtgtagatactgcatctggacagctgagttcgcaagagcaaaaaactgttgatgccattgtgaaggccagtgaattgcctttgtccattgtgttagtaggagttggtgatggcccctgggacatgatgaaggaatttgatgacaacattcctgctcgagcttttgacaatttccaatttgtaaatttttcagagataatgtccaaaaacatggcacaatcaaggaaagaggctgcatttgctctttcagcattgatggagataccaccacagtataaagcaaccgtggaattagggattttgggtcgtcgctctttcaagtctcctgacagggttcctctgcctcccccttccggaagtcatggcgcttattcctactattcatctaaaggatttagcaaaccgagcacctaccctcagagttcttcatcctcatcaccctatcctcactatgaaactccacatacagccaccccagctgcgccttcagccacttatgacaaccaggtctgtcctatctgcctcgtgaaccccaaggacatggcgtttggttgtggacaccagacctgctgtgactgcggacagatcctggagtcgtgcccaatctgtcgcactcccatcaccacaaggataaagctatactag

SEQ ID NO: 23096 - DNA, 579 bp, Zea mays
  Peptide Sequence Number=SeqID_64875
atgggcagcttccacttccagagctgtgactcgtactcaaatccaagtgtgcgatgcgtgcgccggaaaggcgaggagcagcctttattttacgtggcagccgccgtgggtgactactgcctctgggctctggctggctattgtggaatatacttttggtcttccacggctcgcatcgcctgtggcgccgaggtaacacagctcgacgccataggctatggcgccgagcatccctcgttttttttaccgttgactcgctcattatcatccgagcccagaacccgtgtaagaccaactccagcaacactccgtatcccactccgcatccgcattttgcacggtctgaggcactattgcgcgctccagcaggctccgcatccctctccgcaaaatggacgccgtgtccctgcgctccccatttctacactttctctctcctctccgcagctctctgcgtgcgcgcgcgcctgctggcgggccccaggtgtcatagactgcatgcggagtgggatggggagtgttgctggaaacggagacggatacggagaggagagagaatgtgttggccgcgcgttttag

SEQ ID NO: 23097 - DNA, 261 bp, Zea mays
  Peptide Sequence Number=SeqID_64876
atgcggccaagccggccgctcgcgcgaccacaacggctggcggcgcggccacctcctgacggcacagcgcgcacgacgaacgaggcgcgcagggagcaggcgcccccccctagcgcggctccccatggtggcggctgggacttggtccctggcggctgtggccggctaaggggcggtggccctaaagctacatgctttggatgtgtggggtttgctgcgttctcagtggcaattgagaagttctttgatcggcatacttga

SEQ ID NO: 23098 - DNA, 279 bp, Zea mays
  Peptide Sequence Number=SeqID_64877
atggctaggttgactgtgctgctcaacctaggattgtcctcaccgacagctcgagctgctgtcgccacctctgtcgccagggtctcctccgacagctactccagcggctggggcgctcagtggtggtgcggggcgcatccagcgggagcacaggggagcagctcctcacaaactctatctcctgctgaagtgagaaagaagagccctactgctccagctcctgtcatcgacgctcctgctcctcgtgcaggcggtagtgtagcctctccaaatgcctag

SEQ ID NO: 23099 - DNA, 201 bp, Zea mays
  Peptide Sequence Number=SeqID_64878
atgactggtgggattttcttttctgttgaaacggacttcggtagaagcagggaaatcggccggacctcaacgaaccccgcgattcctccggctggggtgctcacgcgaggaaggagatcccgttttatcccaatttcaaattcgaaagttaaatttgattcaaagttcaaggtttccaagattaaatgcaccaacaaataa

SEQ ID NO: 23100 - DNA, 573 bp, Zea mays
  Peptide Sequence Number=SeqID_64879
atggccgcgctgcgcgccagggcaggggccacgctgcgagtagccgcgccggaccggagccgaggcaccgcgcgccatgggcacagggaggagggagatgccgaggagggggaacggggcaggctcacctcagggagcaacgacggcacggatgggctcggtggcagtggtttccgcggctgggcgatggggaggagagagggaagcgtcgggcgagcgaaccgcgtggggggcagagagaaatgcgcgtcgtggggagagggagatgaacaggggcgatttgaggagcttacaggcgggccccaccggatggcggcggcggctgggcaaccgccctgcccgcaccagccgggcgagctctccgcgccccatgcgctggcggttgggccgcctagcaggccaaaagcgagggggggaagggaccgggcgtgggagctaggccacgccagagggaaagcctgcgggctcgcgtggggagagagtcgttgggccacgcggggcattggccaggtgggccgcgaggggggaaagaatcggttgggccgaaaggggggaaaaggagagagggggtag

SEQ ID NO: 23101 - DNA, 708 bp, Zea mays
  Peptide Sequence Number=SeqID_64880
atgggttcttaccagccgcaatggccccggattccgcgaccccggcgctgcgacgttgtcggcccacggaagggaatggagtcgcggcggagcttcgactccggcaagaaattccctcgcgcaggacaccaatcagccgaggcgagctcccaatcatacccagcatggcccgacgatgctcccgcgcagtggatttggttccttggtgggggctggtggacaatcggcgttcaaccgcggcagaaatcctgcaactctacgacggctcgctcgtggttcctcctgttggttaatagcggactaggagaagagaagagcacgactttatgggcgagattaatgtccgagttggccgaactaggtcatgttgtgccagttaaggctagtacaaacccgaccgaagagccaaaattagagaaggcagcacatgagttgaaggtgttgagcccaccagttttccaaggcttaattctaagcaaggctttgaaggcccagaaggatgaagaggatgagagctacctcatagctcttgggaatctgcgtttagtagataaactgaaatctaatgaggccaagcttgctgcccaagccgaagctcacaaagccgaagtacaagagctaaacaggaaggttgctgaagcaactgaaaattttgaagttgaagtggtgaagcatgagatatgcaaaatcgaaagatcaagagcgtag

SEQ ID NO: 23102 - DNA, 273 bp, Zea mays
  Peptide Sequence Number=SeqID_64881
atggagaccgagcacgagaacacagaggggaacatgggtgctgaggagctcgactggggaggcgcatgtatgcacctactggaattatcacattcgcgctggggcttttggtcaaaaccttttcaattccttattggggttctaatatctcggactggcataatatccaagacgctgaacattgcactgagaactcatcatcctaaagccacagatactccagtagatatcgtcaaagcacgcacgctccgaaagatcccagccgaggactaa

SEQ ID NO: 23103 - DNA, 621 bp, Zea mays
  Peptide Sequence Number=SeqID_64882
atggatacaaggagagagcgcagcgctgggtgcgtaggccgagccagcgttggggcgagtgctggccataggaaggatgccggccaggacgagcttgagggcacgacggctgagcctcccgggcgaggatgtggagaaccgacgcggctgctagttggcggtggtcggctaggcacccatgaccgggcagggaggagagcagcgtgcttgagggagacaagttggaggggcgcggccatggcaagggagatgggagggactcggccagccctagggaaggagatgcgggaggccgaggaacaaggacgcgggatccgtggccgggcagaacccgccggggcactggccagaggactgagcgatgcggccagggcggggcgagagatggcgcggccatggataaaagcaagagcaaccagagctgcgcgacgattagagcttacggcgatggggcgcgcgccggcgagctggagcaggagagaggaaggtctggcgtgcggcgagcttgaggaagacaaagcgcgcaaagaatatcagggaggagcgcgcggctggaaaaggggctgggcgcagggaggactggagggagctcagcacgcaacgcaatattttgagaattaa

SEQ ID NO: 23104 - DNA, 384 bp, Zea mays
  Peptide Sequence Number=SeqID_64883
atggtgtcatcacacttcttctcgagtctcgactatgtctggcagcacagcgtgcgtgacccgcgggacgccctcgacgttgacccagatcaggctgcgcatcagctcctcgtccacctcatagaagtagcgggcgtatggctaagacagctcgtcgtggtcgtggatggagtcttgagcgcctcgacgccggccacgaatccctcgagatccttgcaggaggcgctagcgtcgaggaggaggcgaagggtgaaggtgagggaggggaccaagggggatctgtcacggtggggcaggggggctaggaggccggggcaacacacgaggcaggcacaggtgggggccaaagtggagagaggcgagaatggtgggcgtttggcatag

SEQ ID NO: 23105 - DNA, 459 bp, Zea mays
  Peptide Sequence Number=SeqID_64884
atgccgaggcggttggatgcggcggcggcgccgaggctaggaggacagtcgtgggctcttggcgtagtggctaggaacgaacgccaaggcaaatggatggatgacaacgctgaggtagatggggacggcggtgccgaggcagttggattttgcggcggcgcccgggcgaggaggacggtcgtgagatcgcggcctcgtggtgggaaggaatggattagtttaggatcatgcaatggtagactgatagcacgggcaaagaggaataatcgtcgtcgtcacaaacgaattgcctacggagtcctcatccctggtggcagcgcccacggccccggcggcggctgcacaacaggccccccgatgatgtgtgatgtgaggaggagcactagatctgcgtacctgcgtggaggaggaatctcagccggcaacaacgatgccaaattcacaaggataatagcgtag

SEQ ID NO: 23106 - DNA, 531 bp, Zea mays
  Peptide Sequence Number=SeqID_64885
atgggcctcctcgatcagctctgggacgagacggtggccggcccgcgaccggactccggcctcggcaagctccgcaagtactcctccttctccccctcctcctcctcgtcgtcgtccatcctggctcccgcgccggcgccggcgccggcggtgacgcgcagcatcaccatcgcccgcccgccgtcgctctccgtcgagtcctacagctcctcctccgtcccgtcctccccggccagcacgcccgactcgccgctcgccgcagctaccccgcccaaggcggacgtctggaggaggttccgccggaaaaccaaggtctccgacgggccggagccggccgtcgggcccaggagccccaccgtctacgactgcataagtagagagtatgtcgatgatgatgatgacgacgacgaggatcagttcgcggcggggaggtccacgcctcaccgctcaccggccaccgcgcctgagtttgggccctggaaccgcggacgccggagcctcttctgggtcgtctggcctagcctaggctag

SEQ ID NO: 23107 - DNA, 1890 bp, Zea mays
  Peptide Sequence Number=SeqID_64886
atggcggccgcctccaccgccaccgccgcctcgcactcagcctccttccccgcggcctccctccgccacgacgcgcgcaggccctcctgcgtagcccccgccgccgccgcggcgacgacggccgctgagacggggctcacggccgtcccggcgccgccgccgacgccgatgttgcgggtggtgccggagtcgctgcagcgggacagcgggtgcctcgtggcgggcttccgggagcgcggcgcgggcgcggcggatggggaagggttcggggacgccgtgggggaaggaggaggccccggtgcgatggagtacctcaccagcgtgctgtcgtccaaggtgtacgatgtggcaatcgagtcgccgctgcagctcgccaccaagctctccgatcgccttggggtcaacctctggatcaagcgcgaggacctgcagccggtattctcgttcaagttgcggggagcatacaacatgatggcaaagctctcccgtgagcagttagagaggggtgtcatctgctcctctgctggaaatcatgcccagggcgttgctctttccgctcagagactgggatgtgatgctgtcatcgtcatgcccgtgacaacaccagaaatcaagtggaaatcagtggagaggttgggtgcaacagtggtccttgagggggactcatatgatgaagctcagtcatatgcaaaattgcgttgccagcaggaaggccgcacatttgtacctccttttgaccatcctgatgtcatcactggacaaggaactatcggcatggaaattgttaggcagctgcaaggtccactgcatgcaatatttgtacctgttggaggtggtggattaattgctggaattgctgcctatgtaaaacgggttcgcccagaggtgaaaataattggagtggaaccctcagatgcaaatgcaatggcattatccttgtgtcatggtaagagggtcatgttggagcatgttggtgggtttgctgatggtgtagctgtcaaagctgttggggaagaaacatttcgcctgtgcagagagctagtagatggcattgttatggtcagtcgagatgctatttgtgcttcaataaaggatatgtttgaggagaaaagaagtatccttgaacctgctggtgcccttgcattggctggggctgaagcctactgcaaatactataacttgaaaggagaaactgtggttgcaataactagtggggcaaatatgaactttgatcgacttagactagtaaccgagctagctgatgttggccgaaaacgggaagcagtgttagctacatttctgccagagcggcagggaagcttcaaaaaattcacagaattggtatgccatatgagcctccggtgctccagcgtccgcctctcctttccccctcatggctggcggctcctgggcagccatcactgtcggcgcagacgtctctggcacgctcgcggggcctcatcggcccttggtgcctccatcgacatcaccgccacccactccaccttggttgtgaccctcgccactaccaaggccgttgtggctgctgtcgggaaccgtgaacgtgttgcgacccttgcttgggagcatgagcgcacaacggtggatgccatcgcctctcagctagctaagcgttatgccctcgacgaccacatcctcgccgacaccgttccccacctgctcctgtcctggcaccggatggacaacatggtgctcttgtggatcctcagcaccctcaccgttgagctcgaggatgttgtccgcgagcggagagcaccgctcaccaggcatgggttgcccttgaggcacagttccttgaaatccaagaggctcgcgctctccacctcgatgcctcctttcggctcttctcccaaggggacctcttcatga

SEQ ID NO: 23108 - DNA, 762 bp, Zea mays
  Peptide Sequence Number=SeqID_64887
atgaaggacttgggccctctccaccacttcctgagggtcgtcgtggagcgccactccagggactcttccttggccagcgttagtacaccatcgacattctggagcgggctagcatgtcagaaagcaagccctgcttcatgcttgttgacactcagcacgaagcacgtaaagatcaacctttacttggtccgcgagcgtgtcgttgtccgtgtccttcgtgtccttcgtgtcctggccacttcgcagtttgtagacatcttcaccaagggccgtcgttccacggttggcaggatgaatattactgaattcaaatacagatacgattctaatgcaaaagatgcccttgttctttacagtgttggcatctacactgacaatgagcttggagcaatgatggatcgcatggaatctgcgaaactgaggactgttaaccttactgacaatgatttggcaaaggaccaccttagatactttattggaggaagatcagaaataaaagatgaactggtttaccggttcattttcccggaaaggcctggggcccttatgaaatttttggacacgtttagtcctcgttggaacatcagccttttccattaccgtgcacagggtgaagctggagcaaatgtattagttggtatacaagtgccgccagcagaatttgatgaattcaagagtcatgccaacaatcttgggtacgagtacatgtcagagcacaacaatgagatataccggttgctgttgcgtgacccaaaggtctaa

SEQ ID NO: 23109 - DNA, 408 bp, Zea mays
  Peptide Sequence Number=SeqID_64888
atgggtgtgggcgcgggtgcgtttttcacccacgggtgtgacccgaacccgacccgcaccttttctggttcgggttcgggtttctcacttcacccacgggtgacccacgggtacccgaacatgaacgccaacccattagtatccccagtccccagtctcgaactgctggcccaagcccaactgaccaacaccactacgacagtacaccaccgagacctaaacctaatcccctcccaggtcccagcagccgccagccgctctcttgcagtcttgctcgcaggctcgcagccgccgcccaccggccaccgtaaatcccagcagcccagccgcgcccaggtcctaccggccaccaagttcccaaaatcccagcagcccagccacacccgcgctgcttctgctgagtgctga

SEQ ID NO: 23110 - DNA, 195 bp, Zea mays
  Peptide Sequence Number=SeqID_64889
atggacccttacctcggcgccgtcatcattggcgccgagacaaggaaaaatattgatcatcaatgtgctcaaagcactccgggctggcccatgaacaaggaaaacgcgctcgcgtgtgtgactgcgttgatcaatttggccagagaaccctcaccttttgaatcacaggctcacaatccttgcaccctattctga

SEQ ID NO: 23111 - DNA, 2736 bp, Zea mays
  Peptide Sequence Number=SeqID_64890
atgccgctcgggctggccgctgccgctcccatcggccgacggctctcgaccgcggcccccacgccgctgtccagcctcaccgacgcgctcctcgccacccgcctcgctagccatctcctcaccacgccgcacctgcccgccgcgctgctgccgacggcgccgctgccgctacccgtccacctccacatcctccgccacccggcgctcccgccggcctccaagctctccttcttcctcgccgccacgccgcccgcctccccgcttcttgaatccaccttccccgtcctcctccgcgcgctcgccgcggggtccccgccgctcctcgacgcgctcctcccgttcgcgctctccgcgtccccgtccaccctcctccccgcactcctctcatttctcctctccgcttcgcgcctcgacgccgcgctctccctcttggactccgcgccgccagacctcctcccccgcctcgccgcagctgctctcccttccctcatagcctcccagaacctcagcgccgccgtccccgccatccgcaggctgcttcccatcgcctcgcacccaccacccgtccgggaaacgaaccgcctcctcctggcattatcgaaggagaacctctccgatgacttccgctatgtgttcgaagaaatgtcgaggaggggccttccttcgaatgtaaggttatacaacatttgcatccacgcgtttggcaagtggaggcagctggacatgtcgctggggcttttcgcagcaatgaaggccgccactcctccagttgagccggacatatgcacctataattcagtcatccgggcccttgttgttggtgggcgggtacctgatgctttggtgatctatgatgaaatgaaatcttctggaatcgagccagatgtattcacttatcgagcagtcatgaatgggtgctgcaagagttttcggatggatgatgcactgcgtgtgtttcatgagatgcggggcatcattggggtgagtgacgtggtggtgtacaattcacttcttgatgggctgtttaaagtgaagaagcttgatgaggcatgcagtttttttgagacaatggtggctgatggaatccaatgctcagcaagcacacacaacactgtgatagatgggctgtttaataatgggagggcagaagcagcatgtcggcttttttacgagctaaggaggaaagggcaactgttggatggaattgcttatagtatcatggtgagggagttctgcaaggaggggattggggaccaagttgcagaggctgtagagttggtgaaggagatggagcagcaaggcttcagtgttgatttggttacaataacatcattgttgataggttttaacaagagtaaacgctgggacttggaagagcaaatagtaaagtttataagggacagcactgtattgccggatgccattcggtggaaatcaaacatgatggttgccttgagaggacctcacggcagagagaaagatgggacaccattgttttcctttgatggcaatatggaggatgtgatgagtttggttaaccatgtgggacatacaggtactgatgaagaaatcccaaacagtgatcccaaggatgattggacactatcaccacacttggaccatcttgctaaacatgctgacagtttgaacagctctgttgtatttacaatgcacagagggcagagggtggaaggtatgggccccaagacttttgatgctgacatgatcaatacatacttgtcaatttttttagccaaagggaagttgagtgttgcttgcaagttatttgagatctttacgaatctaggaaacaaagggacaagttatacatacaattcactgatgacctcgtttgtcaagaagggctatttgaaacaggtgtgggcagttcttcatgagaggggtggacagctctgccctaatgatgtagcaacatataatctaatcattcaaggtctcggcctgatggggaaagcagatgttgctaggacaattattgatcggttgtcaaagaaaggtgtttacatggacattgtcatgtataacactttgatcagtcagttgggaaaggtcggaaaggttgaagaagcaggctgcttgtttgagcagatcatcagaagtggcatgaagccagatgttgttacttttaatacgttaattagtattaatgcgaaagctgaccttctggagtctaggcatcttgcccagtcaacatccaagtatgttgtcaaccagtcgatggagctggtgccaatgtggagaatgaaggagagtgtcgttcacacattggagaattcgcttaatcagaccgaggttagactcacagggatcatacatgaagagacaaacttgctgaaccgcgtatgtcaagttggggtgggcaacatcaaccatcatgtactgaagggcattgacgagactctagtagtcggaggcatcgacaacgagagcaccatccgaagtagaaagtttgtctcgagtgtttatagttgtcgtggtggagtgacactcgaccatgcctacacgttgaagaagataatacagaggaaggtgtcggagctggcggagacaaagccgaggcatcgaatagagtcgacactcttcactaatcctcgttggagcaccctcacaagtgtgtcgcttcctcttggtatgtgcaaggatcaatcgctctctatgagctggttcttcgtcactctgtacggtgacccgctcacaaaagtgtataagtcctga

SEQ ID NO: 23112 - DNA, 363 bp, Zea mays
  Peptide Sequence Number=SeqID_64891
atggaggtaccggccaggggcctgatgattggtgaagaagcggccgacgtctggctcaggcaccaccacgcgccaccgaggacgagggggactggaatactggagattggagaaaggtgcctggcggtggcgggtggcggctggccgctggcttcttctaggtcttgcaggttgcagcgtcactcactcacgctcacgccttggctaattggcttggaccattggacgcttcacacaatcacgctcatgggccatggcatattggcatttgtgttacacgtgatgtccaaggcccacttctccactccaacagacgtccagaccaccacggtccatggtgtgcagtcgcagcctcaggcgtag

SEQ ID NO: 23113 - DNA, 1086 bp, Zea mays
  Peptide Sequence Number=SeqID_64892
atggatctatcgattttttatgctaaagagggaacttggtgctttggggtgaagcatccaagtgatacggcaaattctcaaacatacatgtctatatctcttcagggatgccataggaactgcaatcagaaaggtgtgtgtcattcctcagttgatgaaagtgggctgactttctacagtgcttctactcttcaatacttgattttcaagataagattagacaaaagcttctgcacatgtgatcgcgatcatggtggctttgattgcagcgatgagctagtttcccctaatggtcccactcgccttaggctccagagtaaggcgaggaggacgccttacgtcctcggctcaccttaccgcctaggcgacaccttaacaagtatgcttagcgtcctccacctagtgtcgttctacttgaaagctcgacctcccttcaactgcttaaccttgttgtttacttacgcgaagaatcgcagtgtaatgctactgaaatgccttttatgtaagatacccatgctgacgcccatgctacgtccagcggccaccatactcgcccccatccctaaggctccgtccaccccactcgcatcaccctcgcctgtggcccatcccatctccccgacgggcaggaccaagtcccagcgttgggaggacgccagcccgctggttcccagcacagagccacgtgacgaagaaggtccttctcattgctgccccaccaatgaagagttcattgtttttccctttcaagtgatcagtaacatgcctatggatctagacatggaagttctggaggcgattgcgaataatcacaatcttgaagctggggcgttgcatctggtgacagagctatcggtcatggaagaacccacacaaccgttaaagagagccctatcctatccaattgatgtgactgttagtgtcattcttggtttagcaaatgatcctcctaatccaccaccaccacctactgcgaatggagatgatacttatgaagatagtgatcgtcctagccagcgccgccgggggaactcctcgccgcgttctgggactgcttcaagtctcgtgggacagtgccctgtgtga

SEQ ID NO: 23114 - DNA, 363 bp, Zea mays
  Peptide Sequence Number=SeqID_64893
atggccgcggcgcggcggcaggccgcggtgctggtgctggtgctggcgttggtgatgggcgcggggttggcgccgggtccccgcggatgcgctgcgcagggggaggctgtggtggtgtccagctacgggcagggccgcctctcgctcaagccctacgactggacctacctgcgcgttgagctcccgccgtcgttctcttctgtcaccatggatttcgctgctgacatagaccttcagagggagcgcttgaaaggcattccaagaaacaagcttgctattatctgtttgatgaattccaaccctcctattcctgatatatctgattcttatctggacaatttatgtgagtgccacatttcctag

SEQ ID NO: 23115 - DNA, 870 bp, Zea mays
  Peptide Sequence Number=SeqID_64894
atgcggattcgtaggagaacatctcacgtccttggctccggctactctacacctgctactccgcctcctatgcttgtaactccaccaccgatttcggaaccgtgtttggagccgcttacatctcacattcacgacgacttcttgagccctactacaacccgagagagtctctgcaagctcagtcgctcaccatgggacctcttggatgacttgtccctctcggatcctcaggaggtggatgacctccttgatggttactatgtaaacatggactcccatgcatggagcctctcctcggccaccatgcccgtcacctccgtgaagaatgagaagacgacgaccatggccgcagctagcagtgagagagcacaactacagatactgaataagaatacaacattgaaaaaggctacagtgggggagaaaagggtcagagagatccagaaccaaaagactgcaaatgtgaagaaaaaagagggtaaggaagaggcagcacgtacctggcagtgcaagaagaatgatggcaaggggtggaactgccgtcacaatgcgagtcaccccaactccctctgtgagtaccacttgatgaagaagcgttcctacttgaacttacagcatgcttcgccagcggaggaagataaggccatggcggcagcaccaacatcagcagcctccaagccctccagcagctccaacacacagaagacgaagcttcccaacaactacgatgcaaacgagggcttctactactaccacgggtttcgcccgtctcgtggcaagaggcgctgcaggaaccatccaaagaatgatgaagaggtgaaggtggaacccatccaaatctgcttctcttccgagtcatgccaaagttga

SEQ ID NO: 23116 - DNA, 519 bp, Zea mays
  Peptide Sequence Number=SeqID_64895
atgggtcggcgcgaggtgaagcacgaaggggggcaagaaagagggagacaggcagaaaaggggaaacccgtggccttcgtgttgccctgcgcccaggtcgggcataaggagagggcccagggtaatgatgcccccccctgtgacgtggtcggtccgagccctgggtcgggcgaggcggtggctcctccgaggtcgaggtcgagtctgtcttccgaggtcgaggtcgagtccgagccccgggtcgggcgaggcggagaccatcgtctgaggacaaggctgagtccaagccctagggtacggcgatgcggagttcgtcgtcttctagagccgaggccgagtccgagccctgggtcgggcgaggcggagtttcctatggcgcccgaagccggacttggctgctgtcagcctcactctgtcgagtggcacagcagtcggagcgacgcaggcggcgctgtcctcttgtcaggccggtcagtggagcggcgaagtgactgcggtcacttcggctctgtcgactga

SEQ ID NO: 23117 - DNA, 396 bp, Zea mays
  Peptide Sequence Number=SeqID_64896
atgagtgccaccaagcaccggcgacctacaacatgtgcccttcgtcccaagatcgccaacgacaaatgtattcaactcgtccattgcaagatccaagctcgaaatagagagaagcaaacgaatcgcatcgttggtgtcgtcctcgtctttgattcgaccgagagccccagattgaagtcttgtcaggccttagtcaacatcgagtccattgtcacagaccttgatcaactttccctacaacgcaagtgtgaggttaggagcatagaccaagggaatgatgatgaggttgtcaatcccaatgatatcgttccaatggactacgaacctcggaacaatgctgattgctacgactacaatgattccctactcagagtctctagtgactactccgattaa

SEQ ID NO: 23118 - DNA, 150 bp, Zea mays
  Peptide Sequence Number=SeqID_64897
atgacggcagtggctgggtgccactgtctctggccgttctgggctgtggcgggcctgcagaggttggagctgggggcgtgctgcactttcagtggcagcacgtgtggcacacacgacaaggtgttcctggttccgtgtgcccagccatag

SEQ ID NO: 23119 - DNA, 144 bp, Zea mays
  Peptide Sequence Number=SeqID_64898
atgggtcatgcggctgagaaagggatttgggctggccagtcctcaatttgtaatactcagattttgggccttacattaaccaacaaaaactctgctcaacgacaattactgatccgtgacgcgacagtctccaaggccacatga

SEQ ID NO: 23120 - DNA, 606 bp, Zea mays
  Peptide Sequence Number=SeqID_64899
atggttttattgaagtgccaaacattttctttgccttctttcatgggaatttataggtacgggtgccctgacatcgaggaaatagagaaattcaatagactctacaagcagaaactggatgagatcgtcgaaagaggcgaaatatccctggacctggcactcgaggcaaggctacctaaaccgaaatgtaaaccaaggacgcatctgcagctcaatacctgctcacagaaaagttttggtcgtctgcaggtatcatcgccaggcgcagagaggcttctgaaggtgcctgaggatctggaccgcttcaaggacatggctatgagggtgcagtacctcgctgaaggcaacagtgaccttgcgtcgaagcagagcctgctgaaggacggcatcttcttgctcgagtccgttaacgctgaggctgggcactgtgtttggaggctggcagatgtgaaggaaaaccgagcagaagctgggaagggaaggcccgctgaacaggaaacagagagactggaggctgcagacttgcttcaccgcagtgaagaaggtgaccttgtacttggacgccaactagtaaatccgggccaggaggactattatggcttgtga

SEQ ID NO: 23121 - DNA, 216 bp, Zea mays
  Peptide Sequence Number=SeqID_64900
atggcggagggcattgcgcggcggggttacaccgccgtcaccttcaacatgcgcgacgtaggccggtccacagggcgggtgtccctcacgcgctccatcgagaacatcgactttttgaacatgtgggttctgagagagtacttggagattgaatttaagattctggaaccattctgtgagtctgatattgagaggctaatagatggcacattatag

SEQ ID NO: 23122 - DNA, 333 bp, Zea mays
  Peptide Sequence Number=SeqID_64901
atgacaaggcggcacaaggcgggtgcaacgatagtcgagttggcgggggacgacgggggcggcggcggcgcttgggagaggcggtcgggggcagcggtatcgctcggggaggcggtcgggggcagcggcggcacttgggggcggggacggcgctcggggaggcggtcaggggcagcggcggcacttggtgtcacacccagttttggaagaggttgcacagtttacccacaagccgtgattcccattatgctcggggttctagcctccccattgatcactaccaaggtccttacggagaggtactcaggaaacatcctgagtcccctaaagtaa

SEQ ID NO: 23123 - DNA, 748 bp, Zea mays
  Peptide Sequence Number=SeqID_64902
gaagcgggtagaagggcccaggcgttactgcacttacgcgcgctcgaggccgccgggatccgcgaaacctgccaccgcggcagcaagcaaccacgccgcggcccacaccaccggggcacaacccatctctgcgacgctgcagccggaggctcacaggagagcgccaaaaaccaagcgcgatagcccccttacggctgcaacggcaacgggttctgctgtggactgtggtcggggaggaggattggaggtggaggagtgggaagggagggagggagaggtcccgcccagcagcgggcgcgacctgataaagggctccaccggacgcgcggtggcggtggcctttgcttggcgcgaggtaggaaggagacgtggaggcgaggcgaggtcgaggctagcggtgaccaacgccaacacgttcgatggaggcggcgtcaacgacggtgtacgggagagaagggtcggcggctataaaactattcggtttacacaaacaaaagagaaacgaggggctcttaagaaaaagaacaagattatgagcctctcaagggcactgtacgagggtatttataggtgcccgggtgcccaacgtcctgatactgtcattacagaagagccattacaaaccggacccgtaacgcgcttcttcgtgcggggcctgtcacgatgggtcgtcgtaccacgtgggcctccaggttgggtgaggacgtgggatggcgggacttcatcgtgggtcttcgtcttgcggtga

SEQ ID NO: 23124 - DNA, 255 bp, Zea mays
  Peptide Sequence Number=SeqID_64903
atgccgcccggttccgcctccgccgccgccatcgccacccgcttcgcgacccactggatagctgacgccctcgccggcgacgagtacatagacttctccgtgctcaagggtgaggctccaaatcctaaactccttcgccgttcgcctggacgctttcggtctcagggtctctcacctgggatggttaattggcttgttggcgaacatcagtggtggattcattgggatggagcatggaatatgacctggaactag

SEQ ID NO: 23125 - DNA, 693 bp, Zea mays
  Peptide Sequence Number=SeqID_64904
atggcttcggagctcaacgcaagtggcgtgcaactgacagatagatcgtcgggatcgatgggcacgtcgcggacgcggcatggattgacgacgaggagcaagggggtgtcacagcacacgaagggcgacacgaagatgttgggcaccgactacgacgtgcgtgcagattcctgggactcgacgagctgggcagagccgagagccaaccccacgttgcgtcaacgacagcgcggttcgggtaaggccacgcaagcactggacgaggaaaacgatgggctcgacggcatgcgaagctatcaccagcgacgacacgacgatggtgacatgggcgagcgcggatcggagccagagaagccgagcgcacggtgtcaacaactgaggagggcggacagatcggtgccatgggcgaccaggggaaaagcaggggcttgggcgagcacagggagggaacaggcacagctgggctgggtgaccatggcgagggagcagagacggcgcgctgagcaagcagccatgggagcaggggagctccgagctgggacgacggggaaactccacggcgggggtcgcggcttggacagagcagagggaaccactcggctggtgtccacgacgaaccgaggtgattcacctgcacaggggcgagcagggagaacgcgccacggctggaagccaagcgctggggcagggtag

SEQ ID NO: 23126 - DNA, 438 bp, Zea mays
  Peptide Sequence Number=SeqID_64905
atgggcaagagcaagaaaggcgggagctcctcacatcattccggcgacaagcggaagcgcgagccgactcctccttcagaggacttcggcgattccgagtactcggaggaggagttctcctccgagtccgagggatcgccggggattgttgcagaagtgtggacctacatctgggccgtcgagcttgctgggctcgagggctcggatgagtcggaggtctcctcggatgagggggactcctctgactcgtccgaggaggggagcgacggcgacgacggtggcgagggcgacagcggcggcggcgatggcggtggcgacggcagcaggggcgacggcaagggcgacggtggcaacggcagcggcaacggcaagggcgacgacggcaacggcagcgacaacggcaagggcggcagcggcagcggcaaggccagtggctag

SEQ ID NO: 23127 - DNA, 552 bp, Zea mays
  Peptide Sequence Number=SeqID_64906
atggcgacatgggcgagcgcagatcggtgccagagaagccgagcgcacgatgtcaacaacagaggaggtggacgtgagctggacaccatgagtgagctgctcggccaccagcgagggagtacttcgagcggggaaaatacacagggctcgcacgagctaagcgacggcagggcagacagatcggcgccatgggcgaccaggggaaaagcaggggcttgggcgagcacagggagggaacaggcacggctgggctgggtgaccatggcgagggagcagagacggcgcgctgagcaagcagccatgggagcaggggagctccgagctgggacggcgggggtcgcagcttggacagagcagagggaactgctcggctggtgtccacgctggaccgaggtgattcacctgcgcaggggcatgcagggcgctccggccaggcgagtagggagagcgcgccatggctggaagccaagcgctggggcagggcagagcgtggacgggcgagactccggctgggcgcgcgctggacaccaaggagatgaggcgctcgggtag

SEQ ID NO: 23128 - DNA, 468 bp, Zea mays
  Peptide Sequence Number=SeqID_64907
atggccacgggccataacatctggtatcaaagttgtgctcctcggcttgggtccttaacgtccactacgtcaccggttccgaagccttcggtgcaaacttggttcatctttgacaccatgacgaccaaggagaaggaggatgcggatcggtgggaaaagttaacgttgaagatggaacggttgacgaagagggtgatagggatggatgacgtgcaacaacagttgttggcgcagacggatttggccgcaactgttgttcagagagtggcggaggagtgggtgcatctggcccaacagctggagcaggcggtcgtggagttgaagctggaactggtggtgcaagatctagagtctccggaaccagcaatcgatgggaggaatcaaggtggagcgccaaggatggtgcgaccggaacctgctcgaaggtatgacgaagacgatctgaatcaccataggaatggggaatga

SEQ ID NO: 23129 - DNA, 288 bp, Zea mays
  Peptide Sequence Number=SeqID_64908
atggccgccggtgttctagacaagagaatacatgcaaacgcgcgcggcaagggcacggagcacggcggcgtagtcgcaggtcggttcttgtatcctcggatcgcatcgagatttcgtagcgccggtgcgtggcgaaggctacatccacaaaacatggcagaacaagacgagggcgtcgatcggacggagacctgcgcgacccccttcgctctcgtgtggcaagatgaaggccctgccgatgtctacggacctcacgtgccctcaccgtcgggggatgcccatgtgtga

SEQ ID NO: 23130 - DNA, 633 bp, Zea mays
  Peptide Sequence Number=SeqID_64909
atggcgcaggaagacgtgacgacagcggcgacggagggtgtcgtctcgccctcggtgtcggtggtggaggagctggggagaaaggcggcggaggccgaggcgcggctgcgggagaaggaggaggagaacgctgcgctgaagcggcagatcgagagctaccatgtcaggtggctggagcacgagatcagggccaaggccctggaggaggcattccacgaacaggtggccgctcttcaggacgatgcgcggatggcccaaggaacagcgcacgaccgccgcggggccgggtcgtcggaagagacggcggccgaggaggatccgccgccggtgaggctgtggcacggccgggaccgcatgtcctcgtccgcgggtgccatgcggggtgcggtgggccgcctgctcgtcgtcgcggagttccggcggcaaagccgcacgctggagcacgccgcggagccgccgccgccgtggcagccggccgccccggtcgccaactccgccgccgacctcaagaagctcaaggcgcagctccgcgcgtgggccaaggactacaaggcccggctgcgcagggcccaggccgggatcggcagggatcgatggcgcaggggcaactgctggatccgaacgagcacttag

SEQ ID NO: 23131 - DNA, 915 bp, Zea mays
  Peptide Sequence Number=SeqID_64910
atggcatccgattctagcacactgaattcccatggtggttactacacgtcactactaagccaggatgttgcagatgattttgtctcagatgattatgtgctagttgataacgaagctgtacaatcaccggtgctgcatgaaatgagctcacaagtgactaaaaggtgccgatccaaaaatttcagtgaagaggaggacacactattagtttcagcgtatcttaatgtgagtaaagatcctattactggaagagatcaaaaagatggcacattttgggaaagagtatgcaaatactttcacaagaataggacatttgagtcggatcgtaattggtcgtctttgaagcatcgttggggtataattcagaaggaagtgaacatttttcaacaatactatgacgccatagaaagaaaaaatgaaagtggaaaaactagtgatgacaagcttgctgaagcgaaagcgaaatttcgggaagaccatcaagggaaggcattttctgtcttccatgcgtggattattcttaggcatgagccaaagtggactttcagagattcaaagctgaaagacctccatgaggcaaactgtaatggtcctgtcaatgctgacagaccactagggaggaaagcagagaaggaaaaagcacgagcgagaaagcacgatggctgcgatgctgatggcgattttttctttgaagaagttaaaaagatgagggaagcaagggaagaatcagagaaagaccggaaggcccgtgatgataagttctatgagcttgagatgaccaaggttcaattggagcaaaatcggcaggacaaagaaattatgctaacagacacaagcacaatggacgatgactctaaactatacttcaagatgatgaaacaagagattttggctcggcgtttcgggagtagttag

SEQ ID NO: 23132 - DNA, 1042 bp, Zea mays
  Peptide Sequence Number=SeqID_64911
atgagtgtgatccaaatgaaggttgttggcgttcagtcggcatcgaagatgagttatcgttgccgaactgtgaccgagatgcaggttgagggcatgcagcgacaccggatgacatgggacctgttgattcttgccgaattgcatttatggcggtgtttagcgaggaccttcgacgacccctttgtggctgttgcgccttcctttgatccatgtgttgagttcgagatcgctggagcagggaacgccgactggttgcagcagggcacggcgacgagatgccaatcctgtgcgggcggggctctggctgaagaagacgggagggatcaggttgtgcgtctccgactgcaagctgggcggacgggcggggcagcacctgtgcgccggcggctgcggatcacagttgccgatggcccatcgacgaaggagacgaagattcacggaggactcttcctggtcatcatccgcttcctcatcgcgggcataccttcagggcttgttcggttctaccccaatccatatggattgagggggattgagggggtttcaatccccagacggtcgaaatgccgcgcggacccagaccacgcgcagcgtgccaagccccgcggccgggctcgcgcgccacgagtcccgcaaccgagtgccaccgccccgtgcacggtgcaccccgatccacatcgtcctcgtcgtcctcggactcgaagatcccgccccgtgcacggtgcaccccgatgcacatcgtcctcgtcgtcctcggactcgaacggcagccccgacgcaatcgtcctccttcgtaggctgcggccgcggaggccaccgtcggggtgcacaggtggacggggcggcggccggagtcctaccgggggcgggggaagcggggagaggatgacagagaggccttacgaggaagaccacgttcttgggtatggcgcggaggggaaggctggtggaggcagcccagcacgggcgatgccggggatgcaggctcggcggcgagatcgggggaaggggcaggggcgcgacgacccacgagagagggagg

SEQ ID NO: 23133 - DNA, 942 bp, Zea mays
  Peptide Sequence Number=SeqID_64912
atggtcgccacgctcgaggtgatccacctgcactccgtcttcctcacggacgccgcgctgcgccggatggtcgccgcctgcccccgcctccgggagctcgacctccgttactgccgccgcctgcgccgtgtcgacttcagcagtgttggggtgcccaacctcagtagcttcaccgtcgtcgactgctcccgcaccaccgagctccgggtccctgtcgcgccccgtctccggtcgttccggttcagcggtaccttcctctccagcaacattctctctggagctaagggttctcttgagcatctctacctctgctctggcgggccagagaccggccttcccgccaccaacttgccctacgcagttcctcgcctgtcgaacctcactgtcctcaccctctgcagcattgctctccagtatgtttcttctttcacagccaaggccggctcggagggcaacctgcatggcttaagggagctccagttgctcacgttcgggatggccaactccaaccttgctgacatttatagcttcctcaagacctgcccgtgtcctcgcttggagcgtctctttgtgcagctcccgacaaacaccggtgatgcattcacggagaatttcttggaggtggcggaggaggatccaccaaaaggtggattagaaaacctttgcttagccaagctgacaaatttcaaggggcaccgcaatgagatgcaactagtaggatttctgcttagaaagtcttgtagtctgaagaaactatttctgattgctcctaaggaggatcaccctcaaggactccgcaagacactgtcagatacgctgcctgattttctaaaaaaagaaatattgcatctggaaagagcttcaacagatacgcagatatttttcagtgagcctgatgctcagacgcagcaattgcattcggaggtctttgtcaggttttag

SEQ ID NO: 23134 - DNA, 1656 bp, Zea mays
  Peptide Sequence Number=SeqID_64913
atgccgggagccgtgatcgtgcaccaccacacgaggtacaagacgtaccccggcgaggtcaccggcatcgccatcttctcgtgcttcatcgcctccgtcgccggctgcatcttcggctatgacatcggcctcacatctggagcttggcttgctctgactctgacgtcgtacggttgttgttgttgccacgctgtcgccgtcgccgccgtggtggtcgtacgtgaagccgggctgacgtcgacggagccgttcctggtcaagttcttcccctccatctacgaggagatgaagaggcaggtggtcgtcaaccagtactgcaagttcgacagccaggtcctgacgctgttcagctcctccctcttcctcgccgcgacggtggccaccttcttcgccggcccgatgacccgcgccttcgggcgcaagtggaccctgttcgccgccgcgtccgcgtacgtggtcggcgcgtgcatcggcggcgtgtccgtgaacttcccgatgctgctcacgggccgcgtcctcgtcggctccggcgtcggcatctccatccaggcggccccgctctacatctccgaggtggcgccggcgcagcagcgcgggatgctcaacatcctgttccagctcatgatcacggtgggcatcctgacggcgaacatgaccaactacctggcgtccaaggtctcgggcggctggggctggcgcatccccgtgacgttcggcgccatcccggccgccgtcatcgcgctgggcgcgctcgccatcccggacaccccggcgtcgctcgtcgagcgcggggacacggccacggcgcgcaagacgctgtcccagatccggggcgtcggcgacgtgcgcgaggagttcgacgacctggccgccgcgagcgaggacgccaaggccgtgcagtgcccctggcgggagctcttcttcggcggcaagtacaagccccagctcacgttcgcgctgctcatccccttcttccagcagctcaccggcatcaacgtcatcatgttctacgcgccggtgctcttcaagacagtcggcttcaagcagaacgccaccctcgtgtcctccgtcatcaccggcctcgtcaacgtcttctccaccttcgtcgccatcgccaccgccgacaagatcggacgccgcgcgctcttcctgcagggcggcacgcagatgatcatctcccagatccttgtggggacgttcatcgggctgcagttcggcatgagcgggacgggcgacatctcggagcagtacgccatgtgcatcgtgctgttcgtgtgcgtgtacgtggccggcttcgcgtggtcgtgggggcccatggggtggctggtccccagcgagatctacccgctggccgtgcggtcggcggcgatgagcgtcacggtggccgtcaacatgttcttcacggccttcatcgggcagatcttcctcacgctgctctgccacctccgcttcggcctcttctacttcttcggcgcctgggtgctgctcatgacgctcttcatcgccatgctgctcccggagaccaagagcgtgcccgtcgaggagatggcgcacgtctggaagaagcactggttctggcgcaagttcgtcatcgacaccggcaacgacgcccgcaacgccgagatgaggaagaggatagcgctagagatgagctga

SEQ ID NO: 23135 - DNA, 648 bp, Zea mays
  Peptide Sequence Number=SeqID_64914
atggcgcgcagccactacttcctccgttcccttcccttccggccggagcagtctcgaaccctctctttcggcagcgagccccacgcacttgaataccttgcgacccctccctgtctcggaccgcgaccacccgccggcgaacgtaaccggcggcactccgatcccccaccccactcgtggatgctcaccgaccgttcgtcactgatccggacggacgggcgggcggacgggcggcctgtgcagtccagtccagtccactgggcccctacacgacgacggggcgggccggcgcctgtggacgatggatggctatataaaccggccggctcggtgtccatctgccaacggcgccacggcggcgacgagaagtggcgagccccgagagcgggtttagttagaggctacgggcggtcgggcgcggcggcggcggcggccatgagcagcgggagcgagagcactaccgccagcaggtggcccgagctggccacgctgcgcgcgctggcgcgcgacgccgcggagcagcttcggctgccgcgggccggcacgtcggcgtcggcgtcgtcgccgtggcgcgggcgcgaggaccacctccacggccacggcaagacggccaaggtgatgcacctgctgctctggggacccaagtga

SEQ ID NO: 23136 - DNA, 363 bp, Zea mays
  Peptide Sequence Number=SeqID_64915
atgtccagagatagatcacatggattacatgagcaaccattcacggaaaagaacatacaaccagacctccagatctacaacgaacgctacaccaccaggggatcccgatctcagaggttaaacattcgactgaaaagaaaagcgtacgagaggataatgggggcacgagagaaggctgtgtataccggcgcggggtgggaacgaggtgcgcgatccggggaaccggcggagctcggcgtgtccgtgcgcgaagctgcatgtgtcgcgggaacagccgccgcgctgccacagcgcgcacaacttcgtcttgtaatgccgtccgcaaccgcagcagccagcaggtgcacgcggcagttactttga

SEQ ID NO: 23137 - DNA, 978 bp, Zea mays
  Peptide Sequence Number=SeqID_64916
atggagattccaggggccatcgctcccttcgtgaccgacgaccaaattcccaagaaagggaatctagctattcacggtctcccagtaggaagagttgtggcatttattcaccatactattcactgtattggcatatgcattgaaatgaggcatgataagaagcctgatgatggagaaactaactcatctaggagtctcagtgtctctgacaataatgatgatagaaaaaaggagacactgttaagtggtgatgataaagaggatcacgaaatacagataattttggatgagaagaatgctgaagtgcgcaagatttctagcagattaaatgatcttgatctgcagttaaggaaggagaaagaggaatgccacaggatgacctcaaaaattaaaaagttccttaaagcccatgctcgctttttgaaagcacaggaagaattaaaaaggtcacaagctcgttttgagagactcggtgatttacttgcttcagatattctgaagcgtggtgctaatgaagaagtttctagtatcaatgttgatgaagatccaaatgttccttatgaaaggagcccaaatgctgctatagctaagaagagatcaataccatactcaacaagtgaagaagcgaaagccggatttgaaaaactaagcaagggaaccgagccaacaaaatctttatatttgaagaagaaactgtgggaagatgaaaaggataagataggcaactttgtctcctcagccaacaccgacaaggtcaaagaatctccggtcaaacatgttttgccctccactggtatggctgctcatgctttggacgatctgtttgaagctgttgaactggaggatagacgtgacacatcaatagaaaatgatgctgatgacgaaactaggtcgcctgttatgcccccacaaccaccaccggtggttaatacttacgagcagtacgaggctgatgacgaggaagtcgacgtggaatga

SEQ ID NO: 23138 - DNA, 861 bp, Zea mays
  Peptide Sequence Number=SeqID_64917
atggccgtagtgccggcggcgccggtggttcttggagtggccatggtgctcgtcgtcctggccgccagcgccggcgcggccgggcagctcaggatggggttctacgccgagagctgcccgggcgtggagcgcgtggtgggcgacttcgtccggcagcacgtccgccgcgtgcccaccgtcgccgccgcgttgctccggctgcacttccacgactgcttcgtcaggggctgcgacgcctccgtcctgctcaactccaccgccggcagcgtggccgagaaggacgcgccgccgaacctgacgctgcgcggcttcgacctcgtcgaccgcgtcaaggcgctcgtcgaggatgcctgccccggcgtcgtctcctgcgccgacgtcctcgcgctcgccgcccgggacgcggtcgtcgccatcgtgcgtgagctagctcgtcactccactttccaccacgccacttctcgatctggtggtgcctggacgatggatggatcgtcgtcgaccatgcacgaggcgctcgacgacatccccaagcacaccatgaccttcccgcagctggccagcctgttcgccagcaaaggcctcggcgttcgtgacctcgtctggctctcaggcagccacctgacgttcgacctgggctactaccgcgcgctgctcaagcgcacgggcctgctccgctccgacgccgcgctgctcaccgacgcggcggcgcgcgccgacgtcgagggcgtcgcggccgggcccgaggaggtcttcttccagctgttcgcgcggtccatggccaggctggcggcgctgcaggtcaagaccggcgccgagggggaggtcaggaggaactgcgctgtcgtcaacggcggctaa

SEQ ID NO: 23139 - DNA, 396 bp, Zea mays
  Peptide Sequence Number=SeqID_64918
atgagtctgatatcatcagtcgccaaacaaggatcagtctccactttcaaggcagaaagaaacagatgttgcgatatgctttcacataccattggcgcctcatgcactgaatgtacaaggcaaattgataattttctgcaagtagaggaataccatcttcgaatgtgtaattcttggttgctctcggccagatggtcgattccggagatcaaggactgcttggaggaggctggattcaagtgggtccacgtttggatgagggagatgccaaatacccagtcaggtggaaacgccaaggaatataacgccaaccgggacgtgaagtatgaagaatcacaccatttcaaccaaggagatgcttggaacgcctatgtcgttggagtagcaaatatctag

SEQ ID NO: 23140 - DNA, 420 bp, Zea mays
  Peptide Sequence Number=SeqID_64919
atgccgctcccgatcccttgcacccgccatcccctacctcccgcccctgcaccccgcgggtcccgcgcgcgcccggtcgtgaatcagccgccgcgcctcctgcggaacccgcctccacccgcgaatccagcgccgcgcctgaggaacaaccgcggagaaacccccgtgcgtcgtgccctcgcgaaccccaccccagccgcaaacgccacagacacctctgctcggagcaggtgctgtccccgaagcagctggcgtgcggcccgggaggtgcagagccagcccaagatcagcaaatgggagcggaccttcgcctccgatcccgtgaaccccgcgggctccatgctcgaccccgtcagcggccacgccggcggcgacccgctgctgcaggacatcctcatgtactggggcaagccgttatag

SEQ ID NO: 23141 - DNA, 138 bp, Zea mays
  Peptide Sequence Number=SeqID_64920
atgatgcgtgcccttgcctctcttctcttggtctggactgagctggagtggatcagccaggtgtccgaggacagcagctttgtgatatggttacgccatacttcgcaatcagctgatcttaaaacacctactagttag

SEQ ID NO: 23142 - DNA, 264 bp, Zea mays
  Peptide Sequence Number=SeqID_64921
atgcaccgtagccgtcgtccacagaacctcgcatgggcctcctgccgctgttcctccgggctgtcgcgaggctggctgcgtgcctggcgagcccggccgctgcccgagacggcggcgaccgtactgttccacgccggggcgctgccgcgggaccccgcgctggagcgcctggtctgcgacgacgtgctcgacggcggcggcggcggcgaaggcgactgcgacatcctgcgtttcgtcgtcggcgtcatgaggtccttgggctag

SEQ ID NO: 23143 - DNA, 252 bp, Zea mays
  Peptide Sequence Number=SeqID_64922
atgagggttgtccgcattgtaaccattgctcaggagaaggtgaagccatggaaggagacttccaggagttccaggactacgacgaattctagtttgggggatctttttgcgagggcagtcctcaagcccttgcacggagcaataggtcgatcaagggatgcctcgacttttggttcatatgccccttcctcgcctctctgtgaggaggaagggggaatgcgtcacgctgcccttagcgggagacgagcgtga

SEQ ID NO: 23144 - DNA, 540 bp, Zea mays
  Peptide Sequence Number=SeqID_64923
atgcgcgcacgccgcctgacaccatctgatgggacgcctaatacgacaagccaagcggacgagtctttaggcgcaacctctctgcctcgcctgacccaagctcagccctcgggcaaattctttacctcgtccgagctcggcctcagccacctactatgctgtgaaccccacagacagccactccacccgactgtagcgcacgtcaagagatggctcgactggcacctctggaagacttctgcatcaacccaagcaagggatctgatctcgatgagtgctgcagagaatcttgacgtcatcatgcgccaggacgatgacgcaccccgtaagcggcctttggcccatacctcggtgttgttacaaccactacggcatgggcggactctccttcgggagctcaggcgtacgaacgacccctcggcatcggtctcggctctctacgggaagtcaacaggcgcggatctactgcacggtttgtcgggcatctctccttcaaatacaagactcagcttcgccacggacgcgcccctgggtgtataa

SEQ ID NO: 23145 - DNA, 2484 bp, Zea mays
  Peptide Sequence Number=SeqID_64924
atggaggagacgccgccggggcagcgcccgcagccgccgccggcgcacgcgtctcctccgttcgcctcggcgcccttcacaccgccgccgcgcgtcttctctccaggcctcgccgccgcgcggggcacgcccagccccggctcggggcccggccacgcgctgccgcacctcagcacgccacccggcccgcccgtcttctcctcgccgctgcgccctgcggccgtgcccttccgcgccaccccggcctctccccaccccgtgtccttcgccgcttcggggggctactcctcgtcctcctccgccactgccgctaccaccgcctccctccccacctcatcagcgccgcactttctcaacggcgctgccacgcttcacggggaccatgcccctgcgccatcatcaatccagggagacggcctcgacagtccctatgtacagttctccgcaaacaaggttctgaagcagaagaagctgctcaatgcccctagcttggggttcggagctctggtttctccagggaaggaggtgtcacctggcccagaggttgtggagcgtgatccacgccgttgcctgaactgtggcgcctatgtgaacttgtactgtgatgtccagatcggctccgggcagtggcaatgcgtcatttgcaagaagctcaatggcagcgagggggaattcgttgtctccagcaagcaggacctgctccagtggccagagcttgcatccacgactgtggattatgtgcaggtggggaacaggcgtccaggctttgtcccagtgtctgacacgagggtgtccggccccatttttatcctcatagatgaatgcctcgatgaggcgcacctgcagcatcttcagggctccttgcatgcctttgtggattcgctccctcctaccgcaaagataggaataatcacctatgggagaactgtctcagtgtatgatttctcagagggggcagcagtgtcagcggatgtgctacctggaaacaagtcgcctacccatgagtctttgaaggccctaatctatgggacaggtgtttacctgtctcctatacatgcttcgctacctgttgcacacacaatattctcatctctgagaccctatcagctgagcgtgccagaagtgttaagggatcggtgtgttggagcagcagtagaggttgcccttggtattattcaagggccatcagtggagttgtctcgtggaatcatcaagagatctggtggaaactgtaggatcttggtgtgtgctggtggccctagcacctttggaccaggatcggtgcctcattcagctaaacatcccaactatgcttatctggagaagacagctatgaagtggatggagagtcttggtcatgaagcacagagacacagtactgttgttgatatcttttgtgctggacagtgtcctgtgagggtccctgttctgcaaccattggcaaagtgttctggaggtgtgctcttagctcatgatgactttggagaggcctttggggtcaatttgcaaagggcatcaactagagcagctggttcccatggcttatttgagatcaggtgttcagataacatgtatgttactcaagttattggccctggtgaagaggcttctcctgattctcatgaaacgttcaaacatggtagttccttctgtatccagatgcatagtgttgaggaaacacagagtttttctgtgtctatggagacaaaggctgatatcaaaagtgattttgttttctttcagtttgctgtccattattccaatatatatcaaacagaaatcactcgggtgatcactatgaggctgcagactgatgatggtttgtctgcatatctggcaagtgtgcaggaggatgttgcggcagttatcattggtaaaagaactgtattgcgtgccaggactgcctctgatgctattgatatgaggctctcaattgatgaaagagtaaaggacatagctctaaaatttggtagtcaggctcccaaatcaaagctttaccgcttcccaaaagaactagcatcactcccagagtgcttgtttcatctgaaaaggggaccacttttaggtagcataatcggacatgaagatgaaagatccgtacttaggaatttgttcctgaatgcttcgtttgacctttcgctccgtatgttggcacctcggtgcataatgcatcgtgaaggtggtacatttgaggagctgccagcatatgatcttgtcatgcaatctaatgctgcagtggtactggaccatggaacagatattttcatttggttgggtgctgagctagcagcccaagaaggacaaagtgcagcagctttagcagcatgccgtactctggcagaagagctcagcgagaaacgttttccagctcccaggatactttcattcaaacaaggaagctctcaggctagatattttgtctcacgcctgatcccagctcacaaggaccctacatatgagcaggtggagaaatctacacaataa

SEQ ID NO: 23146 - DNA, 1104 bp, Zea mays
  Peptide Sequence Number=SeqID_64925
atggcggcggagagcttcctgttcacctcggagtccgtgaacgaggggcacccagacaagctgtgcgaccaggtgtcggacgcggtgctggacgcctgcctggcgcaggaccccgacagcaaggtggcctgcgagacctgcaccaagacgaacatggtgatggtgttcggcgagatcaccaccaaggcgagcgtggactacgagaagatcgtgcgcgacacctgccgcgagatcgggttcacctccgacgacgtggggctcgacgccgaccgctgcaaggtgctggtgaacatcgagcagcagtcccccgacatcgcgcagggcgtgcacgggcacttcacgaagcggcccgaggagatcggcgccggcgaccagggccacatgttcgggtacgccaccgacgagacccccgagctgatgccgctgagccacgtgctggccaccaagctcggcgcgcgcctgacggaggtccgcaaggacggcacctgcgcctggctcaggcccgacggcaagacccagcacgacgagaccgtcaccaacgacgagatcgccgccgacctcaaggagcacgtcatcaagcccgtcatcccggagaggtacctggacgagaagaccatcttccacctcaacccgtcggggcgcttcgtcatcggcgggccccacggggacgccggcctcaccggccgcaagatcatcatcgacacctacggcggctggggagcccacggcgggggcgccttctccggcaaggaccccaccaaggtggaccgcagcggggcctacgtcgccaggcaggccgccaagagcatcgtggccagcggcctcgcccgccgctgcctcgtgcaggtgtcctacgccatcggcgtgccggagcccctgtccgtgttcgtcgactcctacggcaccgggaccatccccgacaaggagatcctaaagatcgtcaaggagaacttcgacttcaggccagggatgatcaccatcaacctcgacctcaagaagggcggcaacaggttcatcaagaccgccgcatacggccactttggccgtgacgacgccgacttcacctgggaggtggtcaagcccctaaagaaggcatccgcttaa

SEQ ID NO: 23147 - DNA, 363 bp, Zea mays
  Peptide Sequence Number=SeqID_64926
atgggtatcagttaccccgtccgcagcaaggaaaggcctaaggttcgcagcatctcccgaagggcgaaggcgaaccacgcacgaacctcgggagaaggacgacgaacgaacggtccaacgagggagaagaagcagcagggagggaggagaagaggcgaacggggatggatgtgtggcacggggtctcggggctgctggggctcgccatttatagccgcgcccgcgctggcgctggcgctgggcgtggaaccggtgagagggggagtgggcccgcgcgggtactgctgcggctgcgggcctgcggtgcgggaagtaaactactcgggccacttggctagtcgggcaggcatgcacgtgacgtga

SEQ ID NO: 23148 - DNA, 438 bp, Zea mays
  Peptide Sequence Number=SeqID_64927
atgagattttctatggatgagtattcctctagaagttctgttgatcagttcactcttctctgtaacactgatatccaatatattcatacccaattgcagtttgatgtcttctggagaactcttatgtacactaagtttcataagcatcagagaactgacttcagtgaattggctgttaaacaatttctttccattgcaaaaattaacattgaagatcaactgattgtttggatgacaggttttaagagatatgtggccacttttgctgaatttgcacatgcaaacaatctggattatgatgtgatctcaaatggggttgatctctatgctgaggagcagtttgaggactatattcagtattatgaatttgcgaggctgggtccccaggagatttggagaaatttcagggctgaggcaccatcctgctgttatcaataa

SEQ ID NO: 23149 - DNA, 909 bp, Zea mays
  Peptide Sequence Number=SeqID_64928
atggccgggaaggagatgacgccgaactcgaaggcggcggcgccaccggcgacgatacgcctcgtgaacttcatctccgaagaccaggctaggccccgaacacttgactccccctctttccctctcgcgctggcttgccgggcacgtagaatcggaagggcaaaacctaggaagaaacttgacgaggtgaagcggacacgaggggagcgtgtggaggacggcaccgcgcagcgcgacaaacccctcttccagatcctacaggagaacaaggagaagaaggacgccgagttcaatgagcgtttcaagcacagtgtatttttccgtgctagtactcataaggatgtggtcatgaagaacttatacgaattacacaagtgtgattgtcatattatctgcaaattcaagttgcagcacgatctgcacaggctaaaaaaatactctataatcgctgaagtttgcagttatctattctatctaggacctccaaaggctttggatgaggatgagacagagtttcttgataaattggctttgtcaagaaaggaatatgaacagcaggtggccaatgaagaagcagaacagctccgcggtttccatgaggctgtagctgcacggtccaccgttgttcatgaactcgagactcctacagtatctagacctgaggagagcagacctaagccacctacaaagaggagccagcctgcgctcctgaagaacataataatttccgtgaagccgcatgccaagaaaccaaaggttgagacggaagctaaacctgctcccgaggagcggcggccttcagataggcacggctcagatcagaagcaaccagacgacacaaaggcaacgcttggctctctagtggcttatgacgacgacgacgacgaaagtggtgaggacgttgactga

SEQ ID NO: 23150 - DNA, 177 bp, Zea mays
  Peptide Sequence Number=SeqID_64929
atggccgctgcttgcgatctccaatgttccatggagttggtacctttagcgttagcacagacacacacagtcagccctgcaaaagtgctcctccgttcgtccgcgtttggtgttgggcttctgcggctccggtgcccagagttgctgccggcggaggccgagcaggagcgcaactaa

SEQ ID NO: 23151 - DNA, 390 bp, Zea mays
  Peptide Sequence Number=SeqID_64930
atggacatggagcacgccgagagcgggccagggagcttctgcgcgcaggggaaaggctccttgctggagaggtccgtaggggcgcacgtcggggggaggatagggagcaccggccagggagaggccgctggcgacctgcagggagggagcgccatggagaagaaaccgagctccctgctggttgccgtggagaccagggaagaagaaaaaggggcgccggctgctgctgcgcgagggagaaggagtagtgggcgtcgagcagctgtagccgagggggagaatgggaggacgccatgggaggagagggagcttgctggtggctgttggtgccgtgagcagcgagaaagaagaaggcagggagagaagaaagtggtggccagggaaaagtga

SEQ ID NO: 23152 - DNA, 423 bp, Zea mays
  Peptide Sequence Number=SeqID_64931
atgaagctgtggaaggagacttccaggagttccaagactacgacgagttctaggcgtggtttgccttctaaaaccgggtgtgacaagggtcaacttcaagaaggggggagcaaggttggacaatgtcaagcactacaacaacaccttatgcaggcaccaacgactttgagtcgaggacgactcaaaactaagaaaggggagaatgataaggacatgtacatcaactatatggtcaagtaccaatcaatgatagagtcccaagctcaaggagagttgaagtccagtttattcacgaatctggcatgggctgcaggagtgggactcatgaaaacagacgtccaggcctcatatggactccactttgggcgttctagatatcgttggaaagctaaggagataagatttccaaaccaactagtttga

SEQ ID NO: 23153 - DNA, 375 bp, Zea mays
  Peptide Sequence Number=SeqID_64932
atgaacggatccgccgctgggtcgtcttcgtcgtcctcggcctccacatcgtcgctctcagcgtcgccccgggcggtgcacttctttgtgcgcgctaccgatgccaggaccatctcgatgtgcgtggggtgggatgacaccgtcggcgccgtgctcgaccacctcggcgcctgtggtgatgccctcctccgcgtcgctctctgtgctcgcaactccgccgcatggccgcctcgtgtcgtggtcggagtctacgactgctctttggccggttctttggaggatatggttgctggagtgacttggccgtccatcttgccaccgggttggacagtcgggtgggaccctacctcggccgaggaggagcatgaggagtga

SEQ ID NO: 23154 - DNA, 537 bp, Zea mays
  Peptide Sequence Number=SeqID_64933
atggagccggacgcggatgaggactacatgggcgacctctcccgcttcctcccaccgagtccgtcctcctccccaccgaagaatctcgggcgccggaagcagccatccacgcaggcgcaggcgcagccgagggcaaagcgcgggaagggggtgtcgtggcaggagcggcggcggcaggagcgcgagcggaagcagcgggaggaggacgcacgcacgatggccgggctcgcggaagctatccctgagagcaacgtagggttcaggatgttgaagcagatggggtacgatcccgactcccgcgccgacgccggcgccgaaccggtcagcatcgagatccgccgctcgcgggcggggctcggggcggaggagcctgtgttggctctgacgccggcgctggcgccggtggagaagccccgggaggtgtcggagcgggagcgtaggcagcaggaggagatggcagcagagctaagggaagacagccgaaacggtctcccagaacacttgaatatcatccatggaagtgacaaaagaatttga

SEQ ID NO: 23155 - DNA, 204 bp, Zea mays
  Peptide Sequence Number=SeqID_64934
atgcggacggccgacgaaggatgcaacgtcgttgatgtgggagcagacattgacgtactccctccggtcctccttgagcagcaggtgggcttagaggtggagcgtcgtgatgagactaactcctacggattcagcaataggtgggggaggaataaggtcgggcctcagggtggtagcggattcggtgggagtggacgaaagtga

SEQ ID NO: 23156 - DNA, 1764 bp, Zea mays
  Peptide Sequence Number=SeqID_64935
atgcccgagtcacctgcatctccggccaaacccccctcgcagccgggatctccgctcaatgccgccactccgtccccagcgtcggcattgctgcgaggctccgtgctgctcatcgccttcctcgtactccagctcgtgctcctctggaacatcctcggcctccccagctcccgcttcctcccggtgccgggccaaagagacactacctggcccaacggcgcagtcaacggcggagcgtgcgatgaggggctcatctacgtctacgacctcccgtcggagttgaaccacgacctcgtcgacgactgcgagagcctgtggccctggtactcgttctgcccgtacctaaccaacggcggcttcggcgaggcggccgccacgctgcccgtcttcttcaacgtcacacggaacgtgtcgttgcccagctggtacaacaccgaccagttccagctcgaggtcatcatccaccgccgcctcctctcccaccggtgccgcaccaccgactcgtcgctggccaccgcgttctacgtcccgttctacgtcggcctcgacgttggcagccacctgtggggggacaactctaccgctgccgaccgcgacagggcaggcttgaggctgctccggtggctcaagaaccagacgtccttccagaggtccggcggctgggaccacttcatcacgctggggcgcatcacgtgggacttccgccggtacggcgacgacgggtggggcaccaacttcgttgtcctgccggggatagccaacgtgacccgcctcggcatcgaggccgaccggctggaccccatgggaagtcggcgtccccggcacgtgctctccctcaagcgcagcaagctcttcggattcgccggtgcgccgcgctccgggttccgggacgacttcagggaggtgctgctggaggagtgcgaggacgctgggagcgagcactgccgctccgtggactgccgcggcacgcggtgcaccgacaacggcgcggcggtgctggagctgttcctggactcgagcttctgcctgcagccgcgcggggacagcttcacgcggcgctcgctgttcgactgcatggtggccggcgccgtgccggtgctgttctggcggcggaccgcgtacgaccagtaccggtggtacctgcccccggggccgcgcggcgaggagggggagtggtcggtgttcatcgaccggcaggcgctgcgcgtgggcaacgtgagcgtgcgggacgttctggaggggctcagcgagcggcgggtgcggcggatgcgggagcgcgtggtggagatgatcccgcggctggtgtacgcgtcatcgtccgacgggctcggcgacggcatggaggacgccctcgatgtggcgctgcgcggcgtgctggagcggttccggcggcgccgggcgagcaccgcgcctgtaggtgtttcagcaaagcactcgccaggccgcttcgtcgcccggagtgtcgacggcaaatcgacgccgccgcctccttctgacggcaaaaatggttcggtagcgacgtggttccctctaaattctccccctataacccattacaaccataaaatatcattatccaactctattcatcatctattaccattttttcttcaactattaaatactagccagcacgcaactcgagacaaggggatgcagcagctgacgctcaatatctcctggcttgccgcgcccttgccccgtctaatcgtgcagggcgcaagtgtaggttgcggcgtaaaactgatgcgctacccgatgtag

SEQ ID NO: 23157 - DNA, 312 bp, Zea mays
  Peptide Sequence Number=SeqID_64936
atgggagggcccccagccctagcgccgcactctctcctcctcctctattccccttcgccgtcgccggaggagactactggagagtcgctctcccctggggcaccggacactgtccggtggggcaccggacagtccgccgcggaggctgctggggcgggcgctgtcccccgcgccgtcgtcttccctgtccctggtggcgtcctgacggtgcacggcggatcaacaactcaggcgccatgttgggtcacgggcaccaggttccacgtggggaggaggctcatgaccggggcgttcacgcccgcgtgggcgtag

SEQ ID NO: 23158 - DNA, 537 bp, Zea mays
  Peptide Sequence Number=SeqID_64937
atggcgcttcctgttgacgtggtcggtccgtgccctaggctgggcgaggtggaggctcctccaaggtcgaggtcgagtctgtcttccgtggccgtggtcgagtccgagcccctgggtcgggcgaggcggagaccgtcggctgaggccagggctgagtccgagccctggggtcgggcgaagcggagtccgtcgtcttccggggttgagcctatgtccgagccctggggtcgggcgaggcggagttcgtcgtcttccggggctgagcccgagtccgagccctgggtcgggcggagcggagttcgccgtcttccggggctgagcccgagtccgagccctggggtcgggcggagcggagttcgccgtcttccggggccgagcccgagtccgagccctagggtcgggcgatgcggagtttcctatgatgcccgaggccggccttggctgctgtcagcctcactctgtcgggtggctcagcagtcggagcggcgcaggcggcgctgtcctcttgtcagaccggtcagtagagcggcgaagtga

SEQ ID NO: 23159 - DNA, 210 bp, Zea mays
  Peptide Sequence Number=SeqID_64938
atggccgatggggcgagggtggaagagctcgagtcccgaccatgggccaccacgggcgagtgcgagccggcgagcggccgggtggagcgcaacaatcagacgcgggcgggacagaggcagggcgcaaggttagagtggttcggcccgccggaacgtaaagactacatccactatgagttgtatagtttaggagtctctgagtatctctga

SEQ ID NO: 23160 - DNA, 276 bp, Zea mays
  Peptide Sequence Number=SeqID_64939
atggcgcgcgaggagggaggcgtggaaggtggtgaggaggtcgtggtcgctggggaggccatggaacgggacgtggaggtgagacactgcccgttgcgcggcgcggaggtggtgttgctacgtaatagtcactcccttttagtctctaatgggcaaccaaaaaaatatgaccctgatttaaccgttattgtcgttgaggtcgctcttggagagaagactactttcatttttagagtatgtataaccttatttaatatggaatctcttcaaggttaa

SEQ ID NO: 23161 - DNA, 1326 bp, Zea mays
  Peptide Sequence Number=SeqID_64940
atggattcgccactgctgagcacacccgctctgctggcgctgtccctgctccttctagcgctctacatcgctcgccggcgccgcggcggtggcaagaaccggaactaccctcccgtggcgggcaccgtgttccaccagctgctccacttcaggcggctgatggagtaccagacggagctcgcccacaggtaccgcacgttccgcatgctcaccccgacctgcaactacgtgtacaccgtggagcccgccaacgtggagtacatcctcaagaccaacttcggcaactacggcaagggggcgatgatccacgacgtgatggaggacctcctcggcgacggcatcttcaacgtggacggcgccaggtggcggcaccagcggaaggtggcgagccacgagttctccacgcgggtgctgcgcgactacagcagcggcgtgttccgcgacacggccgcggagctcgctgggatcgttgcggtggcggcgcggggcgccgggcccggggagaggccgctggacgtcgcggacctcctgatgcggtcgacgctggactccatgttcaaggtcgggttcggggtcgacctgggctcgctgtccggctgcggcgacgacgagggcgcggcggcgttcgccagggcgttcgacgacgccagcgagcaggtcctgtaccgcttcttcgacccgtcctggaaggtcaagaggctcctcggtgtctcgtcggagggggccatgaaggggtcgatccgcaccatcgatcaattcgtgtacggcgtcatcgacaggaagatcaagcagatgggcagggaccaagaattcgtgagcgagctctctgcagctgcctcgcccgtttggatgcacatgcattcacgggcgctcgattggcgctccggccatttcttctttttactgacacacacggacggtggtgtttgtctttggcaggccaagaaagaggacatcttgtcaaggttcctgatggagcgggagagcgaccccggctgcttcgacaacaagtacctgcgggacatcatcctcaacttcgtgatcgccggccgcgacaccacggcgggcaccctgtcgtggttcctctacgtgctctgcaggaaccagcacgtccaggacagggtcgcgcgggaggtgcgtgccgccgccacgggcgaccgcgacgacgtcggcgtgcaggagttcgtcacgcgcggaaccgaggacccccaaccacctcattcataccaagccaagcattctaaacattgcattcaatacaaaagcaaaagactccacttcaagacacaatcaaagcgatcgatccactcaaagtccccgaattaa

SEQ ID NO: 23162 - DNA, 438 bp, Zea mays
  Peptide Sequence Number=SeqID_64941
gatgtgaagtattgcttttcggatgacacgttaccggacggctacgctgtcaagaaaggtgacatggtgaactaccagccgtaccaaatgggcaggatgaagttcctgtggggcgcggacgccgaggagttcaggccagagaggtggatcaacgacgacggcgtgttcgtcaacgagagccccttcaagttcacggctttccaggcggggcctcgcgtctgcttgggaaaggagttcgcgtacaggcagatgaagatcttcgcagcggtgctggtctacgccttcaggtttgagatgtgggaagccaatgctaccatgggctaccggcccatgctcacgctcaaaatggacggcccgctagatagaaatgtgtatggcccatcgtccaaggaatactttggaagcaggattgcgctatttccgcctgctaccatctaa

SEQ ID NO: 23163 - DNA, 363 bp, Zea mays
  Peptide Sequence Number=SeqID_64942
atggctcaccagagtttctctggcccacccgaggccacctcaccgccgctctcccctctctgcccgtggattcatggcctcttccccgccatcgagttcgccgtggcgccctcttcccctctgcccaactccggcgaccccggagccaccctagctcgcgcctgcctcaactccagcgacctcaccgccatggagaggagcgacgccgcccgcagccatctgttttccctcgatctgatttccccactgtccgattcagatcgaacggcccagaccacgcgatactgcttcgcgcccgcgtgcctgacacgtcctggcccgcttgttagtgccatttgcagccgcccatctttcctggtctga

SEQ ID NO: 23164 - DNA, 194 bp, Zea mays
  Peptide Sequence Number=SeqID_64943
atggctgcgggcgcgtcgctcccctccgcggcggtgaggtcgccggagttgaggcaggcgcgagctagggtggttccggggtcgccggagttgggcagaggggaagagggcgccacgggcactggcagggctataagaagagagttgggcgtgtgtgagggcgacgtggccgagaaacccgacgacgtgcgcaa

SEQ ID NO: 23165 - DNA, 522 bp, Zea mays
  Peptide Sequence Number=SeqID_64944
atggcgcctcctgtcgacgtggtcggtccgtgccctaggttgggcgaggtggaggctcctccgaggtcgaggtcgagtctgtctcccaagatcgaggtcgagttcgagcccctgggtcggacaaggcggagaccgtcggctgaggccagggctgaggccgagccctggggtcgggcgaagcggagttcgtcgtcttccggggctgagcccgagtccgagccctggggtcgggcggagcagagttcgtcgtcttccggggctgagcccgagtccgagccctgggttcgggcgaagcggagttcgtcgtcttccggggctgagcccgagtccgagccctggggtcgggccacctttgctttaaatgcccctgcgatttggtcggttggtgtggcgatttggccaaggttgcttcttggtgaagactgggcctcgggcgagccgaagttttgtgctgatgggggttaccagctgagatttaggagtcttgagggtacccctaattatggtccccgacaatgctag

SEQ ID NO: 23166 - DNA, 1014 bp, Zea mays
  Peptide Sequence Number=SeqID_64945
gccaggattatttcaattcaaactaaagccatttcaatgaagggagagagaaatggacaagaagaagaggacattaaagaaaagccccagaattctttccctttcatttcccccttcctgggccgctcggcctccctggcccacgcgccttcgcctccccccccgcaccctgctcgcgctcctgggccgctgcgcgcgcccacggcccagctggaccgcgcccctggctcgctcccacagcgcgcgttgccggcccaccccgcgtggcccagcgcgcaggcacccacacccaggtcgccaggccagcgccccctccctggcccagcaaccgcgacccacccagcacgctcgcgaggacgcgcccggccatcgtgcctcgctcccgcatgggcgaacgttgcccctgccctcgcgccgccgggcccaccggccaccctaatcaactattcatcttctttaggcactcttcatgatttgcgctcccattccgccaagaaccgcccagctactcgtgctcctgtcgatctcccacccctccactccccgacggttggtggccgtctcgccaaagtggcccagccggtgcagccgagatggcgaagggcgatgggcgcagaggaggaccgcgggggcttcgaccggccatgcggcgacatcatccatggtgtcgacaattggggcatggagctctggcggtgctgctccgcccaggcatcgtccgatgtgctcaacgctatcgacacgtgcgctacggtgctgcagaccgtgtggctcgtctccaagacatgcgacaacgtctctaggaaagagaagcatgagatgatcgtgtcttgccccttcctgctgtacctcgtctcgtcacaggataaggctgtgcagacaacgagcagtctgtgtttcctgaggaagttgcagaggaagtccctgatcagcagtttggtgaaggcaagtaaagaagaaggcgtcgaggtggatctccaggagttccaggacttcgacgagttcgaggattag

SEQ ID NO: 23167 - DNA, 981 bp, Zea mays
  Peptide Sequence Number=SeqID_64946
atggcgagctctggcggaatctccgaccagctcttcgtctccgtcaagttagagagcccgcacctcgcggagctcgacctcgccccccacctcttcggctcccaccctgtggctggctcgtgggacccctgcaaggccctgcctttggagcgggcggccaccgccgtgtgggagttcagctgcgtcgtgccttcgcagcacgaatcgctggatttcaagtttgttttgaagcgaaaaggtgataatcctcaatacattattgaggagggacctaaccgaccattgggttgccagagaaatgaatttgagatggggaatgcgttgtttaaactcaacgaagggaaggaggtacttgagtgcaaggttcaggttgagacagaaatgttatccccaattgacttggcggctagttggagagctcatcaggagtattttcagccttcaagggtgcgggggactcacgatgtcactatcaaccctgggttagaaggcagggccaagaatggcttcgcttctggtttggagcttgatttagacaagtatgtagttccaacaccaaacatgggctcaggtgttgtttatgcagctagtttgactgaaaatccacgctcattattgcaaactgggagttcctcaaacaatgataccacaaaggacattttgcacaactcaactaaaggcgattcatccttgaatcactatgttaacactatgaagctatggcaatttagctgtttcactatagaaaagagcacaattggagggcatgcatcgtcactggaagaacaaagggcaatgtttgttgatagaggggttggctcaccaaattttgcaagaccaacaatggaaaccttttcgatgagcaactttaagttggattctgaatcaaaggttgtacattattcactccggtcactagatttagtaaaacttgatactcgtgggtttatagtgaaaacaatggaattgcatgggaattga

SEQ ID NO: 23168 - DNA, 1272 bp, Zea mays
  Peptide Sequence Number=SeqID_64947
atgatgagagagggtgatgcacgtgttacgcttctaagaagcaagctccatggcctggtcgaaaggaaccgagatctggaagaggaaaacaagcaattgagacaccaagtgagccaattaaaaggtcagatctcctctctcgaaggccaggaaactaataagaggatgctgtggaagaagctggagaattctgcaaccggcatcagctactccaaggaaaagcagtttgtccagagcaacgatggtgctaaggaagccgtagatctcaacagctcattgtctcacagcaggcagcaattctccagtgtaaaccaagtgagatcaagggcgccaagggttccaaatcaacctcccaatccgacaagcacccaaccaaaggcaactgtgagaaaggaaggatgcatggcccctcctcctcctcctcctcctctaccttccaagttgcagaggagcacaaaggcgatacaaagggtaccagaggtagtcgagttgtaccggtcgctagtgcggcgtgaaggcaaaaataatgcaaagtctggatccgtaggaattccagcagcaacgaacagcagagagatgatcggggagattgagaacagatcagcttatgttttagctattaaatcagacgtagaaaatcaaggcaacttcgtgaacttcctcgcaagtgaagttcaaaacgcagcatacaaaaagatagctgacgttgaagagtttgtgaagtggcttgatggggaattgtcataccttgtggatgaaagagcagtgctaaaacaattccccaactggcccgagaagaaagcagatgccttgagagaagcagcattcaactaccgcgatctgaagaacatagagtcggaagcatcatccttccatgatgacaggagagtggccacacctatggctctcaagcgcatgcaggcattgcaggacaaaattgaacaaggtattcataacactgagcgagtaagggacagtgcaagcggaagatataaggaccttaagataccatgggaatggatgctcgactctggagtcataagccaactaaagatggcttccttgaagcttgcaaaagagtacatgaaccgcattgtgaagacactgaagtcagatccatttgcgaatgaggaggagctgcttctgcaaggtgtccgctttgccttccgcatacatcagaacgggatagtctgccgaaccatcccagcctatgacgttgtttggtttgagacgctagctgtccgtcatgaacgagcactagtgacatgttaa

SEQ ID NO: 23169 - DNA, 1056 bp, Zea mays
  Peptide Sequence Number=SeqID_64948
atggcaccaggccccagaatgatgacgttgttcataccctttctcttgcttctgtgcacctttttacagacctttctccaccaatctgcaaaagatatctcatcaccagccggagagatatcaccaaaccccatgggcgaaagaatgatatgccaaaactttcttgcaaaatgcatgtgcacaggagattttggatggttaaatggtttcctgcacctgatcatctttttggaaacattatgtaatgaccaagatgttcttgagagaaatatacgattgaaagttcaacaaagtcctgattatgcagagcaaacagattttgaagctggtgtacaagatttcaaagagcgattgacctattatgaaaaggtctatgaaccggtggaagaaggttcttacataaaaatgattgacatggttagtgggaaggggggccaactaaagattaatgacataagtggttacttgcctggacggatcgttttcttcttggttaactgtcatctgacacctcgtcctatcctgctaacaagacatggtgaaagtatggataatgtcagaggaagaatcggtggagactcttctttgagtgaggccggtgagctttattcaaggaagcttgcgagctttgtggagaagcgactgaaatccgagcggactgcctctatatggactagcacactccagagaacaatattaacagcacatccgatcattggttttccaaagatacaatggcgtgctcttgatgagatcaatgctggggtctgtgatgggatgacatacgatgaaataaagaaaagtaaacctgaagaatatgaatcacgaagaaaagacaagctgaggtatcgttatccgagaggagaatcctatcttgacgtcattcaaagactagaacctgtgataattgaacttgaacgacagcgtgctccagttgtagtcatagctcaccagatacctctacatacaataattgagatacaaatgggtgttgctggtgttcaagagaaacggtacaaactcatggatgcaatccatcccacagcggggttgtaa

SEQ ID NO: 23170 - DNA, 1113 bp, Zea mays
  Peptide Sequence Number=SeqID_64949
atggtctcaaaggattccaggagggctcttccatatgcttcgtatattatgttcatcattgagagggtgactggttacattttctcacatgatggccttcatgtgtcatttcgagttgagaggtcccgatcctcaactcttgctgctcaggctcactcctttacaatggggggtgtagaaggtaatgatggcgcctcctgtgacgtggtcggtccgagccctaggttgggcgaggtggaggctcctccgaggtcgaggtcgagtctgtcttccgaggccgaggtcgagtccgagcccgtgggtcgggcgaggcgaagaccgtcggctgaggtcagggctgagtccgagccctggggtcgggcgaagcggagttcgtcgtcttccggggctgagcccgagtccgagccctggggtcgggcgaagcggagctcgtcgtcttccggggctgagcccgagtccgagccctggggtcgggcgaagcggagtttgtcatcttccggggctgagcccgggtccgagccctggggtcgggcgaagcggagttggtcgtcttccggggctgagcccgagtccgagccctggggtcgggcgaagcggagttggtcgtcttctggggctgaacccgagtccgagccctgggtcgggcgaagcggagttcgtcgtcttccggggctgagcccgagtccgagccctggggtcgagcgaagcggagttcatcgtcttccgaggctgagcccgagtccgagccctagggtcgggcgaagcggagttcgtcgtcttccagggctgagcccgagtacgagccctggggtcggggcgaagcggagttcgtcgtcttccggggctgagcccgagtccgagccctggggtagggcgaagcggagttcgtcgtcttccggggctgagcccgagtccgagccctggggtcgggcgaagcggagtttcctatggcgcctggggcggggcttggctgctgtcagcctcactctgtcgtgtggcacagcagtcggagcggcgcaggcggcgctgtcctcttgtcacactggtcagtggagcggcgaagtgactacggtcacttcggctctgtcaactggaggacgcgcgtcaggataa

SEQ ID NO: 23171 - DNA, 1809 bp, Zea mays
  Peptide Sequence Number=SeqID_64950
atgtcgagcttggcgtgcggcggtgtcatcctgacagtgcacccatgtggcggcacgatccagggtcaccgacgcctcttcctgggggattggcgcgctgcggccagcgccgtgaacgcccacagcgccgccgcggggcgccgcttcaaccgcaccctcgtccagtgccagacccgtgtccgcaccctcaagcacaagcagcggtacaaggaggagctcctgaagcagccggcgtcggggtggtgtcacctcccgcggctccacgcgttcctggccagccccgacgagtcgactccgggctttccggccaaggcgccggcgttcgtcaagcaggaggaggaggagaaggtggccggaggaggcattgggctggtggggagctggactgttccgaggaggccgaggaatgcggccgcagcagggacgggattctgcccgggggcggtggtgacgaagctggcggaggtgtacgagcgcgtggagctggccagaatcggcgccgagaaggtgaagacggagatgcagcaggagatgggaggtgtagaaggccatacgcgcgccggccgccagtccgccaccgcgcaccggccgcccgtcgcggccgcggcgaaaccaggccgtgggatggtgactgatcgcctcccaccagcgggaggacaaagtggtgaccaaccagcgtttcagtggcagcacagtaccaagccaacccaggccgatggagcagcaaaaaacctcagcgtgatcgcacgcaagcccactcacccctgcaccgcgccgcgccgcgccgtggatgcacgcatcatccacccacctatatatacacacgcgtacgacggaaccacgcagaagttatgggtggacgcgacgcgaccgactggccaatcgattgagcagcagcacaaacatcacacgctcctcacggccgcacccaaccggactcgcctcgcctccctttcgaaccagcctctctctccgccagcgcggatgtcgtcgtcgcgccgccgcccgcccccgccgccgccggcgtggacgcccgagccgtggagcgacggggagacgtccgcgctgctcgacgcatggggcccgcgccacctccgcgcgtgcggcggcgcgctccgccccgccgactggcgggcctgcgccgacgccgtcacctcccgccgcgccgcggccggccgggccccgcgcaccgtcgaccagtgcaagaaccgcctggattatctcaagaagcgcctcagggccgagcgctccaggcccaagggggccccgccgacgccgccgccggtctcggggtggctcacccgcctccgcgcgctgctgcacctcgccccctccgctcctcccgggttcgcgcaccgtcttggcgccaaaacgcccaaggtggaggaggaggaggaggtgttggacgagaagccgagcggcggggctcctctgccccgctactggccgccggtgccgaagcggccgaggacggcggtgtcgctgtcgccgttgaccgccgcctccggggaccaccctggaggcggtgggaggaattgcacggaagtggcggcggctctggataggcttgccgggacgtacgagcgggtggaggccgccaagcagagggaggccacgcggctggaggagcggcgcctggaggcgatgcgtgatctcgagatcgagcgcatgcggctcctcgtcgacgtcgccgtcaccgcctccgtcgttgtcgatggcgcccgccgcgaccgccacaaccgccaccggcgacttctagttggtgagagggacttggataactggctggccaaggtctgcagcaactga

SEQ ID NO: 23172 - DNA, 1092 bp, Zea mays
  Peptide Sequence Number=SeqID_64951
atggcccctcctgtgacgtggtcggtccgagccctgggtagggcgaggcggaggctcctccgaggtcgaggtcgagtctatctttcgaggtcgaggtcgagtccgagcccttgggtcgggcgagacggagactgtcggctgaggccgaggtcgagtccgagccctgggtcgggcgaggcggagttcgtcgtcttccggggccgaggccgagtccgagccctgggtcgggcgaggcggagttcgtcgtcttccggggccgagcccgagtccgagccctgggtcgggcgaggcagagttcgtcgtcttccggggccgagcccgtgtccgagccctggatcgggcgaggcggaacttcctatggcgcctgaggccggacttggccgttgtcagcctcactctgtcgagtggcacagcagtcggagcgatgcgggcgatgctgtcttcttgtcagattggtcagtggagcggcgaagtgactacggtcacttcggctcagtcgatcgaagggcgtgcgtcaggataaggtgtcaggccacctttgcattaaatgctcctgcgatacggtcggtcatcgtggcgatttggccaaggttgcttctaggcgaagaccaggcctcgggcgagccgaagctttgtgctgatgggggttaccagctgagattaggagtcttggggggagctgctccttcctcatcttccatggacctagcaccagtccctctccatggcgtggatcagccccagcttcccatggatgtcaccctcctctccctcagggctgctttccccatggtgctgccctcttctatggcgctcctctgctcctccatccccatctcgccctttagccatgaacgccgccaaccctggtgctcgccctggaactgccctttcctgtgctcggcgcctagccctagctcgcccccatctccctccctccctagccgaaccccctgccgtctccatctcggatttgctctagctggagctcttcctcatgccatgcacatcacccaccaggtgtttggtgaaaggtccaagccaaaagtcgtcgtcgttttagaatatatcgagtccattcgaatttggtga

SEQ ID NO: 23173 - DNA, 2604 bp, Zea mays
  Peptide Sequence Number=SeqID_64952
atgaggtccgacgcccgtctggattcggtggtcttccagctcacccccacccggaccaggttcgatttggttctgatagcgaatggccggaaggagaagtttgcatctggtttgctgaaaccgttcgtcgctcacttgaaggccgcccaggatcagattgccaagggagggtactcgatcacacttgaaccaagctcagggttcgatgtgccatggtttacgagaggcaccgtggagagatttgtgcgtttcgtgagtactccggaggtccttgagcgagtcagaacactggagtctgagatcctgcagctcgaggatgccattgctatccagagcaacgatagtcttggattaaaatctgtcgaagaccatggaagaaagttgactgaaagcaatggaggtggacgtgcaaattatgatcctgattcagccacagcaattgttgtctacaagcctggatcaaatccaacgccacaaattcagaatgaaacagcagcacatgaggagaattcaaaagttcaattgctcagagtgcttgaaacccgcaaaactatgttaagaaaagagcaggctatggctttcgctcgtgctgtagctgctgggtttgacattgacaacttgggttacttgatcgcatttgcagagcgctttggtgctgcacgtctgatgaaggcatgttcacatttcatcgaactgtggaagcagaagcatgaaactggacaatggattgaagttgaacctgaagcaatgtctacacgctctgaatttcctccatttaacgcatctggcattgtgttcatgggagacaacatgaagccaaacttggaatcaggctccattaatggagaggcaaatggcgaggatggagctaaagctgatcagaagtccagccagcagatgggatctcatgctgcatatcctccatgggcaatgcatcctccatctggtgcagttgtttacccaccttatcctatgcaaggcatgcctttttatcctggggtgaatccatactaccctccatatcctccagtggatgatcccaggtaccactactcaggaaggaaatcttcgaggaagcactcctcggatagtaaggactcagaaactcttgacgttgaaagtgaccattgcagttcagatagaggaagttctcatggtcgcaagtcacatagaaaggggaagaggtccggaaagaaaaaacctagtgtggttgttatcaagaatgtgaatgtaacatctaaaaagcatggctcatcagagagcgaatcacaatcaagttctgaagttgagtctgcggacagtgacaattcacactccaaatcaagtgaaaggaagcataaaagctcaagttcaaagaaaaaggagggtaggagaactacttttgcctccggagatgaatatagcaaggatgaaatgtcaaatggccacgatgctgagcaaggaaactggagcgcattccaaaatttcttgttgagagcagaagaaaaaacaagatctagtgatgcagacctgtttgctggtgagaaagaacccccatcaaggagaaaacagaatgtaaacacagcagatcctattcttttagctgagagagatggtggcattgtccatgagcggaacatagtaggttttgattcagccaatgggaggactagagctatccgggtcatgtccaatgatgaacttgttatgtctggagaagggaggaactatatgcatagtgaaataaaggagattgaagctggtggaggaaggtacaggagagggacaggtgatgactacatggtttatggtcagggaagtcagatagccagacatagtttgttggatcctcttgcagaggcccagtacaagaatcctgttcagcaggacaagaataggaatggtgtggcggacgagtcctttatgatccctcttaggtccagcttacatgataatatcggagcagaaagcagaactactattgacatagatgttgagcttccttctagaattcataaagcatcagatgaaaaggctggacatcagcttttttacgaacctgacgaattggtgccagagcgtggatctgaagatgtttcatttggatatgatccagcaatggattatgatagccacatgcagactactgtgaaggtggaagatgaaaaaacagaggatgacttgccagttgctgacaatgatgtacagaaggtagagaaagagaagctaaggaatgcaaaggatggttcagataaacgaaggaaagatgccttattgaggaggttatcggcgccaaggaccccactgaatgatgcacaaaaacgtgcacagaacctgcgtgcatataaggcagaccttcagaaactgaagaaagaacaggaagaagagcaaataaagcgattggagaggctcaaattggagcggcaaaagaggatcgccgcaagaggtaatggaaagggtccagggaatggttctcctaaagcgaatgtgtataaatgtcaattggctttgggttggacgagatgggcccctccagttggtatgctacagttggattggcccaaggagcagatgaacctgggttcaattcctggtgattgctatttgccttcaataaagggctaa

SEQ ID NO: 23174 - DNA, 291 bp, Zea mays
  Peptide Sequence Number=SeqID_64953
atgttcggtgtgctttccctcatcttctgtaccttcactctgattcctttgctgaagcatacaaaactcagcttgctgccaaatcaacaagcagccgatgaggaactatcttcatactacagaaatgggtttgcacctcgcaatggatcttcaccttggttaagaagatttctggagaagcacaaaaaaatgagagttgtgcttcttctcatagttctttgtggcgctagcatggtgattggtgatggtgtcctcaccccagcaatctcaggtggatacttaccacaataa

SEQ ID NO: 23175 - DNA, 474 bp, Zea mays
  Peptide Sequence Number=SeqID_64954
atggagaagagtgatggggaaggggtgcgcatctggtgcccaggggaaggagtagagggcgccgagcggcccatcagagggaggaaggaggggacgtcagagctcacaaccatggaggagcagaggggtccgcggcttgtcctggcaggtggtgagctcagacgtgagagaattggcacccgcgccttagggaagaatggctctgcgcaagggacagagaggagggagctggagataggagaggggcaccacggggaagtgctggccgtcgacgagggtggtgctcaagttgggggcatcagctgttgtgaggtcgcatgcccagggaaggcgtcggctggggaagaagacagggagatgagcggctgccagggagcttctgcgctctgggagatggagccgagcaggaggggcattggccaagagaatggcgtccaacgacttgctgaggatggtggcgacgctgagggttag

SEQ ID NO: 23176 - DNA, 261 bp, Zea mays
  Peptide Sequence Number=SeqID_64955
atgaggaagaaggtggcgcttgaggagaaggtgcatctggtggtgctggaaaagcgcgccgggctcgagggttcggatgagtcagaggtctctccggacaaggagaactcttccgactcgtccgaggaagggagcggcggcgacagcgacaacgagggcgacagcggcgatggcggtgacggcggtgatggcggcgacgaccgcagcaagggtggtggaggcgacagcagcggcaagggcagcgacgacggcaaagggtag

SEQ ID NO: 23177 - DNA, 174 bp, Zea mays
  Peptide Sequence Number=SeqID_64956
atggcgcggcgcagcgagggcaagaataccacaacggcggggtgctatgcgcggcgactgcccgacggcaacaacgagggcgcgacgaacatcgacggcatagaggcgagggcgaggcatggcgcgcgaatttggtacactttgatcactgaggaatctcataaccaaaattaa

SEQ ID NO: 23178 - DNA, 264 bp, Zea mays
  Peptide Sequence Number=SeqID_64957
atggccttgcgagacagaatcgacactctatcatcaacttatgctttagagatcagcgttctgtcctttggggttaaagtttcattgggtgcacctaggtgcacctcactggaggacttcggtgactccgagtactcggaggaggagttctccgccgagtccgaggggtccccggtctacacttcccctccggcgtcgtccgatgactcggatgactcccaagggatagccaccgaagtgtggatgtacatccggtccgtctga

SEQ ID NO: 23179 - DNA, 390 bp, Zea mays
  Peptide Sequence Number=SeqID_64958
atggagaagagtgctggggaagtggtgcgcatccggtgccaaggggaaggagtagagggcaccgagcggcccatcagagggaggaaggaggggacgtcagagctcacagccatggaggagcagaggggtccacggcttgtcctggcaggtggtgagctcgaacgtgagagaaatggcacccgctccttggggaagaatggctctgcgcaagggacagagaggagggagctggagataggagaggggcaccatggggaagtgctggccgtcgacgagggtggtgctcaagttgggggcatcggctgctgtgaggtcgcatgcccacggaaggcatcggctggggaagaagatagggagatgagcggctgccagggagcttctgcgctctag

SEQ ID NO: 23180 - DNA, 2970 bp, Zea mays
  Peptide Sequence Number=SeqID_64959
atggcatcatgcggcggcggtgtctgtctcaagagagatcgacgagaggaggaggagaacgacgacgacaagggcgagacgagcggccgcaacaagagaccaagctccggcgcttattacacgggcgcgggagtcgatgctcagagaacggatgacgacgacagcgccgccgccgattacatgtacgagtacgacgacggctacgaggaagaagaatccgctgctgagcaacccaagggcgacgacgcctcggcgcgcgacacggagcagaggtacgcccgtgctgaccgaggacgacgtcccgcgcgcggaatgaggccggacacggccagggtcgcggaggtgcttgtcgatcccggcgcgcttcgcgcgctcgctgctgcgccacttcaagtggtgcctccacccgcagaagacgtcgtggttctaggacgcccatgcgacgggtggtgtcgcggctacgtcgcggcggcggttagggggacggcgcgcgctgcctgggcgctgcggtgccccccgaccccgtcgtgcgcggcggcccgtcgtcccgggagctggtcgacgaggtgggcgcgcgacgacgaccgggcccggtacgcgcggttctggctccgctcctacgtggaggagagcgggggccggatcaggtggtgcggcggcgccggctgcacccggtccgtggagctcctcggcggctgcgacgcggaggccgtggcctccgcggtcgacgtcgtctgcgggtgcaggcacgccttctgctggcgctgcggcgaggaggcgcaccggcccgtgtcgtgcggcacggtgcgcgcgtggctggccaagaacgcgtccgactcggagacggccaactgggtggtggccaacaccaagcgctgccccatgtgccgccgccccatcgagaagaaccacggctgcaaccacatgacgtgcggcgcgccctgccaccaccagttctgctggctctgcctcgacccctgggaccaccacaggggctgcacgcgctacgactcccgccgccgccgccgccatgggccggtcgacgaggtggaggacgaggaggagcaggcgcagcggaccctggccaaggcgtcgctggacaggtacctgtaccactacgagcggtgggagggcaacggcaagtcgctgcgcaaggcgctcgcggacgcggacgagctggagcggtcggagctccagcggatggccaggctgctcgacctcccggcgatggacctcggcttcgtgaccgaggcctaccgccagatcgccgacggccgccgcgtgctgcggtgggcgcacgcctacgactacttcctgtccctggacccggagcgcgacgcggccaagcgcggcctgttcgacgacctgcagagccaggccaaccgctggctcgagtgcctgcacggctgcgccgagctggagaggaagcacctcttcggcgctgccgacgccgacgccgaggacgagcccaccgtcgccgccgccgcgttcatggcgtacaaggagaggctcgccaacctcaccggagtcacgcgcaggttcatcgggaacctcgtcagagcgttcaagaccaacctgccggaagtggtggtgacgctgacgccgccggcatccgacttgcaacacatagtgaagagtggaccaacgacggagagacaaacaacggttggcattggaggcatcctttctacagaagcaactgtgacactacctgtttccaacgtgtcttctttacaagggacatcagcactgcgaccttcatcgtcgtctctagtagtctcacaggaaacggacattgcaaatgatagcgtgcaagaacgacacagccctacaagaaaccttgcccaggcccagcatccagttcgtcctggcggtcatggcggcttcctcagcaatccatacccgagtttctttggagaggctacctcaaccgcgggaccattgcaactctacatgccaaacatggtggtgtcaggtggcacgacatcgacgccctctctcgccttctctctgtctgcgcttggacagcctattacgagcacagctcttggcggctcctttggctcaaacactcgcactgcatggggcaattcagatatggctgctgcgtcgtcctctcagcctgaccgcatgggcatggatcaacaagcaggaaccggttctgccatgaatctgacaattgggctgcatcccaatgcccagcagccaccaccaaaatatgtcaaaatctgggagggtgacttatacgggcaaaggcaagggcagcctgtgtttattagtaaactcgaaagttggggtggaacagtgtccagaaaatattctgaaagtcaatacgttggaaacacagactttctaatatttcgggctttaaatcagcatgggtttcttggacaactacaagagaggaaactgttaccgtcgcaaactctactactttcaatgtatgacaaaacaagccgtatggttggcatgctcttccctaagaacatgctgatgttcaggccagaggccttaactcagccatcaccagtgcagcaggaagaacttatacaccaccaacaacaacaactacagcagcaacagagaaacatacatcgtcttcaacgacaactcatacagaagcagcagcagcaacatatgcagaagctactaccacaacgacttcaataccaagagcagctacatttacagcaacagatgacgcaacaaatacaacagcaacaacaatctctataccagcaacatcaacaaatgcagcatcaacagcaactgtggcaacaaatacaacaacagaagcatcagttgcaacacatggatccccaacaacaacagctgttgtctcagatggtgggtacagaattaggcagtgatgatgacacaagggaagattgggtcacaggggctgggccggcatgcctagggaatcagggagggttaatgagggcttacactcactcacttgagggttaa

SEQ ID NO: 23181 - DNA, 429 bp, Zea mays
  Peptide Sequence Number=SeqID_64960
atggcgataaacttacactacagcatagcgaacatctttaataaccccttaccggcgattgatgacgcgaagtctcccagccacggcggcgtgtggttcccgggatccggtgccaaaggttcaactcaaaccaatacaaagattaaaaagggctcaaatagaaaggagcaaaggaaactgaagtgctccctggtctggcgcatcggactgtccggtgcaccagggaccgttcactccgaactctgcagcttcgggtttctaaggcgcagctccgctataattcaccggactgtctggtgcaccaccagactgtccggtgtgccagcggagcaacggctatctgcacgcaacgatcgactctgcaaagtgaacagtgcaattcagatgtcagagcagaaggtcagaggggcaccggactgtcctgtgtag

SEQ ID NO: 23182 - DNA, 270 bp, Zea mays
  Peptide Sequence Number=SeqID_64961
atggcgcctgaggccggacttggccgctgtcagcttcaccctgccgagtggcacagcagtcggagcggcgcaggcggcgctgtcctcttgtcaggccgggcgcgcgtcaggataaggtgtcaggccacatttgcattaaaggctcctgcgatacggtcggtcggcgtggcggcttggccaaggttgcttcttggtgaagtctgggcctcggacgagccgaagatcatctttattgttaattggaacatggagaaccacccgagaaaatag

SEQ ID NO: 23183 - DNA, 498 bp, Zea mays
  Peptide Sequence Number=SeqID_64962
atggctggtgctctggacccgacacaatggcgttcaaactggaccaagaacctaagctatgcgatgtcacacccggatttaagggacaaagtcggggtgaagctgacagcggccaagtccggcctcaggcgccataggaaactccgcttcaccccgaccccaggctcagccctggaagacgacgaactccgcttcgcccgacctcagggcttggactcgggctcggccccggaagacgacgaactccgcttcgcccgaccccagggctcggactcagccctggcctcagccgacagtctccgcctcgcccgacccaggggctcagactcgacctcggcctcggaagacagactcgacctcgacctcggaggagcctccgcctcgcccaacccagggctcggaccgaccacgtcacaggaggcgccatcattaccctaccccaagctaactcaggctacggggaacaagaccggcgtcccatctggctcgccccgataa

SEQ ID NO: 23184 - DNA, 702 bp, Zea mays
  Peptide Sequence Number=SeqID_64963
atggcaaagctcttcggaaaggtggcgatcgtcacgggcgccgccagcaaactgggcgaggccatcgcgaggaagttcgtcgacaacggcgccaaggtcatcctcgccgacatcaaccgccactcctgcgagaacatagtagcggctctcaacaagaccaaccatggccccgcggtggctcacgcgatgcgcatcgacgtcagcgaacccgacagtatcctggccaccgtcgaggaggcgaagaaggtctacaagcaagatgtcgacatcttctacaacaacgcgggggtcagcaacgtctcctccccggcctcctccatcgacatgatgagcttcaggaacaccatggcggtcaacgtcgaccccgtgggctcgctcggcgacgtggtgccctcggcgtacagcatctccaaggccgcggtcgtgggcgtcgtgcgcgccgccgcggccgagctggggggacacggcgtgagggtcaatgccatctcgccgtacggcgtcgccgccaggtttgacaagggcgtgctgaggcacatcttccctcacgcgactgaccagcagctggatactatgatcagcagctacggcacctacacggtgaccgaggacgacgtggccaacgcggcggtgtacctggcgtccgacgctggcaagaacatcaatggccaaaacatcgtcctcaatggcaagttcggtctttag

SEQ ID NO: 23185 - DNA, 1827 bp, Zea mays
  Peptide Sequence Number=SeqID_64964
atgagggcgcctctcctctcctcgctcctcgtcctcgccgtcgtcgccaccgtgcctctactagtcccggcggtgtgcatctcgcggcacgacaagtccgagagcaaggctgacgaagaagctgctgctactaccgttgccgccgacgagcatggctctgtcaagaccatgtccctcgacgcatacgggccactggagatggccgccaagaagcccaaggagcaggtcctgaacgcgcaagctacgccggcgacgaccgctggcgctgacacatatgaccagaaacccgttggtgaaaaacaggctgaaacggccacggcctccgctgccgatgaacaacccgacaaatacgtggaagctctagttcctgacgagaaggcggaggaatttcccgataaatatgtggaagctctagttcctgacgacaaggtggaggtgaagaagaagaaggtaaagaaggaaaagaaggacgagtctgatgattctgatgtagctacgtcttataagaagaaggagaagtctgatgattctgaggtgtctacatcttataagaagaagaagaaatctgacgattctgatgaagatgcatctcttgataagaaagaaaagaaggcgaagtttgcagcatctgacaaaaaagaaaagaaggacaagtctgacaacacatcttccaagaaagaaaaggaggagagatccgccgattccgatgcatctgcgtatttcgacaaggaagagcagaaatccggcgattctgacgccgccacgtctgttgagaagcaaaagaagcagaagaaggagaaatccggtgattatttcgacaaggaaaaggaggagaaccccgaggaggacgctgcgcccgtcgacgtctccgcggacggcgtgtatgtgcctctcaagaaggagaaatccggcgaagacgccacgccggtcgacgtctccaccaccaccggcaaatacgtatcttcttcttccaaggcaaacggcaagcccacgggaggtcagcccgcagagagctccaccaccgccaccgcggatgcgtacgcgtctccaaagcagaaagtcgtcagcagccagcccatggccagcgccgctcctgacgagcttccgctggcggccaagagctccaccacctccgacgcgtacgcatctccaaggcagcagcaggtcgccagcagccagcccatgtctggtggcgctcccgacgagcttccaccggtggccaagacctctgccacgcccgaaccgtacgcatctctgaacgtcgccggcggcgggcagcccaacgagccggcggcggggaggccgccgaagctgtcgatggagacgttctcggggatgatcaagaggccgttcgccaagttcctgagcccggtgatcaagagcgtgtgcgccaagacggagtacccggaggactgcgagtcgtcgatcgggggcctcccgggggccgcgtcggcggcggccacggacagcgtgggcgtgctgaagctggccatggaggcggtgcggcagaaggccatcgaggcgatgaacgcggccacggacaggatgaacgcgccgggcacggacccgacgaccaaggaggcgctcgactcgtgcacgtcgtcgtacagcgacatcaagacgagcctggagacggtggacgacgcgctcaagcgcggcgacgtcgacacggcgcacaccaacctcgactcggtggagacggacatcaccacctgcgacgacggcttccaggagcgcggcaccccgtcagtcatgaccgaccacgaccaggagctccagaagctcgccagcaacctcctctccatcggcgccgccatccaccactag

SEQ ID NO: 23186 - DNA, 285 bp, Zea mays
  Peptide Sequence Number=SeqID_64965
atggaggtccggcaacttggtaattcacgttcaataactgttctcaatggaggttctgcacaatcaggagtatcaggcctgatagtacctgcagcaactgtaggagcactgggttacggttatatgtggtggaaggggatctcgttctcagatctaatgtatgtcaccaagcgcaacatggcaaatgctgtttcaagcatgactaaacatttggagcaagtgcaaagttctcttgctgaactacaccttcaactgcataatgtgtctactatgacttctaggtag

SEQ ID NO: 23187 - DNA, 384 bp, Zea mays
  Peptide Sequence Number=SeqID_64966
atgtctcgagcaaggcgcgggtatggccccacctacggggtcaccacctcactcgaggtgggcctgggggcatctgtcggtaccctaaatatggggtacccactcttgttgggtcaaggcgggacccctatggctacatgtagccatggtgggacaagcggtctaccacgacttagagcatgtgcccttctagcagggtcgctggcctctgagccagcattaccacgggccctgtcggtgggattggtcgatgattacaccctaggactggatcctcgtgggatggtctcgggcccccacgtgtgccgtccggacctctggccaagggaggtccagcgccgccacatgtcttggccaattaggatgggacctggatctccatag

SEQ ID NO: 23188 - DNA, 364 bp, Zea mays
  Peptide Sequence Number=SeqID_64967
atggggcgcgcggggcttaactacttggtggccgacgttgcctcctctgcggcggcgaggtcgccagagacgtggcagacgcggtcaccgggtaggctagggtcaccggagagggctagaacgggtctagagggcctggcgaacacactggtagactaccgaccgcaagaacgggaccagagaaggaagaataacgaagggaaggtgctccgggggcacgatatcgggctaaaacagctggtcaccgcacggacgcggcgaaccggcacgaccatcaccggcgaagccaaattggccaataccagggggaattgggagaaatttagtgtgggggcggacatctcaccttgggacgggactcaag

SEQ ID NO: 23189 - DNA, 2193 bp, Zea mays
  Peptide Sequence Number=SeqID_64968
atgtcggccgaggagggcgcgtcggcggcggcgtccgcgccgccggaggcggaagcgcccgcggcgggggcaatgggggccgaggcggcggcagccaggaagcgctacgagtcgctggtgcaggtgcgcgccaaggccatcaagggcaagggcgcctggtactgggcgcacctggagcccgtgctcgtgccgccgcccgcctccgggcagcagcccaagttagcgcgcctgcgctgcacgctctgcgccgccacgttctccgcctccaacccgtcgcgcaccgcctccgagcacctcaagcgcggcgcctgccccaacttcgcgtcgccgctggccgcctccgcgcctgtctccacggcgccgccgctagccatcgccgcggcgtcctccgtcgtgcccatctcctccttcccgccgtcgtcgcagcggcgccactccaccggcggcggcggtcgcaagcgccacgtgctggcagcgggcgtacgcagccgtcgacgcggcctcctcgcaccacatggtggttggcgagccggccatctactccacgcctcccacgccaccggcgctgcccgcgccgcgccaggtcctctcgggcggccgcgtcgtccgggaccgtctccctgggccgcggcggagcacccgaagctcaaggctttcctgcgccaagtcggccttccggagctgtcgcgcgccgacctaacccgaggacgcctcgacgcgcgcctcgccgatgtccgcgccgacgccgccgcgcgcgtccgggacgcaagattcttacagctcgccgcggacgggtggcgcgaccaggtagtcacgctcgccgtcaacctccccaacggcacgtccgtcttccaccacgccgttcccatgccggcgccgccgtcgtcaggctacgccgaggaggtgttgctggacgccgtgtcgtccgtcgcagcatccgccgacgtccgtcattgcgccggcatcgtcgctgaccgcttcggctccaaggctttgcgcgatctcgagagcaagcacccgtggatggtgaacctgtcgtgccaagcccattgcttggcacgcctagcgaaagacctggtgcgggagctccctgtggtccactccgccgccaccaattgtgccaagatggccgcctacttcaacgccactcgagccgtgcgcgcgctgctgcagcgacaccaggtccaggagcttggccacgcggggctcctccgcgtcgccgctccgccgtcgactggcgacaacgaaaccagcgcagtattcgcgatgctcgatgacgtgctgacctgtgcaaggccgctccagctctccgtgctcgaggagcccttcaagctgctctgcattgacgactctaccgctcgggagatcgtggacatggtgcacagcgcggcgttctgggcggaggtggaggcggcgcactcgctggtgaagatgatcaccgacatggtgaaggagatggagaccgaacggcctctcgtcgggcaatgcctcccgctctgggaggacctgcgtggcaaggtcaggggctggtgccgcaagttcaacgtggacgaagccatcgccatgagcgtgctggagaggaggttcaggaggagctaccacccggcgtggtcggcggcattcatcctggacccgctgtatcttatcaaggacgtcagcgggcggtacctcccgccattcaagtacctgacgccggagcatgagaaggacgtggacaggctgatcacgaggctggtgtcgccggaggaggcgcacctggcgatgatggagcttatgaagtggcggtcggagggcctggacccgctgtacgcgcaggcggtgcaggtccggcagcccgacccgacgacggggaagatgaagatcgccaacaagcagagcagccggctcgtctgggagacgtgcctcagcgagttcaagtcgctaggcaaggtggccgtgcggctcatcttcctccacgcgacagcaagggggttcaggtgcacgccgacgatggcgcggtggctgaccgcgcccggtacctcatcgcggggcatcgcccgcgcgcaacggctggtgttcgtggtggccaactcgaagctggagcggaaggacttgcggaacgacgacgacagggacgcggagctgctcatggagggagacgacgacatgctgacggatccgaccaccgccattgtggttccctcgtcggtgtaa

SEQ ID NO: 23190 - DNA, 492 bp, Zea mays
  Peptide Sequence Number=SeqID_64969
atggcgccgccggccccatccgtcggtccccgcctcctactccgccgcctcctctctacggctaccgaagcggcggcggagacacctgcgcccaccgcccccagctccgccgccgccgcgaagccggcgaaacaggacccgaggctgctctaccgtcgtttgtcggcgcttggaagcgccggggaggggagcgtgtcgcgggttttgaacaagtgggtgcgggagggcggcgcgacgcgaagcgacgacctcgtcaagcatgtcaaggagctccgcaagtacaagcgtcacgcccacgccctcgagcttctctcctatatagctaccacttggttctgccaacccaaaactgcaaggtccaaaggccatgacaactgggcccacatatctaatggtgctaggtatgataatgttgcccccacgaaacattgcttgtccccaagcaatggcttgaatgccactactggggcgcaatgcatgaaatttcaataa

SEQ ID NO: 23191 - DNA, 114 bp, Zea mays
  Peptide Sequence Number=SeqID_64970
atggaggatgctaaacccatcaagacaccactgggagctaatggacatctcgtccttggcataggaggtaaaatagttgatcaaaagaaaagagggcctccttcctttttatag

SEQ ID NO: 23192 - DNA, 225 bp, Zea mays
  Peptide Sequence Number=SeqID_64971
atgctgccgctcggtgtcaaacggggctgggtgattcgccggaggccactgaagctgttcttggcagaggatggcggccgggaacgctcctatgcgatagcaaccgtgccccgcgacaactgcatgcgcgcggccgcaccagcacaatggatgtcacaaaggaccagtcggatgcgggacctctccgcggccgggactctcgtgattgcgcgggctctgaaactg

SEQ ID NO: 23193 - DNA, 735 bp, Zea mays
  Peptide Sequence Number=SeqID_64972
atgggcgcaattctggtcttggctctgtccgcacaagggacacgatctcgcctcgcccgagcccagcctcgggcaggaacagaaactccgcctcgcccgaccccaaggctcggcccctgtctcggcctcggaagacggtctccgcctcgcccgaccttagggctcggactcaacctcgacctcggacgacgatctccgcctcgcccgaccccagggctcggactcaacctcgactccagaagacggtctccgcctcgcccgaccccagggctcggactcaacctcgactccggaagacggtctccgcctcgcccgaccccagggctcggactcaacttcaaccttggacaacggtctccgcctcgcccgacccctgggctcggactcaacctcgacctcggacgacggtctccgcctcgcccgaccccaaggctcggactcagcctcaacctcggaagagtcaccgcctcgcccgacctcgggctcggaccgaccacgtcacagggggcccatcattaccctacccctagccagctcaggctacggggaacaagactggcgtcccatctggctcgccccggtcaacaagtaatgatggcaccccgcgtgctccatgacgatggcggtcctcagccccttacggaagcaaggagacgtcaacaaggatccgacagccccaacagctgtgcttccatagggctcaggcgctcctccgatggccacgacatcacatga

SEQ ID NO: 23194 - DNA, 522 bp, Zea mays
  Peptide Sequence Number=SeqID_64973
atggttggagggccaagtctcatatctatccatgagaatttatccccaataatttttctccctcggttctggcctctatctcctccatttgcactgccacctgctctgctagttaaaattgttgagaactacgttaccacggatcaccagatccgctcccttccctcccatcagcagattaggcgtgagaagatgtggaagacccgtatccctccccagaagcacgacagtgaaacacatgagacacatgatgtaggattgggcctctggcctctttctcttctctatcttatgagggggtgtacaagttccttatatagagatatgagacccctcatgggcaaagccgcaaatagattgcatattgttgcaaggattatatcaagaacttcacctctactcacttctaggatatacgagatatatcgttatagtctatcattctggcacaatggggatattttgccagtaacacctaaaccttataggtttctgccatcggggctttacaggataccgtaa

SEQ ID NO: 23195 - DNA, 474 bp, Zea mays
  Peptide Sequence Number=SeqID_64974
atgacgatgcctcgccgcgcccttctcttcgccgcggtgctcctcgcggcctccgccgccgcggtctccgggttccacctcgccggggacgagagcggcctcgtgaggggcgtgctcacagcggtccgcgagcgggccgaggccgaggccgaggacgccgcgcgcttcgccgtcgcctaccacaacaggaaccagggtgctgctttggagttcactagggtgctcaaatcgaagcggcaggttgtgaccgggaccctgcatgacctgatactggaggcagctgatgctggaaaaaagagtctgtacagagcaaaaactctgaatctgaacccgagcctttctgttgcttctgatgaaggctctgggcaaggagttgccaagctctctcttgaagcagacatcatacacgaagaggctcacctgcacaccattgagaatgatggactttccagcgatttcgcatcatccgcttag

SEQ ID NO: 23196 - DNA, 957 bp, Zea mays
  Peptide Sequence Number=SeqID_64975
atgcccggcataccgagggatgtcgccgagcactcgctggatatccgagccggagcccgacccgtcaagcagcctctgcgccgattcgacgaagagaagcgcagagccataggcgaggagctccacaagctaatggcagcagggttcatcaaagaggtattccatcccgaatggcttgccaaccctgtgcttgtgagaaagaaaggagggaaatggcggatgtgtgtagactacactggtctaaacaaagcatgtccgaaggttccctaccctctgcctcgcatcgatcaaatcgtggattccactgctgggtgcgaaaccctatctttcctcgatgcctactccgggtatcaccaaatcaggatgaaagagtccgaccagctcgcgacttctttcatcacacccttcggcatgcactgctatgtcaccaagccattcggcttgaggaatgcgggtgcgacgtaccagcggtgcatgaaccatgtgttcggcgaacacattggccggacggtcgaggcctacgtcgatgacatcgtagtcaagacgaggagagcctccgacctcctttccgaccttgaagtgacattccgatgtctcaaggcgaaaggcgtgaagctcaatcccgaaaagtgtgtcttcggggtaccccgaggcatgctcttggggttcatcgtcttcgagcggggcatcgaagccaacccggagaagatcgcagccatcaccagcatgggacccatcaaggacttgaagggcgtacagagggtcatgggatgtctcacggctctgagccgcttaatctcacgcctcggcgaaagaggtctgcctctgtaccgcctcttaaggaaggccgagtgcttcacttggaccgctaaggccgaggaagcccttgggaatctgaaggcgctcctcatgaatgcgcctatcttggtgcccctaactgccggagagccctcttga

SEQ ID NO: 23197 - DNA, 285 bp, Zea mays
  Peptide Sequence Number=SeqID_64976
atggcgcctaagaggggcaccctcaacttctttgccaccgccacaggggcactctgcctcgccaaacccgacgaacttgtcaacgcggactcggcgccccagcgttccttggggaacaaaatggagaagcaaggttttggccaacccaccaccaccattaagcggcaagcaggggaggccccgccattgacccccaagactgtcagcgtcaagcatcatcacagaccaagcaacgaagaggtggatgcagcagaaccatctagaccccatgccaccccaggatga

SEQ ID NO: 23198 - DNA, 414 bp, Zea mays
  Peptide Sequence Number=SeqID_64977
atggagctcaaggcgtcaagtggtggctcactcggactcgcgctcctctgcaaggcactgttccccatgaggccgctaaatgtggagatgcactgtagatccggtatcctgcgcaagatggttcttttagctgctagtgtacctggtgccgaggttgtgctcggacgaggcggaagtctgcccgaggtcgtgaccgagcctgcttcgagattcacacttgtacacaacacagttgaaggtgtgacctcctgcgggattcgcgaggagcaggtagccgagcccgggctcggacgaggcggaatttgttccgaggctgaagccggcttcgggcgaggcgtagtttcctcccgaagaccagcccacgctttgtcgtttgcatgtccagcatggggaacagtagtcgttgtagcttag

SEQ ID NO: 23199 - DNA, 204 bp, Zea mays
  Peptide Sequence Number=SeqID_64978
atggcccgatctgggaggagagaccgaggagaggccgagaccccgagacggcgaggaacaactgctttggactttggagacggaatatacattctatttatacaacaacaacaacaacaacaacaacaacaaagccttttttgtcccaagcacgttggggtcttcgttggatatgtccaaaccatctcaagcgatgttgcataa

SEQ ID NO: 23200 - DNA, 237 bp, Zea mays
  Peptide Sequence Number=SeqID_64979
atggcgaatgcgagggacgagatgttcggaggcggatcgcagaggatccggtcgaagatggtctgcggctgcgcggcggtgcaccagccacgacaacggcatccggcattgcagagcatagcttcgcacgagaaaggacacggtcgagtcacgcgtggtatggcgaagctccctggcccagatccaaggcccgaatggatacccaggcgaggtccgcgacggcggcatgtccggtag

SEQ ID NO: 23201 - DNA, 459 bp, Zea mays
  Peptide Sequence Number=SeqID_64980
atgcgtgggcgtcacctgttatttgcttcgtcactgaactatcgccgcacgggctctgttggatcggagaagggtgaagatgcgaggagaagggtaaacatgcagttagctgaccatgattcagctgatagaccatgcaattggtgctattttctcggcaacagattctgtttgcaccttacaggtgttaaccaggatgaaacacccctactctatagtctagtttttggtgaaggtgttgttaatgatgccacatctgttgtgctcttcaatgcaattgaaaaccttgatattaataattttgatgctattgttctgttgaatttcatcggaaaatttctctacttgtgcttcaccagcaccatacatggagtagctaccgggttgcttagtgcatacattatcaagaagctttgttttgccaggtctgcgcacaattctctttctctgtgggggtag

SEQ ID NO: 23202 - DNA, 279 bp, Zea mays
  Peptide Sequence Number=SeqID_64981
atggggccactgatcggcgcgcggagaaagattttccccaaatacccacaatggggtattaggatgttacactatgacagccagcggacttgctacacgttcatgaaactgagagaaatatacttcgacgacgatggcaagctggcgggcgtcgacgggatcctggccgagataataaagaacattgacctttcggaattgcgtgaactgggttctggaacctttagtattgtttaccatggaaagtggagaggctctgagcctctgatgttgctataa

SEQ ID NO: 23203 - DNA, 165 bp, Zea mays
  Peptide Sequence Number=SeqID_64982
atgaaaaggttatgtgtccatgtatcatataggcgtatagctgtgtatatatttggtttcgtgaaaggtgcaatattaggtccccttataatgacggttgttatagcgttgaagaacttgtacacagagtttgtacttgctgatggagaggagacgagcagctag

SEQ ID NO: 23204 - DNA, 219 bp, Zea mays
  Peptide Sequence Number=SeqID_64983
atggcagcgacccatgtggcgcagagagtcaatggcctcgcttcagtaacgcgtgagccactatgtggtccgtgtactttggtcgtagcgcccaccgctagagtgggcaggttgagatcgggtttcccccgtggtccatgctatgtgtcgtcggacatgcgacaatgctgggcttcgcctagtgaggggagaagtggtcagcaccactcttccttgtga

SEQ ID NO: 23205 - DNA, 375 bp, Zea mays
  Peptide Sequence Number=SeqID_64984
atgcctcagctcaagcttggagaagcttcacggctccacggggaagcagtccaggggctggtgcgcgactgggggtcaacaggaggggctggccactacggccgtgctcgggcagagatggcgtgcggtggtgctcgctttccacggcgaactccggtgatctttggctcgagcggggctttggctgcgcgagtgcaaacggctaaggcctctgggggcatttataggcgagggcgaggtgcagacgcgtggggcgcgcgctgccgcggccagtccgcgctcggctggcctgacacagcgtcgagcatgtggctccttgcttctgcccgagttcaaacgctcataggttggagatcttcgcgtatttgggcatga

SEQ ID NO: 23206 - DNA, 117 bp, Zea mays
  Peptide Sequence Number=SeqID_64985
atgcagcttcatatccctagaggtttgaaggcagaagtcgtatttgcatttatagtcatatgcactcatgagcctaatgttaagaagagagttgtggaatcagttgggggtacttga

SEQ ID NO: 23207 - DNA, 408 bp, Zea mays
  Peptide Sequence Number=SeqID_64986
atggggctgctgccgccgggaagcgctacaaaggtaaggagcacaataacatgttcttatttgagaaacttacccctcttaagtaaaaacattagtactaaggtggggtcaacactaagcagagttacaggcgtcaagctatccatccgcgaccacgagtctaaccctaaccaaaagaacatcgagctggaaggcaattttgaccagatcaagcaagccagcgacttggtgcgtgatctcatcgcaaccatcagcgcaagcatgccagcaaaaaatccatcttctgctatggcgccagcaggaggaggccgaggcagtggtccggggggcacgagcagcaactacaagaagaagctgtgcgagaacttcttgaagctatgcgagaacttccaacatgactatgtatga

SEQ ID NO: 23208 - DNA, 234 bp, Zea mays
  Peptide Sequence Number=SeqID_64987
atggacagactacctatagtggtttactgcgatgtgggatcaggggttatgggccacaacatactaccaccagtggtaccagcactaggaggagcttctagaggggagggtgataccacagaggaggatgacacgaaggttcttcgtaggctaagcgagacaaagtgtgagccatcaaaaaggtacatttataccttcgccttgtcagaaaataattccagcgtaatgcgttag

SEQ ID NO: 23209 - DNA, 219 bp, Zea mays
  Peptide Sequence Number=SeqID_64988
atggcgctcatcatgctcatcggcgacagcggcactacgtgccacgccatgtggcatattactcatgccccgcccctgtcgctcctgtcgccgtcccggtcccacgaatgcgacacaaactcggaggacaagcctgtgaagatgcccgtggagttagtgagccagaaaatcagatgtacgtacgtgcgtaccttggaggacgtaggcgagtcagagtag

SEQ ID NO: 23210 - DNA, 396 bp, Zea mays
  Peptide Sequence Number=SeqID_64989
atgggcaccattaggtgtgtcaatgccgtgccgggtgacccgtttggccatctacaggggacagtgcagcttggtgctggcttaggtgtcgatcaagagatactatgctctggtgctattccccatgtctctcaatatattcgtagtaaaaattgggacacgagggttgcggcagcccatgcgattggtgccatagcagagaatgtcaaacacacatcattgaaggacttgtatgcttccgtgcaagcagaaaaacatgcttccggtttctctgatggaagtgatgatgctggctcagcattgccacggactgatagtgcagcaacatctgatcttgcttacatgttgtttcagaatctcagactttacttacatgttgttttaaaaattggctag

SEQ ID NO: 23211 - DNA, 189 bp, Zea mays
  Peptide Sequence Number=SeqID_64990
atgtcgggggtgatgccagcagagacggcagcgctgatgctctccgacgcctatggttgcggtggtcgtggcggttttggtgaagcgaggacctcacccgactcgtcgctcaactcccaccgccaagaccttctaacgatggctaaggttctcaatcgcctccctatgcctgactccaacggtcaatga

SEQ ID NO: 23212 - DNA, 555 bp, Zea mays
  Peptide Sequence Number=SeqID_64991
atggccttgcggaataatgggcctggggccttccgtgaggccttcttgccttctagtggacccgagggatatccgtcccccacagttgtgattgtaacaagtgactggcgtgtgctcaagcgggtgcacgaggtcttgccggagtggctttctgcactgaggtatcacttcaagacatcctcctcctcctcgctctctccgcctcgtgacctcttgattcttctcgaaatgtcaccccccggctctctccgcctcatgtctctcgttggctataataatatcgtatctgctgccctctccgccttccctcccagcgtcgtctccactgccctccccttcgacctccctaccagtgtcgtgtctgcggtcctccgtcctccccctttgcctctgcaccgtatccacgaccctccccctctgcctccgcgtcgtctctgtagctcggaccgcctcgtcaccgttgttgcgcccgtttctgcccgtttgatgcctcagtcgtcgaaattgtttgagaggtgctctaggaagtcccccgagaagatgcgactattgtag

SEQ ID NO: 23213 - DNA, 1755 bp, Zea mays
  Peptide Sequence Number=SeqID_64992
atggtgcttcctgttgacgtggctggcctgcgccctaggttgggcgacgtggaggctcctccgaagccgaggtcgagtctgtcttccatggccgaggccgagtccgagcccctgggtcgggcgtggcggaggtcgttcggcagaggccagggcgtagtccgagccctggggtcgggcgaagcggaggcctggctgcctgtcagtctcactctgtcaagtggcactgcagtcggagtggcgcaggcggcgctgtccttttgtcaggctggtcagtggagcggcgaagtgacggcggacgaagcagccgccgcaggcccgctcccgcccgcgcctgacggcacatccgccccggccgcctccgaccccgcccccgcccccggccccgaccgccgtgcccacctcgcggtccggctggccttgcctcctcctcatcgcttctctcagcctcaggccaacacgcagcccaggtccgccgtcgccacggaggtgaggtggaaggagcgtagggcctccgcgcttggctcgctgcagcgagccgcggtcaggcgcaactgcacacgggaggacgccggcgtggcgtgggaggaggagttcgagagcgtcgtcaccctcgcggcgatgtcggagcgagagggcgccgcgttccacccatgggagctcgccttctgcgtcatcagcatgagctttgaagatgatattaacaaaggcccaaagaacaaaccatcaattctgggaactgtttctctcaatctagcagattatgcattgacggctggagagacaattgagataattcttccgttgtctatacctggtggtgcacctgaacgagcctcatcccttcatctcactctgagtatggttgaattaagagcttttcaagaaacatctgatgcatcacagcgatctgctgcaaccttgccattgtccccatcacctagtgattctcttcctggaggaaaatatgaggttttggttattaaagcagggttgaggaaggtaaaaattctcacagatctggtgtcgacacgaaggcctaagaagacttgccagggaggtggcgaagataagttctgtgttaacagtgatagtgttgaatatccatgcgatactgagtctcttgatgacgatctagatgacagagttgaggaagatgaatttggagattcaactatcaggaagtctttcagttatgggtatctgcaatctgtcaactatgttggtggcctagtttatgcccatgcaaagattgatggggagcatgaggactggatatattatagtaaccgaaaaactgatgtcggtttccatgtagagaaaggatcaagaggatatggattagcaaatactatggtgtcagaatttggtgatgacaattttgtcattgaaaattgggagttgaaggagataattagttgtgatggtcgtatgaagctttcatcccagatgttctttgcatcaatagaccagagaagtgagcgagcagctggggagactgcatgtacatcacttgtagctattattgcagactggttccaagcaaatcagaatattatgcctatccagtcacagtttgacagccttatccgtgaaggatcactagagtggagaaacctttgtgagaacgagacatatagaaagcgttttcctgataagcactttgatcttgaaactgtccttcataccaaaattcacccgctgacagtttcccccagcaatcttttatttgatctgtcttattatgactatggatga

SEQ ID NO: 23214 - DNA, 1988 bp, Zea mays
  Peptide Sequence Number=SeqID_64993
gccgacctcaagacgcacgccaagacctgcggcacccgcgagtacagatgcgactgcggcacgctcttcaccagacgggacagcttcgtgacgcatcgcgccttctgcggcgctctcggggaggagaccggcagggcactggcgccaccggcgccgccatcccctcggccgcctgatttggaggctgaggagaacgttgacaacgacaaggaggaggaggagaatgaggattctgcattggccgaggtggaggtgcctcagcgtgtggaggtggcggtgccagaggagccagagccagagccacagcgcattccatctccaccgccattgccacaggagccaccgtgccgtccgtctccacctccattgccgcaggagcaaccgcgccgggtgtccccgcctccgttgccaaaggagccaccgtgccaccatccgactccacctccactgccaaaggagccacagcggcttccgtttcctccggagcagcaggcagttgtggcattggtgccaaatgtggatgagccagaggtggctgctgtgggaactgtggctgccaaattagaggatgaaaccgatcaagatgagactacctgtttccaggaagctgatcaatacaaggatgccgagctcgaggtctccaatctgctggacaaggacaccccgatgcttccttgcttcctcccctcgccctcagaagccattggcaccgatggaagcagcacaacctgcggcgcgggcggcagcgtttccaattccatcgtgccatctacaaccaccaacaccttcgccggtctgttcgcgtccgccacaacgagcaccacttcccagagcagatctctgcgcgacctcatcggtgtggatcccaccttcctttgccttgcgatcggagcgccctctctgttcccgcagacaagcgcaagcaactcaggcaccttcgctccgcccccggcgccacacatgtccgcgacagcgctcctgcagaaggcaacagaggctggagcgacgcaatcgagctcatcgttcttgaaggagtttgggctcgcttcttcgtcatcatcacctcgaccaaagcagcagcaaccccatggaagggttgctgaaaccagcacggacccatggcagtacaggaacagtaatcagcaaatggagatggagcgccaccagagccatcaacggagggagatggagtccagttcgcaaccgtggcagcacccccgcattacccagcagatggagatggagcgccaccaccagcggagtcatcaacagagggagatggagtccagttcgcaaccgtggcagcacccccgcagtacccagcagatggagatggagcgccaccaccagcggagtcatcaacagagggagatggagtccagttcgcaaccgtggcagcacccccgcagtacccagcagatggagatggagcgccaccaccagcggaaccatcggcaaagggagacggagtccagctcgcaacaatggcaccaccaccaccaccacccgaatgaccagatgatggggctggagagctaccggagtaaccagcaaatggagatggatcccagttcgcagcaacggtgggcgcagcaccagaggagcaaccagcagcagcagatggagatgatggagcggcaccacctgagtaaccagcaaatccggagtacccagcaaatggagaggagggcgatggtatccgggggtggtctgggccttggcctcgcatacgaaagtggaaacccaggcttgcccttgcccgacctgatgacgggaccatcgccactgttgggtcctaagcctgcgacgctggacttccttgggctcggcatcggagggaccatgggcggctccacggccagccgcggcctcccggcattgatggttggaagagagctggacatggggccttcggcacaggtgcctcctgctgctgctgcggcgccgtgggaggacgcaaagaggaagaccaacggccgcacgatcct

SEQ ID NO: 23215 - DNA, 603 bp, Zea mays
  Peptide Sequence Number=SeqID_64994
atggcggctgcgctggcttcttcacgcaactcccaccttcccgccatgcgcagcagccccgctgtctcgcctcttcccaacaactatcgcatgcgcgtcaaccccagcatcgcttacgtcgcgagaccagagaccgccgccgcgtgcaagcgtgggcaccgtcatcatcgtgcttcccatgatgacaagacccgacggacgacgtcgcgatcgccgctggtgatgaggcgccgctggcgacgcagcgcgtcacgggacagtaggaggaggaggaagggaagcgacgctcgcgccgactactacaggcgaccggacgacgacgacgctcatcgccacggctactacgacgacgccccaccgcgcgggccgatacgagcaagcaggaggcccgccgagtccatcgcgaggcctctcgtcgctgccgccgaagacagaaagcggtcgtcgccagggaaggaggcggaccaagaggatgacgccgaagccagacgcagacggcacgagatccagcggatgagggaggaggctcggcgggagctggacaaggtggtgacgactgtgtggttcaacgacccttacatctcccccacgtgtgcctgctga

SEQ ID NO: 23216 - DNA, 1095 bp, Zea mays
  Peptide Sequence Number=SeqID_64995
atggccatggcgtttcacttccacccgctggtcgcctcgcgcgtccacttctctccgctcccgttcgccgccgctacgggggcaccctccccctcttcctccgtcgccatcgcggcgcactaccaccaccacggccgccgccgcttctccgccatcgtggccacggccaccaccacggagttcaacttcaaggcatacatggaggagcgcgcggtcgcggtgaaccgggcgctggacgcggccatccccgccgggggcctccccgcggcgctgcacgacgcgatgcggtacgcgctgctggcgggcgggaagcgcgtgcgccccgcgctgtgcctggccgcgtgcgccgtggtgggcggggccggagtcctgggcgatgccggccgcggcggccgtcgagatggtgcacaccatgtcgctcgttcacgacgacctactcctgcatggacgacgacgacctccgccgcggcaagcccacctgccacgtcgtctacgggcgagcccatcgcggtcctcgccggggacgcgctgctctcgctctccttccaccacatggccagcgtcggatcctaccctccggccgttgacccggagaagcaccccgcccgcgtcgtccgagccattggcgagctcgcgcgctgcatcggatcggagggactcgtcgccggccaggttgtggatcttgagatgacaggcacgtctcaaactgtgccccttgaactcctcgagtacatccacctccacaagactgctgcattgctcgaggcctcggtcgtgatcggggcgatcatcggaggcggcacggacgagcaaatcgaggcgctgcggaaatacgcgaggtcaatcgggctgctgttccaggtggtcgatgacatactcgacgtcaccaagtcgtcggaggagctaggcaagacggcggggaaggacctggcaagtgacaagacgacgtaccctaagctactggggctagccaagtcgcgggagtttgcagagaagttggtctctgacgcaacagagcagctcgcttgcttcgacgaggagaaggcagcacccctgttgcacttggccaactatatcgcccacaggcagaactga

SEQ ID NO: 23217 - DNA, 840 bp, Zea mays
  Peptide Sequence Number=SeqID_64996
atgacgtccggggcggcggcggcgggaggtctggggcggacgccgacgtggaaggagcgggagaacaacaagcgccgggagcgccggcggagggccatcgccgccaagatcttcacgggcctccgcgccctcggcaactacaagctgcccaagcactgcgacaacaatgaggtgctcaaggcgctctgccgcgaggcggggtgggtcgtcgaggacgacggcaccacctaccggaagggttgcaggccgccgccggggatgctgagcccgtgctcgtcgtcgcagctgctgagcgcgccgtcctcgagcttcccgagcccggtgccgtcctaccacgccagcccggcgtcgtcgagcttcccgagcccgacgcgcctcgaccacagcagcggcggcagcagcacccacaaccccgccgcggcggccgcggcggccgccgcctccctgctcccgttcctccggggcctgccgaacctgccgccgctccgcgtgtccagcagcgcgcccgtcacgccgccgctctcctcgcccacggcggcggcggcgtcgcggccgcacaacatagtccgcaggcccaactgggacgccgccgccgccgtcgtcgccgctgaccccttccggcacccttgttcgcgcttccaggccaccacggcgcccgcgtcgcccacgtacaacctcgtccacccggcctccgactccatggagctggacgggacgacggcagccgtcgaggagttcgagttcgacaagggccgcgtcgtcacgccgtgggaaggcgagcggatccacgaggtcgccgccgaggagctcgagctcacgctcggcgtcggcgccaagtga

SEQ ID NO: 23218 - DNA, 819 bp, Zea mays
  Peptide Sequence Number=SeqID_64997
atggcgcgtccacggcgctccgccaccatccgttgccaggtgaagacgacgacgcattgccctgttggagatcctacaattttggaccttttgctcggcgccataggttatggcgccgaggtaacacagctcggcgccatagcctatgacgctgaggtcaaggaggctgagagaccgtcacgaagaggagacgagcacgctccacggcgcgcttcacatgaaagaatctccgatagcatcaatgcagacacgacactgcgacgcgagcggagcaactgggcgtgcgcgctccgcttgccgctggcgtgcgcgagcgcgcctgggagatggacgctcgtcgctggcgtgcacgagcgcgcctgggagatggccgctcgccgctgggcgtgtgcgagcgcgcctgggagcgcctgggaagtaaggaagaatggagatggccgctggtggcgtgggctagtggcggctggtggagaagacgaatggatggtgactgtgttcgaaaccctaaaatgtgaccaggctggcctgagcacggcccactatagcgtgccgggttacttgggccgttgggccaccaaccagagcacggcccagcccgcgaaatgtgccgtgctggcccgtgtaatttttgttcgtgctggatcgggctccgtgccactaatttcgtgtcggactcttgctggctcagcaggcacggcccaaacctgcaggactagctacgcccaccgtccgtggctggtgcgcccggcagtggtaactggacggagacggacggtacagtacagagcggggacgggggaccatctggcgccgccgtga

SEQ ID NO: 23219 - DNA, 873 bp, Zea mays
  Peptide Sequence Number=SeqID_64998
atggaggccgagaagaaggcgccggcggtgtcagacgtgggcgcgtgggcgatgaacgtcgtcagctccgtcagcctcatcatggccaacaagcagctcatgtcctcctccggctacgccttcgccttcgccaccacgctgaccgggttccacttcacggtcacggcgctcgtcgggtggatctccaacgccaccggctactccgtctccaagcacgtcccgctctgggagctcgtctggttctctctcgtcgccaacacctccatcaccgggatgaacctcagcctcatgctcaactccgtcggcttctaccagatctccaaactgagcatgattccggtggtctgcctcatggaatgggtgctgaacagcaagcactacaccaccaaggtcatctcggcggtggttgtcgtggccgccggtgtcgggatttgcaccgtcacggatgtcgaggtcaatgccaaggggttcatctgcgcttgcgtggcagtgttctgcacgtcgcttcaacagattttcttcatcttgctttcctgctccctggccgtcttctgcaacatgagccaatacctctgcatcggccggttctcagcgacctcgtttcaggtcctgggccacatgaagaccgtgtgtgtgctgatcctcggctggatcctgtttgactcggccctcaccgtgaagaacatcctcgggatgctgctcgccgtgatgggcatggtggtctacagctgggccatggaagcggagaagaaggtggcagcccctgtcccccggatcaagagcgaaatgctcgacggggaggacgtacccctcaaggccagggtgagcggcgtgcccgcggtcgacctcgaggacggcgagatgaagagctag

SEQ ID NO: 23220 - DNA, 348 bp, Zea mays
  Peptide Sequence Number=SeqID_64999
cagagtcgcgggaagtacacggaccgctgggaggctaccaatctggtgcgtcgtctagaggatgatctctggggtgtagatgcctgctcagagcactatgatattacccccgccattcgacccgatagtacggggagtgtgattgtctcacccgttggtgaaggcaatcctatgttgagcagcacagtcaacctagtcgctatgctcaacactgagctggaccacgctccagacaagctgagcagggctcatgctgaaatcgcggaggtgcgtgctgagcgcgcggagcattgccaccaggagggtggttctctcgcccttgctggtgtgatagaaactcccaagtaa

SEQ ID NO: 23221 - DNA, 477 bp, Zea mays
  Peptide Sequence Number=SeqID_65000
atggagggatttggtcgcggtgagacgaggcacgggcgcacggcgttgggcgcggatggtccagttggtgtgctgcgcggtcgcgtcgatgacggacggcggggcgtgaattccggggcagggcgcggtccatggcttagcgcggccgggtcgaggcgccgggcttcggtcggggtagcgagcaggcgctcggtgcggggctgggcaggggctcaggcgcggctggagcgggtgtcctggcggctggcgcggtcgacagcgggtgctcctggcagcggtcggctcggcggcgtcagggcgtcgcggcacgggcagggcaagcagggcagctccatgggcgcggcttggacggggcttcggctcctggtcgggcagggcgtggcggcgaagaacggcagcacacggcgaggactacagaggaatggctggaactgggagatgaagaagcacctgacgtgtggggcccttgcgtcatag

SEQ ID NO: 23222 - DNA, 474 bp, Zea mays
  Peptide Sequence Number=SeqID_65001
atgcggttccgcggggggaggtccgactacggcgagaaattcccacccagtcgtcgccgcgcgcacccggtcactgccctgtgcgtgtcccgagcaaccacccgaatgcccaggacgaggcaatcggagcggatgggcgctgatgacgcggttcaacgacggcggcggcggcggtctcccacgttcactgcctcccgctctcttcctcctctggtgaacgcaatggactctcagctgggcgtgagtgcgggatgggtcacggaggggcctatttatccccgggcgaccggttcaaactccgccggattcggtcagcccgctcctatttccccggcggctggatcggtcacgaacgcgccgcgccgtatggagaagacggcgctgtcaagccggtcccacgggtcagcgcctattcctttcctgagcgcgcgagcgaaggtgcggctggtcaagcgggcccgcgcggcagtgtga

SEQ ID NO: 23223 - DNA, 2769 bp, Zea mays
  Peptide Sequence Number=SeqID_65002
atggatggtggacctccccacatgaccccagggaatgtagcttcacaggctacatccctgcttcggattgatttgcttttgaactccgaagagctggactatattttatggacttattccattttcccgtggaagggatttctaggggtgcaaccattgtataccgtcaccagtaattcggctgtgcgagctggagaagaaaatgctgcctccctctatgttttatctgttattgactcgttaaaaaagaggattaccgcagatcgtttgacttacattaagaataggataggggagaacaagactaatatcagcagctatacacagaggacttacaatttatcaaaaaataggcaaattagtacatcaaagggtactgattcagcatcaaatttgctcacaaaaaggcaagatgatgcgctatgcaccctgcatagtcttgatattattccggttgacaaagatggtggtacttttcaagacgaaagtcctttctcttcatctaatgttatgtttggtggaaatcttggtcccaagaatgctattattagaccaattaaactaccagaagtgccaaagcttccaccttatacaacatggatatttttggacaggaaccaaaggatgacagaagaccaatctgtacttggtcgacggaggatttactatgataccagttgtggtgaagctctaatttgcagtgatagtgaagatgaagccattgaagatgaggaggaaaaaaaggaatttaaacattctgaagatcacattattcgtttgtgcatggtgtttatggccaggtatgaaattctgcatggtgagaaaactaaggattcttgcaagaaagggactgagcataatgtcaaagtggaagatttgtactgtgacaaagatttggatgcagcattggattcttttgacaatctcttctgtcgacgatgtctagtgtttgattgcaagctacatgggtgttctcaagatttagtatttcctacagaaaaacaaccagcttggagtggcgttgatgacagtgtaccctgtggtattcattgccataaactggcatctgaaccagatgctgctgctggtgctgatcacatgctttttgatgttgaggagccaactcactcatcagacaatgtgatgaaccagccaggttcaaataggaaaaagaacggctccagtggaaggaagactaaatctcaacaaagtgaaagctcttcaactgcaagagttatctcagaaagcagtgattcggaagtacatccaataagcaataaatctccacaacactcccctagtccctcaaaagttaaaattgggccgaaaggtggaatcagaaagattaccaatagacgaatcgctgagagaattcttatgagtgtgaagaaaggacaaagggaaatggcatcatctgattctaattttgttagtggatatcttttggcaagggacatgaagcttaggtctgatacacgaaatggaaataaggaattaattgtatcctcacaacagagttctccaagcacaagaagttccaaaaagaagagtacacctcaaattgggaacagctcagcttttgctgaggctcataatgattcaacagaggaagcaaataaccgtcattcagcaacagatggttacgatagttcaaggaaagaagaattcgtcaatgagaatttatgcaagcaggaggtgtacttgagatcatggaaggcaattgagcagggacttcttgtgaaaggattagagatttttggaaggaacagttgtttaattgctcggaaccttcttggtggaatgaagacgtgcaaagatgtttttcaatatatgaattatattgaaaacaacagtgcctctggagctcttagtggtgttgattctcttgttaaaggatatattaaggttacaatttcaaaaggattaccgaaaggaaggatcagccttgtcgacaatataatccttgtggttgtcaatctacatgcggaaagcagtgtccatgtctttcaaatgggacatgttgtgagaaatactgtgggtgtccaaaaatttgcaagaatcgttttcgaggatgtcactgtgcaaagagccagtgtcgcagccgccaatgtccatgttttgcagctgacagggaatgcgatccggatgtttgcagaaactgttgggttggtttttaactcggctgaaacatgcctggtttctcatttaacagctatgaactctggggttaaatactacacaatactaggaaacatgtgtggtgatggtacattgggagttccaaaccagagaggagataattatgaatgccggaacatgaaactgcttcttaaacaacaacaaagggtcttacttggaagatcagatgtctctggctggggagcattcctcaagaatagtgttagcaaacatgaataccttggtgagtacactggggaactaatctcacacaaagaagcagataagcgtggaaagatatatgatcgtgagaactcatcgttccttttcaacctgaacaatgagtatgttcttgacgcatacagaatgggtgacaagctgaaatttgccaaccatgcccctgacccgaattgctatgccaaggttatcatgaaagaatcctcgctggtgaagagtttattctacgattaccgctatgagcctgacagagctcctgcttgggcccgtaagcctgaggcgtcgggagcaaaggatgatgggcaaccgttcaatgggcgtgcaaagaagctcgcccaaaacaaccgaggctga

SEQ ID NO: 23224 - DNA, 164 bp, Zea mays
  Peptide Sequence Number=SeqID_65003
atggtgtcaaagtgcattgtcggagcggtccatttggccaccggccgtccccgcaagcgggcgtggtttgaatgggacttagtgctagttggcaagaacggcatctttgcctcccgcgccgccaatgcccccgccacggccccaacctctgtccgaggcaagag

SEQ ID NO: 23225 - DNA, 282 bp, Zea mays
  Peptide Sequence Number=SeqID_65004
atggcgatgacgctcgcgggcatgcctaggaaacgaccgatgacctccatccagctccccaccaccacacatcgaaatctacgtgccagccgcatgccccatcaagcccctggagacactgtcgtctgcccctcgcctgcctacctcccgtcctcacgcttagacatccaggccaccgtttccaatgtaggattacggggaggctacgctagcgcaaaacgaaattttcaaccccataataccaagaactactgcggttataggtcatggaattaccactag

SEQ ID NO: 23226 - DNA, 639 bp, Zea mays
  Peptide Sequence Number=SeqID_65005
atggactgctccagcgacacggccgtctgcgccgtggccgtggccgcggccgcggcgccatcacctccttcgtcatcgccacggccgccggcgccggcgctgagcccgtgcgccgcgtgcaagatcctccgccgccgctgcgtggaccgctgcgtgctggcgccctacttcccgcccaccgagccgcacaagttcgccaccgcgcaccgggtgtttggcgccagcaacatcatcaagctcctacaggagctgccggaggcgcaccggggcgacgccgtgagcagcatggtgtacgaggcggcggcgcgcgtccgggaccccgtgtacggctgcgccggcgccatctggcagctgcagaggcaggtgaacgacctcaaggcgcagctggcgcgcgcccacgccgagctcgccggcgcccgcgcccagcacgcgcacctcctcgcgctcctctgcgtcgaggtcgccgcctcctcgccgccgtcctacgactgcgccgccggctactccgcctccccctcgcgtcaccagctagcggcggtcgtcgcggccaaccccgtgatggccgacgccgtcgacggcgccttgcatcagacgcaggccggccccgtcagctgggccgaggaggcgctctggacatga

SEQ ID NO: 23227 - DNA, 1209 bp, Zea mays
  Peptide Sequence Number=SeqID_65006
atggggtacggactcacgggcgcaactcttagcgacttcccctccaggaaatgtggcggcctcgaacctgtccctccattggcctcggacctgtccctggacgggtctgaatctggtgcgctctcccccttaggggcacttagtggcctcggacctgtccctggacggtctcgagccaattctaccaaaattgtcttgagcctcgagggcttgtggggatggatatcccgggtcatcaagacgcgaactcgcttcatgggctgcttgaatgtcaccgataagtcgtccaagggacacatcgtgggccttgacaggaggctggaatgcaccttgaaatcaggatctgtattgtttttggagattccaatacctccttctcagtcgcctgctatctccaagctgtccaaagtcgaggagcgacgcatcgcaacgccaacactcacagttgactatcccaccaagccaaaaaccgctggccttgaacatctccccatccgcctcccgcggcctgccacgcgacatgattgcgtcgcgggctgctgcggagctcagctgcccccgcacgccgctggcgacgccttctgcttgcccgcctctgcccgcccgtcttccctgatccctcctcccctttgcttccgcacgaagatctgggcgtgtcttcttccgacaaagctgtatgtggggagagtgcctgtttcgatggggaagaagggcaagtggttcggcgccgtcaagaaggtcttcagccctgaatccaaggagaagaaagaggagaggctaaggaggaagtcagcagctagcaacccgacgccggtagatctgaccccgtctacctccttggaagtcaatctttcggtgccaccgcctccagctcctcccccagttcttcaccaggccgaggaggttggggtccctgaagccgagcaggagcagagcaagcatgtcgccgtggaggaggcccctgctgccgccccagcgcaggcgtcggtgctgccacctgctgtgccaacccaggagctcgccgcagtcaagatccagaccgccttccgaggttacctgatggccgcattaccaagcacatggaagtgtcggcagcttgccaaccttgcaagcgtgagttgtctagttgctgttactgagtgcctgtctgccctgctattgagcctgtctgccctgctattgaactatccatatgagatacgctattag

SEQ ID NO: 23228 - DNA, 2340 bp, Zea mays
  Peptide Sequence Number=SeqID_65007
atgaccggcggacgaggcgcgctcgagcagcgggaggggggagttgcactgcagagccgcagcaacgcgaggagcctgtcgccgcggtccgccatgggatgggagaggtgtcggcgctccccaccagcgcgcgccatgggagccgtgggcagagacaggaagaacgagacagagaaggattccgtggctctactcgtcctcgcgcacgcccagccatccgccgagaagcggatccagtggcgggtggtgctagtttgccactcgttgttctggctgctccttccggcggtcgtcctcggtgccactgcggaggagacgatgcagacctacatcgtgcagctgcacccgcaccacgacggcggcagcggcgaggccacgctgcccgcctccaactccaaggtcgactggcacctctccttcctcgagaggtccgtggcgtgggagcaggagaagcgccccgcctcgcgcctcctctactcctaccataccgtgttcgacggcttcgcggcgcagctctcggacggcgaggccgcggcgctgcgcgcgctgcctggcgtcgcgtccgtgcgcgccgaccggcgggtggagctgcacaccacctactcgtaccgcttcctggggctcggcttctgccccaccggcgcgtgggcgcggtccgggtacggccgcggcaccatcatcggcgtgctcgacacgggcgtgtggcccgagagccctagcttcgacgaccgcgggatgccgcccgcgccggtgcgctggtccggcgcgtgccagggcggggagcacttcaacgcctccaactgcaaccggaagctcatcggcgcgcgcttctactccaagggccaccgcgccaactacccgaccaacccctcggaggcggcggctctgctggactccgacatcctcgccgggatggacgacgcggtgcgcgacggcgtcgacgtcctgtccctctccctcggtgggttccccatcccgctcttcgaggacagcatcgccatcggcagcttccgcgccacggcgcgtggcgtctccgtcgtgtgcgccgctgggaacaacggcccggcgcggagctccgtcgccaacgaggcgccgtgggtgctgactgtcggcgcggccaccatggaccgccgcttcccggcgtacgtccggctcggtgacggacgtgtcctgtacggcgagtccatgtccatgtaccccggggaaaccggtttgaaaaaaggcgggaaggacctggagctggagctagtgtacgccgttggtgggacccgggaatccgagtactgcctcaaggggtcccttgataaagccgccgtcgccggaaagatggtggtatgcgaccgcggcatcacgggccgcgccgacaaaggcgaggcagtaaaagaagcaggcggcgcggccatggtgctcaccaactccgagataaaccggcaggaggactccgtcgacgtccacgttctgccagcgaccctcatagggtaccgtgaggccgtggagctgaagaagtacatcagctcgacgccacggccggtggcgaggatcgtattcggcggcacgcggatcggacgagcgcgcgccccggcggtggccgtgttctcggcgcgcgggccgagcctgaccaacccgtcggtgctgaagcccgacgtggtcgcccccggggtgaacatcatcgcggcgtggcccgggaaacctgggccccgtcggggctggagagcgacgcccgccgcgatggtccggtccgcgatcatgaccacggctgacataatcgaccggcaggggaaggcgatcatggacggcggcggcggcggcgggcgcgccagcgtgttcgccatgggcgcggggcacgtgagccccgcgcgcgccgtcgacccgggcctcgtctacgatatccagcccgccgactacgtgacgcacctgtgcacgctcgggtacagccacatggagatcttcaagatcacccacactggcgtcaactgcagcgcggcgctccacgaggacaggaacaggggcttcttcagcctcaactacccgtcgatcgctgtggcgctcaggaacggcgccaggtcggcggtgctgcggcgtacggtgaccaacgtcggcgcgcccaactcgacgtacgccgtgcaggtgtcagcgccaccgggagtgaaggtcacggtggcgcccatgacgctgtcgttcgtggagttcggcgagcagcggagcttccaggtgaccgtggacgcgccgtcccctccggcggcgaaggacagcgcggaggggtacctggtgtggaagcagagcggggggcaggggaggcacgtcgtgaggagccccatcgccgtgacctgggtggagtag

SEQ ID NO: 23229 - DNA, 840 bp, Zea mays
  Peptide Sequence Number=SeqID_65008
atggggaaaattgatatgtctactgacgaagaatcagattgtgtagctatatgtccacctaacagaaatgctggtcacgaggaagttgtgagtggcagccatgatgaagattcttcaggaaagcaagagaacccttatgctgtgaactcacatatggacagcaatggccaggaagatgtgtctgtaaacctagacctgctcaagctgattcatcagcaggaatcttctgtcagcaattcaccaacaaagcctgcagtagctagacagcaaggaactgtaacttcagcaagagctgggaaaactaagaagacaactgttgctgttgcacctacattcgtctgtgctaatcgtgctgagaagagaggagagttttacacaaaattagaagaaaaacgcaaggctttggaagaggagaaactccaagcagaggccagaaagagggaagaggaagaagaagctctaagacaactgaggaagaacttggtcgtccgagcaaaacccatgccaagcttctaccaagagggacccccaccaaaggttgaacttaagaaggtgcctccaactcgtgccaagtcaccaaaattgacacggagaaagagctgcagtgaaacccctcatacaccagagggaggaaatggcagtgcagtatgctgccggttgcatcgccacagcattgggaacgccagagatgttagcagcaaggcacaatgttctccaaagagcgcctcaaaggctggatcagctactagatccagggtcaccaaatccagggaagacctgaaggcttccgtgaagaaagtgggactgccaagcgccgcgaacttcgctgtacaaacctaa

SEQ ID NO: 23230 - DNA, 1242 bp, Zea mays
  Peptide Sequence Number=SeqID_65009
atgaagaatgtgaatgtcaccacaagcaacacattcccgcacaaagtggaggtcaatctcgatgtgcttggagatccggtaaactcccaccattttgttgtcgaactgagccgaattaactccatatttgctaaaagtaagagacagtacatagaagcacaagtagaatatgctaaagaagaagctatactatcagttctgagaactcagttggcatcccaacagtcatatattcatcaggatagccattctctaaggaggaaaaactccgaacttgctgaagagcttaaagatctttcccatcaagtgcaggaatacttatctgagaacatgagcaccctaagaagtttatctattcctgagtcaatttctggcgcctttatcatccatgtagatgtcctactgtgctttacttggactgttacaggcctgtgtgcagaccttgctcggctttcaggtgcaaatattttggaaggagatcacaatttaaagcttctgcgccaggactgctacataagtcatcagaagaagttcatcaaccatcttgtcaatcaacttgctgctcacctatttctaaagatagcctgccagctcgaagaacagataaaaatatcgagtgcctactcatttctgaaagctgtagaattggaattgcagggctacttctcagcttttgatggccgcctgggccggtacaatttaattgatcaagcagcatctgaaatgtttgaagagggatcagttgacgacagtgattcttatcttcatgctgtgagggatatccttagcagtcactcgagttcccaagcaacgtcaccagaatatgtgtcatcatatggtttgatcgggcagataacagagctgcaggatgagctccagtaccttcagcatgagaccgaaaatgtccttccacgtgagcgaggaagatgcaccgacgaactatgcaggatgatccaaacactggagcaaattctcgctgtgtccctttctgatgagcaaccaaagctgacaccatggccattggcgcattcacttgaagacctcgaaatggtcagccagcaggtctccgcttccgttagtgaggtgacactagctcgagacgaaaaggccgagaagctgaaacagccttcacgcaacgcgcagcaggaaaggcaggtgttctcagatttcttctgccacccggaacgactcgagaatcgagtggaagagctgctctcccgctttagagctctccctgagtag

SEQ ID NO: 23231 - DNA, 390 bp, Zea mays
  Peptide Sequence Number=SeqID_65010
atggacagggaagccaagaaagaagcgttcaggaagtatcttgaatccagtggcgtgctcgataccctcacgaaagctcttgtggcgctgtacgaggagaacgataagccttcatctgcagtcgaatttgttcagcagaagctgggtggcccgtcaatctctgactatgaaaagctcaaggcagagaagctggacttgcaattgaagtatgataagcttttagagacccacaaggaaacatgcagacagccatctggatcccttttggattatgaagacacccaactcactgtaggtcccagaaattataacaaattacaaatgtaccttcggcttgaaggaaagcaagagtacaagagtgacgcaaaagcaaatgccaagtcagcgtga

SEQ ID NO: 23232 - DNA, 345 bp, Zea mays
  Peptide Sequence Number=SeqID_65011
atggaggagatgcagatgggagcagtgaaggaacaggaaataaggcagtccagggattgcctccgcagcaaagctgatcttgttcacgccgagaaggtggaggacttgcctctgccattaacggattctccatgcaagcggacgaacatggcgtgcctggattcagtgtctatcacatccgtggtgctcgcggagggcgtctgccaagcacaacgatttgcccttcgcattggcgacatgcaagcggtggagtgcgtcatggatgaccgacatctccaccttcaccgcttccgccttctagaagaactcgcgttggcgcttatctgtgacgtcgctgacgtctga

SEQ ID NO: 23233 - DNA, 549 bp, Zea mays
  Peptide Sequence Number=SeqID_65012
atgagcgcgaagcagctctgcgacgccctggccgccgtggggttcgacgccggcgacgatcctctcgacgcggatagcctcgagtgggcgtttctccagggggaggactcccgccggatgcttgcgtgggtctgtgcccggctccgccctggcaacgtcctctccgccacagacctcgagctgtacgagcagcttgaaatggaaggcaagttattgaagggggaagacttagattttgcttttgatcgtatttcggctttctcagacaatatggagaatcaggaatacatattcttgacggaagaaagtcttgaagacatctgtgagtcaaagcttgctcttagagctgaagtttctgatttggaaaggcagcttgcttctctggagtggaggcttgatatacttacagcacaagctaccaccattaaccagggaaagaagtcccgctcatctgctaatactagagctaatggacaacttactggcttagataagatgtttgctaagagaagtttagagggttatgcgggtagtatgagtggtaggtag

SEQ ID NO: 23234 - DNA, 465 bp, Zea mays
  Peptide Sequence Number=SeqID_65013
atggacaactatacggcagaaatgatgaaggttttgcatatcgcgttccgacccggtggaggtcccgccacggcgcagagtgggcggacagcaatgaagttgctccgacgagcaattcaggtggccctggtggtagttctcgggcggcacgaccatgacctcccttccccaggctcgaggaagacgcaggcgcaagcaccaaagggttggatgatgacggcgccgagcacccacgtggcggctcaactcttccctccctcagatttgccaggacaacgcagcggcgctagggtgattcccaggtgtcgcaaagcgaaagagaagagggatctgcagcagggtcttatgcccccgaatggctggttcggagaagcacgagctggcgcatgtagtggcgcaagaattggccgtcgttggttgcggagaggaagaactacagggcacatagggcccacctggcgatga

SEQ ID NO: 23235 - DNA, 543 bp, Zea mays
  Peptide Sequence Number=SeqID_65014
atgcacgtcagctactacaaccagtacagcagcaggatcccacccaagttcggcaccctgcagtcgctcatccgcctggacatgaacagctgcacgctcacggggcccatcccctggagctcgcatgactcgcccacctcaacatgctcttccttggctcctcagtatcgacagctcaccaggaagataccgccggagctcgacgccctcgccagcctccagtcgctcgacctctccatcaacaacctcaacggcgagatacccaccagcttcgccggcctcaacaacctcacactgctcaacctcttccggagccagctccaggcaagataccggacttggtcgcttcccgttcctagaggtgctgcagacagcaggacagcctgggggcgccatatttcatgtgggggtgccagcctggtggcggcgtgcgaccggagacaggcgctggcagaaggaaccttagcatcgggctcaccattcctcgtgatgttttcacacagatgggaacacaaggggaaaaatgaatcggtattttcataa

SEQ ID NO: 23236 - DNA, 381 bp, Zea mays
  Peptide Sequence Number=SeqID_65015
atggtgttagcaaattcgctaaaatttgtcgatagtaaagctgttgaaatggatgccatactggatgaagatgaaggatttttggagattgttgaggctgaaaagaaagttgaagcaaaaaaaacgacctctacatttccgcctggcacagtttcagcaaatgtgccggtgtatcatgttgatcttgctccaataactttggaaactggtcaggactgttggaactatcttgatgcctcaagtagtgaatataaagcaacatccatggttatactcttactgcatattgatgttttaagttgttcgttagaagttagaactgattcactcagagcaccttttgcgaatatatgtacatataggctattgtataacacgtag

SEQ ID NO: 23237 - DNA, 303 bp, Zea mays
  Peptide Sequence Number=SeqID_65016
atggaccctttcccgggtaacgaggggcagagggaggatgcaaggaaggcagtggaggtggatgtgcgcggatggactggagtggcggagtcggcgtgcgatggaggaggcggaggcgacagacagattcaagtccacatcgcttcgcctccagggacaacgacatgtgcgatggaggagtcgctgccacaacagatgcggtcccggtggaagcggaggaatacgacagatggggtcgtgggctggtggctccttgggaagcgccgccttgacttgactggcgtgggaatttgcccttggtga

SEQ ID NO: 23238 - DNA, 753 bp, Zea mays
  Peptide Sequence Number=SeqID_65017
atggagatcggcactgacacgcgccaacaacccctggatctcgccaggtcccgcgtgccagtgcaagttgcgagatcgatggatggatcggagccaacggggcagccggagccggcaccaaatcaccaactccagatctcaatggcgcactcgcgcagccaccaccacctcctcctgctccccgcgcccatggccacggcgtgcttgctcctcgccaccctcctcgcgctctgcgccgcgccggcgccgacccacggcgcgcgcgtcctcatgccgggcggcgcgggcgcggtgaccaaggcgcagcagggtggcaccggcagcggcagcaacgcgacggcggacgagtacctggcgccgcacaaccaggcgcgcgcggcggtgggcgtggccccgctgcggtggaacgcgggcctggcttcggcggccgcggggacggtggcgcagcagcggcggcagggcgggtgcgcgttcgcggacgtgggggccagcccctacggcgcgaaccaggggtgggcgagctaccgcgcgcgccccgccgaggtggtggcgctgtgggtggcggaggggcggtactacacccacgccaacaacacgtgcgccgcggggcggcagtgcggcacgtacacgcaggtggtgtggcgcaacaccgccgaggtcgggtgcgcgcaggccagctgcgccacgggcgccacgctcacgctctgcctgtacaacccgcacggcaacgtgcagggccagagcccctactag

SEQ ID NO: 23239 - DNA, 396 bp, Zea mays
  Peptide Sequence Number=SeqID_65018
atggcgctgaccaacttcatcgtgacggtggctgtggttggcgcgggggtgctcctcttcaccaccgacatccgcaggtccggcgccctcttccgccgcaacgcgcgccagctccagcagtggctccaggaggacacgacctccgccgcgtccaaggctcggactcgggctcagccccggaagacggcgaactccgctccgcccgacccagggctcggactcgggctaagacccggaagacggcgaactccgctccgcccgacccagggctcggactctggttcagccccggaagacggtgactccgctccgcccgacccagggctcggactcgtgcttatacccggaagacggcgaactccgctccgcccgaccaagggctcggactcgggctaa

SEQ ID NO: 23240 - DNA, 402 bp, Zea mays
  Peptide Sequence Number=SeqID_65019
atggcgatgggcctgacgcgagctgtgaggctgccggtggaccaggtggtggcctctcctcgcgtggaacaggctggggcctgggaggctgggacggctgggtctcctcgggcggtttcctcgtctcgtcttctaaccttgtcgaattatccttcgcgacaaacatattttgtctctgctgaactaagaagcacgacttggtacgagtatgggttaaagacatcaaacgatactaatgtactttgcatggaccgtgacacgttattgccggcagactatctgatgacaggtctttgccgtcgcacatattctggacgacgtaattactgtatcgacaacaagtctgtcgctaaaagtctatatggcgacagattgtttgtcgttgttctttgtgtccggtaa

SEQ ID NO: 23241 - DNA, 636 bp, Zea mays
  Peptide Sequence Number=SeqID_65020
atgtcctggccttgccggatgcctatgtttgcatgctcccgttacctggacgagaacaagcagctgatcctggccatcctcgacaaccagaacaatggcaaggcggaggagtgcgaacggcaccaagctaagctccagcacaacctcatgtacctggccgccatcgctgacagccagccgccacagaccgcgccactatcacagtacccgtccaacctgatgatgcagccgggccctcggtacatgccaccgcagtccgggcagatgatgaacccgcagtcgctgatggcggcgcggtcctccatgatgtacgcgcacccgtccctgtcgccactcctgcagcagcaggcggcgcacggacagctgggtatggctccagggggcggcggtggcggcacgaccagcgggttcagcatcctccacggcgaggccagcatgggcggtggtggtgctggcgcaggcgccggcaacaacatgatgaacgccggcatgttctcgggctttggccgcagcggcagtggcgccaaggaagggtcgacctctctgtcggttgacgtccggggtggaaccagctccggcgcgcagagcggggacggcgagtacctcaaagtcggcaccgaggaagaaggcagttag

SEQ ID NO: 23242 - DNA, 180 bp, Zea mays
  Peptide Sequence Number=SeqID_65021
atggtggcgctcgaattgaggatggcgcggtggcggctggagaaaggaggcgagctcaatccggggaaaagcggctttcaccgtggcagtgactccggtgatcgccgggcatgcaaccgggttaagtcctttaaccagggttctatttgcaaaaacattaaaacaatacaacttgtttga

SEQ ID NO: 23243 - DNA, 414 bp, Zea mays
  Peptide Sequence Number=SeqID_65022
atggaaatcatccatcaacaagtgcaaaggaagaaggagaagatggcccgactagccgatcttcaaaggaagattcacgaagctactgaagaagtgcgtcatcttgttcaagatgaacaagaccgaaggccccagcacagggagcttcatcaagagggcctattcaatgaggatggatggtatgatgatttcaatcatgatacttttacttttgatgatgcttctcccttggcagcagaactacaggctactgcatggcccccatcatacaagccaccccagcttcccatgtatgatgggcattcagatccaaagcagtttctgatgagttacgaagtaactatatcttcgtatgggggcaacaccgcagtcatggcgaagtccttcgtcatggcagtccggaatgtagcctag

SEQ ID NO: 23244 - DNA, 180 bp, Zea mays
  Peptide Sequence Number=SeqID_65023
atggtggcgctcgaattgatgatggcgcggtggcggctggagaaaggaggcgagctcaatccggggaaaagcggctttcaccgtggcagtgactccggtgatcgccgggcatgcaaccggcacagggcgcagcctgtgagggattacaagtatgccccttatgaaagtttacaacattga

SEQ ID NO: 23245 - DNA, 210 bp, Zea mays
  Peptide Sequence Number=SeqID_65024
atggtgcttgttttaaattggataaatcacaagcttaaggatattattcaactaaagagccttcggaatcgggatgaagctgtccacaatatgaaaagcatggttgggacgaaggtcgaaccagttccgaagctatgcgcaaggaagcttcggctcagtagcagaaaaggaaccgacttaaagaggaaaaggctttttagtcctggatag

SEQ ID NO: 23246 - DNA, 2649 bp, Zea mays
  Peptide Sequence Number=SeqID_65025
atggggcttcaatcatcgcccatgctgctgccagcgccgacggcaacggcggccggcggcgggtcacagtggcgcacggctgtggcaggttcgtccctaacgcccatcgtgagaaccgatgccgaaagccgccgcacgagatggcctacggacgacgacgacgctgagccgctggtcgacgagatcagggcaatgctgacgtcgatgagcgacggggacatcagcgtgtcggcgtacgacaccgcctgggtcggtcttgtgcccaggctggacggcggcgagggcccgcagttcccggccgccgtgcggtggatccggaacaaccagctccccgacggctcgtggggcgacgcggccctgttctccgcgtacgaccgcctgatcaacacgctggcgtgcgtcgtcacgctcaccaggtggtcgctggagcccgagatgcgcggcagagggctctctttcctcggccggaacatgtggaagctagcgacggaggacgaggagtccatgccgatagggttcgagctcgcgttcccttccctcatcgaactagccaagagtctgggcgtccacgacttcccgtacgaccaccaggctctgcaggcaatatactcgagcagggagatcaaggtgaagaggattcctaaggaagtgatgcacacggttcccacatccattctccacagcctggaagggatgcccgggctagactgggcaaggcttctgaaactgcagtcgagcgacgggtccttcctcttctcacccgcggccaccgcgtacgctctcatgaacaccggcgacgacaggtgcttcagctacatcgacaggacagtcaagaaattcaacggaggagcgttgcccactgcatgcgccttccttctcgtctcttcaacggttcgtcttctctcgccgtttctcgcagtgcccaacgtctaccccgtggaccttttcgagcacatatgggctgtcgatcgcctggagcgtctcgggatctcccgctacttccagaaagagattgagcagtgcatggactacgtgaacaggcactggactgaggacgggatctgctgggcgaggaactccgacgtgaaggaggtggacgacacggccatggctttccgcctgctacggctgcacggatacagcgtctcgccagatgtgttcaagaacttcgagaaggacggggagttcttcgccttcgtggggcagtcgaaccaggcggtgacggggatgtacaacctcaacagggcctcccagataagcttcccgggggaggacgtcctgcaccgtgcagggcctttctcgtacgagttcctcaggcggaaacaagccgagggagcgctccgtgacaaatggatcatatctaaggacctgcctggagaggtagtgtacaccctggacttcccttggtatgggaacctgccgcgcgtggaggccagagactatctcgaacagtacggcggcggcgacgatgtctggatcgggaagacgctctacaggatgcctcttgtgaataacgacgtgtatcttgagctggctaggatggacttcaaccattgccaagccctacatcagcttgagtggcaaggcctgaaaaagtggtacactgagaaccggctcatggatttcggagtggcgcaagaggatgctctgcgagcgtatttcctggccgccgcttccgtctacgagccgtgccgagccgcggagcggcttgcgtgggccagagcggcgatacttgccaacgccgtctctacccatctccgtaacagcccctcattcagagaacgcttggaacactccttgcgttgccgccccagtgaagaaacggatggatcatggttcaactcatcaagtggaagtgacgctgttcttgtgaaggcagttctgcggcttaccgactcgttagcgcgagaagcgcagccgattcacggcggtgatccggaggacatccacaagctactgagatcagcttgggctgaatgggtcagggagaaggcagatgcagcagacagcgtgtgtaatggatccagtgctgtggaacaagaagggtcgcgcatggttcatgacaagcaaacgtgtctgcttttagctcgaatgatcgagatcagcgctgggcgagctgcaggtgaggctgcgagcgaagatggtgaccgtcggattatccagctcactgggtctatatgtgacagtctcaagcagaagatgctagtatctcaggaccccgagaagaacgaagagatgatgagccatgtcgatgacgaattgaagctgcgtatacgagagttcgttcagtatcttctgagactcggtgagaagaaaaccggcagcagcgagacaaggcagacctttctgagcatcgtgaaaagctgttactacgctgctcactgcccgccgcatgtggaccaggccaggccaggcttgtcactgttctggcgcctaaaaaccgtcaggcctgactttttgctgcaaaagcaacccagctctgatcgagaggatcaggagaaccgcggaaactctgaagtttcagaatccacaacacataaggatctccggctgctcaacgacaacgggagcaaatcatatgtatggcggtgtggctacaagccttccagttttgcctacctccctgaagcactgcagtatagtggctga

SEQ ID NO: 23247 - DNA, 207 bp, Zea mays
  Peptide Sequence Number=SeqID_65026
atgaaggatgaagtctggagtccgtcggtgaactggattcgcgcgtgctggaagcctggaactcgagattggatttgcacgtgccggattggaagtctggagtggagcagtggactttggaagcctggattccagaacaagatcaagaactcaagaacagccgccgagcagagtaaagaagcagaaactcggaacattttaacctga

SEQ ID NO: 23248 - DNA, 804 bp, Zea mays
  Peptide Sequence Number=SeqID_65027
atgaagaacacgcacatccccaacggcgacacactcgcggacaaagtggaggtcaagctcgacatgcttcgtgcgttggtgccgtacgagcttggtggagagctgacaaagccatgttgcctcggctacgccgttagccacaacatggtactcagcctcggcgttggagcgggagacgactggctgcttcttcaaggaccacgagacaagattgtcgccgaggaacatgatgaaactggaggtggaccgacttgtgtcaggatagctggcccggtcggcgtcgatgtagatggcgaggtcgttggtcgcagatcatcgaaggagcccgaagtcggtagtgccacagaggtaccgcaggatccgcttcatagcagtgagatgtggcttccgcggggcgtgcatatggtgggacacatgctggacgacgtatgcgatgtcgggttgggtgaggatgagccaccgggggccatcgttggaggccttgccctgagtgtccaccggagtcgtgcaaggcttacagtcagccatgctagcgcgctcgaggatgtcgacgatgtactggtgctggtggagaaacaagccctgggaccgactctccatggtgatccccaggaagtggcgcagctcactcaggtccttcatcgcgaactcctgctagagggaggagatgatgtgccacaggagttcgtgcgaggaggccgtggggacgatgtcatcgacatagaggaggaggtacgccgtgtccaggccacgatagaagtcgaacaaggaggtgtctgccttggcctcgaagaagcctcgtga

SEQ ID NO: 23249 - DNA, 3771 bp, Zea mays
  Peptide Sequence Number=SeqID_65028
atgggcagcagcacggcggagaagttcaggttctgcattgacaggggcggcacctttactgacatctatgccgaggtacccgggagaagagaaggctacgtcatgaagcttctctccgtcgacccgtcgaactacgacgacgcgcccatcgaagggatcaggaggatcctggaggagttctctggagagaggatcccccggtcggccaagatccccaccggcaggatcgagtggatcaggatgggcaccacggtcgccacgaacgccctcctggagaggaagggcgagaggatcgcgctttgcgtgacaagggggtttagggatttgctccagatcggtaaccaggctcgcccgaacatattcgacctcaaggtgtcaaagccgtcgaatctttacgaggaggtgattgaggtcgacgagcgagttgagctcgttcgggatggtgacagagatgagtcatctgttgaagggatctctggggaactggtgagggtgtcaaaacctgtcgatgtccaagcactgaagcctctgttgaaaggtttgcttgacaaggggatcagatgcttggcagtggtgttgatgcattcgtacacttatcctcaccatgaactcctggttgagaagttagctctggggatgggattcaagcacgtatcattgtcttcgtctctgacaccgatggtccgtgcagtgcctcggggcctgacggcaagcgtggacgcgtatctcacaccagtgatcaaagagtacctatcgggattcatgtcgagatatgaagggggctctgaacaagtgaatgtgctatttatgcagtcagatggaggactagcaccagagaggcgattctctgggcataaagcagtattgtcaggccctgcaggtggcgtggttggctattcgcagaccttatttggacttgagacatccaagccactgattgggtttgacatgggaggtacatccacagatgtcagccgctatgatggaagctatgaacaagttctggagacacagattgctggggctattattcaagctccccagcttgacataaacactgtggctgctggtggcggatcaaagcttaagtttcaatttggcgctttcaaggttgggccagaatctgttggagcacaccctggtccagtttgttaccgaaaaggtggtgagctagcaattaccgatgccaatttgatcctaggaaccgttattcctgaatacttcccatcaatatttggtccgaatgaagacatgcctcttgattatgaggctacaagaaaggcctttgaaaatcttgcacttgaaatcaactctcaccgaaagagtcaggacccatcagcaaaggacatgacaattgaagaggttgcacttgggtttgtcaatgtcgcaaatgagacaatgtgccggcctatacgccaactgactgaaatgaaggggcacgatacaaagaaccatgccctcgcatgctttggtggtgctggtccacaacatgcatgcgcaatggcaaggtctttgggcatgtctgaggtacttgtccaccggtactgtggaatactaagtgcatatgggatgggtcttgctgatgtcattgaggatttgcaagaaccatactctgctgtttataataccgattcttctgcagaagcatctagaagagaagcccttttagtaaaacatgtgaaagaaaagctgagggagcagggttttggagaggagagcatcaggacagattcatacttgaatttgaggtatgagggaactgatacagccataatggttagacagccagagcaaggatctggaaatgactatgctgatgagtttgaaaaattatttcagcaagagtatggcttcaaattgctaaacaggaaaatactcatatgtgatgtgagagttcagggtgttggtactacaaacatcctgcagcctcgtgaactgacgcaaatatcaaccaaacctgtgcaagaaagttcatgccggatttatttttcaagtggatggcaagatactccgctgtacaagcttgagaatttgggttatggccatctattggagggtcctgcagttattatgaatgggaatagtactgtgatcatagaaaaagactgtaaagccataattacaaagtatggtaacataaaaatagatatcaatgcagctccaagcactgtatcgatatcagagaaagttgcagatgtggtccagctttctattttcaatcaccgattcatgggcattgctgaacagatgggtcggacacttcaaagaacttcaatttccactaacataaaggaaaggctagacttctcttgtgctctctttggtccagatggcggccttgttgcaaatgcacctcatgtccctgtgcatctaggagccatgtctagtactgtgtgttggcagcttaacttttggggtgagaacctcaatgagggtgatgttcttgtaacaaatcatccatgttctggggggagccatcttccagacataacagttgtcacaccagtttttgatcacggtaagcttgtcttttttgttgctagtcgaggccaccatgctgagattggtggcatcacgccaggaagcatgcctcctttctcaaagtgtatttgggaggaaggtgctgccatcagagcatttaaacttgtcgaaaggggtgttttccaagagaaaggaataatccagctgctgcagtcaccttgctctgatgaacttgctggctataagatcccaggaacacgtaggatccaagataatctttccgatctccgtgctcaggttgcggcaaaccagagaggtatagcacttatcaaagaactcataaatcagtacgggttgatcactgttcaatcatatatgaaccatgttcaaaagaatgctgaggtagctgtcagggagatgctcaaaacagttgcgtctagagttgcaaaggagaatggatcatgtgttgtcgaggatgaagattatatggatgacggctctgtcattcacttgaaactcacccttgatgctattaaaggtgaagctacaattgacttcgagggtaccagtcctgaggtctatggcaactggaatgctcctgaagcagtcacaacagctgctgtcatatactgcctacgctgcttggtggatgttgatataccactaaatcaaggctgcctagcgcctgtgaagatcctcattcctaagggctctttcctctcaccaagtgacaaggctgctgttgttggtggcaatgtgctgacgtctcagagagtgaccgatgttatcctaatggcgttccaagcctgtgcctgctctcagggctgcatgaacaatttgaccttcggggacgacaccttcggttactacgagaccatcggaggtggatgtggagctgggccgacatgggacggcactagcggtgttcagtgtcacatgacaaatacaaggatgactgaccctgagatctttgagcagcggtaccctgcccttctgcacacatttagcatcagggagaacagtggaggttctggtttacacagaggtggtgatggccttgtaagggagattgagttccggcggcctattgttgtgagcgttctatctgagagacgggtgcatgctcccaggggactcaaaggaggacgagatggagatcgtggtgcaaactatttagtcagagaagatggtagaaagatttaccttggaggaaagaacactgtaacggtcagtgctggtgatatccttcagattttcacgcccggtggcggtggctttggctgtccttga

SEQ ID NO: 23250 - DNA, 252 bp, Zea mays
  Peptide Sequence Number=SeqID_65029
atggcctccaaaatgaatcgagtctgcacggagggcttcgccttgggagccgtcgtggttgctgccgaggatcgcagttctgataccacttgtgatgcccgtggccgacgtcacgtcgccgtcgacgtgaggatcaccggtgattctcagagatacagaagacgcaagaattatttaagcagtcgcttacatgggcctcacacccttacacatcatccggcccacacggcccaacaccttacagaatgttga

SEQ ID NO: 23251 - DNA, 306 bp, Zea mays
  Peptide Sequence Number=SeqID_65030
atggagagggacgtcgtgctctccgcacccgaggccgctgggtcctcgtcctcccccgcctcctcgtcgtactcctccttcgccgagaccagggtcatctgccgcgtgtgtcagaagcagttcgcgcagtacacttgcccccgctgtaacgcccggtactgctcgctctcgtgctacaagcttttggacaagaaatcctctgattcctgctcaaaatgtgtaactatccatgatataaactacgacttacctctgaatcatgcaaaccacatgcgaattgttcactttggcctctatatttggtga

SEQ ID NO: 23252 - DNA, 1239 bp, Zea mays
  Peptide Sequence Number=SeqID_65031
atggccgagaccgtcgacgacaaggtcagctactttcaggccgtcaccggcatctccaacacggacctctgcacggagatcctcgccgcgcacaactgggacctgcagctcgcggtgtccaccatcaccgccaacccctcctcgccctccgcttcggcctccacctcctcgcgtgacccggccccttccgctccgttggcggtagatgcggagtacgtcgcgcccccgccgccgctgccgctgccgctgccgccccagcagcagccggggatcgcgtggaagctggtgacgctccccttccacgtggtctcgggtggggtcggcctcgtcgccggcacgttccgccttggcgcctgggtagccgggggcgtgctgtcccgctccctctccctcctcggcctcgcggggcaagccggcagcggtgaccgcctgctagagttgccgccgtcagctgccgaggcggccgacttcgtcgctgagttcgagcgcgagttcggcgctggccgcggcccgcgcttcgtggccgaggggttcgctgatgcgctgaagcgagcgcagcgggaattcaagcttctgttcgtgtacctccactcccctgatcacccggatacccctgccttctgcggtggctgcctctgcgctgaacccgtcgcggcctttatagatgagaacttcgttgcctggggcggtagcatcagaaggactgaaggattcaagatgagcaacagcctgaatgcgtcgagatttccgttttgtgctgtggtcatggcttctacaaaccagagaatcgtgctattgcagcaggccagggaacgtgaaaggttagaggaactgaaaagacgtgaaagagaggctgcagaggctgagaaaaagcgtaaagaagaggaggaagctgtagcaagggcatcccaagaagcagctgagaaggaagctgctcttgcaaggaggaggcaagagaaggccatggctcttggagctgaacctgagaaaggaccaggtgttactcgggttctcataagattcccaactggagagcgcagagagcggagattctacagttctgcaaccgtcgcttccctctatgactatgtcgattctctagactgcatgaaagcggagaagtacaccctagtttcgaatttcccacgcgttacatatggtccagaaaagcaatccctgacgctggaggaagcaggcttgcatctgcaggcgagcttgtttatcgagatagaacaatga

SEQ ID NO: 23253 - DNA, 2859 bp, Zea mays
  Peptide Sequence Number=SeqID_65032
atgcgcggcgaggctggcaatgacggcggtggcggggatacccaactcctggacggcgccacacctcggttaggttctccttcgagtgatgacgacggaacacagagtgaggcgtatgattgggcgctgtacgacgaaacacagcctctggatggtgctgagacccagtttgtagaccaggtggaggaggagggtgtggctggcgattggacggagacacagttggagagtggcgacgaggatggtggcagtggcaatgaggatggcggcgatgacagtgaccaagtgaagacacaacaacaggtggaagatggggaacggggcaatgatggtggtggtggggatgataatgctggcaattggactaagacccagttggatgaagtatgcgaggtgtatggagcgaacaactttgttggagacatggttgaggcccagttggttgaggaatctgaggaggaggatgatgacaaggatggattaactgatgatggtgagcatgatcttggtgagtgggggaagacccagttggttgaagactctgatgaagacataggtgacgatgagttgagtgatggcactgttgtcctaagtgacaatgagagcttgtcagaagatgagaggggcacaaagtcaggaacggataaaagggatgcaaagttgggaatggaaggaagcatcgaggggttaaatggtgggattaagaagcatgatgataacaataattcggtagattctgatgcatcaacagatgaggagggtgacacaagttcaggtcaccttcagatgaaattaccttctgttcatgttgcatcagtaaggacatgtggaatttctgaacctcggaactctctgtctgtgaactgtatgaagcaatggaaacagaaggcctgggtcaacacaatacatcccctgccgaaaattgtagatgaatctacttcgtgtagcacctccgttggttgggttgataacgactcccatggttatgtacagaaccatgatcaagacggagcaaaaagcagagacaagtgctcaacagctaaaaaactttttgccgacacaacagtggaggatggtgaaaacaacagcagatgtattgctggattaagctatgtgggatcacaagagcctggtgatctgtcacaagcaaatgcttttgatgttgtggacagattgatttcaatcaatggtggattatcatctcaagaaacgaccccaaataaattggaaatagcaaagccatgtgtttcaagtaagaggggaactttaatgttggctgagaaggtcgaccttggtagaagttccaatgggaaagcagaaatatttaaatttgtggatagccttgaggatgagggaggagagagtaagcggccttctgaaaacaggactaagaaaaaccttttgaaggtcttagatgatctatcaaatgacaaatcattggaagaacaggaaaaggctgatgtagttttgaatgatgttggtccagatactcaaatggctgttgaagcaatggatgccctggtacaatgttcacctgctaaaagtttatcttctgaacatcaatctgtgctcaatagagatatgatagctgagaagtctagaatagctaaaagtcattcgaagaatggttctcctcagagagctagcaacatacaggaaggtgtcacaacacgttctaaaaaaggaaaagtaactgacttcagtgccaaacctcagaaagaaagactaagaggatctaagatgcaacaaagttctgagtctatagtaaaagtgaaacataagcaaacaaagtctgtgccagagaagagcaaagtttcaaagaaatttatcagtgaaaataagtaccatgagacacctgttgctcaccgaactaggcattgtggtaggaatgatccttctgcatttatcgagttatctaataaacacttgaggagagaattggcaagaccatgcaagaaaaggcggattttcataagaagtgtttctgacctgctaaagtatgcaaagagagaaccttcccatgggaaatcagcttctatgctatccagcatcatagaaaagtcattagctgcttatcctgtacttaattcttctataagagatgacaggaaaacttctgatgtcattagctctgcacagagactgaaggaatcctcccatattgagaatacaagcaaatcaccaaaaacgaatcctcaggttctggacagtgctatgaaaacaccgtcaaaagtggttaatgaattgtcacccacttttagtcctgtgaatccatcaaaaggctcaagtaggagcttgttaaaagcttctgttgcgagagaattgctgaagctagatcctgaaaatgtactatcaaatcagcagaaaaaagattccagaagagggaaggataaggccaatgccagtattttattcagccagcatttggatgacgatgttatcaagcgtcagaagaagatcttggcacgcttaggagtttgtgaagcattttcgatggccgatgcaacacactttgttgcagatagattttgccgcacaaagaatatgctacaagcaataactatgggcaagccagtagttacatcaatgtggcttgaaaattgtgcacaagcaggctgttttattgatgaaaggaaatatattatgagggacgaaaaaaaggaaaaggagataggtttcagcatgcttatatcactggcctcagcttgcaaacaccctcttcttctgggaaaaagagtctttgtaacatcaaatgttaaaccaagtcaagtagtgatgactagcttggttaagtcatcatcagggcaggaaacagtaagggggtccctactggttaatatgtcaaggacaatgatatag

SEQ ID NO: 23254 - DNA, 867 bp, Zea mays
  Peptide Sequence Number=SeqID_65033
atggcggactggccgggggaaagcatagggaggggtagacgaaggagagagagtatgcgggaaggggtagacgctcaccacgcggacgtgctgtgcagcacgacggcgagaagcgactgcgagggcgagtttgccgaaacctccgcttccgggtgcagggcgcgcgcgagctcgctggtagggcggtcggctaccgcaccacgctgccacgcatcgccgccggcgctggctgggcgagcaggggcaggggtagctcaaccgcgggaactcgccggggcagccatagagcagacgagatggtgcggtggaggtagttttctcgggcgcggcgactgctgcttgcgggcggttctgcgcgaagccaagagaatgggggccaaggagcatgcatcatggggaagcagggagagaagacaggaaagagagatggcaggtgggtcccacggcagcggcggcattgggaaaccgcccacgcgcacggcaggcacgacagaacggagccacggagcgcgaaaccgcgcggggcgtgcagcgcacgcgtgcatgggccgaccggggcacagcgacgcaaggcatggcggcggcggcagttggcgagcgcgcacacacgagcgaggcgagcgagcaggggcgcggcgcgctgggccgcggaatggcctacgcgcggggggaacgagagcggggctagggcgctgggctaggatgcgggggcgagggggtgggccaggtgggccgcgcatgccaggtgggccttggggaggtggttgggcgtggggagagcaagcccgcagcgggcgctgggccgcgcgcgaggcaggccgcgggaggtggcttttgtggaggacagatatcccccgggtccactag

SEQ ID NO: 23255 - DNA, 495 bp, Zea mays
  Peptide Sequence Number=SeqID_65034
atgaggccgaggctgcgacgtggagaaggggcgcaggagcaggcgaaggcgtcggcgaggagaggaggcgcgggctccgagaggggaggcagggacggggcggtggaggccacggaggcgggaggaagaggcacaccaaacgtggctgcgtgggagagctccgccgctgtcgccgcgcaggcagctacgtgcaccattgccgctaggtcgagctccaacctcgccagcgagcaggcgaggtccggccacggcaccgagcggactagctctggcgcgcggtcgagctacctttaccgagtgccgccccaggagggggagcgcacggccgatgaagggaggtccgcggcggttcaaggctggggaggagggaggctcgccggcctaggatggctgggagccgacggctggagaggagccgccccgggagggaaggatgagcctctcggggcagcggtgcggaagccgggcctagggcagaggtggggtggcggctag

SEQ ID NO: 23256 - DNA, 363 bp, Zea mays
  Peptide Sequence Number=SeqID_65035
atggcgcaccggactgttcggtgtgccagggacaccgttcggtgcaccagggccgtacaactccaaaccagccactcttgggagtttgaacacgtgctccgttataattcaccggactgtccggtgagccagcggagcaacgactctctggcgccaacggtcgactgcgcagatgggaacagtggtgaacagtgccacgcaaaagtcagagcagcaatgtcagagggcaccggactgtccggtgtggcaccggactatccggtgcagctaaaagacaaaagctctaatggtcgaccggctccgaaccctaacggttacgctgacgtggcgcgcaccagacagtgcacagtggctgtccggtag

SEQ ID NO: 23257 - DNA, 180 bp, Zea mays
  Peptide Sequence Number=SeqID_65036
atgaggcgcgacgatgaaggaacagacaccggaacgtacggcgacatcatgaagctggggaacgagatccggtgtagctcgtatcctgagatgaagcctcagagatgggagaaactcccgatgagcgagtgcaccgagaaagggaaccgagaactcatgtttgatcccttcttcgcctaa

SEQ ID NO: 23258 - DNA, 1275 bp, Zea mays
  Peptide Sequence Number=SeqID_65037
atgaagactgaggtatcctgtacactaaacaacagtgtcagtcctgaaggccacaaaagctcactaagcttgccagttccttctggccagtcactttcttccaatcttgccacaaggtctttaagtactgcaggagaatctgtgaaaaatgcatatgacttggtagtatttaaagggagtagagaatcttctcgggctggagactgtatatcttcgcttggtgtgcatcataacataccgccaataatgattgatcaaggaagcaacatgaatcctagtatggagagctcaaacaattcacataggttgatggcatctaacactaatgcaactaagttttactcttacaaggaccaaatgcatgtaacaccagaaagtcaagcttctgctgcatcaagtcagccctttgcgggaactgttttaagagcacaaagtgtatctcaggaagcttcacctagcgtctttacttcaaagcctctcatagattcttcacttttgaaaaatacttatgttggtttaagttcaggcggtgcccatattggacatccaaattttggtaaccagcaaccaagtgacgaatgccttcaaagaaaatctgaatctctatctggttcagaagcaaagggccattcagctgcattggtgcaacctgctctaggaaatcatcataatgggagtggaggtgcacacaagggccttcggatggctaacgttgtacatcgattcaagagcttagttgaatctttggaaattggtgttgtgctatctgggaggttgtggtcctcaagccaagcaatcttcccaaaagggttcaggagcagagtaaaatatttcagcatcgtggatccaacacaaatggcatactacatatctgaaatattagacgctggaccacagggacctctgtttatggtgactctggaaaactgtccaggcgaactttttatcaacgtctctcctgccaagtgctggagcatggtccgtgagaggctgaatatggaaatacggaggcaactcagtacgggaagagctaatcttcctgcactacagccaccgggatcagttgatggttttgaaatgttccggttgctgtcaccggcaattgttcaggctcagggtcctctgcatgcgctgaggggtctattccagcgagccaaccgcaatgagctgctagccctacggagtctactggtgagcaacatcagcccggacgacttctccaggcggcaggctacccaaatcctcgacgaggagatcgccaagcagtggcgctga

SEQ ID NO: 23259 - DNA, 2718 bp, Zea mays
  Peptide Sequence Number=SeqID_65038
gtagtatacggtgctgatttggagactggaacttttggtagcggcttcccaaagtcttctcccgaagtaaaatctgatgttgagcataagtacttagagtctggttggaacctaaacaacttgcctagactacaaggttcagtactatcttttgagggcggtgacatctctggtgttttggtcccttggctgtatgtcggaatgtgcttttcatcattctgctggcatgttgaagaccatcatttgtactcactgaactacatgcattggggtgctccaaagatgtggtatggagttccaggaaaggatgctgtaaatttggaggcagcaatgaggaaacacctacctgacttgtttgaggaacaacctgatttgcttcacaacctggttactcaattttcaacatcattgcttaaatctgaaggagtaccagtctaccgatgtgttcagcatgagggagagtttgtcctaacgttccctcgggcataccatgctggtttcaactgtggcttcaattgtgcagaagctgttaatgtggcaccaattgattggttaccaattggacaggatgcagtcgagctttatcgtaagcaagctcggaaaattactgtttcccatgataagctgttgctaggggctgctagagaagcaataagagctcattgggatattctgttccttaagagaaatactgctgataacttgaggtggaaaagcatgtgtggacttgacagcactatatgcaaatcgcttaaggcaagaatcgatttggagttggcgcaaagacaaaatatatgctctccatctcaatctagaaaaatggatgctgaatttgattctactgatagagagtgtgcattgtgctattatgatctgcatctttctgcttctggctgtccatgttgcccagggaaatatacctgccttgtacatgcaaagcagctttgctcatgtgactgggacaaaagatttttccttttccgttatgatatcaatgagttaaatatgttggctgatgctttaggtgggaagttaagtgcaattcacagatggggtgtctctcatcttggattaagtttgagatcatgtgtcaaaagagaaaaagaccaagattcgaagactcctcgcagagtaactgatggccccagaaggtcctacatgtctcaggcgtcaacagtatcattggcaccttcgttggtttgcaatgaacagaacaacaatggtaataagatgctggacaaagttagtttggaaacggatacttgtccttttacagagcaaataaaatctggaactatttcactacaggaggcacacatgaagactgaggtatcctgtacactaaacagcagtgtcattcctgaaggccataaaagctcactaagcttgccagttccttctggccactcactttcttccaattttgcgacaaggtctttaagtactgcaggagaatctgtgaaaaacacatatgacttggtagtatttaaagggagtagagaatcttcgcgggctggagactgtatctcttcgcctggtgtgcatcataacataccgccaataatgattgatcaaggaagcaacatgaatcctagtatggagagctcaaacaattcacataggctgacggcatctaacactaatgcaactcagttttactcttacaaggaccaaatgcatgtaacaccagagactagggcctcagtgatgacagaaaaagatagcagtcaagcttctgctgcatcaagtcagccctttgcgggaactgttttaagagcacaaagtgtatctcaggaagcttcacctagcgtctttacttcaaagcctctcatagattcttcacttgtgaaaaatacatatgttggtttaagttcaggcggtgcccatattggacatccaaattttggtaaccagcaaccaagtgacgaatgccttaaaagaaaatctgaatctctatctggttcagaagcaaggggtcattcagctgcattggtgcaacctgctctaggaaatcataatgggagtggaggtgcacacaatggccttcggatggctaacgttgtacatcgattcaagagcttagttgaatctttggaaattggtgttgtgctatctgggaggttgtggtcctcaagccaagcaatcttcccaaaagggttcaggagcagagtaaaatacttcagcatcgtggatccaacacaaatggcatactacatatctgaaatattagacgccggaccacagggacctctgtttatggtgactctggaaaactgtccaggcgaactttttatcaacgtctctcctgccaagtgctggagcatggtccgtgagaggctgaatatggaaatacggaggcaactcagtacgggaagagctaatcttcctgcactacagccaccgggatcagttgatggttttgaaatgttcgggttgctgtcaccggcaatagttcaggcaatcgaggcacgggatagagatcgcatctgcacagagtactggagatccaggcctcatgttgtcactgaagatcgtgcgacggcgccacctcaggctcagggtcctctgcatgcgctgaggggtctattccagcgagccaaccgcaatgagctgctagccctacggagtctactggtgagcaacatcagcccggacgacttctccaggcggcaggctacccaaatcctcgacgaggagatcgccaagcagtggcgctga

SEQ ID NO: 23260 - DNA, 1993 bp, Zea mays
  Peptide Sequence Number=SeqID_65039
atgcggtgtgcgctgtgcgctgtgccgagacagatgcgtgcgacggtgcgagggagactcagcactccactcacctggcgccacgtcgccctcccgttgggcctctttgcctcgcgggccgactgggccggctattgtgaagagagaaagggtcttgtgtgggctggctattccaggccatctggcccgtccatctacgtgacggatacttctcgtttcccctcctcacgcggccgcttctgctcggtgccccctctcctctacagctctactctcccctcccgcggaggcgtggacggcatggagttgggggagcccggggcccgtggatgccgtggtcccgtgcgattactcggatctctcggtttgctgatcaaagcgtcgtcctccgatgcagcaatgatgggaacagagtgcatcatggccacactcggcggggatcctgaaccctcaattccacctggattcggaccttttgttgccctcgcgctacagggcatccaaaacaatgccaaatcagctgatgctcattctagttctgctcaagcagcacactgcatggagaaagatgttgaagttctggaacacggttcggcgcatggttggagtgacactcctgctagtacttcagggacccatagttgcaggaggtcacttcgtaacaggcctccaatagactatagccagttcgaccttatctcggacgaagaatctgatgttgaatcagcagaaaagggagtgggattagtgagacgcagacgacaattaccgaaaggagtacttcggggatgcgcacaatgtgctgattgtcaaaaggttgttgcaaggtggaatccatctggtgcaaggaggcctgttcttgaggaagctcctgttttctatccatccgaagaggaattcaaggacaccttaaaatacattgagagtatacggtctacagcagaaccatatggaatttgtcgtattgtcccgccgccttcatggaaacctccatgccttcttaaagagaagaacatatgggaatgctcaaaattttgtactcgggtacagaaggttgacaagctccaaaaccgtaaatcatccaagaagggcagaagaggtgggatgatgaagaagcggaggaagcttttagagctggaagataacaataatattaatcacaatcaaactggggtgcagcaaaaccaagagaggtttggatttgaacctggacctgagttcacacttcagacatttaagaagtatgcagatgatttccgtgaacaatattttaagaaagaagtgcccgcggactcaccaccatcagtagaagacattgaaggcgagtattggcgtatagtcgaaaagcctactgaagagatagaggtagtatacggtgctgatttggagactggaacttttggtagcggcttcccaaagtcttctcccgaagtaaaatctgatgttgagcataagtacttagagtctggttggaacctaaacaacttgcctagactacaaggttcagtactatcttttgagggcggtgacatctctggaaaggatgctgtaaatttggaggcagcaatgaggaaacacctacctgacttgtttgaggaacaacctgatttgcttcacaacctgcccgccgctacaggccgcactatcaccagcccaattaggatctcgcgttctcaccagccgccgcactccagggcgcactccagcctccaggccgccgctgccgctgctccaaccctcctgcgccgcccgtccgacgccgccaggcccgcctctgcgtgccgctgctccaggccgccgccgctccaggcagctgctctccaggccgtcctccagccccgcctcagagcctctgtgtgccgccgctccaggccgtcctccctcctgcgccgcccgtccggcgctgccagccccgcctctgctgtcccactgcggcaggactacagagtacagagactgactgtcccactgtccgctggcgtatgctccactg

SEQ ID NO: 23261 - DNA, 2316 bp, Zea mays
  Peptide Sequence Number=SeqID_65040
atgatgggaacagagtgcatcatggccacactcggcggggatcctgaaccctcaattccacctggattcggaccttttgttgccctcgcgctacagggcatccaaaacaatgccaaatcagctgatgctcattctagttctgctcaagcagcacactgcatggagaaagatgttgaagttctggaacacggttcggcgcatggttggagtgacactcctgctagtacttcagggacccatagttgcaggaggtcacttcgtaacaggcctccaatagactatagccagttcgaccttatctcggacgaagaatctgatgttgaatcagcagaaaagggagtgggattagtgagacgcagacgacaattaccgaaaggagtacttcggggatgcgcacaatgtgctgattgtcaaaaggttgttgcaaggtggaatccatctggtgcaaggaggcctgttcttgaggaagctcctgttttctatccatccgaagaggaattcaaggacaccttaaaatacattgagagtatacggtctacagcagaaccatatggaatttgtcgtattgtcccgccgccttcatggaaacctccatgccttcttaaagagaagaacatatgggaatgctcaaaattttgtactcgggtacagaaggttgacaagctccaaaaccgtaaatcatccaagaagggcagaagaggtgggatgatgaagaagcggaggaagcttttagagctggaagataacaataatattaatcacaatcaaactggggtgcagcaaaaccaagagaggtttggatttgaacctggacctgagttcacacttcagacatttaagaagtatgcagatgatttccgtgaacaatattttaagaaagaagtgtccgcggactcaccaccatcagtagaagacattgaaggcgagtattggcgtatagtcgaaaagcctactgaagagatagaggtagtatatggtgctgatttggagactggaacttttggtagcggcttcccaaagtcttctcccgaagtaaaatctgatgttgagcataagtacttagagtctggttggaacctaaacaacttgcctagactacaaggttcagtactatcttttgaaggtggggacatctctggtgttttggtcccttggctgtatgttggaatgtgcttttcatcattctgctggcatgttgaagaccatcatttgtactcactgaactacatgcattggggtgctccaaagatgtggtatggagttccaggaaaggatgccgtaaatttggaggcagcaatgaggaaacatctacctgacttgtttgaggaacaacctgatttgcttcacaacctggttactcaattttcaacttcattgcttaaatctgaaggagtaccagtctaccgatgtgtgcagcatgagggagagtttgtcctaacattccctcgggcataccatgctggtttcaactgtggcttcaattgtgcagaagctgttaatgtggcaccaattgattggttaccaattggacaggatgcagtcgagctttatcgtaagcaagctcggaaaattactgtttcccatgataagctgttgctaggggctgcaagagaagcaataagagctcattgggatattctgttccttaagaaaaatactgctgataacttgaggtggaaaagcatgtgtggacttgacagtactatatgcaaatcgcttaaggcaagaatcgatttggagttggcgcaaagacaaaatatatgctctccatctcaatctagaaaaatggatgctgaatttgattcaactgatagagagtgtgcattgtgctattatgatctgcatctttctgcttctggctgtccatgttgcccagggaaatatacctgccttgtacatgcaaagcagctttgctcatgtgactgggacaaaagatttttccttttccgttatgatatcaatgagttaaatatgttggctgacgctttaggtgggaagttaagtgcaattcacagatggggtgtctctcatcttggattaagtttgagatcatgtgtcaaaagagaaaaagaccaagattcgaagactcctcgcagagtaactgatggccccagaaggtcctacatgtctcaggcgtcaacagtatcattggcaccttcgttggtttgcaatgaacagaacaacaatggtaataagatgctggaaaaagctagtttggaaacagatacttgtccttttgcagagcaaataaaatctggaactatttcactacaggaggcaccatggttattaaaacgtcgtttaaacgacgattaa

SEQ ID NO: 23262 - DNA, 342 bp, Zea mays
  Peptide Sequence Number=SeqID_65041
atgaaggtgtctcaagttgtcattgagatgacacttggtcttaaagttgatgatgcaaggattgaggaacatgaagataaagtgatgatcggcctgtatggtcatgcatgcaccgtcgaggtcattagagtgttcatccctttggtgtatgctaccatcgtcatcacctccaatgcagccatcgccttcagggtagccatagtcatcatcaacagttgcaaagtcgtcgtcacagttggtgttgggcctttcaccatcatgcatctacgtgagacctcatgtgatgatcaagtagcagtctccaaaaggaggcacgttcttgatatacttcattccatgtga

SEQ ID NO: 23263 - DNA, 273 bp, Zea mays
  Peptide Sequence Number=SeqID_65042
atgtgcagagagacacttctcctcctccccttggccgccccccctgcccattttttcctctctcaatttttgcagccaccaaaccctagccccccctcaatcccctcctcccaaggtgccaatccttgccgctcggatcatcgtctcgtggtgcgaatctccaaccgttttggtggagggaagaagggaggaagaaaagggggagaacccaaggtggtggacttccggatcgttcttagggatttttgcccaaacttcggtgaaggcaagtaa

SEQ ID NO: 23264 - DNA, 1227 bp, Zea mays
  Peptide Sequence Number=SeqID_65043
atggccgaaacaacgcagacgctctctctcagccgcatggccagcagtaaggggcggtgtggccgcgacattggggcgaacgagcgcagaagggggcaggcgacaaagtcagggcgagcacaacaagaggttggtgacgacggggttgagtgctcctaccttgtgttgattacaacgggcggtgacccatgtggtgagggtggtgggagtaaacactggcgaggcgtcttttgcaagggaccatccattgttgcaataaatattagtgggctcggagttggtggatggcttggcccagacctgctcaagtttcagtcattgaaaaagctggacatgagcttcaataacattgctggcgaaatcccgtccactttgcccccaaatgttgaatacttgaactttagctacaataaactctctggagtaattggtgatgtttttgttaatatggatagcttagaaacgatggatctgtcattcaatgctttcaatagtgacctaccaagatcgtttagctcattgactagtcttcgctatctttatctacagcataacgagttcacaggatctgtgattttgttagcaggccttccattgtcatccctcaatattgaaaataatcacttcagtggctatgttcctggaacatttcagtccattcctgagctgaggattgatggaaaccaatttcaacctggattcaaacttgcatcctcgtcatttactaggaagacccctgcagctccacctcaatctttgcctccacctccacttcaatctccatctccatctccatctccactagcagctcagcagaaaccaaagcgaaggccaaaatctccaaagccttcttttggccccaagagcacctctaaccatgccaagactttaccagccaatatggaaacagtccctacagcgaatgaggtcttgtactcttggagttctctattgattggcagtgatacttcctctagtaatggcattccttctgaaagagttcccaaaataaaaagttggttcaaggcatctaaaaaacttctaactgcaaaacagtttccagctgcagacattctagcggctaccaaggacttcaatgaagaatgttttattggtgaaggtctcactggtcgagtttacagaggtgaattttctgatggccaggaggatttctacaacatgcacttcagacccctaatagctgaagtgtgccatcagttatgttaa

SEQ ID NO: 23265 - DNA, 645 bp, Zea mays
  Peptide Sequence Number=SeqID_65044
atggacctcctcgacgcgaggcaccgccacacgccggattcgagctcctccccacatgccgcctccgacatgggtctcccgctcgccggggctgcctaccagccctacgtctctgagctcctctccttctccatcgagcgcctccacaaggagccggagcttctgagggtcgacgcggagcgagtgcggcggcagatgcaggaggtggcggtggagaactacggcgccttcatcgccgcctccgaggcgctctccttcgtccgcgcgcagctcgagaacttcgatggccacctcgaggccatgggtctcaacctccacctcaccctagcctgcctccgccgcccgccatggcctccctcacctcaacctccacctcactcttcccgcaagcctccacatccagaagccacgtccggcattgacgggctccgctcccacgcgcgcctcgaccacgtgctcgcccgcgacgacaaccgcatcgccgtcgcgcgcgcctcaggaaggaccccaccgtgcacttgctcctcggcgtcaaggcggacccgtgcgtcggaggatgccacccccacccaataccaccacccaggaatgcagccaaccggcacccagtggcgacatcggagccgggcacaaccacaacactag

SEQ ID NO: 23266 - DNA, 312 bp, Zea mays
  Peptide Sequence Number=SeqID_65045
atggccagcatgctagacgctgttatagagactacgagggctttgagccctgttcctacaaagaaaattgctgaagatgccaaagcgcaagccgaagccgaaactgggcaagcagaagccgaagctgggcctttagcgaccatcgtagcgaagcctgccgcacctaaggaaaaacggcactgcagaatgcacctgaaactcctgcacccgaagctccaattgaaactgttgactacatcattcgacatgcttcggggaagaaattgtccgaagaagaaattctggaagccagacactatgcgcgaaagttga

SEQ ID NO: 23267 - DNA, 270 bp, Zea mays
  Peptide Sequence Number=SeqID_65046
atgatagttcaaaaatgcttaattagaagcacaatagaaagaaaagtggaatttttgggagaattagataatgtaccaccaaaatctttcatggatctcatgaaacataaaaatataattaaagagtactgtaatctcactgacggggagtacatccttgtgccggagcaaggagttgctcagaaggtagcccaggatcgagcaccagagcctaccctcgaggatctgcctgccccagctttggaaggcaagccccggttttatgcataa

SEQ ID NO: 23268 - DNA, 186 bp, Zea mays
  Peptide Sequence Number=SeqID_65047
atggggcgaggcgcagcatggcgcaagctcgataggcttcttttccgacgtgacgagtctctggcaattgttgtggggcgtggtggtgccagcagggaagcgacggggcgcgtgcacgtggctccaaatggccaccgacgggtggggctagtcggtgagggaagaagggggtgcgggcatggatga

SEQ ID NO: 23269 - DNA, 639 bp, Zea mays
  Peptide Sequence Number=SeqID_65048
atgaccgcgtcaaaaaaggtgcgccacgtcattcgatttcgtatccttttccacttcctcattctctctcttgcctcagggatcgggaaaggggatactccaaaagggatccttccccgcgaaggaagcgggccccgagccccccctactgatcagaggctggcccccgaagggttcgacagccgcctcagacgcagagcgagggatgaccctgggtatgttcgatacataaccaaggctctggctacgctcccgaggaagctccgcctcgcccgaccccagggctcggcccccgtctcggcctcggctccggaagacaacgaactccgcctcgcccgaccccagggctcggactcggcctcggctccggaagacgacgaactccgcctcgcccgaccccagggctcggactcggcctcggctccggaagacgacgaactccgcctcgcccgaccccagggctcgaactcagccttggcctcagtcgatggtctccgcctcgcccgacccggggctcggactcgacctcaacctcggaatacagactcgacttcgacctcggaggagcctccgcctcgcccgacccagggctcggaccgaccacgtcacaaggggggggcatcattaccctacccctag

SEQ ID NO: 23270 - DNA, 303 bp, Zea mays
  Peptide Sequence Number=SeqID_65049
atggccacgccggcggcggaggctcgcacggccgtgtcgtgcgcgatgttggcgccggctgcagcccgccaggaacacgcgggacaggtcggcgtgctccagcagccacgggtcctcgccgagcgtcaccgcccaccgcagcgccgcccacgcgtcgtcgtacgcggcgggcagcttgtgctccggcgcgaggcggtagtagacggacacgccgatggcgcccgagcgggcgacaaggtcgttgagggtaaaaaagggtttgtccactttgtcgtggcgatgtctgcagatctgatgcactga

SEQ ID NO: 23271 - DNA, 495 bp, Zea mays
  Peptide Sequence Number=SeqID_65050
atggcgctggcgcccggcgagagcgggcgatatcgcctcgctctcgcccgcgctggagcgcccgccagggcgagaggcgggcgagagggaggcgagagggaggcgaggcgctggcggggcgagagcgcgggcgagagcgacgtgtcgcgatctgattggtccacgtgtcgcgatctgattggtccaccatcagccggcatagagtttgggaaaccgggggctcaatatggcctcgccgaccatggtgccgccacgaccggcagtcgagggaggtctattgcgccagggggggcagggagaagtgtccactatatatctaaaaatgaacgctctggatttgccaaccacataccccttcgactagatcaatccgagcccttagatggtaagcgagtggctttgatcgggttgggtcgaaggagttacgcggaccatggatctctgatccaatggctgagggcatactggtgcaggaaggcagatctggcatgttaa

SEQ ID NO: 23272 - DNA, 174 bp, Zea mays
  Peptide Sequence Number=SeqID_65051
atggccttgctagaccctcccgagcgtcttccgcccgaggtggcactcaacttggtgctcggcctcatgggggcgacgctcttccaccggtgcttagcttcaaggatgttcatcagccttgcggtggtggagagcgaactgggctgcggctctgtcttccacgtgagccagtga

SEQ ID NO: 23273 - DNA, 503 bp, Zea mays
  Peptide Sequence Number=SeqID_65052
atggagagcgtgggcgcgggcgcgggcgtggcttccagctcctgtatttctctcactgtcaagtcgggtgcgcttgcagtagggggttacaagcgtccacgcgggagagtgagcgagcggcctcaagcgagcgcgtacctcgtcctcgtccccgcgcggccaacctcctctaagagggccctggtccttccttttataggcgtaaggagaagatccagccggagagatcttggcacccagctggtgtcggggaccataattaggggtaccctcaagactcctaattctcagatgggctcggactccgccctggcctcagccgacgacctccgcctcgcccgacccaggagctcggacttggcctcggccacggaagacagactcgacctcggctacggaggagcctccgcatcacccaacctagggcgcaggccagccacgtcaacaggaggcgccatcatcaccctaccccgagctgactcgggccacagggaaccagaccg

SEQ ID NO: 23274 - DNA, 312 bp, Zea mays
  Peptide Sequence Number=SeqID_65053
atgtgcaagggcaaacaaatgatgaagggcaaaagcactaacctggacgactgcagtctgcaagccagcaactgcaagcgcggctgcgccctaggcggacagccggacgcggaggtgcagaggctcccgaggccgagggagaggcggggtcgggggctcgctcaggtcgggctcaggtcaggccatcagggcgtcgggcggcgcgctcagatcgggggctcggcccctcggggcgtcgggcggcgcgctcaggctcgactgctcgaggcggggttgggcgctcaggtcacggcgtcgcgctcagcggcttag

SEQ ID NO: 23275 - DNA, 288 bp, Zea mays
  Peptide Sequence Number=SeqID_65054
atggcgccccccgtgaactggccgctctcgggaaaagctcagggcgccatggctaaaaatcatcagactgtccggtcgcaccggactgtctggtgtgctatcggactgtctggtgtgccacgagggacggtagctgcaacggtcggcttcgccaaacaaggaagggaatcacacactgttcattgtccggtggtgcaccggactgtccggtgcgcccacagacagaaggcaactagatggaactcaaacggctccaagctaccttggggctataaaagggacccctag

SEQ ID NO: 23276 - DNA, 144 bp, Zea mays
  Peptide Sequence Number=SeqID_65055
atgcagagaacagagctgagcgcagctgttgcagactcgtggcagttctctagtgctcagtctatctttcaagataagccaacatatgaccatgtgcttgttttgacaagagttgtggttgacaagagttgttctagatcttga

SEQ ID NO: 23277 - DNA, 564 bp, Zea mays
  Peptide Sequence Number=SeqID_65056
atggcacattggcgcaccatcgagcgcacgcgaggccgcaagcaaggaacccccgcacgtatgcatattcatgtgtgtcccacacacacgctattccggcacacaaatgccacagctggcacccatggccatagagcccacacgtcgctttgtttcccatgcaaccccacaaatagcgcaaactcgccacatgtttggtcgaattattacgccacagagaaagtgggacaggggaaggagatggcaatagagggaacctggggcccgccacatgggcatgagaggaaggaggcatggtgcgatcagggcacgtgggaggcacagagtacaggtgagcatcatgaagcaaagaagacataccaagcacaggaagctcggtgcatgacaaaagcaagaaggcttggtgaacaattacaaacagaagggaagaactgcctgcatatgttggagggatgctcattaaggcaaggaaaagttgtttacttcaaaaactacaacattgcagctgattcaaaaattgtaaaatgtccgtaccatgtgtgccggcatcggacagccacttga

SEQ ID NO: 23278 - DNA, 198 bp, Zea mays
  Peptide Sequence Number=SeqID_65057
atggcgtttggtgtcatcatgatgatgggatcagaccttaggaggtgtgttggtgggagggaaggagagatgggatgtcgacacaatcgtactggtggaggattcacaagaaagagtgaggaaaggcggaagaggggccaccagatcctctacagtcactatagaggacatgtatttctacacgtgggtctagcatct

SEQ ID NO: 23279 - DNA, 150 bp, Zea mays
  Peptide Sequence Number=SeqID_65058
atgttgacacattttttgaaaaacaaggtcaaagttagagaggtcaagcttctatctgaactaaaaaatgaacttagaatctcacacattgagcataacgaagttcttatgaagaccattttaaatgagcatgtcaagtcattgaggtga

SEQ ID NO: 23280 - DNA, 453 bp, Zea mays
  Peptide Sequence Number=SeqID_65059
atggatacactaatcacaaagttcttacaatcttacctgaacaaacacagtcttgagcctcgtcctgtacttcagggtgtccgaatgctacgacaaggaggtttccgaacatttcaagagtctatgatgaggtttttcgaggacgaaaccgagaaggtgaaagggttcacgtcagaatccaccgtcagctacagagaccggctcaagatcatggtcgggctggtcaacccggacgacctccagctgggctctacggagaggaagctcgtccaggcgtacaacgagaagccagtcctctcgcggccccagcacagcttctacgagggagaggactaccttgaggtggaccttgacatccaccggttcagctacattgctaggaaggggctggattcgttcagggcacgcctcaagaacggcatcctcgatctggggttaacgatccaggcctag

SEQ ID NO: 23281 - DNA, 225 bp, Zea mays
  Peptide Sequence Number=SeqID_65060
atgagggctcctgccgtggcctttgctgctcttctcatggtgctgctgatggctacaagagcacatggaatcaggctggacaggcagttacatgatgcaatcaacagcagcaaggagggggacaagctaacgacgagcgagccagcgccgagccaggaccgttcttccgagtcgggcgatgggcgcggcgtctgcgacatgggagggaagcagtgctccctctag

SEQ ID NO: 23282 - DNA, 969 bp, Zea mays
  Peptide Sequence Number=SeqID_65061
atggacgtgccgctcccgctgctgctgggctccctggccgtttccgtcatggtatggtgccttgtgctccgccgcggcggggacgggaaggggaagcggccgctgccgcccgggccccggggctggccggtgctggggcaacctgccgcaggtcggcgccaagccgcaccacaccatgtgcgcgctggcgcgggagtacggcccgctgttccggctccggtcggcagcgccgaggtggtggtggccgcgtcggcgcgggtggcggcgcattcctgcgcgcccacgacgccaacttcagcaaccgcccgcccaactccggagccgagcacgtggcgtacaactaccgggacctggtgttcgcgccctacggctccccggtggcgcgcgctgcggaagctgtgcgcgctccacctcttctccgccaaggcgctggacgacctgcgcggcgtcagggagggcgaggtggcgctgatggtgagggagctcgcccggccgcggcggggagagggagggcgggccgccgccgtggcgctcggccaggtggccaacgtgtgcgcgaccaacacgctggcccgggcgacggtgggccggcgcgtgttcgcggtcgacggaggggagggcgcccgggagttcaaggagatggtggttgagctgatgcagctcgccggggtcttcaacgtcggggacttcgtgccggcgctcgcctggctcgacccgcagggcgtggtcggcaggatgaagcggctgcaccgcaggtacgaccacatgatgaacgggatcatcagggagcggaaggccgccgaggaaggcaaggacctgctcagcgtgctgctggccaggatgcgggaccagcagcagcagccgctcgcggagggcgaggacaacaggatcaacgagactgacgtcaaagcgctcctcctcgtgagtttgcttgcattgacgacctctcaacgtgcaaatggaatggac

SEQ ID NO: 23283 - DNA, 186 bp, Zea mays
  Peptide Sequence Number=SeqID_65062
atggatctcggcggaaatggcgctgattcttgcgattggtgcgcttctgctgagccgatgcgcgcggacatggaagaacgaaggcctgacgcgcgggacccgcgcgtgatccacagccgcgcaacaacccagcgcgtgctgagcggaatccgcggagcagacggcgcgaggaagacggagatttaa

SEQ ID NO: 23284 - DNA, 192 bp, Zea mays
  Peptide Sequence Number=SeqID_65063
atggacgacgaagatatagccgaagacattcggtttgacgtgatgacgaagaccaaatatgatgaggaccgaaaaaggacaaagattatccaatccttaatgattcgtgttatgttagtgccttcatccttttacattcctattcacatattaaatgatgaagataatgcttcggaggatgaaggtccataa

SEQ ID NO: 23285 - DNA, 642 bp, Zea mays
  Peptide Sequence Number=SeqID_65064
atgaccgcctccgcccgcatcctcctcctgctgccacgccagcttaccacgcctcttcgtctggcacacgcgctcgcgccccagtcccgggcggcggtgcgcggctacttctcgccggtcgtcctgcagcaggcaacccaccgctgttggtccaccagcagctccagctgcgagcagtatccgcaggcacccatcaccgccgccgcacccggtgctccttgtccccgcgacggaaagggagagggatacggggaggcggcgacggcgacggcgtgcggcggcgagaaggccgtctcaggcgcacatcaagacggcagcgacggcgccggcgcgcctgccccgccggctcatccccaggataaggaggcggcggtaccgctacgggcggctccggcgggaaggaaaggccgctccggcgtccagacgccgaggcagcgcggccgcccggcgaagccacaggggaataagaataagaagcctgcgcggccgggagctccgaaacaagggcgcggcggcggcggaggcatcatccacgtcgttgctcctcgtcgttcctcctcctcttcgccggcggcgtcctcgacgccgccgtctactactcgtcttagggcggcgaccaagaaacgagagagcgaggattga

SEQ ID NO: 23286 - DNA, 966 bp, Zea mays
  Peptide Sequence Number=SeqID_65065
atggagcagctggtaggagttcaccatcacaaccactcgctctcccctcgggctcctcgcaccccgacccgcccgctgccgcagccgcagccgcacccactcctccaccatctcccgtccaacaggttccaggatctccactcccagattcacaatcacattcacctcgtggtccccgcggccagcagggtgctccgcgccaccccgcccttcttcctcatcctcctcgcctccgtctacctgctcgcctccgtcaccatcttctccgcccccacgccgctgctccgcctccgattgtcctctccgaggccgctgatcctcccgaagctcgtgtcgcatccgcttgcgccggagctctttgatctagacgacgggagtatccgggtccgcctcgccaatgtcggcgccgccatcacctcgttcctcataccggacaagaatggtgtgggttctctttggtacctaccttctgtttgcttgtgctctacaacggctctgactctttcatttcacgatgctcgactcgtcttcctcccaggggttctcgctgatgtggtgctcagattcgactcactggatccgtacctgataaaaggctacaagcttgttgccatcaagctgattgtcccatccaaaggattcgctgagaaacactaccatgatctcaaggaaaggcctttcttcaatgggttgtgtgacttcctcagctttggccctgtacttgcaatggtttgggaaggagagggtgtcatcaagtatgggagaaaactaattggtgccacagacccacagaaatatgaaccaggaaccatcaggggcgaccttggcattgttgtgggaagaaacatcattcatggaagtgatggcctggagacagcaaaggatgagatcgccttgtggtttgaacccaaggagctggtctcttataccagcaatgcggagaagtgggtctatggggtgaattaa

SEQ ID NO: 23287 - DNA, 642 bp, Zea mays
  Peptide Sequence Number=SeqID_65066
atgggcatgggccgcggagacagcgagccagtgagtggggaactagttaggctgtccagagtccagacactgccattgaagttgtctgcagtcaacctcaatttcgtgcgtattttaccacttcaaagcggctaccgagaacgaagtttgagcattgacccgctcaagcgtgtggccggagcaggtcgtggggagggcatgggaggcgacgtggagagggaggttggcgacgaagatggtttggaccggaaggcagccctggaagacgacgaactccgcatcgcccgaccccagggctcggactcgggctcagccccggaagacgacgaactccgcttcgcccgaccccagggctcggactcgggctcagccccggaagacgacgaactccgcattgcccgaccccagggctcggactcagccttggcctcagccgacggtctccgcctcgcccgacccaggggctcggactcgacctcggcctcggaagacagactcgacctcgacctcggaggagcctccacctcgcccaacccagggctcggaccgaccacgtcacaggaggcgccatcattaccctaccccaagctaactcgggctacggggaacaactccggcgtcccatctggctcgcctcggtaa

SEQ ID NO: 23288 - DNA, 1614 bp, Zea mays
  Peptide Sequence Number=SeqID_65067
atggaggccttgaaaattgcacgaaaaacaacctcaaagttaccagctcacactctaggatttctgccgccggctttccccagagggcactcacatttcgctcactgtttgtgcgcaaagcacgatactggtaaaggggtgccatggcctgacgccggctccaaaggggacctgaacctgaccgatgaatgcgctcaaggccatcacaggaaagccggaagcttatcgagcaccttgtctcttgacaacggagatggcgctggggagacgaacgatgctgagaagcccgtgaggcgcggtggcctgttgccgaggagagccgggcaaggactggccctgaggccaaagtctggcggtcgagcagacacgaacggaaaccagcaggatctgttggctgcgtgggtgccctcgtacggggacgggttgcgcgcggtgaagagatcgtcgagcgctccggagttccaggattcggacagcgtcagcctcgcctcggcgtggctgaagagcaagtggaacctgaaacgggattataccttcaccctggcgctgttcgacgccatctccaagcctctcctggacagcatccccaagcctctcctcgacaacatccccaacacgatcgttgcttggagaaacaaggcttcggtcgcggcgcggtcgaggcttcggctgctcctggcgtcgtgctggggtgcaggtggagcgttgggcgcgtgcagagagagggaagaggagagagttttgaagggagagttacctgcatctgcatggaagagggaggagacccacagcttccgagcatctccgcacgcaccacgtccgaaggcgcggggcgtcgacttggatctccttgagcagctactgtctgacgacaacggctggctcgaggtggtctcacgctcgcccaactcggtagcgtttcctccactctcagccttcttctcggctgacgcgacagccaccacagtgacgacggcggcgacggccgcgaacgccagctggtggattcagacgggtggcgcgagcccctcctccgtggaggagcagttcagccaggccatgtcctacatccgggatatgcagagcgacggcgacgtcctcgtgcagctctgggtgccggtcaaccacgatgacgggaaactggtgctgaccaccagcgagcaaccgttcacgctcgaccaccgctccgacagcctcctccggttcagggaggtctccaccaagtaccagttctcggccgatgttaagtcgggggattcgccggggctgccagggagggtctttatcagcaggctccccgagtgcactgcttcctacaaagatgctttaccagagatactggaggtcctaagagcagcctgcttgacccacaagctgccattagctcagacatgggtcacatgtgctcaacaagggaaacgaggcagccgacattccgacgagaactaccggtactgcatctccaccattgatgaagcatgctttgtgaatgaagccgagacgcggggcttccatgagacctgctccgagcaccaccttctgcgtggggagggggttgcagggaaggcctttacaacaaaccagccatgcttcttgccggacattggatcctga

SEQ ID NO: 23289 - DNA, 399 bp, Zea mays
  Peptide Sequence Number=SeqID_65068
atgtcgcgcgcgttcgacgactactatatcaaggattgtggcttcatcttgccgccggaggtgacgcagaggaggatcgacaacagtgaccagttcgtcatactcgccaccgtcgggcgtaaggagaggatccaggctcctccgaggtcgaggtcgagcctgtcttgcgtggccgaggtcgagtccgatcccctgggtcgggcgaagcggagaccgtcggctgaagccagggctaagtccgagccctggggtcgggcgaagcggagttcgtcgtcttttggggctgagcccaagtcagagccctgggtcgggcggagcggagttcgccgtcttccggggctgagcccaagtccgagccctaggtcgggcggagcggagttcgccttcttccggggctaa

SEQ ID NO: 23290 - DNA, 675 bp, Zea mays
  Peptide Sequence Number=SeqID_65069
cgcttcctctcctgggatattttggccgcccagcagcagccttatctttctagcgccgcacgccctggagctctcctgcggcgtggagatttttttcctctcgacgttatctctctccctcgtcttcttcgccgacagcgcgcatctcccggcagagcagctcctctgcgccgctgttttcaggcgttctctcttccccgtgatcctatccgctgccgtggggcttatcccctgcaccgctcaagctcgtggaagagaatcccgccgccctgttgattttttcagccatcgcgggataaaaatcgcctcgtcgagttctccctccagccgcgcccctggctcctactcttccagcgcgcccaccttcccagctcgttctccagcctttctcaagttcgtcgcgcgccccctgtatttctctgtggccgacgctcagctcctagctccggcgcgtgtccctctgctcagctccggccgcgagcagctccctggtgcttggacccggctcagcgcgctccctgctcctatcaccgctgcatggacagttatcgtcgccgacgcctgcaccaactcctgctgctgcagccccaacgcctacaccgacaccatcaccatcccctgcaccagcaccagcaccgacgacaacacctgctccggcaccatcccaaaaccgat

SEQ ID NO: 23291 - DNA, 156 bp, Zea mays
  Peptide Sequence Number=SeqID_65070
atggcggagcaggcatcaaggtcagccagttaccacgcgccagtaaaaataaacaggtttgaccgacttaatcaaccatccagatcggtcctatatgggttcatgagacagaacggacgatacatcacaaaccctgaccaggtgcggaggatgtag

SEQ ID NO: 23292 - DNA, 378 bp, Zea mays
  Peptide Sequence Number=SeqID_65071
atggcccggtcgttgatctgcctctgcccgctgggatgggcaccttggagtcctcggctcgtggaatcagtcctgctaggctgcattccggttataattgctgataacatacgtctgtcgttccctccagtcctccagtggcaggagatctcactgcagaagaatttgtgggatccagtgaagcagagggctctggttttcaatcgtccgatggaagcaggcgctgctacatggcaagttttgagggagcttgaggttttgctggaccagtctcggaggagatctgttggatcctattcctggaggagttcacagcatgccgccctggctgacaacatcaacattgagtcgagacctgagcctgagatccacctctga

SEQ ID NO: 23293 - DNA, 369 bp, Zea mays
  Peptide Sequence Number=SeqID_65072
atggccgggaagggaggagggaagtcgctggtcgccgcgaagatagcggctggcatggacaaggacaagaagtcgccgttccctgtggaacgcatccaccgccacctgaaggatagcgcacaggccggcgagcgggtgggggcgacggcggccgtgtacgcggcggccgtcctgaagtacctgacggcggagatcatggagctggccgggaacgcgtgcagggacctcaaggtgaagcgcatcaccccgcggcacctccagctggcggtccgcggggacgaggagctggacaccctgatcaaggccactatcgccggcggcggcgtcatcccccacatccacagggagctcatcgacaaggctgcctag

SEQ ID NO: 23294 - DNA, 369 bp, Zea mays
  Peptide Sequence Number=SeqID_65073
atggccgggaagggaggagggaagtcgctggtcgccgcgaagatagcggctggcatggacaaggacaagaagtcaccgttccctgtgggacgcatccaccgccacctgaaggatagcgcacaggtcgacgagcgggtgggggcgacagcggccgtgtacgcagcggccgtcctagagtacctgacggcggagatcatggagctggccgggaacacgtgcagggacctcaaggtgaagcgcatcaccccgcggcacctccagctagcggtccgcggggacgaggagctggacaccctgatcaaggccaccatcgccggcggcggcgtcatcccccacatccacagggagctcatcgacaaggctgcctag

SEQ ID NO: 23295 - DNA, 267 bp, Zea mays
  Peptide Sequence Number=SeqID_65074
atggaggtcgccgccgccacttgtacgctccttgctgccgtcgccctaccagcatcgtcgtcctcagcagcagcacgctctgcgacgaaacagagctacgcgaggaggaagacgacgccgcatcaggtgccgccgcctgccaccgccaccgccaccacgtaccgcgacaactggttcgacaagctggccatcgggtacctgtcccggaaccttcaagaagcttctgggacgaacgtcgacgagcaggaagcgtggtcggtcgagtag

SEQ ID NO: 23296 - DNA, 810 bp, Zea mays
  Peptide Sequence Number=SeqID_65075
atggcgctgtcctccggcagcgcggccccggccaggcactggcgtggccccgacggccaacggcggggcgcgggcgcggccttcgagcagcggcgcgcgggagcggccccccagcgcgcgcggcctcccctgcgggcgagcggccgtccaggcacgacccgacaactagggcgcgatggcccaacagcgcgtgcgggcggccttcgctggcgcgagcgtgcgttccgaggcgcgcgcgagcgaggatcccccagcggcgcggtggcctccggccccgacggctcgggcgcggtccccgcaccggacctccccgacgcatgtgtcaacggcgacacgggatctggtggcgaggcgctgcctccccagcgaatcgggcgtgcggcacatctggcgcggtccggcgcaggcggacctcggccagcgcgggcgcgcgtcggcccctgcacgggctcgggcgcaacagcccccggcgcagatctccttgccaggcaccggctgcgcgggatcgcacacctgacgcgagggtgcgtagcccgtcggcacttgggcgcggccttggcccgatggctggcgcggccccgagggcggcgcgtgggcgctcggctggcgcggtcccggcggctccccgtggtgcagcggccacgcctcggccccggcggctcgggtgggcaggcaccggtgcgggcgcatggcgcggatgtgcaggcccgggagcgtgcatcccgacagcgcatagctctgatcagtgatggccctgagggtggggcagaggggcggtcgccctgggcccccgaattcatagggtcctaa

SEQ ID NO: 23297 - DNA, 1473 bp, Zea mays
  Peptide Sequence Number=SeqID_65076
atggcgcatccgtctccacatgcgctcgtcatcccctacccggcgcagggccacgtgatacccctcctggagctcgcccacgcgctggtcgaccggggcttcaccgtcaccttcgccaactccgagttcaaccaccgccgcgtcgtggccgccgccatgccggagtcggagtcgccgacgctgctgggccggagggggatccgccaggtggcggtgccggacggcatggggcccggggaggaccggaacgacatcgtcaggctgaccctgctcacggcggagcacatggcgcctcgggtggaggacctcatcaggcgcagccgcgacggcgacggcggcgcggagggcgggcccatcacctgcgtcgtggcggactacaacgtcggggcgtgggcgctcgacgtggcgcggaggaccggcgtcaggtccgccgccatctggccggcttcggccgccgtgctggcgagccttctcagcatcgacaagctgatccaggacaagatcatcgacccacaagatgggtctgcactgagccaaggcacgttccagctgtccccggacatgcccgtgatgcagacgtctcacctcgcgtggaactgcataggcaaccacgacgggcaggaggcgctgttccggtacctccgcgccggcgtccgcgcggtggaagagtgcgacttcatcctctgcaactctttccacgacgccgagccggcgaccttcgcgcggttcccgcggatcgtcccagtcggccctctcctcacgggcgagcgccgtcgccgtggcagtggtggcaagcaggcggcagcggtggtggggcatttctggcggcccgaggacggcgcgtgcatggcctggctcaacgcgcaggcggcgaggtccgtcgtgtacgtggccttcggcagccacaccatgttcgacgcgcgccagttccgggagctggcactggggctggagctctctggtcggccgttcctgtgggtcgtgcgccctgacatcgtcctcggcggcggcggcatccacggctaccccgacggcttcctcgaccgcgtcagcgcgactggccgcggcatggtggtggcgtggtcgccgcagcagcgggtgttggcgcaccctgcggtcgcgtgcttcgtctcgcactgcggctggaactcgaccatggagggcgtccgcaacggggtgcccttcctcgcctggccctacttcaccgaccagttcgtcaaccaggcgtacatctgcgacgtctggaaggtcgggctcccggccgaggccgatgagtcgggcgtcgtcaccaaggagcacatcgccagtagggtggaggagttgatgggtgacgccggcatgagggagagggtggaggacatgaaaagggctgcgcgtgggagcgtcacccgtgggggctcgtcgcaccgcaacttcgacatgtttgttcaggcaatgaaaaggcgtgaatcaatagattcacagaataattaa

SEQ ID NO: 23298 - DNA, 600 bp, Zea mays
  Peptide Sequence Number=SeqID_65077
atgccttcccagcccatctcactgctcatccccaagtgcacttcggccatcatcctccggcgggcgccgccatgggctcgcctcacccagctccttgctcgtcgtgttggccgcctagtcgttgccatcgctgctttggccttcctctggtgctcggcttccctatctgcacacaacaccgcgcccagcacgcccacttggcaaattcctgttcgcctcttctccaaactcatcggccatgctctttcctcgccgtggcgctctggtggtccgcaccacctagctctgtgtcatctgtcgttgtctccatcctcgctgtgccaccagcgcctactcggagcttcagcttgtcccctgcacaggccatgcccctactctgctacagctttgcgtgatcgagcagcacgccctaaaacctgcatagccctggtccgcaccgtcgtcttcgttttgaaccacttcggcacgaagtcatccttgcaaccgcgtcatatgttgttgttccttgcagttcgtctcgtcatcaccttgctactgcatccggtgtggagcgatttgtgtgtgtcgataaagcaagcgaagtcccgcaacgtccgccag

SEQ ID NO: 23299 - DNA, 534 bp, Zea mays
  Peptide Sequence Number=SeqID_65078
atggggttcccgtcggtgtgctactgcgtgatcctgccgcagccgctcatcctggtgctgcagctgctggacttcctgcggcacgccgtgctgctctgcctctcctcgctgggcctcgcggcgccgccggccgccgacgaccatccggcctacgcctacgcggcgccgccgccgccgccgtcggacctctgggcactgcagccgtcgtccctgcagcagcagcagcagcaggcggcggcggcggccctggcgccgccgcccacgccggcagccatcaaggcccgcctgcccgccgtccgcccggcggccgattgggaggcagagcaagtaacgactcacccgaagggaatctctgataggacacgtaatcacgactcacttgaggccaacttcagacatggtcacgaagctaaccttagacgtgagactcagttatggctcgcccgaggcgaacctcagacgagcggtgacccatccgagtgcatctcgagcgatgctctggaagttgcccaactccgtcgactaattctgtga

SEQ ID NO: 23300 - DNA, 1104 bp, Zea mays
  Peptide Sequence Number=SeqID_65079
atgaccgcgtcaaaaaaggtgtgccacgtcattccatttcgtatccttttcctcttcctctctctctctcttactacagggaccgggaaagggggatactccgaaagggatccttctccaccaaggaagcgagcccggagccctcctactgatcagaggttcgaaggctggcccctaggaagggtccgacagccgcctcagagcactcgggctctgcgcccactactggtcagaggttcgaaggctaacccctcggaagggttcgacagccgcctcaggcctctcgggctccacgcccactactggctggcccccgaagggttcgacagccgcctcagagcacgcagagcgagggatgactctgggtatgtccgatacatggccgaggttcgggctacgctcccgagagctcgggctcaccctcgacgccggacgacggactccgcctcgcccgaccccagggctcgaactcagcctcgacctcggatgacggactccacctcgcccgaccccagggctcggactcagcctcgacctcagacgacggactccgcctcgcccgaccctagggctcggactcagcctcgacctcggacgacggactccgcctcgcccgaccccagggctcggactcagcctcgacctcgaacgacagactccgcctcgcccgaccccagggctcggactcagcctcgacctcggacggcggactctgcctcgcccgacccccggccgcccggccacccctggccgcgcccctggccgcccccagcccagccgccggccgcgccctggccccagccgcgcctggccagcctcggccgcgccctggccggccccggccgcgcccagccgcacccccggcccgccctggccgcgccctcggccgcccctggcccctggccgcccgccagccgcccctgcccgctgaggatccggggtgtagttcgcttcgccgtcgtgccgtcaatggggctcggtgtatgcggctcgctctgccaaggtgacaatgagattgatggttctgattacgattatggtattggcgaagatgaagctgtggaaggagacttccaggagttccaagactacgacgagttctag

SEQ ID NO: 23301 - DNA, 819 bp, Zea mays
  Peptide Sequence Number=SeqID_65080
atggaaaagatcaaggtggaggctgcaaattgtggcttcatcggcttgctacacccagacgtagatccagaatttcacatggagttgttaattcgctccttcaacctttgctctggaccataccagcatattgctttgagagttgggtttgatctacatcctccagctgtggagaatgttgcagatgggagagctgaaaggatggagaagccctcggaccctcctatagccccaccagttgatgatggaaaatctgttgtgcctgatgagaacctgaagaagcgaaagaacactgaaacgaatggttacttacaaaacaaccttgatatgcagcctacaaagttgccgagaccagcactccccagcaattgtgtggagaatgcttatgatgaggccctagaagtcaggaggctacaagacaaagctgctgatttttcaggtgaaagtgttgcacttttcatgggacaagggaaattggaaagcatatgtaccaggtcagagatggggcacctaatattgccaaggaagaggacaaaaagagtgatcggcatgagaaaaagaaaaggaaatagaaagataaacacaaagagaagaaataggagaaagaggcaaaggcggcacccagccaagatatacaacattcctgaagcccctcaaatgatggaattgcctgggcaggaaggtgaggactgtctgttcgacaaaggcggcacccagccaaggaagccggccagttcagcgcttgagtctgatggagtctcccaagtgtgggctcaggctctgaaaattgaccatgctgatggtggtggtggtggctga

SEQ ID NO: 23302 - DNA, 246 bp, Zea mays
  Peptide Sequence Number=SeqID_65081
atggcgacccagcctaggccaacccagaggacagagtcccagctacgacgagcttcacttgtggcggaacaagaagaacccacggcggcgcgatggtgcttgtggaacagcggcaagagcacgataggcagctcaaacacaagtgacgagcagctccgactcccccagacggatcccacatggacaaaggaactcgacgacgcctacatccaaacaccggaagagaaggaggaagccctccaatga

SEQ ID NO: 23303 - DNA, 411 bp, Zea mays
  Peptide Sequence Number=SeqID_65082
atgggtcaggttcccatctacggaacacgccatgaggtggtcagaactgcaaaagacctacacgtcgcaagcaagagcccgaaccatgaacacacggactgccctagcgaatacaagaaaaagcaccatgccagcgcttggggcttgcacatgctcgccctcgacacgagcacacaacccgcactgggcgtaccctccctgcacaccaccaatagcagcacctcctctacaggggccgaggatgtcctagcaccgagcggatgcttcatcctctacatggcgccactgcgaactgtggtcacccacccctacgccaccgtctccgtcaggtctcatgtcacgatcaccctgacgatgacgggttccaactacaccaagtggacgttcttcttcaagtccttgtgcgggtaa

SEQ ID NO: 23304 - DNA, 570 bp, Zea mays
  Peptide Sequence Number=SeqID_65083
atgaagacaaggtcaccccctgcgctcctcactgccggttcgtcttcgagcagcataatatgtcgcagggcctttgcttgcttcagcgtggcacaggagcgggtgaccacactaccagcaccggtgcaagcagcagcggtgccaactccaaccacaacaagaaaggtagtggagtggttcagcagcagcagcagcaaggggggccacgcgctcccctcctgtggctctgttggccccctgcccggtcagcagcagcagccccagtggcgtggacaggggctgcttggaacgtctccgcaggcacatttagctttcgctctggcagagttctccattctggctgtcgtccagcagccacagtttgctcctctgccgggtcctcaagctggtggctggaaccaggcgggtctcaaagcgacattgaaccagatggcgcttcaggctgctagtccttgggggctggggttctggacactgcctgaaattcgctcccacggggagtcaaactcaggacctgaggggtgctactcagaccacccaaccaactcagctagaggtcctttcgcatga

SEQ ID NO: 23305 - DNA, 318 bp, Zea mays
  Peptide Sequence Number=SeqID_65084
atggagatggtgatggttgagccgtggcttcccctattggcgttgcccatggagaaggtgatggctgcatcgacgacagtgccatgggcgcagcgactgcccatgtggataggactgggcagcaaggaagccaatccgtcgctgtcgcttgaagatgcgacactgagaacacaggatgaaggactggacgaaatcagcagcggtgtagatcgaaacccaagctattcgatactagattgttatggactacgatgggattggggaattggagagggagttgtagttgcaggaacgccggccgagggcctctgcccatga

SEQ ID NO: 23306 - DNA, 879 bp, Zea mays
  Peptide Sequence Number=SeqID_65085
gtgcggcatccaaatatcttatcctttttacacagtactgaagcagaagttgcgggatggacctgccatcaaacacacgatttatattgtaacagagccctgttatgcccactttctgaaaagctcaaggaactgaatcttggtggtacacagagagatgagtactttgcatgggggcttcatcagatatccaaagctgtgagctttctcaataatgattgcaaacttgttcatgggaatgtatgcttagccagtgttgttgttacacaaaccctggattggaagcttcatgccttcgatgttctgtcagaatttgatgctaacaatgaagcctctggtagccccatgctgcaatttgagtggttagttgggatgcaatacaagccaatggagctgtcaaagtcagattgggcttcaattagaaaatcacctccgtgggccattgattcttggggactggggtgtttaatatatgaactcttttctggtgcaaagctggctagaacagaggaccttcgaaatactgcttcaatcccaaagtctctacttccagattaccagaggctcttgaattccacacctactcgtagactaaatccttcaaaacttattgacaacagcgagtttttccagaataagttagtagagactatccagttcatggaaattcttaatttgaaagacacctttgagaaagacagctttttccggaagcttcccaatatagctgaacagcttccccgtgagatagtcctgaaaaaggtcttgccaactattgtcaagctttttgcctccaatgaccgagctatccgagcatgtcttttgcaccacatagatcagtttggggaatcaatgtctgctcaaactgttgatgaacaa

SEQ ID NO: 23307 - DNA, 1884 bp, Zea mays
  Peptide Sequence Number=SeqID_65086
atggccactgaatcttccgccgtcgccttcgctggcgacgcaaattccaccgaatcatggagcgcgcgggtgcgcaccctgacgcgcctcggacggcacaaggagtcgatagctcttttacgtcatggcggcccctcgccgccgccccacgcgcttgcgctcccggcctcggtcatctcctgcgccgcgctatccctccccaccggcgttgcccagatacacgcgctcgccgccaagcgcggcctgctccccgccgccgacgcctacctgctctccgcgctgctgaccgcctactcccgcctcggctgcctccggctcgcccaccagcttctcgacgaaacgcctattgagtccacatcccacaccacgctccgcaccgcgttcaactctctcatctccggctgcgcccgccactctctcccggtggcttgcttcgctctcttccgccgcatgcgcgccatcgcggtccgcttcgacgcggtgaccctcctcgcgcttgtccctgccgcgccactgagcgtggtgccgcaggtccacgccctcgctgcccaagtcgggctcgccaccgaaacttctgtggccaactgcctcatgtccacatacgcgcgcggtggcgcgttcggcgcggccctcgcccggagggtcttcgacgagatgccgctggcctcccgcgacctggtgtcgtggaacgctgtgctatcagcccacgcgcagaacggcctggctgtggacgccctcgatctctaccgccgcatgcgtagccccgaaggcagcggggtggagccggacgccgtgacgatcgtcggcgtgctctcctccgcagcgcacctgggcgcgcgcggtgtgggtttcgatgctgagcactacgtggtccagaggctcccgggcttccgcaccaacgtgcagctgtgcaacgcgctaatcaacttccatgcgcgctgcggtagcctgccccgagcgcagcaactgttcgacgaaatgcccgcgaaaagcatcgtgtcatggacggcgctgattactgggcacggcatgcacggaaatggtggcgtcgccgtcagcctcttcgaaaggatggtgtccgaaggcatccacccggacaacgtggcaatggtcggcgtcctctccgcatgcagccacgccgggttgtacgacgaggggcgcatgtacttctcaacaatggagagcgtctacaagctgcggcccacactggagcactacacctgcattgtggacctcctcggacgtgctggccgcctggaggaggctcgagagctcatctcatcgatgcccatgcctgccgacggtgccgtctggggcgcccttcttggtgcgtgcaagatacacaaaaacgtggagattggggaggaggcctttgcgcgcgtcgtcgagctggagccgaggaacgtgggatactacgtgctcatgtcgaatatatacaccgacacggggcagctggactgcgtcgcgagggtacgggcggtgatgaggaagcgcgggctcaagaaggagccccggatgcagctacgtcgagcacaacgggaggcgaggaggatctacgagctggtgaccaggctggagctgatggtgaaggagaagtcgggagtgcgggagagcgtggtggcggtccccaagggacgcatggagaaggaggctgcacagccgctggttgggtttcacagcgagaagttggcggtggcgtttgggttgctgaacaccgaggccggcagtgagattgtggtgatcaagaacctaagggtttgcggggactgccactcgttcttgaaggcggtttcggccactaccaaccggtcgttcctggtcagggacgcgagccgattccatcgcttcgatggtggggtttgctcctgcaaggattactggtga

SEQ ID NO: 23308 - DNA, 1039 bp, Zea mays
  Peptide Sequence Number=SeqID_65087
gatctaccaggacctcagcgcgatcatcttctactgcagcaggtgccgcacgcccatccgaggcaagaacccgcaacccacggacgagaccgagtacgcgctcgctcagctcgagatcctctccgccgacaccgcgtccgtgttctccgacgacgcggagccgccaaatccgaggtcagcctgggccgtcgacgacgacggcgatcgagcggcggcagtgacgcgggatcggggcaccgaatccgactccgacgcgcccgcgccggctacgtcttacacgagccggtcgtcgccgctgagctcacaagaactcgaggtggcgacggtgttgtcaggaatccagccgtccgaccttacgaggacgccactcagcgacccggcgttccagaaggacctcctgcaggcgctggacaacctccggaagctcatcgccgccgtggaccacccgcgaagcatcgacgggcactggcaaggcgtgacgatgcctcggctgagcgcgtcctgcaacgacgagagcagcggcaagcgtacaataacaaggcgcagctcccggctcatgcgccgcctggagtcgcagctcacgcgggcgttgcccgccgagcgcccgcgccggaacgcgagcacttcgtcctcctcttcggcatcgagcagccggcgcgatggtaccaggccgcgggcgcaccaatgccgcccagtgctgggcggcgcgccgttcgttgtctgcggcgagtgttcggagatattgcagctgccgcccgccctgccggccggcagagccaccacgctgcagtgtggtggctgcggcgaagcgttccaggtgacgttgccgacgatcggctcggtggacctacccaagaagatcttttcagcgccgcagcctgctgtcttcgtcggacaggacgccgaggagtatccgctcgcgagaagcagcaacctgagcggtgaacaaccacggcctgcggggccgctgcaccgcgtgctggggtacagctccgtaagctcggttctacgcagtcggcggtacggcgacaacagctga

SEQ ID NO: 23309 - DNA, 279 bp, Zea mays
  Peptide Sequence Number=SeqID_65088
atgggtctcggaggtccgccgacattcatggtgctcgtccgtgccattccttggatgcgcaggcgaggaactaacccccatcttcgtcgtgactgcaacatcgtgtggagctatcgggatgtgaatttcgtggccggaatatcgatctggccatttccggccatggccaccaccgtgtatgctggtggcgccgtcgcggcggtagctgggggaaaacggggtggaattcgtaggggagctgtgtggacgtcgatcggtgatcgtgcgaacaagatttga

SEQ ID NO: 23310 - DNA, 177 bp, Zea mays
  Peptide Sequence Number=SeqID_65089
atggcgagagagattctccgtcgtcgtggtacggtgacggacattgcggagtccgccgtggcgcctggtccaactggtgctgtgcggggaaggagaagataccctgtcgtcccgggcccaccaaccagtgagagcacggtgtgcgcccaggtgaaggcaagctgggctgcacagtga

SEQ ID NO: 23311 - DNA, 453 bp, Zea mays
  Peptide Sequence Number=SeqID_65090
atgacggagagtgcgtgctcattcccgagcaaggagctgtccacgaggaagattaggagccagctcccgaacctgccacagaagatctccccgcagccccaacatttgaaggcaagcaccggttctatgcataaccgctatggtgggtacaagtgcggtcactgcacggcggcagccggggtacgctttaggatatggttgatgggacgcgacgaggccttggatcgacagtggcagggcttcggctgcacggtggaggtccggtgcataaagattgaagtaagggttcaaataaagaggagcaaagaaaccgagtgtgctctggtctggcgcactggacagtgtccggcgcactccgctataattcaccggactgtccggtgtgccaccggactatctggtgcaccagcgaagcaacaactacttcgcgcaacgatcacctgcaaaagctaa

SEQ ID NO: 23312 - DNA, 165 bp, Zea mays
  Peptide Sequence Number=SeqID_65091
atggacgacaatgacattccaagatcttggaatgcagatgagcttcaaagatattatgcgcctatgcagtacaagggccaaattcccccatatgtaaaatgtaacatcaggatccgcaccatcgagtgcaaaaaggacagggagaagctcaaaagtcgttcctaa

SEQ ID NO: 23313 - DNA, 795 bp, Zea mays
  Peptide Sequence Number=SeqID_65092
atggcgccgtctctgctcggggtcacctttcctcttcctctctccccttcttcttcattcaggtgcatattggctatgcgccatcccaggaaactggtcctggcaggctgtttgactgcactaatagtgatgacagctctatcagcttctctaggttgggttgcaccaaatctgatttcacgtaaatggactcatcatgtgaccactctattgttctttgtatttggtatttggtcattgtgggaaggcttcaaggaagatgggtattgctcttctgttgctcttcaattaactttttgtgctatgtgttttggtcttttcgttatcgacttggctaagcgatgcaactgtcatttcagagattcagaagaattggctgaagttgaagcagagctggttggcaaactccatcattatattatgttattttatgcactgcattttagattacttattggcaagttccacccaatttacaggatgctgtctttaagagtaataaaggcgaatctaaaactaaaactaagggtccatactcaagccccggaccttgtcctggtacgtcctgtatgggttctgtaccaggagaaggcaaacgatgatacgaagaaacagcaaagaccatttctcatgcaattcttctcaccaattttcataaaggcattttctattacattctttggtgagtggggtgacaagagccagattgctactattggcttggctgctgatgaaaacccatttggtgttgtcctgggcggaatcatgtacgagctgcttcttttactgacctga

SEQ ID NO: 23314 - DNA, 514 bp, Zea mays
  Peptide Sequence Number=SeqID_65093
atggcgccccacaagctctgtgacgacggcggctctcagctctcttacggaagcagggggaccactctgctacacccccattgtacacctggatcctctccttacgcctataaaaggaaggaccagggccttcttagagaaggttggccgcgcggggacgaggacgggacaggcgctctcttggggccgctcgcttccctcacccgcgtggacgcttgtaaccccctactgcaagcgcacccgacctgggcgcgggacgaacacgaaggccgcgggatctccacctctctcacgcccgtctccggacacctcgcctctccccccttcgcgctcgcccacgcgctcgacccatctgggctggggcacgcggcacactcactcgtcggctcggggaccccccggtctcgaaacgccgacagttccctggaggatatggttgctggtgtactcgacgtccatccgaccccagggtcggccaatgtctcttccctacctcagcaggggatgagccagg

SEQ ID NO: 23315 - DNA, 429 bp, Zea mays
  Peptide Sequence Number=SeqID_65094
atggaggaggacttccaggagttccaaaagtacgatgagttctatacgtggggcctagggtcagcatctcactcgcgccgccctcagtcactgtctggtgggtcccgaccgtcagttccccagcccgtctttcctgtgttcaatgacatgtgggacccactagtcgggttcagcatctacctcgcgaacggactcgcagaaggcaacaaaatccatagaaaccgtgcgcgatcgttggcatggggttcccttgccgagcgtatagaactggagccataccccttcccttcctacaccaattcaaagccatcacctagccatgcacctgaggaacaacgtcgggcaaaaccgagaaggaaggagaccgagccgcctccgttggaccacgccttcatcgttgtcgagcctgcccgtatcggtcgaagatga

SEQ ID NO: 23316 - DNA, 510 bp, Zea mays
  Peptide Sequence Number=SeqID_65095
atggctgccggacgagtctctcccgtctctgcttgtcctcttcgagcttggttcctgcgcgcgcgctcctctgctcccatggcgtgttcctgcgcccgcctggatttccctgctgagctcggtctcatggccggcatacggcttcgtgttcgccggagcttcctggtgctcgcccatggccgccggtgctcgccctcttgcgtcgcgcccgacccagccgtgtgctcgcccgaccgtacgctcgctctgctcggccatgccgcctgctgcgcgtgcgtctgctccgtcccggcgcccaagctccaagtctgtcaatccacggcgcgccggcagttcgccgccaacgtccggtcgccggtcaaggcctcgtctaccaagggacgcaatctcgcctcgctcgagcctggcctcggggcaggaacagtagtcccggacgaattcacgcctcgcccgagggccacctcaggcgacgggcgcaccctcgactcgcccgaagcccagctcgggtag

SEQ ID NO: 23317 - DNA, 414 bp, Zea mays
  Peptide Sequence Number=SeqID_65096
atgggcgccgagctgagcgacggcggcgacctgggcgagccaaggaagcgcgaggctggtgctggggcaagcgccaagaacaagcaacggctctggacctctggtagccacctgggcacaagcaagcagaagaccaggcgtaaagaaagaagtgtggagaacgacatagggataagggagaaaaagtctgtccgtgcagagataaagatagagcgaggcggtggagagctcggctggaaaaagattagagaaggtggggccgtgggggcggcgaaagccagagcccacaagcctagaaaagctgaatttatatgggaacttgaaaagccccaggctgtttgctttagattaaagccaaatattcagactattgaagttgcaatccatagagacaaaacattgtacaaacaatag

SEQ ID NO: 23318 - DNA, 201 bp, Zea mays
  Peptide Sequence Number=SeqID_65097
atggcagagagggcgcagggaaggggtggcgcagataggagacctgggcgccatggggctatgctcctgcagcgcctgctcgccccccaagctgtcggcggggtggaaaacgagcagggagctgcagggagtgcacggctgctcctcatccatgtagggcgagcaacagcaggggagggagctcgtccgcgcctagggtag

SEQ ID NO: 23319 - DNA, 126 bp, Zea mays
  Peptide Sequence Number=SeqID_65098
atggcggatgttggagatgccgtggtccacgtcccctcgctttcccttgccgccggcgagcctctggccggctattttgctctccccgtggagatacatggagctctgttgctccaaatagattga

SEQ ID NO: 23320 - DNA, 255 bp, Zea mays
  Peptide Sequence Number=SeqID_65099
atggcacagaaggagggcgagctcgccatgggagcagctggaggcggccatgggaaacatcaaggggcagtgcccagcatggggagatgcccgacggcgaccatggctgggggcaggggtgagctcacggctggggaggacgcggctggcgagctgcaggggagaaacagctccagcagcaggcgtccatgggaagcgagacaaacaaaacataaatatctccgggttttagaattagatttacatgaggattaa

SEQ ID NO: 23321 - DNA, 552 bp, Zea mays
  Peptide Sequence Number=SeqID_65100
atgggccgcagtctccccagcttggtaggtcaccgagtccatcctgtcaagcctataaggaaggggaagggcgtcctcggccacgtgcacacacctcacaaaaccatagggcgctttggctctgagcaccgcaccatgaagagagaaagggagggaaggcgaaggttgccaccgtcggactcgcgctacgctggtgtccagaagctgtggatacccagggaggctcatcggggcctatcggacgaatacgcggtgttgccggggtcgagaatcgagcggcccaatgacgatttctcgtcgcacttcaacgtccaccgccataccacgcttgaccgtgggcggagcttgtggtttcgcaatccctggatcgctatttaccgcaaagcactgtccgtcgtcgtgctccaccgtgggaggccagcggcgcaacctcgccaggaagatgatggcgctatcgttgatggcgtgatcaatggtcgtgatccaaccacccataaacctcgcgctcgctcagtcttgtccatcgtgatctggatgaatggtgtggattag

SEQ ID NO: 23322 - DNA, 798 bp, Zea mays
  Peptide Sequence Number=SeqID_65101
atgttgaagcgcgcggctggggcgctttacgataggatgtggtgtcctcacggcctcggcgtcgtctacgagagggccgaccgagcgttagcacaggcaatgagggatgaagaagttgaggacctcgccggcgtagagagcttggtggcccgaaaggatgtcgaggtggaggcgggagctgaagagcagacttcgctcaaaaaaggcggcgctgaggactctgcggcagttccggcacttgggcttgcacaagcaaattttggtgacaatggaaatgataaattgttaatgtgccaaactttgatagtgcttagtattgatgattctgatgttgactcgtggtcaacgaaaggtgaagagttgatgagcccatttgctaggatgaacgatgactctttggaggatgacttagattattttttggcgctagatttgtctgttgcagagtcttcgcctagggttgcccccgccgcggtggagtctttgtctagggttgcccccactacaccacggggcaagagaaggatcggagtttggaaacagagtgtgggaatgattggcgacccttcgcaaggcattgaagtccctcgaaggcgtcgtcatatcggaatggagaggtctcgtccacgagaaagaatgcggtcggaggaggggacttgccggatcatccctgctccgacgaccgagcaatgtttcgaagagggagatctatgggctctttttgatggcgaggagattaaactgatgttgttcaatttctgggaggctggccttatcctgaaggcagagccaatgtaa

SEQ ID NO: 23323 - DNA, 525 bp, Zea mays
  Peptide Sequence Number=SeqID_65102
atggcggaggtgagcggcgtgctggcccgttttcctggctcaaggcaggatgtggggagacggggcgcagttttgcgcgagagatgggcaaaggggcacgtcgtgcggcgtttgtgggcaggccatgcagcgcatgcaaacagcattcaagggagcagttttccgggtttttttgggtcgtgggcgctgctcatgctgcatgtgcggctgggcgaccgagcgagcgtggacggcagcggggaatgggccacgcgcgcgcatgggtcaggggcgcggaggcagcggctggggcgcgctgggctacgcgggcgccacacgctgggccgtggaggggcgcgaggcggcctgggcaagggtgggctgcgcgcgagaggtgggccgagggggcgtgttgcgctggtgcggctgcctgggctgaggtgggccacgcgcgcgctgctgggcagcggttgcgcgtgggccggggcaggccaacggagtggcgctgggccgcgggaggggagctggcactgggtgggctggtag

SEQ ID NO: 23324 - DNA, 552 bp, Zea mays
  Peptide Sequence Number=SeqID_65103
atggccatgatgataaccatcgccagccttagctggcgatcaacggcggcgtcaagcgctatcctttcctacgagcttgccacgtcccgccgcgacagtaacgcggggcaccagcagcagcaacaacagcagcagcaacaacaacaatcacagcagcaaacaacaacagtagcggtcgccccacttctagggtcactagaaggtctagggccccaacaggaatctgctgggagtggtgccggtggtccgcctccaaccgctgccgagacaacgccagcagcttctcaagccccagccgagggtccggcggcagcagcgccagcatcaggtggcgtcgcagcgacagaggaggtcctagctgggggatccgtgcccgcctctgacattgcgcccattctcgacgctgggggtgacaccggaggcgcgtctagctccaaccccccgcccgcactggaggagatggaggtggtgttcgggcggcagctccagtcaggtgccgaggaagaagctacaccaatccccctcccctgcatgctgtcccgcgcccactag

SEQ ID NO: 23325 - DNA, 228 bp, Zea mays
  Peptide Sequence Number=SeqID_65104
atgactcactgcggcatggttaaagcaccaaggcacatggcgcaaggttgcgaggtggctaactctggcgagcctatccaaagcggtcgtgactcaggcggagctacagagctccaaagtcagtcctgtttactgattttcagacttagtcacttgggaggtgtagagtggctttttgcaaataagcccaaatctcgtggtttgatttgcaaatcttcaaataggtga

SEQ ID NO: 23326 - DNA, 432 bp, Zea mays
  Peptide Sequence Number=SeqID_65105
atgggccgcaacctgggcccaggccgtgtttttggcccacgcggcctcccctcccctccacttgatctcagccatcgaatccgattcgacggtccagcttcttgcgcgcaggctataaagggcggagatttcggagaggctgtaaaccctaacttcatttctattctcctccccagccgccaggaagcaccggcgcctggccaacggcgcgcctcccttttcacttctttgtcttctgttttcgttctgtcacccgcgcagaacttcagccgccagggaactctggttcctggccgaccgagcccttcaattgggctatcgaacctcggatttgttgtacccgagctctattatttttctgcgaatgaaatttctgtacctttgactgacaacgaatacatggattatattgataatgctctgtacacataa

SEQ ID NO: 23327 - DNA, 204 bp, Zea mays
  Peptide Sequence Number=SeqID_65106
atggcgctcctgctcgagtcgtgcatccgccgtctctgctgcgcgcggcactcaggcctgctttgtcctctaccgtgctgtgccgccgccttggagctcaccctggcgctcgctggtgcccctgctgcgcgacgtcggccaggagcgccgtcgctggcttctctgttcgggagcaggccatctctggtgctccaaataggttga

SEQ ID NO: 23328 - DNA, 204 bp, Zea mays
  Peptide Sequence Number=SeqID_65107
atggcgctcctgctcgggtcgtgcatccgccgtctctgctgcgcgcggcactcaggcctgctttgtcctctgccgtgctgtgccgccgccttggagctcaccctggcgctcgctggtgcccctgctgcgcgacgtcggccaggagcgccgtcgctggcttctctgttcgggagcaggccatctctggtgctccaaataggttga

SEQ ID NO: 23329 - DNA, 1056 bp, Zea mays
  Peptide Sequence Number=SeqID_65108
atggagttcatggagcccaaggacatcgactggagcagggtggtgtcacggtacgtgcgcgacgagacctacgaggacatcgaggccccgcactgggcggacctcaccgaccccaacgccggccgcgccgccgtcgacgacgaggcctggttctgccgccccgattgccagcatccgaagacggccgacgatttcctcaagctgagccccagccccaagggcaagctgctgcgatcggtttcggccatgctgccgttcgtggaaagggacgccaatgccagtagcctcagggacggcagtggcaatctcaactggcagggcggcggcgccgttaccgcctccacgccgccgaagctaaaggcagcgcccaagaagaggttccaggaggacagcgagaaccaggacccttcgctggccacgccgcccccacggcaggggccaagtaggccgccgttcggtgcccctcggtggaacaagcatgccaaggagaccattaagtccagtgcggagaagcggccggacaacgctgagaaggaggcgctgctcaataagcacgccccgccgaggcagctcaagagcactctctcagcgaggaatctcttctctggaaaggatatacttggacagatttcggagttctacgatgagctgaagcggatggttggcggcagccggcccgttacagacacacaggaggtttacagcttaaacccgatgaatccgagcgatttgatggagaaggtggttcctgatgcccctgacagtttcatcagcaatccagttcccgcagagatcgtgaaggaggtggcgacgcaagaaagagtgaaaaagagtccaagcccaatgaagggaaagaaggtggggttgaaggtggaagcagggaagccaaggtctccctctgtgctcaaggaggtgaaggcaacaccgccgactccgcagcggtttccatccccatcgccgaaccgcattaagaatgttaagcttggaggggcggccatagcaggatcgccactcaagaacccactgaaggacttcgaattcttcaagggcatgtaa

SEQ ID NO: 23330 - DNA, 189 bp, Zea mays
  Peptide Sequence Number=SeqID_65109
atggcgtgcagaatgctgccgacgtgggttcatatttatatgcccagtgcgttgcaacttgaagggccccatttgtcattgactattgctattctagcaaagggaaggtaccttcggattcgggttaaaactgtacacaatatgaaaagtatggtcgtgtcacacccgagctttaagggacaaagtcag

SEQ ID NO: 23331 - DNA, 387 bp, Zea mays
  Peptide Sequence Number=SeqID_65110
atgaccgaccacacggcccaccactctgctaccgccgtgccacactcactgatcctcagggcccacggtcctcgccgggccgagcttgtagttgctgcgccccaaatttactcaccggaagcggggttcgtcgtggagtcgcccggtgacgcggactggtgccccggccttgccctaaccctgattattaatatgtatgttgtatacatgtttggtgtgatgttaattttgtctataccatatttgtttgtattgctacgactagcagtacacgagaatctgaggatcatcctgaggtgtatgggattcatgaccccttggcagatgggtaacacgacttgtgggtacagggtacaacctctgcagagtgtaaaactggtatactag

SEQ ID NO: 23332 - DNA, 504 bp, Zea mays
  Peptide Sequence Number=SeqID_65111
atgtcgctggtgcatggccatcgcatccgtggctcacatgccagtatgaagagtgagaagtatgatgagcatgctatgtcaagtggtaagctatcaacatcattggaaaatgaaaacgtccacatcatgctactaattgagggggtcatagccaccaccggtgttggtcttctggactgcagcaggacagcagctgagcaggcagaggcgccagtggagcaggccagcagggggcgaagggacaatggtgataggatagcagagcaggggcagcatgctcgcagtacctcctcggcgccgcctacgatgccagcgtcaacttcttttgactccgcagagatggacaatggtgatgggatagcagagcagggcagcatgctcgcagtacctcctcggcgccgcctacgatgccagcgtcaacttcttttgactccacagagatactaccccatttctctgcctcttcaagggttacacatatatcttggttttgctgcattctaa

SEQ ID NO: 23333 - DNA, 489 bp, Zea mays
  Peptide Sequence Number=SeqID_65112
atgggcgcgcagcgagggggatccgagctggggctgcgaggaaactccacggcgggggtcgtgacgctgggcgccgaacaggaaagaattccaagggaaatcgcaaaggggaaacaggggctgaatcaagaccgccatgggggagctcgaggacacgctcgcgcggcactagggagcgagcaggacgccgcggcatggacgagggaggagctcgcggacaagagcagggcgctggcctgggcgaaatccaagggcgaggtccgagcagggccagaaccaggggcgcggcgagagcaccgtgacgcacaggaagatggggaaaagcggctcggtccgagcgccatggaaggggaagcttcgggaaggagctcagttggaggagtgggaggccacggtgcacaagagctcgcgtacgcagactgggcaaactccatgccggggctagggacgcgcgcagaagctccggggaagaagacgcgaggaagatag

SEQ ID NO: 23334 - DNA, 381 bp, Zea mays
  Peptide Sequence Number=SeqID_65113
atggagaggctggcggtggccacgagggcgttcttcgcttcggcctccggcggcggcactggcggtgttgcattagatgtgaaatgtgatgatctaaatggggaggagaagatgcagcaacatgagatgccaaatactaaaaacgacgatggtgtcacgatattgttacccactattgttgcatgttccctcccatgcttggaggtcctaatcgagatgaaagtggtggcagccaagatgaaagtggtggtggccgcatcaaaggagaaggtgcaacaagacgaaccgaaagctgctatctcagatgtgaaatgtgacaacccaaaagaggagggcaatgtgcagcaaaccaaaagttgttgcctcagatgtgaaatgtga

SEQ ID NO: 23335 - DNA, 600 bp, Zea mays
  Peptide Sequence Number=SeqID_65114
atggggaggcagtcgacgaggtggtggagtggcggctccggatccgcgcggacgctgggcgtcggcgtcgcggtggtggttgccctcgtcgtctccctctgcttcgccttcatcggcggccgtcgtctcgcggggacactggtgggtggcggcacccccgcttcaggagatggtttacaccggacggcggcgcctgctgtcgggcggcccgggctcgcatccgccgcggtgcgcgtccaaatgcggcagctgcaacccatgctacccggtgcacgtgtccgtgccgccgggggtcctggtcaccacggagtactacccggaggcgtggcggtgcaagtgccggaaccagctctacatgccgtgaccgtcgtcacatgcagtgagtggacgacgctcgtccaactggagacgaagacgaccaagggcgggccctgcccgctgcccaagcccaatggctgcgagtcgcgacgccgggagcgcgcagcgcttgcgttcccgcgccgcgcatctatcgctgagctgagcgcccggcagtccgccgcgggcctaccacgagggctcgcacgggcacgacggcaggcagggcgccgtggtgattaa

SEQ ID NO: 23336 - DNA, 630 bp, Zea mays
  Peptide Sequence Number=SeqID_65115
atggcgaccaccgatccatcccttcctgccttggtggtgcaagagagccttgcctttgtccaggtggggggttgttgtagattaatggtggacaacaccggacgtggtagagaagacaacgggatcgacgtgactagctcagtttccgccgcagcatacatcaacgtgccatctatcatcctcttctttagctcagtttcgtcccagactcccagtggccagtttttctgcagttgcgacgacagtgataatagccgggaggcaacttccatgctctggcgttctggccatcacgtttctcgcgcgaggaggattccattccatgccacgccgcgcctgcgtccacgccctagctcggcgcttcctgtgattgctggacccgcgctcctgcccgagttctcctgctcgtggcgggcttcccagtccccctctgcttttggctcggtgcgctgctcgaacaactcaatggagataattgcctggttcagtttctcagggaccacctgcgagggaacgaaggttattggcgagcgcggtgatgtggatgtcaaactcgctgaccgactctccatccatgattgtagagactctcatggatgcgaaataagctgtgagaaattgttgtcctag

SEQ ID NO: 23337 - DNA, 438 bp, Zea mays
  Peptide Sequence Number=SeqID_65116
atggtctcgttgttgcaggccgggataagaaatggaaagcttcaatttttcaccaaaaaggaaatggaaatcttccaaggttgcgctgcagtttgcaggacaaattcctgttctcgaacgggcgaggacagtttcctgcaggtcctttgtcagcaaccacgcccagtccccagccatggtgcaggcagttgctcatttcccccatgtcacatgtggaaatcgaatattacactctggatcacggtcacaccatacacacaggacccgaccggctctacgctcctggaaggagaggcagatgcgttgcttcttgatgcaaccagtgcgaggggttctcctctatttaacctctcgcagagggaagctgaaggagaagagtctgcacgcgacacgccaagagacgggcagctgaaggacaacggtctcgcatgcagctga

SEQ ID NO: 23338 - DNA, 150 bp, Zea mays
  Peptide Sequence Number=SeqID_65117
atggcaggatttaatatgaggctgcaatttattgcagatgtgtgcagtttccataggtgtatttttggcatgcttgatggtttgctggctgcagaacagcttcctgaggaataccgggaccggtgccaggcttacacagacctgttttaa

SEQ ID NO: 23339 - DNA, 174 bp, Zea mays
  Peptide Sequence Number=SeqID_65118
atggaggcacggagcagggcacgcgcgcgcgcgggggagcgtcggatggaggtcggacggtccaagacggcgctcccacgcgcggagcatggggccgcgtgtttcgagaagcgggtcggtgggtccggagcatattgggacccaagaggcatcctgcggggaccttacttgtaa

SEQ ID NO: 23340 - DNA, 405 bp, Zea mays
  Peptide Sequence Number=SeqID_65119
atggcttcggcggcggcggcaactcaggtggggacttacttcctgcggaactactacaacctgctgcaacaaacccccgatgtcgtccaccagttctacagcgaagccagcaccatggtccgcgtcgacgacctcaccggcaacaatactgcaacaaggagctgtcgttcagccattgccaagccgagagcagagttcagtgattgttttagtgaaacaaattctaatttgcttacttacatggctgctcttagccccaacaattgttttggtgacttcaaagcagaaagcttaatggaattagataagctctatccagatgattttagttcagatgaattgaatgatcttgcttatgatcttcctatcagtacttcaatatctatgatttatttgaaagaatag

SEQ ID NO: 23341 - DNA, 618 bp, Zea mays
  Peptide Sequence Number=SeqID_65120
atgcaggcggcatgcaaccgcgccaagtgggtgcgctcctccgacttccaacgcacccagcatggggcccacgcccacgcgtcatgcaatcggcgcgtcggtcgctacgtgcaagcaactgcaccgccacttgcaccactgccacgcctcctcgactgcggaaccagtaccgcgactcgaggcaaccctgcgtacgatcaagcagtgccagccaggcgcgatggtcaatacggccaaaaatgggccggcagtaatggcgatggcaggcgggcgggagcagcggtcacgtcgggaagcgagcgacgcttcgccttcgccataatgaccgcgtcaaaaaaggggccgggaaagggggataccccgaaaaggatccttctccgtgaaggaaataggctccgagcctccctactgatcagaggttcgaaggctggcccctcgggggggttcaacagccgcctcagagcgcgtgggttctgcacccactactggtcagaggttcgaaagtcggcccctcgaaagggttcaacggccgcctcaggccactcgggctccgcgcccactactgatcacgggttcgtaggctggccctcgaagggttcacagccgcctcagacatag

SEQ ID NO: 23342 - DNA, 240 bp, Zea mays
  Peptide Sequence Number=SeqID_65121
atgacgggatcaacgaggaagaagaacagagaaggcatagcggtgctcggggcttcgttgcatgtacgacgcctcctcggccggcacgctgatggtccagagtctgacgccgtctcgcttaccaggtgggacatcgagctcgaggtcgagcacttcagatcgacaacagccggcgagcacaggaccaccttctttgtcactgagctttggttatggctgatgacactcggcaatggctaa

SEQ ID NO: 23343 - DNA, 393 bp, Zea mays
  Peptide Sequence Number=SeqID_65122
atggcggtcgggacaggggacgccgaggactggggagacagcgaggtttcggggctgcgtgtggcggtcgaggcgtgggcgacatttcaggggcaacgaggcttgcgcaagggggcgagggggagggaggcagaaccacgtgacacatctgtccctcctgatatatcgtatctaaatgtgactgtggatcatgataggtactttatttcttttagtggattcatggcttccacaagtttaatcaaagataccttcttttcaaccacttatgaagagggagatggtcatacaaacgcttcgagtgatgggttctaccgcccaaaccctttggcgatggcatatgagaagaagacaaaaatcgtcaatggatatcttgggaactcctctatgtga

SEQ ID NO: 23344 - DNA, 174 bp, Zea mays
  Peptide Sequence Number=SeqID_65123
atgaccaacgcgggctcggcagttgaggacgcagcggagggcgtgcctccagcaagtcgggtcctcacagctgtcctggtcgcccccatctgggaagccatgacagttgaaggtggcggggcggaggacccaccgatgggcgatgaagcgtccccaatcctctgggactcaaat

SEQ ID NO: 23345 - DNA, 2322 bp, Zea mays
  Peptide Sequence Number=SeqID_65124
atggcgccgccggccagcaccgacgagaccgcacgccacaagaaggccaggaaatccaagatcgatatagaagagaagaagcacaagaaaacaaataaggcgcgcgccgccgcagaggacgccccgatacccgacgccgccgagcgcaagaagcgtaagcacaaggacgggcgcgaggagaagcgggacggccagaagtccaagaaggagcgcaagtccgagggaaagggagaggaagccgaggcggccgtggggagggacgagaagatgaggcgtgcgatggaggacgagcggttcgcggcggcgcggactgacccgcggttccggccgatgcggaggaaggaatccaaggtggcgctggactcgaggttcagcagcatgatgacggacccgaggttcgcctcgtcggcggcgcccgtggacaagcgcgggaggcgccgcaagaaacgcgagaaccccatgctgcattactatctcaaccaagaggacttggaggatgatgggaaggggaaggaaaaggggaagaaggagaaaccagtgcttgttcaagaagaggaggaagatgaagaggaactagaggaacaggaggaagaagagagctctagcagcgatgacgacgaagatgaagatttggatgacgacgacgaagagtgctctgttggcagtgacattgctcattacttaatgggaaggcatgatgatacacctatgattgacaaggaaactcacaggcttgctgttgttaatatggactgggatcatattaaggcagttgacctgtatatggtgatgacttcttgcctcccaaagggtgggcgagttttgtcggtctcaatctatccatcagaatttggactgaagtgcatggaaattgagtcaacacagggcccagctgctctggtcaatgccaatgttgataaaaaagacagtgatgaagatgaggatgacacggatgatgatgaagagagcactgatgatgatgttgatgaagaagaagaggaagttgactctgataaagagaataacaaactgcgtgcttacgagctaaacagattgaggtattactatgcagttgtggtgtgtgattccagcgcaacagcaaatcacctgtacatgactcttgatgggactgagttcttgaaaacagcaaatgtgtttgatttgcagttcattcctgactctagggagttcaaacatcctgctcgagacgccgctacagaggcacctccgagttacaaggaacctgattttgagactcgtgctttgcaacatagcagagttaagctcacctgggatgatgatgaacctgaacgtaagaaagtcttgaggcgaaagttcaatgatgatcagctagatgagcttaacatgtatttagcaagtgatgacagcgcgtcagataatgaaggtgtagacgattctgaggatgaatctctgccaaatgggggatccaaacggaagctaacaaaagaggagaggttggctcttctgctgcaaggagacaaatctgatgaggagcaaactgatgaccaggatatggagattacattcaacacggagcttgaggatcttagtaaacggatcctagagagaaagaacaatgaggagaagaccatctgggagaagcaccaagagaaaatgaaagagaaaaggaagggtaggaagaggggactaaaggacgaagatgatgataaccactacatcagcgatgatgagcctgagaatgatgatgatttctttgcagatgaacagtctgatgaagaacctaagccgagcaaaagcaagaaacacaaggcaaaggcaaaaggcgaagcaaagaggaaaggaaatgatgggaccacagatgagcatttggaacaagaagcaaccaaagatgagttggagctcttggttgctggtgaccaggatactgccaatggtgcaaagggttataacttgaagcgtaaaaagggcaagaagggcaaagaggaatctgctgatgacaaacttcctgacattgaccttagcaaggatgagaggttctcagcaatgtttacttcccacttgttcgcattggatccaactgatccccagtacaagaggagtgccgccttcatgcgaaagcaagctgggaagccaggggtacatgggggcaaatcaagcagagaacctccgctggagggttcgtctctgggaggtacagtaccacctgacgatgctgttactaacaatgatggtcagaaacctgatggttcagccacagagaagctgcaaattttgtctgctgttaagtctctcaagagaaaccttggtgcattcaaaaactcaaagacaggtgaccgataa

SEQ ID NO: 23346 - DNA, 657 bp, Zea mays
  Peptide Sequence Number=SeqID_65125
atggccatgaacaggcgcgcgcacgacgtcgtgcccgtgccgactgcggagggcagcggtggattggatgaggaagccaagcggcagcagccaagggtgatgctagtgtgtcgagcgatcacgggaagggtgaagcggcccaaagaagaggagcaggcggcggtcgtcgccgacatcgagggcaaggaggagtacgactcagtgacgaggttgaccagggtgaactgtcgttctgatttcatcatctggaggagtctgttcgacgcgtgctgcaggctgtgcaagttgttcaactgccaggagctcaagctcatagacagccaatctacattgaccttgattgatgctcaagtggtgtttgaggaaatgcagcaaagaaaaggccaagttcagaagtcggataggttgtttaaagtggctgagaagaatggcatcggaacgggtgttgtcatgtacaatgctctgatcaatagccgctgcacagatggaaatatggaaagagcatatgagatcatggtagagatggagaagaagaggattgccccagataacgtgagatacaatacgctgatgagggagttttgcttgcttgggcaacttgatgaagctcacacactcattgacgagatgacagaggggtactgctgtcagccgtga

SEQ ID NO: 23347 - DNA, 3160 bp, Zea mays
  Peptide Sequence Number=SeqID_65126
atgggtggagggcaaatgcttgcctgccttcctctaggtctgatcacgctcctctcgctctcgctgagctccagctgccaaatcgacccccaaacacatgccctcctccagttcaaggacggtctgaacgaccccctgaaccacctcgcgtcatggacgaacgccacctccgggtgccgcttcttcggcgtccggtgcgacgacgacggctccggcacggtcaccgagatctcgctgtccaacatgaacctcaccggcgggatctcgccctccgtcggggccctgcacggcctggcgcgcctgcagctcgactccaactcgctgtcggggcccgtgccgcctgagctggccaaatgcacgcagctccgcttcctgaacctgtcctacaacagcctcgccggggagctgccggacctgtccgcgctgacggcgctccaggccctcgacgtcgagaacaatgccttcaccggccgcttcccggagtgggtcagcaacctgtccggcctgaccacgctcagcgtcggcatgaacagctacggcccaggggagacgccgcggggcatcggcaatctcaggaacctgacgtacctgttcctcgcgggcagcagcttgacgggggtcataccggactccatcttcgggctcaccgagctggagacgctggacatgtccatgaacaatctcgtcggcaccatcccaccggccatcggaaacctccggaacctgtggaaggtcgagctgtacaagaacaacctcgcgggcgagctcccgccggagctcggggagctcaccaagctgcgagagatcgacgtgtcccagaaccagatcagcggcggcatcccagcggcgttcgcggcgctcacggggttcacggtgatccagctctaccacaacaacctgtcggggccgatcccggaggagtggggagacctgcggtacctgacgagcttctccatctacgagaaccggttctccggcgggttcccgcgcaacttcggccggttctcaccgctcaacagcgtcgacatctccgagaacgccttcgacgggcctttcccgaggtacctgtgccacggcaacaacctccagttccttctcgctctccagaacggcttctccggtgagttcccggaggagtacgcggcgtgcaacagcctgcaacgcttccggatcaacaagaaccggttcaccggcgacctaccggaaggcctgtgggggctcccagcggcgacgatcatcgacgtgtccgacaacgggttcaccggagccatgtcgccgctgatcgggcaggcgcagagcctcaaccagctgtggctgcagaacaaccacctcagcggggcaataccgccggaaatcggccggcttgggcaggtgcagaagctctacctatccaacaacaccttctctggctccataccgtcggagatcggcagcctgtcgcagctgacggcgctgcacctggaggacaacgcgttcagcggcgccttgccggacgacatcggcggctgcttgaggctcgtcgagatcgacgtctcccagaacgcactgtccgggccgattccggcctcgctgtcgctgctgtcgtcgctcaactcgctgaacctttcctgcaacgagctcagcgggccgatcccgacgagcctccaggcgctcaagctcagctccatcgacttctcctcgaaccagctcaccgggaacgtgccgccggggcttctggtgctcagcggcggcacccaggcgtttgcccggaaccccggcctctgcattgacggcaggtccaacctcggcgtctgcaacgtggacggcggccacaaggacagcctcgccaggaagtcgcagcttgtgctcgtgccggcccttgtctcggcgatgctgctgctcgtggccggcatcctgtttatcagctaccggagcttcaagctcgaggagctcaagaagagagacctggagcacggcgacgggtgcgggcagtggaagctggagtcgttccacccgctggacctggatgctgacgagatctgcgccgtcggggaggagaacctgatcgggtcgggcggcacggggcgcgtgtaccggctggagctcaagggccgtggcggcggcagcggcggcgtggtggccgtgaagcggctgtggaagggcaacgcggcgcgagtgatggccgccgagatggccatcctcggcaaggtccggcaccggaacatcctcaagcttcacgcgtgtctgtcgcgcggcgagctcaactttatcgtgtacgagtacatgccgcgcggcaacctgcaccaggcgctccggcgggaggccaagggcagcgggcgcccggagctggactggcggcggcggagcaagatcgctctcggcgcggccaaggggatcatgtacctccaccacgactgcacgccggccatcatccaccgcgacatcaagtccaccaacatcctgctcgacgaggactacgaggccaagatcgccgacttcggcattgccaaggtcgccgaggattcctccgactccgagttcagctgcttcgccggaacgcatggctacctcgcgcccgagctggcctactcgctcaaagtgacggagaagacggacgtgtacagcttcggcgtggtgctgctggagctggtcaccggccggagcccgatcgacccgcgcttcggcgagggcagggacatcgtgttctggctttccagcaagctcgcctcggagagcctccacgacgtcctggacccgcgggtcgccgtgcttcccagggagagggacgacatgctcaaggtgctcaagatcgccgtgctttgcaccgcaaagctgccggcgggcaggccgaccatgagggacgttgtgaagatgctcaccgacgccggcacggggccctgcagcccgcgcggacagccgccgtcaagggctctgcgtctcttgccaccgaaccgacacatatgcctctgtttcttcgttggattcctggtgccacctgcgttatgtgccccgtcccgacgcccagcccgcgcccgatcctctgtccacgtcgaccggcaactccaccgccgcccaagcgacaccggagccgccccgacgtcgtccgcggccgccggagcctctgcccccgtccccgacgccaccggcgcccgccccgaccccgccagcatccgcttcactg

SEQ ID NO: 23348 - DNA, 399 bp, Zea mays
  Peptide Sequence Number=SeqID_65127
atgggcaagagcaacaaacgcaagcgcgagccgactcctccatcggaggacttcggtgactcggaatactcggaggaggagttctcctccgagtccgaggggtctccggctcccgtctctcccccggcgtcgtctgacgattcagatgactcccaggggcttgctgcggaggtcttgacttatatccgggccgtcgagcgctccgggctcgagggctcgaatgagtcagagtactccttggacgaggaggactcgtccaaggagggcggtggcggcgatggcggagacgatgacgacgacgacgacggaggcgacggtgacgacgacgacgatgacggtgacggcggcagcaggggcgtcaacggcgacagcaagggcagcaacaaggccagtggctag

SEQ ID NO: 23349 - DNA, 1644 bp, Zea mays
  Peptide Sequence Number=SeqID_65128
atggcggcgacgtcgtccaaggcaacggggccatggagcaggctctcggaggccgaggccgccgtgaaccgtgccgtcgccgggagccacgtggggaggtacttcaagctggacgcgcgcaagagctccttcaccaaggagctccgcgccggcgccgccacgttcctcaccatggcctacatcatctccgtgaacgccgcaatcctgaccgactccggcggtccgtgcacggcgcgggactgcacccccgtggccaccgccaccaactcgacgaccgcggactgcgcagtcgtcggggctaaggctaacccggggtaccagcagtgcctggcgcgcaccaagagcgacctgatcgtggccacggccgtggccgcgatggccggctccttcgccatggggctcttcgccaacctcccgctggcgctggcccccggcataggcgccaacgcctacttcgcgtacaacatggtcggcttccacggatccgggcccatcggctaccgcacggcgctggccgtcgtgatgctggagggcctcgtgttcttcgcgctgtccgccgtgggactccggtccaggctggcgcggatgatcccgcggaacatccgcctggcctcggcggtcggcatcggcctgttcctggccttcacggggctccaggcgcaccagggggtcgggctcgtcggcgccagcccgtcgacgctggtcacgctggccgcctgctcggacgtggacccggccaccggcgcctgcctcggcggcaccatgcgcagcccgacgttctggctgggcgccgtcggcttcctgatcacggccacgtgcctgggcagggacgtgaaggggagcatgatctacggcatcctgttcgtcactgtggtctcctggatcagaggcaccagcgtgacggtgttcccggacacggcggcgggcaatgccggcttcgactacttcaggaaggtggtggacttccacgtgatccggagcaccgcggggcagctcagcttcggcggcttccggcacggcaacgtctggctcgccctgctcacgctcctgtacgtggacgtcctggacacgacggggacaatgtactccatggcagagtacggagggttcgtgaaggaaggcggcgggttcgagggcgagtaccgcgcgttcctcgtggacgccgggtcgacggtgctcagcgcggggctcgggagctccacggtgaccacctacatcgagtccaccgcggggatccgggagggcgggcggacggggctcacggccatcaccgtggccgcctgcttcctggcgtccctcttcttcggcccgctgctgatgagcgtgcccccgtgggccgtgggcccgtcgctggtgctggtaggcgccatgatgatgcgcgtcgccagggagatcgagtggggcgacatgaaggagggcgtcccggcgttcgtgaccatggcgctcatgcccctgtccttctccatcgccaacggcatcatcgccgggctgggagtctacgtcgcgctgcactggtacgactgggcgcgccacgggtacggcaagctgaggaacgcgctggacgagcgccggaaccaggtggccgccgccgccgccaccgccaccgcgggagaagtcggcccggcggcgcagggcattgtctga

SEQ ID NO: 23350 - DNA, 924 bp, Zea mays
  Peptide Sequence Number=SeqID_65129
atgtacggccaagagcgcttcttcctcccaggggccaaacgaagaggcaccaagtgcctagcggcggcgagcacaccggcagtagctgatctggttcgtcatggcaccatggccggccatatgtgccgcaagcatggcaacaggcgccacgcgcggcaaggttccaccccagggcgacgacggcggccagcgaccatacaccacggccacacctcggggtcatcgcggcaaccgtgcgtagccacatggcatggtccgaggtggggtccttggtgctatcggggcacagcggagttcctcctcggtgcgcgcgtaccaaccggattgcccgcgacagtagtcatcagcaccaacgcgggtaggagtacaggcatgtcatccccattagttcaacccaaacggtgcatgcatcgacggctggaacttgggttcccgggatccttcgacgacgaggcctgttcccctacgatgcgcgatatcctctctctcccaacatcacacatagacctgctcgagctacggaaggaaaggaacgtgggtggactacgtatcaagtctgatacgaagcagcctaggaaggataggatgtgggcgtatatgaaggcatgggatctccgtgaaaatcggtcagcgttgagccaggataactgcccagagatgtttagcggacatgggatgaacctgggcgacatcacccgtgacgtcatttccggcgagatgaataaacaatcagagaaaataaacacacacagtggagcccttggtccccttggcacaccggacactgtccggtgcacaccagacagttcagtgtggcctacgtcctcggcgattcccgagagcagcgagttcaatgctgagccagcctgggcaccagacactgtccggtgcatcgaaggctggtgcaagtctggctgtacatag

SEQ ID NO: 23351 - DNA, 375 bp, Zea mays
  Peptide Sequence Number=SeqID_65130
atggctcggcttggtctggctcggtgttgcaacgagccgaactcagctctgctcgggtacatggcgagcgatcatcctttggcggacgccggacgaccggacactagacacgggtggtcggatgagcacatccgcgcctggcgtggggtggcgaactgcaatggagtggaaccgtcagctgtggggctggggagcctcgggcgcaacagggagctccgcctcgcccgacctcaggcctcggcctcggcctcagcttcgggaggagtcacatcctcgcccgacctcagcctcggccttaggagaagtctccgcctcgcccgacctcggcctcgaaccgactatgccactggggatacatcattaccctacccctag

SEQ ID NO: 23352 - DNA, 213 bp, Zea mays
  Peptide Sequence Number=SeqID_65131
atggtcatctcgtgcacaccattgctcatccccggcgaacgagtctgggcgctgtgcgagtcccgggagcgcgctcgtggtcttctcggacggaggttacattggagctccactaattactcaactgaggtgagcagcatcgcggggataccccgtcgtgggcagacgggtcagcgcatcaaaccacggtttaattttgatgggacccaatag

SEQ ID NO: 23353 - DNA, 426 bp, Zea mays
  Peptide Sequence Number=SeqID_65132
atgaagaactccaactgccgcgaccagaagatggaggcctactgcgacgagaaggcacctgggggcttctcgcacctgctggttgccatcgacaaattctccaagtggatcgagttcactggcaagaagttcctggacttctgtgaggaccaccacatccgggtggactgggccaccgtggctcaccccatgacaaatgggcaggtggagcgtgccaacggcatgattctgcagggacttaagccgaggatctacaacgacctcaacaagtttggcagcagtctctgcgacgctaccacgcccgaggggtttggccccgagacctccaagtgggagacttggtgctttggctgcggcaagacgcccgagggcgccataagcttactcctccctgggaggggccattcatcatcgccaagattttga

SEQ ID NO: 23354 - DNA, 315 bp, Zea mays
  Peptide Sequence Number=SeqID_65133
atggccatggaggcccctgccgctggaagtgcagaaagggggcgtcgagccaatgggggagggggacgctgtgccgggcgcgcggacagaggggaatgggcgccccagctccaacatggaggtagcagcgccatgggaagatgcaggggaaactctccacgggggagaggaaggaagcagtggaggagccagggcgcgtccatggggagagaagagatccctgctgctggcgcccatgggaggaggggctggagaggggatgaagcagagggcgcgatgaagtacgagctagtgctcctgctgccgacgccatag

SEQ ID NO: 23355 - DNA, 549 bp, Zea mays
  Peptide Sequence Number=SeqID_65134
atgcagttagtggacgacctgaagaaggatggacttaaccagcggatgctcaccaagcgaggccgaagtgaccgcagtcacttcgcccctccattgactgacctgacaggaaaacagcgccgcctgccccgctccaactgctgtgccgcctgccaagatgagacttacagcagcttagtccagcctcaggcgccacaggaagctccacctcgcccggccttgggcctcaaccttaggagaagtctctgccttgcccgaccccagggctcggcccccgcctcggcctcggaagatggactccgcctcgccggaccccagggctcggcctcgacctcggaggatggtctccgcctcgcccgaccccagggctcaacctcggccctgacctcacaaggaatcgcgtcctcacccaaccccgacctcggtctcatgaggagttttctcctcgcccgaccttgggctcggaccgaccatgccataggggggatcatctttaccctacccctacctagctcaggctacggggaacaagagcggcgtgccatctga

SEQ ID NO: 23356 - DNA, 417 bp, Zea mays
  Peptide Sequence Number=SeqID_65135
atgacgcacgagcgaatacaagccagcgtgaacagtacagggcccttcgtatcaaggcacgtcgctatgccgaagctccctgaaaggtaccttcgacatgtaccatcgcactatatttgcttctatgctgatctgccgaaggtgtttcttcttgaaggaccttcggcgacgaagcagacccccaacacatacgatcttgaaaatgatccagaattgaaagatgtccttgctgaactcaaggtgaaaactgctgctagagctaaagtggtctggaaggttgttgctcatatgatgaagatgctgccggggttatctcctagcgcgcgcgctcctctgctcggatgtccccccatggcgctccttcctgcttccagcgccccgccgagctcctgctccctctccatggccgcggcctag

SEQ ID NO: 23357 - DNA, 447 bp, Zea mays
  Peptide Sequence Number=SeqID_65136
atgggcaagagcaagaaaggcgggagctcctcgcaccattccggcgacaagcggaagcgcgagccgagtcctccttcagaggacttcggcgattccgagtactcgaaggaggagttctcctccgagtccgagggatcgccggtccctgcctctcccccggcatcgtctgatgattcagacgattccgaggagattgctgcagaaatgtggacctacatccgggccatcgagcgcgctgggctcgagggctcggatgggtcggaggtctcctcggacgagggggactcctctgactcgtccgaggaggcgagcgatggcgacgacgatggcgagggtgacgggggcgacggcgatggcggtggcgatggcagcaggggcaacgacaagggcgacggcagcaacggccgcggcaacgacaagggcggcaggggcaaggccagtggctag

SEQ ID NO: 23358 - DNA, 1470 bp, Zea mays
  Peptide Sequence Number=SeqID_65137
atgctgtcttatggtgctgttagtagttggctagttgtcaaaggtattcacatgtcaggtaaaagcattgatgcagaccaaagattaacacttgatgtagacaagttgaccactgaccttgctggcctagttactggaatggtaaaaccgctagttgacattctttggtttacatggagaatgaagcttttatctggacgaagaggagttgctatactgtatgcttacatgctactgggtttgggctttcttagagctatatcccctgacttcggtcatctctcaggccaagaacaagaacttgaaggaacattcaggttcatgcactcgagactgcggacacatgctgaatcaattgctttctttggtggtggttcaagagaaaaagcgatggttgaggctaaattcgtcaagttaattaaccactcaaagattcttttgaggaaacagtggctttatggtattgttgatgattttgtaacaaagcaacttccacacaatcccttcggcgacattcttgagttacataagaagttccttgaactttctggtggcattaaccggatctttgagcttgaggagtttacacgcttcgctcaaagaaatactgtggtgtctcccaatgccatcagtgcagcctcaaaagaaacgatttcgtttcatgaagtggacattgtaacaccatcacagaagctattggctagaaaactctcgtgcgatgtggtacaagggaaaagccttcttctgaccggtcccaatggtagtggaaagagttctatttttagagtgctcagggatctctggcccaccttctctgggagagttaccaagccctcagaagggatgtttcacgttcctcagcgcccatataccagcctaggtaacaattctagtgcctccatgctgctggatgatcacctgaagacaattctagagaatgttcggctggtgtatcttctagaaagggaagggtgggattctacaccaaactgggaagatgttctgtcgttaggggaacaacagaggcttggaatggctcgtttgtttttccatcatcctaagtttggtatcctggacgagtgcaccaatgctacgagtgttgatgtcgaagagcatctgtacagacttgcaactagcatgggcataactgtgatcacttcctctcaaaggcctgctttgatacccttccatgccttggagctgaagctcattgacggcgaagggaactgggagctatgtgcgatccagcaacatcagaaaattgaatcaggtgtggatgggaaattgtgcaaggtggaagctacctttgctatgcaattggtgcctgcgttcttcgctccgttccatgcccgtacacatatgggctgctttgccaaaacagaaacagcatctgttccattcatttacaagcaagatgccaatactacacaacatctgttccattcatttagaagaaacaagaaatggtaa

SEQ ID NO: 23359 - DNA, 360 bp, Zea mays
  Peptide Sequence Number=SeqID_65138
atggccaccttcgagctgtaccggaggtccaccatcggcatgtgcctcaccgagacgctcgacgagatggtctccaacggcaccctcagcccggagctcgctatccaggtcctcgtccagttcgacaagtccatgacggatgctctggagaaccaagtgaagagcaaggttactgtcaaggttaagccctgcattaccacttctctgttctggttttatggtcacctgcacacctacaggttctgtgacaatgtgtggaccttcatcttgacagacgcaagcttcaagaacgaggaggccacggagcaggtgggcaaggtgaagattgtggcatgtgattccaaattgctcggacaatag

SEQ ID NO: 23360 - DNA, 345 bp, Zea mays
  Peptide Sequence Number=SeqID_65139
atggtgacgaggcgccaacgaactcggatggtgaccaagcaagaggaggagctacctacctaccttttgatgcaggttgccatggccaccaccaccagcagcagcttggtcaccggcttgaggtgcaggacaggtgcagcagtggcattgatcagacccactagtgccgctggggatcgccggggctggaggacgacggcgtccggccgtggagcccgcaggggcaaggtcacggtcgctgcggcctgcaagacatgcaaaggaaagggggcagtagaatgcccagggtgcaagggcaccggcaagaacaagaagaacggcaacatcttcgagagatggaagtag

SEQ ID NO: 23361 - DNA, 2424 bp, Zea mays
  Peptide Sequence Number=SeqID_65140
atgcgggacaagtgtgggaaaatggtggaaggacgtggtagtgttcctacaaggcaaggccctttggttagtaatgagaaaaattcacctgtggagaaggaaaagaacagtacaagaatatctgctatcgtctcaggactttctgatgaaaaattgcggggtttatctactggcagtgaagggtgggaaaaaaagatgaagcgtagacgctctgttggaacaatgctcagcagaggcagtgatgctgatcgagatgtcaaatccatgggtcagcatagaccagccaatgaagcacgcccacgatctagtgatggccttggatatagacatggagtttctgctggagcactagcaggtaacaagttggatggcacttctcagcagaacaacattgtatcctgcattctgcccaagtcagatgtcgattatgtggctcagccaaatgaaagaagagaacgccatgctggagttgaaaaggaaaggactacagtaaaaggaaacaaggtaaatacttctgatgatatgcaaaacggaagcttaagtcccctgcccaaggctaaagcatgcagggcaccaagaaccagttcacttgctataaactcatgttctaatttccaacgttcaactggaggaaatgatgaatgggaagaagcaccgtacccaaataaagtgtcacctttggcgggcatgacgaatcgcaaacgttccacacattcaaatgcttcctcacctcctattgcctgggtagggcaacgcccacagaagatgtcacggacaagaagagcaaatgttgtttctccagtgtcaaattttgatgaagtgttatctgaaggatcaccacttgacactgccactagatcagcacctatagagtctggcagtgtcttgctgacaaagaacacatcaacaaccaaaatggatagcatcccatctcctgctgggttgtcagaaagtgagggatcggctgtggctgaaagcaagtccaaggagaaaaccatgcatagtggtgaagtggggaacgagggtgcaaatacagcccataatgcaatgggattaatatttttgtcaaataaaaataggattcctttgaaagaagagctcgaagatggtggtgttcgtcgtcaagggaggagtggaaggggtgctatgcatgtcaaggggtgttctctaatgccaaaagaaaaactggtcactgcagaaacaagaaagccaataaaaggtggaagacctggatctgaaaagaacgagagtaagttggggcggccaccaatgaaaaaaggctctgaccgcaaagcttcatcctggcattcacaggctctaaatagtgatcttacagacataacaggtgaaccagaagatgaccaagaggagcttttagctgctgttaatgctgctcgcagtgctattgtttgtggtcagatcaaccttgttgaagagcttgagatgagcatgtcctgcatgtatgacagtgaacatgatattatagcatcagttgatcacagaataatgtcaaagatggaggagcattcatctcagggacttgctctgtctaatttccccccctcatcccagcaaagtaaaactaatggagttggagcaaaaggattaatcggctgtttttctcatggtgacaaaatccatactggaccacaaaagctggaagctgataaatggtttaatgaaatggctccaatggcacacagactcctttcggctttaattatggaagatgacttgcctgataccaatggggtgcaaagcgatatacttgttgaatttccaaatagccacaacccttacactgtcaacggatacatggaaaatgaacttcaagctagtaccataacatctaattttgggctgagtgtggatttcgtgcactcaaacagtacttctgtggtacatcagagcatgtgcaatggttttacaagcaatttcaacaattcaaacagtgaaaattctgttcatagtgaggatttatcagatggactcaattttacagtatacacagaaagtggccctttgcatgacttgataccaccgattccacagcaatgtcaaaatccagggaaaaatttccctttatctccatatgagtatcaatatgggcagatgtctgtggaagataagattttaattgagctgcaaagtattggcatttgtccagagacagtgcccccatggtacgcaccggaagactcgtcgctgcctaagccgtggcacggcctcgtcaacgacatcaccgactacctctactactggaacctcgacatcgacatcacgccgtacgagcggcccgcggccgcgcctctgcctctcatgggtccttgggttcccggccaggcgtgcttcgacaatctgtttgcaaggctcaacgcaatcagcatggtgctctccagcagcacgccagcaccagcggcctag

SEQ ID NO: 23362 - DNA, 663 bp, Zea mays
  Peptide Sequence Number=SeqID_65141
gttattggctggtcaatgtggtttgcagagtacctctttttggaaaggagctgggccaaggatgaaaagacactaaagtggggtctccaaaggttgaaagacttccctagaccattttggctagctcttttcgtcgagggtactcgctttactccagcaaagcttctcgcagctcaggaatatgcggcctcccagggcttaccggctcctagaaatgtacttattccacgtaccaagggatttgtatctgctgtaagtattatgcgagattttgttccagccatttatgatacaactgtaatagtccctaaagattcccctcaaccaacaatgctgcggattttgaaagggcaatcatcagtgatacatgtccgcatgaaacgtcatgcaatgagtgagatgccaaaatcagatgaggatgtttcaaaatggtgtaaagacatttttgtggcaaaggatgccttactggacaagcatttggcaacaggcactttcgatgaggagattagacctattggccgtccagtgaaatcattgctgaaaccaggtaccagtgcacttttgcaaaaagcaaacagtactaggaatttatttattccccatcttcgctggccatttgctgagattgaaaatgctaaatacaaagcgagacatctgttttga

SEQ ID NO: 23363 - DNA, 2010 bp, Zea mays
  Peptide Sequence Number=SeqID_65142
atggagtccttggaggtggcccccgtcggaacgaagagggagaggggtaagaggccggcggacgagatctggggtttcggcggcggcgagctgcgatgtgctgctggattgatggtgggtgggaaacgggggagggagttctcgatcgagtttgagatggggatctcgtcgggtgcagacttccaccagcagcccaccccacaggccgtgctgccgccacgcccccatggccgtgcgccgacgctgcagacgtctctctccctggctggttccgcctcgccggagcaggtcgggtcgcctccggacacacaggagccgctgtcgaactccgacgcggggcatgactccgccacagagagcgccagctcacgggagacttggcctggggagcccggcaagagtggtggcggcgacgctcctcccgtggcatcagcaccgataactgcactgaggatagctgataataaggagaaggaggtggttggtaatggcgtcgccgagctgcaggcctttcggagtaggatcccgagtgcaggccggatgactctcagggaggttgcttgggacagggtggacctcgttgctgagaagatgaagggtatgagcgatgagctgctggacgaaaccaaagccgagctgcagtcgattctggaagggactggcggtcagcaccagattcaggagttcatgtacctgcagaagcttcttcagggcagggttgatctcaccctgcccatccttttgatggctcaccatgtgcagctggagatcctggttgccatcaagactgggatacaggcgttcttgcacccgagcgtcgacataccccagatccgcctcgctgagattttcctgtacaagaggtgccgcaacattgcttgccagagtgctgtgcctgctgaggagtgcaagtgtaacatatgcagtaacaggaacgggttttgtaatctctgcatgtgcgtgatctgcaataagtttgattttgaggtcaatacgtgccgctgggttgggtgtgatatctgctcgcactggactcacacagactgtgcaattcgtgatggaaagattgggactgggcagacgattaagaacggcgttggccatgcagagatgcttttccggtgccaggcctgccagaggacatctgaactgtttggatgggttagggatgtctttcagcaatgtgcacccaattgggacagggatgccttgctgcgtgagcttgactatgtttgcaagatattccgtctaagtgaggactcaaaggggaggaaattgttcagaaaatgtgctgagctagttgaaagattgaggggtggttctgctgaatcaatgactcctagaattctgctacaagcgctgcaagagctggacattgattcctccaagaactttgagcaccaagagccagggcggctgatcactccccaggaggcctgcaaccggatcgctgaggtcgtccaggaagcagtgaggaagatggagatggtggccgaagagaaattgcggacgtacaaacgcgcccgcctcgctgtggaggcgtgcgacagggagctggaggagaaggcccgggaggcccaggagctgaaggtggagcggctgcggaagctgcagcaggcggaggagctggagagcatcatccggctgaagcaggcggagtcggagatgttccagctgaaggcgagcgaggcccaggaggaggccgagcggctgcggagcgtcgcgctggcgaagcggaagtcggaggcggcggggcaggactacgcgagcatgtacctcaagcggcgcctcgaggaggccgaggccgagaagcagtacatcttcgagaagatcaagctgcaggagaaccagcatgccacgagcagcagcggcgggggtgcccgcctcggcggcggagctccctccgccggggaaccctcgcaggcgatgatgctgtccaagatccaggacctgctgaagaacgtgcgcagcgtgccgtccggcaagccagatgggcagcgctccaagtag

SEQ ID NO: 23364 - DNA, 162 bp, Zea mays
  Peptide Sequence Number=SeqID_65143
atggtcagtttgagtgcatttgcattcttgttctctgagttggttcagtacaaccagactcaagttgacagcattactgagctagaacggaggcgtgtagctcttagcagtgaagcacaaaagagtaacatggagctgccacaatttaatatgacgttttaa

SEQ ID NO: 23365 - DNA, 1788 bp, Zea mays
  Peptide Sequence Number=SeqID_65144
atggccgccacgtcgcccttctcctcgtacccccctcgcctacactccaaaaccttgaagcctcgtcattctcgcccgctccaccacaaggccgcgcccgccgcctccgccccgcgtccgctactcctctccttccccgcgcctgcacgccactgcggtgctgggctccgcgcttcagcggcgcagaaaaactctgctgattacaagttcgatgaagacgacgacgacgacgaggaggaggagtacgaatacgacggcgaagaggaggagtgggaggaggaggatgatgaggatgcgatgaacgtggaggcgatggaggaggaagcccgtggcgccgctgccgacctcgccaaacgcctcgctcgggagctccacatcgatgatgatgtcagggagaaacgaagaaacatcagggataagacatctgtgtctaaacacattccagataatcttcttccaaaggtggcaattattggtaggccgaatgttggtaaatctgcactcttcaatcgtcttgtcggaggcaatagggctatagttgttgatgaacctggtgtgacaagggaccgcttatatggacgatcttattggggtgatcatgagtttatggttattgatactggtggggtaattactttgtcaaagtctcaagcaggtgtaatggaagaacttgccgtcaccactactgttggtatggatgggattcctctcgccactagagaagctgctattgcaaggatgccatcaatgattgaaaaacaagcagttgcagctgttgatgaagcatccgtcatactattcgttgtggatggtcaggcaggtttaggaaattatctttcttttctgctcatggaagtgctggctggtcttgtggcagctgatatagagatttctgattggttacgacgcaactactctgacaagtgtattctacttgctgtcaataagtgtgaatctccacggaaagggcaaatgcaagcattagacttttggtcactcgggttttctcctctgccaatttctgctatcactggcacaggaactggagatctccttgacctggtgtgttcagagttgagaaaatttgaggtattggatgccgttgaagaagagaaaaataaggttcctgctattgccattgtgggaagaccaaatgtgggtaaaagtagcattctaaatgctttggttggagaagatagaactattgtcagcccagttagtgggacaacacgtgatgccattgatactgagtttactacagcagatggggagaagtacaaactcattgatactgctgggatccggcgcaggacagcagttatttctgctggcagcacaaccgaatcactttcggtaaagcgtgcatttcgagcaattcggcgctctgatgtggttgcccttgttattgaagcaatggcctgtgtcacagagcaggattataaaattgcagagaggattgaaaaagaaggaaaggcttgtgtcattgttgtgaacaaatgggatacaatcccaaacaagaaccacgagagtacaacacattatgaacaagatgtaagagaaaagcttcgcatacttgattgggcacctattgtctactgttctgcgacaaatggcaccagtgttgaaaagataatttctgctgctgctttggttgagaaggaaaggtctagaagactcagcacctccattcttaatcaagttattagagaagctatagcattcaaatcaccaccaagaacaagaggtggcaaaagaggtcgtgtctattatacaacacagctcctctag

SEQ ID NO: 23366 - DNA, 339 bp, Zea mays
  Peptide Sequence Number=SeqID_65145
atggcgatcccgctcgtgctcgtcgtgctcccgctcggcctgctcttcctcctgtccggcctcatcgtcaacgccatccaggccgtcctatttgtgacgataaggcccttttcgaagagcttctaccgtcggatcaacagattcttggccgagctgctgtggcttcagcttgtctgggtggtggactggtgggcaggtgttaagcgttcagggtgccttggaagtacacttgctgtcatgaagaagtcatccaagttccttccactttacaatttatatgcacatcagagttctgttgattttaatgtaggttttaataaaaactatattgtggcataa

SEQ ID NO: 23367 - DNA, 1350 bp, Zea mays
  Peptide Sequence Number=SeqID_65146
ggcttggtgaggatagctgagaattgcaagaatttgacttctttggatctccaggcttgctttattggagatccaggacttgttgctattggggaaggatgcaagctgcttaggaaattgaacttgcgatttgttgaaggcaccacagatgaaggcttgattggattagtaaagaactgtggccaatcgctggtctcactttctgttgcaacttgtctttggttgactgatgcatctttacatgctgttggatcccactgccctaacctagaaattctatcggtggaatcagatcgtgttcaaagtgtgggaataatatctattgctaaaggatgccgacaattaaaaaccttgaagctacaatgtattggtactggggatgacgccctagatgctattggttcattctgtcctcttttagagatcttgtcactcaacaacttcgaacgatttacagacaggagccttacttcaattgcaaaagggtgcaagaatctcacagatcttgttctcactgattgccagttactaactgatagaagccttgaatttgtagctcgtaactgcaaaaagttagcacgtttgaagatcaatggttgtcagagcatggaatctgttgcactggagcacattgggcgatggtgtccgcgccttttggagctctctctaattttctgccccaggatcgagaacagtgcattcctggagattggtagcggctgctcccttcttaggactcttcatttgattgactgctcaagaataactgatgacgccttgtgccacatagctcaaggctgcaagaacttaacagaactttctattcggcgtggttatgaggttggagacagggcattggtgtctatcgccgagaactgtaaatcgctcagagagttaacgctccagttctgtgagagggtatccgatgcagggctatctgcaatcgcggaaaactgccctctgcataggctaaacttgtgcgggtgccacctaatcaccgataccgggctgacggcagttgccagaggatgccctgatctagtcttcctggatatgagcgtccttcggatcgtaggtgacatagcgcttgcggagataggcgacggctgtccgaagctgagagagatcgcgctctcccactgccctgaggtcaccaacgtcggcctgggccaccttgtgcgagggtgcctgcagctggagtcctgccagatggtctactgccggcggatcaccagctccggggtggcgaccgtcgtctcgggctgcgggaggctgaagaaggtcctcgtggaggagtggaagatcgaaaatgttgtaccagatgttgtatcagaagtgatgaccaaataa

SEQ ID NO: 23368 - DNA, 186 bp, Zea mays
  Peptide Sequence Number=SeqID_65147
atggaaaagaaactccggtcagacgccggttttccaggcacccctattcggttactgtggcgtagcagaaggcggccagacaaacgagaaatgctcgccacagatcagctcgaccactgggaatggaattctatcgaggcggcggcagttgcttgctccaagaacctggatcggctgaggagctag

SEQ ID NO: 23369 - DNA, 402 bp, Zea mays
  Peptide Sequence Number=SeqID_65148
atgtggcatcagcctagcagtggcacaatcgcactaggaacgcagaacgccacccgcggctgcccagaccacctagccgcgagccagtggaggtggcccatcctggtgatgctctgcgacatcgagcacgacgacgagcagatccaggccggcgacgtcgcgtgccagaagatcgccgccggcggccgcgactggggcgcgctgttccagccatccccgttcttcagcacgcacaagagctatctgcaggtggacgcggcgggggatgggggcgcagaagagctccgggagtggaaggggtgggtggagtcgcggctacggcagctcgtggccaaggttgagactgaagcactcttacggaccgggtctgggccagcacggcccgttgcaagcccgccatga

SEQ ID NO: 23370 - DNA, 255 bp, Zea mays
  Peptide Sequence Number=SeqID_65149
atggccacgcgagcgcgcgggcacgcgcgagcgcgcgcgagccaccatggtcgcggccgcaaggccacccgcccatgccagcagggaggagcggtggacggcgaccagcccctagatccgaccagtcagcccgccgatccggccttcccagcggtggatcaggtcgccggccacctccagaaagagggaggagtggagtgggtggaagaaggaaagagggaggagtggagtgggtggaagaagggagagaaatga

SEQ ID NO: 23371 - DNA, 1938 bp, Zea mays
  Peptide Sequence Number=SeqID_65150
atgacactgggcgctgagggtgcggaagctggagtcgtcatcgatggcgaccgtggagtagcaccccaaagctggcgcgcttttcttgccgtcctgccagcgcttctagcttggtttccccatgatcctccgcagcgcactaagggctggtcgcagcctccggcgggttcccctggttcagctcattgtggaacacggtatcagttgcgggcttactcgcctgctcctgcacatgttagggatgagaaacccttggatcatgacgatggggcggtaatggcggataaggaggtcaatcgaatgaagaagatgcgggtgttctggaccgcacagcagactttcatggagtacctccatgtcacacgggggctgagctttcccgacgcggagcatataagcaagcactcacctgtctttgtgagcaatctgctgcaccaggtgaaggatgctatcaaggaccctgtggagggggatgaggcagcgttcaggtcaaaggtgaagacaaaggagataagggatgagagggccaccaaggcgttggagcgtctattcaggtattatccgatcaatgagttcgagccattcttcgagagcatgggcctcaagccgagtgagtaccaaccctttctgcgtcgggatctcatgtttctttccgatgacgagacggtgctggagaactaccgtgttctttgcaattatggggttatgcgcaataagatagggcagatatacattggtgctgcggaggctttcagttttggtgatggtgtgcttgcgtccaagctcagagctcttgaggatctagggttcagtaagtccactgtgataaagcttatggcctgttgccctgccgtgttgacatgtggcccacatgccgaattgaagatcatagagtggctagatgacattggcattcagagagactggattggtcagttcttatccgtaaagaagtcgtataattggagaaagatggttgaagttcctcagtttcttgctgaattgggattcgataacgagggtattggtaaactgatcaggcaacacccagatttcttgttggatggctctggaaatgcactgtttagggcagttgtcattatgctgaaagcagggtccggaaaaggagacctgttcaatcttttcctggacttcccagacgtacaggcgaggagttttgcgaggaacatacagagcgttacgctattcttaactgacatcgatgtgagcgaggaggatattaagaagttcgtggtagcgaacgcctcgatgctcggttccgctcgggtgaagaaggcaaacagcatccttacatacctcagcgtggggaggatgcgtctgaggatgatcataagggaaagaggcacgcccactaatgaaatacacactaggctaaagatcagcctcctgccgcctttgcgacgaaatcgccgagaagtcactgaaggagaaggtgaagttcctgaagaacgtagggcgttgaaggccttccgcggcaagggcgacgagctacaggaccggttcgacttcctggtgaacgctgggttcgagcccaaggacgtgtcgcacatgatcaaggtggcaccgcaggttctgaaccagaagacacacgtcctccagtccaagatatcgttccttgtgaacgagacggcgtaccctctgagcgttctggtcgggtaccccgcgttcctgtcgttcaccatagagagaaccaaagccaggttcctgatgtacgactggctgcgagaaagagggctggtccctccgaacttcgcactgtccaccttgttagcctgttcggagaagcggttttttaagtatctggtcctgaaacatcagaagggcccggaggtctgggagaagctcaagaaggaggtggctgcagacaaaaacgcgcactgtgcttcagaggatgatcagcatgctattgtttcttga

SEQ ID NO: 23372 - DNA, 2514 bp, Zea mays
  Peptide Sequence Number=SeqID_65151
atggcggaggaggacaggcagcggcggtggcggcggcggcggttcgcgaacctgcgcagcgtccggtggcggatcgatctcggcatcctgccggcgtcgcccggggcctccgtcgacgagctccgccgcgccgccgcggattcgcggaggaggtatgttagtttgaggcgccgccttatggtagacccgcatcttccaaaggaggaggacagatcatccaaccttgttgttgacaacccgctctctcagaacccagatagcagctggggccgcttctttagaggggctgagttggagaagacagttgaccaagacctgtctcgattatatccagaagatggtagttactttcaaacgcctagttgccaggccatgctcaggagaatactgttgatgtggtgccttcagcacccagagtgtggatatcgccaaggaatgcacgaactactagctcctctagtgtatgttcttcaagttgacattgataaactatctcaagtaaggaagctccatgaggattgcttcaatgatgattttgatggagtggctttcccagatacagatatgcttttcagttataaacctagaaaggactcaaactggcattccagggctgacaatggcgatgattctgaaagcgcttccagagttaacactcttgatgagcttgacctggatacgaaggaaataatttcacttagtgatgcatatggagccgagggtgaactaggcattgtattgtctgaaaggttcatggaacatgatgcttattcaatgtttgatggtttgatggacggaggtagtggagtggtctgcatggcagagtttttctctacatccaaggttggatctagctcaagtctagcacctgtcattgaagcctcagcatctttatttcatttgctttccattgttgagccatctcttcatagccatttcattgagctggatgtagaaccgcagtatttcgctcttcgttggctgcgagtcttgtttggacgagagttctgcctcgacgatcttttagttgtatgggatgaagtttttgcttgctccaatgatatgctacttagagaaaatgaagaatgcaactttaagatattgtgctcatctagaggggcattcatcgcagccatggcggtctctatgattcttcaccttagatcatctctactagccactgaaatcaatacgttatgtcttcagaggttattgaattttccaaacaacgttgatgtgcataagttaattgagaaagctaaatctctacagtctactgctattgatgcgaatacattatccccatctcttttatcaaagaaggatagctgtgattatgatagagtttatagtaatcttgctacttcaactcctccaaggactccgttgcatccattagctgagagttactgggaagagcagtggagaaacctgcataatgacggaactgctcttaaggagagtgataataagggtctttcttataagagatcattaaagcaatctttgagtcagaggcttggtttatctaggacagagtcagatccttctccagttaaggtagtcagtgtgaataatgacgcgaggaattcagtgagacggtgtcttctaaactcttattcagataaagtagtacaatccaatgaagttattggaaaatttgagcaagataaatttcctatcgtgtcgattcacaaggagactattttgagttctgaaaggtcttcacagctaaagctaaaggcggctagtgagaatttaacagtaagtccaccaccaagtgtggcgaagttcaatccacttatagattcaccggtgaagcctgctgacgagagttcagcgaaaaggacagaagattgttccagtggtgaaaattctccagtgttttatacagctagggctggtaatgaacatgagaattgtcatgataatgattccgagaagagcagtattacttcaaattcatgcgccggtgatgattatagagacgaagtcttgccagacgagtcgtccagctgtaactgcgaggataaaaccgtctcagaagcaatagagtctggagcaaatgtaggtcaaactagacccttggagaaaaccatggtacctaatgaaagaaagccatttattaacaagctgcagtggctgttgaggtttggcagaccatcagctgaaggcaatgtggtggagaagggcagtggtcaggcatcatcggatggtaaacatgacgcggttcctccctgcccttcacctgctgatgcgagttcagataactcttgcagcggcataaatttggcttatggcgataataagaaggtgatgggcacgctgaagaatatcgggcagaacatgctcgaaaacatccaggtgatcgaaacggcgttccagcaggaccgcgcgcagcccagcgccatggagaacttgtcgaacaacatcctgggaggcaaagggcaggtcaccgcgatggctgccctgacagagctccgcaagatcagcaacctgctgcgcgagatgtga

SEQ ID NO: 23373 - DNA, 384 bp, Zea mays
  Peptide Sequence Number=SeqID_65152
atggcgaaggcaacaccgcccaggcgaaggaagaggagcagcgaggggagtagtatgtggggcgtgcggcggtggtactgcggaagtatttttatacccctaagagcccgaagctgcccaggaatccctacgggaacgcaccgaccaagggaggagctcggagttctcggcgcgttgagcggaggttgttgtgaggagggagataagtctgacgagcgggccccatgcggcagcgacagcgcaaagaacgcaagtgcacgcggacatcaactaaaattgctgacatgcgggccccgcaggcagagtcaggaagggaagcgcgtgtgtgagcagcgtggcccagtgagtggtgagccggatgggccaagagggggaaaaaattaa

SEQ ID NO: 23374 - DNA, 528 bp, Zea mays
  Peptide Sequence Number=SeqID_65153
atggcggcggcggcggccggcggcgagaacagcggcgcgggcgcgggcgcgggcgagggcgagttctacctgcggtactacgtggggcacaagggcaagttcgggcacgagttcctcgagttcgagttccgccccgacggcaagctccgctacgccaacaactccaactacaagaacgacaccatgatccgcaaggaggtcttcgtctccccctccgtcctccgcgaggccaggaggatcatccaggagtccgatatcatgaaggaggacgacagcaactggcctgagcccgaccgcatcggccgacaggagctcgagatcgtcatgggcaacgaacacatttcattcaccacttccaagatcggctccctcgtcgatgtccagtccagcaaggacccggagggactccggatcttctactacctcgtccaggttcgccctcacccgcaaataccgacactgtttgttcaccggcaaataacctctacctatgacgcattgataacaagtacacgagccataggatag

SEQ ID NO: 23375 - DNA, 177 bp, Zea mays
  Peptide Sequence Number=SeqID_65154
atggagaggcgcggtggaggagacaggatgagggagatggggatgagaccgatggccgaccgactggggaagatggcgtcctgggaccagacgcatgggggagagatggcaatgggtaaatacccaccgggtattactaccccatacccatacccacgacaaaatgggtatatatga

SEQ ID NO: 23376 - DNA, 124 bp, Zea mays
  Peptide Sequence Number=SeqID_65155
atgaaggtagaccctgttgatggcgtggcaagcagtgttaacagcttccgtccaaaagcactcggggggagcggagaactcgtgcttgatcccttcatcttcaaggaactcctccactttgaag

SEQ ID NO: 23377 - DNA, 1071 bp, Zea mays
  Peptide Sequence Number=SeqID_65156
atgacggccacgaagctcaacccggccgcggcgccgttcccttgcccctacccctactacgcgccgccgcccccgttcccgctcccgggcgcctgcccgcctacgctcccgctcgtcacctactcctacgtcttgtccccgcagggccgcctcggcttctacctcccggtgcggcagtactcgtccccgccggtcccacgcaagggcgtctccgcggcgccgcaccacggccgcctcccgccgcccaaagtcatggcggccttctccgggccctgcggcgcggggaagcgccaggctgcggcgcctccggtggccgccgccgcgcgtgcccaggtgccggcggcgccgcgcaagccgcggcaggaagcggggagcaggagccacgccgtggcgccgcggcagaaagcggagagcaggaggagccaggccgtggcgccgtggccacggaaggcggctggtccccgcgcgcgcctcgccgcgcagcgtgaggcgcccccgccgccgtccctctacacgaaagcggccgctgcattgggtgaagccgaagccttcggaggctcggcgagtgcactaacatcatgctccggaatatccccaataagctcagcggtttatcatgtgcgcaggagcggcgatctgatcagtttgctcgacgagcagtgcgcgcacgccaacagggccgccggctccgtcgtcgcggcgtacgacgtcatgtaccttccgatggacttccggaaggaagcgaactttggctacgcgttcataaacctgacgacgccggcggccgccaaggtgctctactgcgcgttgcaaaactgcggctggaaagtgcagggctccaagaaggtcatcaggatcgaccaggccgcgcagcagggcaaggcgacgctggtgaggcacttggagaggatgcggctggagtgcgacaaggacgagttcctgccggtgcagttctcgccgccgcgcgacggcgtgaacgtccccgccgcgccctgccgcatccgcgtgcagccgctggccctcggcgaggggcgcgggcctcgtcccaggccgaggcccaaggctgcttag

SEQ ID NO: 23378 - DNA, 1850 bp, Zea mays
  Peptide Sequence Number=SeqID_65157
acctgagcaccttggatccgcctgtgatggaaggtgttgatgagctactggctagatccaaggctgttgtgaagagagttcacccagatgacaatggcaccactcaggcccaagcaccttccatatatcactggtttggttcaaaatcagcacagaaggtgcagatgcctctgactgctgttacctctgtaattgatggcttgaaaagactctatgttgaaaaactgaagcctttggaagtcgcctacagatacaatgatttttctcacccattattgtcaggatctgatggaaggaccattcctggcaatactattgccgttcaagccgacatgccattcactggtcttacaacctttgggggagcgtttctgtcgaagtttgaatgctctcagatgccacatcccctgctagagcatatcacctttgtggacactcctggtgttctctctggggaaaagcaacggacccaacgtagctatgatttcactggtgtgacctcatggtttgctgccaagtgtgaccttatccttcttctgtttgaccctcacaagcttgatataagtgatgagttcaaacgtgtcatttcatctttacgtgggcatgatgacaaaatacgcgtagtgttgaacaaggccgaccaagttgacacacaacagcttatgagagtgtatggtgcattgatgtggtctcttgggaaagtgctaaatactcctgaggttgtgcgtgtgtatatcggatcatttaatgataagccagtgaatgattcagctgttgggccaattggaaaagacttgtttgagagggagcaagatgacctcctctgtgacctgaaggacattcctaagaaagcctgtgatcgacgggtcaatgagtttgttaagcgtgcccgagctgccaagatccatgcttacataattggccatctgaagaaggagatgcctgcaatgatgggaaaagccaaggctcagcagcgactcatagacaacttagacgaggagtttgcaaaggtgcagagggaataccatctccccgccggagacttccccgacgtcgagcacttcaagcaggtgctgggcgggtacagcatcgacaagttcgagaagctgaagccgaagatggtgcaggcggtggacgacatgctcgctcacgacatcccggagctcctcaagaacttgcggaacccgtacgaggcagggcagggcagggcagaggggaagaaagaggaggaggagaagaagcgcgtggatgagcgggatgcggcgggcgaggcctgccgcccggtcccggtcccgacggcgccgggggacgcggggccggaggtgaagtaccgcggggtgaggcggcggccgtcggggcggtacgcggccgagatccgggacccggctaggaagaccccgatctggctgggcaccttcgactcggccgaggccgcggcccgcgcctacgacgccgcagccaggaccatccgcggcgccgccgcgcggaccaacttcccctccgcgcccacctccgccgcggtcgcgccgccgccgccactccccgcctcaaccgccgccgcggcgggcgcggcgacgtccagcctcagcagcaccgtggagtcctggagcggcggcggcggcggcggcgcgcccgccgggatcctccgcgccgcggccgccccggccgccgaggaggactgccgcagctactgcggctcctcgtcgtcggtcctctgcgaggacggcgcgtcgggtccgggctgcggcgacgaggccgccgcgccgccgccgttgccgttcgatctgaacgtgccggacccggcggccgacgacatggactggcgctgcgacacgctgctccgcctctag

SEQ ID NO: 23379 - DNA, 324 bp, Zea mays
  Peptide Sequence Number=SeqID_65158
atggcgtctgcagtgaccagcagcgacaaggagcaggccgtccctaccatcgacgctgacgaagcgcacgcgctgctgagctccggccatggctacgtggatgtcaggatgcggggggacttccacaaggcgcatgcgcccggtgctcggaacgttccctactacctgtccgtcacgccgcaagggaaggagaagaacccacactttgtagaggaagtggctgccttctgtgggaaggatgatgtcttcattgtggggttcaagaacgtgaggaacctgcaaggtggttaccgctcctttcagcagcgagctcaacagcagtag

SEQ ID NO: 23380 - DNA, 449 bp, Zea mays
  Peptide Sequence Number=SeqID_65159
atgagctcagggaagcatttgagaacaagtcctcaacagcgccctgtcccggcagacccctctagggcgcgacggtatgggcagtgcccggcgcggctagatcctagcgcagcagtgtgtccgggccagaaccgcctcaccgcgccagcatccgccctgcgccaaggaccgctgttcgtcggcatcgtgcagccctttcgcgccatgcacagtgccctcgccttaccaagcgacgtcgtgagcctgcgcagccccctcgccgtgtgtccacgtctcaccatcgccgccgtcgagcatcgcccatggctgtgcccgggcctgctctgcgcatcccggcgtggcgcgcggctcgtgcggcttgcctgcagcgcgtggccaacggcctgcccggcttttcccaagcaccgacgaagaaggatcgacgacacgccgtccgtgtccacacgtag

SEQ ID NO: 23381 - DNA, 739 bp, Zea mays
  Peptide Sequence Number=SeqID_65160
agattcgtctgccatggccgcagctaccgtaccgcgcccgccctgctccaccgtcgacgggatgctgctgcgttggcctcaccacgcacggcgccctgccccggcagacccttccagggcgcgacggtatgggcagtgcccggcgtggctagatcccagcgcagcagtgtgtccgagccagaaccgcctcaccgcgccggcatccgccctgcgccagggaccaccgttcgtcggtgtcgcgcaacccttccgcgccatgcgcaatgccctcgccttaccaagcgacgccgtgagcctgcgcagccccctcgccgtgtgtccacgtctcaccatcgccgtcgtcgagcatcgcccatggccgtgcccgggcctgctgtgcgcatcccggcgtggcacgcggctcgtgcagcttgcctgcggcgcgtggccaacggcctgcccggctgttcccaagcaccgacgaagaaggaccgacgacacgccgtccatgtccgcacgagcatcgcccatggctgccgtcgagcatcgcccatggccgtgcccgggcctactctgcgcatcccggcgtggcgcgcggctcgcgcggcttgcctgcagcgcgtggccaacggcctgcccggctgttcccaagcaccgacgaagaaggaccgacgacacgccgtccatgtccgcacgtaaagaagaaggcgacgaggtggatctccaggagttccaggacttcgacgagttcgtggtttag

SEQ ID NO: 23382 - DNA, 477 bp, Zea mays
  Peptide Sequence Number=SeqID_65161
atgggcaaggataaaaaagttcgaggttcgccatgtcgctccggcgacaagcggaagcgtgaaccaagtcctccctcggaggacttcggtgactctgagtactcggaggaggagttttcctccgggtccgaggggtcgtcggtctatgcttcccccctggcgtcgtccgatgactcggacgactcccaggggaaagccgccgaggtgtggacgtacatctggtccgtcgagcgtgccgggcttgagggctcggatgagtcggaggtctcctcggatgaggagaactttttcgactcgtccgaggaagggagcggcggcggcgacgatgacgaaggcgacgacatgggcgatgacagcagtggaggtgacggcgacgacgacggcaacgacggcggcgagggcggcggtggaggcaggggcgacgacggcggcaagggcagcggcagcaaggccagtggcaaagcgccactggcttga

SEQ ID NO: 23383 - DNA, 1383 bp, Zea mays
  Peptide Sequence Number=SeqID_65162
atgaagacgggggccggcgcaggcctgctcttcatctcgcccctcgggaaacacctacgctatgcgctacgcctccatttccccgcgtccaacaatgtggctgagtacgaggctctggtcaacgggttgcggatcgccatcgagctagggctccggcgcctcgacgcccacggtgactcgcagctcgtcatcgaccaagtcatgaagaactcccactgccgcgacccgaagatggaggcctactgcgatgaggttcggcgcttggaggacaagttctacgggctcgagctcaaccacatcgctcggcgctacaacgagactgtggatgaactggctaaaatagcctcggggcaaacaacggttcccccggacgtcttctcccgggatctgcaccaaccttccgtcaagcttgacgacacgcccgagcctgaggtgccctcggcccagtccgaggtaccctcggcccggcccgaggcaccctcagctcggcccgaggcgacctcggttcagcccgaggtaccctcggcccccaagggtgaggcactgctcatcgaggaggagcgaagcggggccacgcctgatcgaaactggcagaccccgtacctgcaatatctccaccaaggagagctacccctcgaccgagccgaggctcggcgggtggcgcggcgcgccaagtcgttcgtcttgctgggcgatgagaaggagctctaccaccgcagcccctcaggcatcctccagcgatgcatctccgtcaccgagggtcaggaactcctacgagagatacactcgggagcttgcgcccatcacgcagcgcctcgagcccttgtcgggaatgctttccgacaaggcttctactggccgacggcggtggccgacgccactagaattgtccgcacctacgaagggtgtcaattctatgcgaagcagacccacctgcccgctcaggccctgcagacgatacccatcacctggccctttgctgtgtggggtctggacctcgtcggccccttgcagaaggcacccgggggctacacgcacctgctggtcgccatcgacaaattctccaagtggattgaggtccgacctctgaacagcatcaggtccgagcaggcggtggcgttcttcaccaacatcatccatcgcttcggggtcccgaactccatcatcaccgacaacggcacccagttcaccggcagaaagttcgtggacctctgcgaggaccaccacatccgggtggactgggccgccttggctcatcccatgtcaaatgggcaagtagagcgtgccaacggcatgattctacaagggctcaagcctcggatttataacgacctcaacaagttcggcaagcgatggatgaaggaactcccctcggtggtctag

SEQ ID NO: 23384 - DNA, 546 bp, Zea mays
  Peptide Sequence Number=SeqID_65163
atgtggaagctcctccgaagccgaggtcgagtctgtcttccgtggtcgaggtacgagtccgagcccctgggtcgggcgaggcgggagccgtcgactgatgccagggcggagtccgagccctggggtcgagcgaagcggagttcgtcgtcttctggagctgagcccgagtccgagccctgggtcgggcggagcggagttcgccgtcttccgggacttagcccgagtccgagccttgggtcgggcggagcggagttcgccgtcttccgggacttagcccgagtccgagccctgggtcgggcggagcggagcggcactgtccttctgtcaggtcggtcagtggagcggcgaagtgacgacggtcacttcggctctgccggctggggggcgtgcgtcaggataaagggcctcaggcgagccggaaatacgttcgccgttggaggggagcctcgggcgagacggaaatcctccgggctttatgctgatgggggttaccagctgagaattaggagccttgagggtacccctaattatggtccccgacagtag

SEQ ID NO: 23385 - DNA, 195 bp, Zea mays
  Peptide Sequence Number=SeqID_65164
atgtccggtgtacacccggacagtccggtgaattatagcggagtcgcctctggaaatttccgaagtattgcattccatatgtatgggaagaaaaatagtgacttcaatgcaaagaaatccttctttagagtttatgttatcaacatgagagaaagtccatcaagaatgagacaatcatatggtggttttcattga

SEQ ID NO: 23386 - DNA, 853 bp, Zea mays
  Peptide Sequence Number=SeqID_65165
acgcaaagaaggatgtcgtcgattcattgctcagggcgtcgggatgcttagactactccgtgcatcgcatacttgttcagatacctgcgcaagtcaagtacgcactcaccacccaatgcatgctagccaggagaagtcatcacttctgaatgtcccttcaagcaggaagggttttcccagttacttgcaggagggcatgcttgaggccatctcaattcaggcattggctcagtgtgtggaaatacagcttggcttggcttctgaatgtgagaaggcaacgctgtcagtaaagaggaggctagcttgtgagcaagtcagctatttttctcaggctcactattgtctgtcgggatgcgatacgagtgactcgtacgggaagaagcttctgctgttcctcaagtggaagtggatggaggccaaggctgtagcgtattactaccatggtctggtgctcgacaagggcggcgaaccggcaaaccatatcagtgcagtctgctgcctctctgcagctgatgacctgctctcagacagcaaaagggcttgcttgagtttttgcttggcaaatcctgtcacgagggtgcctcctccttggggtgtcatgaaaaacatgcacaaaaagatcccagatgtcgcttacaagaagttccaagcgcacgggcatctgtttgagcaaaacaagaacagcgcactccaatccgttcctgacctaccagagtttgcgctgtcgctgagaccggatggatacgagttgccaagcactgattcgatctgggataatgttgatggccaacctcagattcaaagcctcaaggagcatatgatagatgacgaagatgaagtaggcacaaaatga

SEQ ID NO: 23387 - DNA, 141 bp, Zea mays
  Peptide Sequence Number=SeqID_65166
atggcgccctctccctctctgcccaactccggtgaccccggagccaccctagctcgcgccagcctcaactctggtgaccccactgccgtggagaggagcggcgccacctgcagccatctattttccccctggtcacaataa

SEQ ID NO: 23388 - DNA, 546 bp, Zea mays
  Peptide Sequence Number=SeqID_65167
atggcgaggaagacaagtacagccggtgagttgagagatcacgatgcgagctccatgaaacctgcggagaagaggacgcgcaaaacgcgacaaacgacactggagcgtgtcgcgcagaacatgatgctgactagaacacgatgccggcgaactgagacgactgaacaagtgctggcgagccgggagaggaacgagcggccgagatggaacagaggcgcaacgaccatggcgagggagctcggcgcagcatggggagctcagcgcggcagggaggagcgccagggagctgcgcgcgcggcgagcagagagggaggaatgccgatgagcagagaagcgcacgcgttaggggcgagctcggcgggattgctgatgaagcttccagcagccatggcgcgtggagaggcagagggagataacacctggggtgttacaatcaggtccccgccgagcaagatcgcgaagctgagcgaccgatcaacaagcctttgccgagcaaggtcgcgaagcggagtgaccgatcaggtccccatcgagcaggaccgctga

SEQ ID NO: 23389 - DNA, 159 bp, Zea mays
  Peptide Sequence Number=SeqID_65168
atgccccagtctggcggcggatatcgcgcggcggcggacagccaacggacttctgtgcgccatgggaagaagaaagatggcggacaaagcggacccacatattttgggccttacagcttttcacccaataatttacatttcgacttagacatcacatga

SEQ ID NO: 23390 - DNA, 846 bp, Zea mays
  Peptide Sequence Number=SeqID_65169
atgacctcgtggcttctgggccgccggggcccctccggcttctcctggagttccaccgccgaccaagtcacgcagggcatctccgccgccggcctcaccgccatcgtcactggggcgtccagcggcatcggcgcggagacggcgcgaacgctggcgctgcgcggggcccacgtcatcatggccgtcaggagccttcccgctgcccaggccgtcaaggacgccgtcctcgcccaggcgccgggggccaagctcgacgtcatggagctcgacctctcgtccatggcctctgtccgcgctttcgcgtcccaattcatcgacagggggcatttcctgctcacacaccttctattggataccatgaagaggacctctcatgaatcaaatttggaaggaagaattgtcaacgtgtcatcagaggggcacagacttgcatatcgggaaggaatccgttttgacaagatcaacgatgaatcagtgtatagtagcattggtgcatatgggcaatcaaagcttgcaaacatattgcatgctaatgaacttgccaggcgatttgaggaagataatgtcaacataactgcaaattctcttcatcctggttccattatcacgaaccttcttcgctaccacagtatcctagatgttctccatcggacgctgggtaaattggtgttgaaaaatgctgagcagggtgcggcaactacatgctatttggcactccacccgcatgtgaagggcgtgtccgggaagtacttctgcgactgtaacctgtacgagccaagcgcgaacgccaaggacatggagttggccaagaggctctgggacttcggcgtcgagctcatcacctag

SEQ ID NO: 23391 - DNA, 387 bp, Zea mays
  Peptide Sequence Number=SeqID_65170
atggaccagcacgaccacgagatggagcagaaggggtgcctctgccggatcaagaactgcgccattgaactcttgtcgatggaggaggacctggagacggacgacgaggagtcgtgggacctcgttgggagggacctccggctcaaggccaccttcctgtgcatcgacctcagccgcttgatcgccttctgccagggcgaagagcacaagaaggcgctcactgtcgtcgccaacaagttcttctactccatggatgagacgcgcttgcacgaatggcagcttggcgacgcagtggagagcagaagcctcccgctgacgcaggtgcgctacggcgacaccgccgacgcgctccgcgaggtggtcgccgtcctcgggccgtccctgtag

SEQ ID NO: 23392 - DNA, 2661 bp, Zea mays
  Peptide Sequence Number=SeqID_65171
atgcgggtggagacgatcgaggcacggtctaccttgcgctgttttcatcaaagacgacgactcggggcaatagatttatatgtcattagggtgagtggggatgcacatgccacgtgctatccagccgctgtcatttggcgcggtctccggatccgtgtctggttatactctaaagcagcagcagcttggatgttcgtcgacgtccttgcgcagctatggagcgattgggggctccggttctctgtaatttccagcttggtgacaatcgtcgtcctcagcctcttgtcctggacacgccggcgctcgacgtccggccgctggcggtcgatcctgctgtggttcgtgacgcgcgttgtctggttggcataccagggcgccgagatagccgcgacgggcgccctcggaagcctgtccctctccggctccgatgggtcagcggaggagcagcaggtgatagcgttctgggcgccgttcctgctgctgcacctgggcggcccggacaccatggccgcctacgcgctggaggacagcgccttgtccgtgcgcaagttcctcgagatggtcttccaggtcgggggcgccttctacgctcagtacaagtacatatatcgcgcgcgcacctggacgccgctggcgacggcgtcggccatcatgttgcccataggcattgtcaggtatgtggagaagtggtacgcgctatggaaatccaaaagcatgatggaggaggaggagggggaggaggaagaggaggagaagaagaaggtcgcgggcgcgggaccgggaccgggacgattcacatccgcaacaagcagcaacgacgcgctgtgccttgctcaggatctgttccatgtctgccgtcgtgccttgtccgattcttcggtgctcccgggcacggagaagcagcgtgccagcgaggagatcttcctgctgggatgggagcgcatgtgcaaggtggtggagatggagctctcgctcatgtacgaggccctgtacaccaaggccatcgtgctgcacacctgcccggttgcaggctacctcaaccgtctagtgtcgcccctcgccaccgctgccgcagtgttgctcttcaaccagtatatcggcagccgcagccgccgggccatcatcatcaggagatctttcgtcgacatcacctacctcttgctggttgttgccttcgccatggacctgatgtggctgctcagagcccttggttctacctggacgtacgccgccctcagagaggcgcggccatgggcatggtggcttcgccaccacttgctgtgcagcgggagatggcgccggatccaccgcgccgtcgacgccctgcatccgttgtcgtggttattcggcagcgatccagttagctactacaggacgtggtcgggcaccatcgggaggtacaacctgctgcaggcgtgcagcgttgctgctgctcaccgtggtgcccgccgtccatggtggacgcggttcgggagctggctggaaaaaaaattggagctggaggagacagagtatctgcgtgagcttcctcaggacgtcaaggaatcgctgatccagcgagtgcagcgaatactggtgtcgaccaaaaataataatgctgataagaagacggatgagaatggaattggatgccgctacaccctggtagacatcaggacactctggggtcagcaggccctggaggacgccaagacgaacctgttcggtcgcggccgtaaaaatggtaggaaaacaagtaacaagaaaccgaaattgcccagcttcggccgtgaattcgaggaggacgtcctcatgtggcatatggccacctgcattctcttctcgtcatcaagcggcaaggagagcatagtcagcataccagggggatcctcggccgacgccgccgatgcccatgtgacggcgatcaaggtgatgtcagaatacctcatgttcttcgtcgctgtacgtcgacacatgctgcctggccttgtgctccacagcctgctcgagaaaatccgccaaactttgcacgagatatgggacgacggcaagaagaaaactactggtggttcgtcgtcgtcgtcgtctacagcagccaaagatactccgcctcctcaagacaagcttgccgaaatgctgctagagagactgaaagcaggtcggagatggtttgaccgaaacgaaggcaggctcgttgttggtaatgcagctgcgcttgctaatacactaatagaggctggcatcagtgtgcagaagcgacagcaagtgccgcagctgctggagttcatcttcaacgtgtgggtggacaagctgctctatgcggccgccagatgcagcgtggagagccatgccaagcagctcagccgcggcggcgacctcaccaccatactgtggcttattgtccaacatgctgccctatttcgcatcggagaattaaaaccgaaggaagagcctcaggaggaggaggagaagaagaaggaggaggaggaggagaagaagaagaaggaggaggaggaattgaagcctttctggccacagtatccaatgccagcgccaccgtcgaagccagcatatgcatatccagttcattacattgcagatgaagaagaatctgacgatgccgaagaatctgacgatgccgaagaagatgatgacatgacgaggcatgctatactgtactag

SEQ ID NO: 23393 - DNA, 258 bp, Zea mays
  Peptide Sequence Number=SeqID_65172
atggtcgcctcccactacgagattgatctcgagcgggtttgcgatggatctgtgctccccaacgaacccgaggtagctgctaccgaggtgcgaaggttgaacgacgcagtcgaggggccagggaccgtgctgcctcgccacttcgaggtcgaggtggagcctcctcccccgtcgccaaccgctatcacggtgtcgctgattgtagctcgatggttcgtgccggatgtacgagaaagagagtcgagcgattttctctag

SEQ ID NO: 23394 - DNA, 1971 bp, Zea mays
  Peptide Sequence Number=SeqID_65173
atggtgatgatacattttccacagcttgtcctatgcacacaggcgccaacagcaaggtggttgtctgtgaggggggctcctctgaattttgccatgcattcccaggcttgggaacttcaacgccaacgcttgtcgtttatgttgttgccgtcctactatataaccaagcttctaagagatctttcaaggacatggagagtaaaatggagcagaactcgggagagatcaggtcgggagaggcccatgagcatttttggccagagcatcgatgtgaggaggccggggaggagcaggagaagagccgccaacaagaaattctcacccgcgactgcgagcgaatcacaatcacccaccctggagcggctgctggaccagcgcagggccgtcgtcacggagcgggagcgcggccgtgccgagtccgagctgtcaagggcgactggcatggcccaggaactggagcggcaggtcgagcaggccaacgccgccacggcgagggcttctcacaggccggagctccaaagaacacgtgccagcggcagcaggaggaagaagacggggttggtggtggacgccgccgaccatcctcgggatcagagcagcacgctgctcgtcgaggtgatgcaggagctggaccgcgtcaagagggagctccggcagctgcagcgcgaggtgaagtccgcgagggaggccgaggccgaggccgagggagtcgcggagacgccgacgcccagagcgacgagccccggtccgcctcccctcgacggtgcggagggagaggccggcgagggaaacgaggagcgtggcccaggcataatggagctcgccgtggccggtggattccgcaagcagggcgtgcaggacacgagggcgcgtgccttagtgctgcgtagggacaggagcctcggagcgagcgaccctgacgagaggttcgccaccgccagcagctccgacgtgggactcgagtccgcggacacggcggcggcggtgccggcgacggcccacgccgtcgtggacgccgagaccgcaccgacggcagcgcggcaggctgcggaggccgagctggaggagcccatgaaagaagagggagcccgcgcgttcgccggctccgtagaacgcacccgcggggagacggccgaggagatcgaccggctcgccgagcaggaggtacgagccagcgcgcaggtgagccagctgaacgccaggcttgtcacggccaggtcccggctggacgccgccacggccgtggacgagcgggccgaggcggtgctggccgagctgtcggccgcgctgcggcggctgggcgaggagaccgaggcagcggagaaggagagggcgctgacggagctggacagccagagcgtgacagaggacgcggacgccgtcggcgccgagatcgcggcggtcgagcagagggtcagggagtcgatcaaggagctcgaggcggcgagggcgtcggaggccgcggccacggcgaggctcagggccgccgtcgaggacgcggcgctggccgggactgcgccgcaggcgtccggcgggaacgtgacggtcgcaaggttcgagtacgagtacctggccgcccgccccgaggtcgtccgggccctcgccgagaagaaggcggccgcggcggaggcgtgggcggaggcgctgcgcgccggcgagaaggagattgcgatgcgggtcgagatggtcgagagggaggtggcagagacgaaggccggtgaagcggacgccacggatagcccgagtgaagaggagcgtgaaccgcggcgcgttggcgtgcagcagcgcgcgcagacaaggaggcggccggcgccgagggagggcgtggagccggagacgtcaaggacgaccggcacaccgtcgtcgtcgtcggtggtggtgcggaagcaaaggtcgccgttggttagcaggaagacgaggacggtggcgtccaagtacctgaagctcgtcaccgggaaatgtggtggatga

SEQ ID NO: 23395 - DNA, 477 bp, Zea mays
  Peptide Sequence Number=SeqID_65174
atggtgaccggggaaaagcccaaacctttgggaaagaagaatgatgaaaggactccgtcgaaggaggctggtgacaagcacaaggtggaatctactggctccatcaagtcacataggaagggtgacaagaagaaaaataaaatgaagaagcgtgccgggcttggaggattggatgactcggaggaggtatcctcagaagaggtggactcctccgactctttcgaggagtggagcggaagcgaagctgacagcgaggaggacgatagcagcggtggcgacgacgatggcaaggacgatggcgatggcgacgacgacggtggcgatggtgagggcgatggtgacggcgtcggtgagggcgacgacgacgggaagggcaacagcgacgacgaagacggtggcaagggcaacggcgacggcgacgacggcaagggcgacgacggcgacggcaaggccagtggcataatgctgctggtttag

SEQ ID NO: 23396 - DNA, 411 bp, Zea mays
  Peptide Sequence Number=SeqID_65175
atggcacagctcctctccaataccctgtactacaagcgcttcttcccatattacgccttcaatgtgctcggtgggcttgacagcgagggtaaagtttgttgctttactttctcacatttattgtttgaacactcaataggttcctatgagagaactggttatagtgctcagggaacgggatctactttgattatgccagtcctggacaatcaactaaaatcaccaagtcctctattgctccctgccagggatgctgtcacaccattgtcggagtcagaggccatcgatctagttaaggatgtgtttgcatctgcaactgagagagacatctacactggagacaagttggaaattgtagtcatcaacaaagtcgggactaagcgcgagtacatcgacctgaggaaggactaa

SEQ ID NO: 23397 - DNA, 708 bp, Zea mays
  Peptide Sequence Number=SeqID_65176
atggacgccgtaagtcctaacccaagtgcacatgctgcagaaaatactgagggaggtgaagataagaaagaggagccccctgctgtagagaatactgaagaaagcaccaaaggccaagcacagcttaataatgttgctgtcccagaatctgagaataaaggagaagtaaagccaggtgaatccgaattagcttcccctgcatttgttgatgaagcagcctcccatgtaattgttgatgaagagaaagaggaaaatactgagaatgagaacattggcgacgctcgcggtcaccatcccacccatctcgccgaaggcgttcccgtaccagctggtgccccctgcgccgccagccaccgctcacgcttccagcggcaccttcccccaccaaggcaagcgtggctgcccgtccaccgcaaggcggcgcccaagccggctgcgtcgtgtgcggctggcttccagagtgcaacccacgccacaccaaaattcactcgtgcctcccaatccacaaaccctaaagcccagatggacagatcgaagcacgagatcgggttcagggactcacaggtcgcagatcttagagtggtcgcgcgtgaggatgctgtatccgacagagaggcgggtgtccgccgcgacgacacagtaatcggcgccggcgatggccacgcaggtcctgcaggaccaaacagaccctcgttagagaacacatag

SEQ ID NO: 23398 - DNA, 777 bp, Zea mays
  Peptide Sequence Number=SeqID_65177
atgacaacggacaggcctgaactactccacatggacgaaaaatctcaaaaccaagagactctaaagagattcttaagacgagctcaaaatgagtttggattaagtatcaaaaagataagaagcgataatgggacgaaattcaagaactctcaaattgaaggatttcttgaggaggagggcatcaagcatgagttctcttgtccctacacacctcaacaaaatggtgtagtggagaggaagaatagaactctactggacatggcaaggaccatgcttaatgaatacaagactccagaccgaggtagaagttctaaatttgctcctaaggctgtagaaggctttttactagggtatgactcaaacacaagggcatatagagtcttcaacaaatccactggattagttgaggtttcttatgacattgtgtttgatgagactaatggctcccaattagagcaagttgatcttgatgaactagatgatgaagaggctctgtgcgttgcgctaagaaacatgtccattggagatgtgtgtcctaatgaatccgaagagcttccacaagtacaagatcaaccatcatcttccatgcaagcatctccaccaactcaagacgaggatcaggctcaagatgatgaagatgaagagcaagaggatgagccacctcaagagggggacatggatcaagggggagatgaagataatcaagataaggaagatgatcaagaaataagggagcaaagactgccacacccaagagtccaccaagcaattcaatga

SEQ ID NO: 23399 - DNA, 423 bp, Zea mays
  Peptide Sequence Number=SeqID_65178
atgaccagtagatacgctgttgagcaccataacaaggccatgtgcagggacaccttttttgtaggttaccaggcgaggaggaggactggagttgtcacaaggaagagcggtgccaaccgctgctcccctcaccaggcgaagcccggcgctgtcgcgtctcctgcgacacattacgtggaccactggggaaacccgatatcgacctccagagtacaatgcgcctcagcattaactgctaacaagatgatagggtctgcccttaaacttcgtaaacttctgagcagtccacatggattactcaggggctcgagaaagggaatctctcaagaaaagcctctacacaactccaaggagttacacaaaggctcggggtgtcaggtacctgagaacagggtacctaaagaaggcctaaagccttcataa

SEQ ID NO: 23400 - DNA, 588 bp, Zea mays
  Peptide Sequence Number=SeqID_65179
atgaccaccgcacatgccgagggaccaggatatagaccagcacaatggactgtgctagcccctgttcctggcccatggggccctaccaatagatatcggggaggtatgagaagtcacttcctgcaagcaggggaggtgactccacctactatggagcatagcggccgaaagctgccggtggccttgctcgtgcttggctgccgaatggcaatggccaccttgaataccaccgtgctctaccagggtcgccgcctcaagggtagacgttacaacgagaacttgtattctactggggtggagttcagcctcatgcttctgggcctcgtagcccctatggtgttgtctgctgggtcgtgcgccgtcgtacctctggcgatgggcgcaccggacagtccggtgcgcgccacgtcagcgcaaccattagggttcggagaagttgactgttggagacgtttgtcttgtagctgcaccggacagttctgtgccacaccggacagtccggtgcccactggcttctgcgctctgacttctgcatttgcactgttcaccatagagcgtctttcgcagtcgaccgttggcgccagttag

SEQ ID NO: 23401 - DNA, 276 bp, Zea mays
  Peptide Sequence Number=SeqID_65180
atgaaaaaggggcatattgaggtaatgaaggacaaatatttttgtgatatctctattgtgagacttggtgaggaagatattgtcctacaccttgagaaagatgaggtggatggcaatttttatttgggcagtgaggagccaaagcttggagcaaatgctgactgcttttgcaatattcatgagttccactaccagacaaagaaagatgtcatgtgcactgcccttgcgtacctagccaacttcctagatgaaggaatgatattatgtgaagaatga

SEQ ID NO: 23402 - DNA, 150 bp, Zea mays
  Peptide Sequence Number=SeqID_65181
atggcgctgcgcgcgcggttcgtgctagttaacccaaaaaattattttttgctagtacaacatggccagcttcgaccaatgatacgccgtctaggtggttcccgcggacgcagtaacttattcccgcctagatacgccgttcccgcgtga

SEQ ID NO: 23403 - DNA, 2508 bp, Zea mays
  Peptide Sequence Number=SeqID_65182
atgcccggcataccgagggatgtccccgagcactcgctggatattcgggccggagcccgacccgtcaagcagcctctgcgccgatttgacgaggagaagcgcagagcgaaaggcgaggagatcaacaagctaatggcagcaggattcatcaaagaggtattccatcccgaatggcttgccaaccctgtgcttgtgagaaagaaaggggggaaatggcggatgtgtgtagactacactggtctcaacaaagcacgtccgaaggttccctaccctctgcctcgcatcgatcaaatcgtggattccactgctgggtgcaaaaccctgtctttcctcgatgcctactcagggtatcaccaaatcaggatgaaagagtccgaccagctcgcgacttctttcatcacgcccttcggcatgtactgctatgtcaccatgccgttcggtttgaggaatgcgggcgcgacgtaccagcggtgcatgaaccatgtgttcggcgaacacatcggccgcacggtcgaggcctacgtcgatgacatcgtagtcaagacaaggaaagcctccgacctcctctacgaccttgaagtgacattccgatgtcttaaagcgaaaggcgtcaagctcaatcccgagaagtgtgtcttcggggtgccccggggcatgctcttggggttcatcgtctccgagcggggcatcgaagccaacccggagaagatcgcagccatcaccagcatggggcccatcaaggacttaaaaggtgtacagagggtcatgggatgtctcgcggccctgagccgcttcatctcacgcctcggcgaaagaggtctgcctctgtaccgcctcttaaggaagaccgagtgcttcgcttggacccctgaggccgaggaagctctcgggaacctgaaggcgctcctcacaaaggcgcctatcttgttgcctccagctgatggagaagccctcttggtctacatcgctgcgaccactcaggtggttagcgccgcgattgtggtcgagaggcaagaagaggggcatgcattgcccgttcagaggccggtttacttcgtcagtgaggtactccccgagaccaagatccgctacccacaagttcagaagttgctgtatgcagtgatcctgacgaggcggaagttgcgacactacttcgagtctcatccggtaactgtggtgtcatccttccccctaggggagatcatccagtgccgagaggcctcgggcaggattgcaaagtgggcggtggaaatcatgggcgagacaatctcgttcgcccctcggaaggccatcaagtcccaggtattggcggacttcgtagccgaatgggtcgacacccagctgccgacggctccgatccaaccggagctctggaccatgtttttcgacgggtcgctgatgaagacgggagctggcgcgggcctactcttcatctcgcccctcgggaaacacctacgctatgtgctatgcctccatttcccggcgtccaacaatgtggctgagtacgaggctctggtcaacgggttgcggatcgccatcgagctaggggtcagacgcctcgacgcccgcggtgactcgcagcttgtcatcgaccaagtcatgaagaactcccactgccgcgacccgaagatggaggcctactgcgatgaggttcggcgcctggaagacaagttctacgggcttgagcttaaccacatcgctcggcgctacaacgagactgcggacgagctggcaaaaatagcctcggggcgaacaacggttcccccggacgtcttctcccgggatctgcatcaaccctccgtcaagatcgacgactcgcccgagcctgaggcgccctcggtccagcccgaggtaccctcggcacagcccgaggcaccctcagctcggcccgaggcgccctcggttcagcccgaggtaccctcggcctccgagggcgaggcgctgcgcatcgaggaggagcggagcggggccacgcctgatcaaaattggcagaccccgtacctgcaatatctccgccaaggagagctacccctcgaccgagccgaggctcggcgggtagtgcgacgcgccaagtcgttcgtcttgctgggcgatgagaaggagctctaccaccgcagcccctcgggcatcctccagcgatgcatctccatcgccgaaggtcaggaactcctgcaagaaatacactcgggggcttgcggccatcacgcagcgcctcgagcccttgtcgggaatgctttccggcaaggcttctactggccaacggcggtggctgacgccactagaattgtccgcacctgcgaagggtgccaattctatgcgaagcagacccacctgtccgctcaggctctgcagacgatacccatcacctggccctttgctgtgtggggtctggacctcgtcgaccccttgcagaaggcgcccgggggctacacgcacctgctggtcgccatcgacaaattctccaagtggatcgaggtccgacctctgaacagcatcaggtccgagtag

SEQ ID NO: 23404 - DNA, 342 bp, Zea mays
  Peptide Sequence Number=SeqID_65183
atgcttcccccagcgtcgtccgacgactcggatgattcccatgggatagccgccgaggtgtggacatacattcgttccgtcgagcgctccgggctcgagggctcggatgagtcggaggtctcctcggatgaggaggactcttctggctcgtccgtgggagggggcggcggcgacggcgacaacgaagacgaaggcgacgacagtagtggaagtggcggtggcgacgacaacaatgacagtggcaacgacggcggtggaggcagcggtggcggcaggggcgacgacgacggcaagggcgacagcagcagcagcaaggccagtggcaaagcgccactggcttaa

SEQ ID NO: 23405 - DNA, 345 bp, Zea mays
  Peptide Sequence Number=SeqID_65184
atggagcgtgtggatgggggattccccggcctcctgctcctcggcgaggcacgaacagcttttccgcgctccggtactcctggttggcggcgagacggcacgagacagtggcgtggtggggtgttcgccgaggcgaatcaccatggcaatgacgtacagcagcggcgctactctttcacttctcggtttagtggtagagctagggcgtacgtgactcatgacggcgcggataggctccaggcattaagtaggggcatggatggtggccgaggtggggttggcgagctagccggctccgaggaagtcgccgcggacgttgcacacaaggcaagagtgcaagcgtga

SEQ ID NO: 23406 - DNA, 363 bp, Zea mays
  Peptide Sequence Number=SeqID_65185
atgcagcgcgagcctcaacggcgaacacagagggtgatggagagtgccttccctccgggtccctggctcctatcaggcggtgctcatggtctccctggtggcttctgtggtgctaccgtgcaggcgcagatgccacgcaacggtgcatcggaggaaggatggcgaggggagagtagcgggtcggctgccggtgacgcgccggcgaagtcgaccgaggaactggacgggtatgtggctggatccttgaggcagtcttcaccggagagcaccagaacccttgggcgccagcggcagcggggcaaaggagagaagctgctcccggcagatgtgacggcggagggtcacgacaccccggatttctaa

SEQ ID NO: 23407 - DNA, 768 bp, Zea mays
  Peptide Sequence Number=SeqID_65186
atggcgggaactccccagtttcagtccccgcacttcccgcctccctctccccctctcggtcccaccttcgtccctccggcgatgaactcaggcggacgcggcggcaagcggcggggtcccccgcccctcgctccctccggtgcggcggcgaagagggtcaatcccagccccggcacgccgcatgtgcctcctcccgcgtcggcggcggccgccgtggaggaggacatgatggacgaggacgtgttcctggatgagtccatcctggcggaggacgaggcggcgctgctgatgctccagcgcgacgaggcactcgcgtcccgcctcgcgcggtggaagcgccccgcaatacccaccgacctcgccgccggatgctcccgcactgtcgcttttcagcagttggaaatagattatgttattggtgagagccacaaagaattactccccagctcatctggttcagcagccatactcaggatttttggtgtcaccagagaaggccacagcttatgctgtcaggtgcatggatttgagccatatttctatattggctgtccttcagggatgggtcctgatgatatatcacgctttcatcaaacactagaggggaggatgaaggagtcaaatagaagcagcaatgttccaaggttcgtgaagagagttgagcttgtgcagaagcagacaattatgcattaccaaacacaacaatctcaacctttcctcaagatagtagtcgctctgcctaccatggttgctagctgtcgtggttag

SEQ ID NO: 23408 - DNA, 312 bp, Zea mays
  Peptide Sequence Number=SeqID_65187
atggttgtgtctaagttggagaagttggcaaagaaatctgggaatggacctgatagatgcaaagctactgcccgtagctcatgggaagccatggtgacagctacctttggtctttggctggcaaatacttgttgcagatattggctcagcttgacagtggtgaagttcctcctgaaaaattataacattgacccaaagtgcattggacgtttggaagttggcagtgaaacagtaatagacaagagcaagtctataaagacatggctgatgcagatatttgagatggttgaagctttcaggcatgacaagtga

SEQ ID NO: 23409 - DNA, 861 bp, Zea mays
  Peptide Sequence Number=SeqID_65188
atggagttggttgctgtctctcaagattcgtatcaagcttctgaagagattgacgcggttggcgaggctctgtcgacagaaagcgtggatggcgtgcggggtcccgaggctgtgccatctgtggagaagatgaacaatcctccagttttatcctcgttgggccatcttggcttaactgggctggctactgtgggacctgaacacgtttctgttgttgggccgctggaacgggctggcgcgaattcgccccaacctggcgatccattagtggttttcttgccatctactgttgaagctcctatgagagtatattcgagaagcagattcaaaagcaaacaagccctgattcaggtggaacaggtgatacatgtcgaggaggccaattctgcagagaagccttgtctacctccttcagagtccttaggtaactctgtgcctgggactactgttgatgcccctgatcctagagatgctgctgaagtccaacctgatgaggcagccagttttgaagctagaaaaaatgagtttttcaaaggaatcaccaagcattcatctaggatccttcatgttccaagagctggtatgcaagcagatctttcaccttccccacctgctgctctcatgccaagaagtcgtcgtgttacgagtgttggagtggaatttgatatacaagacctaggagagagaactaccaggaaagtcatgagatccctgcatattattgcagagaatgaggggattagtcaggaggccttggatgaatatgctagactttttaagcgccccctgactcatagtgaggtggaggctctttcagctttgtttgggtggagagcccctgagtccgtccctcttcagtaa

SEQ ID NO: 23410 - DNA, 558 bp, Zea mays
  Peptide Sequence Number=SeqID_65189
atgtcggtgctggtggacatcgaggtccacgacattccggcacacgcgtgggacctctccacggtttcgcaactgcttcatgactcgtgttacgttttggagctgtttcccgccaccgtgaacaagactaattactcttcgtttctgttgagagcttggtgtttcggtccggtgaagcttcatcgttctatggagttgcatatcgtcgagcacgggccggaggcacaagctaagcgttgcctgacttacaacgtcgttttaacaacatttccgatggatcctgtggattcgtctgcggtctctcagtcccctcaggaggatgggcatggcgctgatgatgacccgggattccaggaccctcctcgacggtcgggtggtgtccaggaccggcagcggtcggctctgctccggctcggtctgttgcactccgcgggagttggaagggcgggtggtgttcgttcttcgcaggcctcctcgtctcccggtgctttgggaagacacgagcattcattgaggcagtcgtctctgcggggctgggggcgtcgttccaactgctga

SEQ ID NO: 23411 - DNA, 405 bp, Zea mays
  Peptide Sequence Number=SeqID_65190
atgaagactggcgatgaccgcatccggtgtaagaagggtgttgttggcttcaatgtcgtgcatggagtgagagtcatcacccgagacacctccaaacaggtgagtggtgtcgataagttggcactcaagggtgccgacggccgcgtgatcctactcctaggcacgagcagcagcctgtgtgcgctgacgagcagcggcgagaacatcgttgggaacgcgacgctgagaagtagtgagcgtcagtggatggatgtagatcagcgaaaagtggacaggacatgtcgcatccgagaacgcgccaagcgcctatgcaagtgtgtacaaccccccggtgccgctcatcgggcccaagtaggggaagtgaggggcaaggagggcgccacggagggcggcagcgtcgagtag

SEQ ID NO: 23412 - DNA, 567 bp, Zea mays
  Peptide Sequence Number=SeqID_65191
atggacggaggtagtagcctcaacatcatctacgccgagaccctcgggctctgcggaatcgatctatcctcggttcgggcggggcgcggcgccttttcacgggatcatccccgggaaacgcgtccagcccctcggacaaactcgatctacccgtctgctttggggactccctccaacttccgaagggagaccctcacgttcgaggtggtcgggttccgaggaacctaccacgcagtgctggggaggccatgctacgccaagttcatggtcgtccccaactacacctacctcaagctcaagatgccgggacccaacggggtcatcaccgtcggccccacgtaccggcacgcgtacgaatgcgatgtggagtgcgtggagtacgccgaggccctcgccgaatccgaggccctcatcgccgacctggagagcctctccaaggaggctccagacgtgaagcgccatgccgacaatttcgagccagcagagacggtcaaatccgtccctctcgaccccagcaatgacgcctccaaggagatacggatcggctccaagctcgaccccaaatag

SEQ ID NO: 23413 - DNA, 469 bp, Zea mays
  Peptide Sequence Number=SeqID_65192
atggacttgataaatagtgtaactggagttgacgaggaaggacgttctcgccaaaggattctttcttttgctgctaaaagatacgtaaatgcaattgaaagtaatcctgacgaccctgatgcatattataattgggctctagtcctccaggagagcgcagacaatgtggatcccaattcgagttcctctaaagatgcattgctggaggaggcttgcaaaaagtatgctgaagctactcgacttagtccaactctttatgatgcatattataactgggctattgctattgctgatcgggctaaaatgcgaggtcggacaaaagaagccgaagaactctggaagcaggcaatactgaattatgagaaggctgtccagcttaattggaatagcccacaggaggcgttgaagaaggggaatgcaaatgagattgggcgagcaccaccagatgagcaagagatgtttgcgacag

SEQ ID NO: 23414 - DNA, 384 bp, Zea mays
  Peptide Sequence Number=SeqID_65193
atgcctttggtggcttttgtaggatatggttttgtgaaattgtttggtgttcttgttggtggaatggtgtatgatgtcactccttttatggatgagcatcctggtggagatgaggttttgctagctgtaactgggaaagatgctacagctgattttgaagatattggccacagtgattccgcaagggacatgatggagaagtaccacatcgggcagatagatgcttcaacaatcccagcaaagcgaacttatgtgcacccccagcaagcgcccagccactcagacaagaataatgatctcctcatcaagatcctgcagttccttgtgcccattatgatcctgggccttgcatttggtatacgtcagtacaccaaatcagagtag

SEQ ID NO: 23415 - DNA, 774 bp, Zea mays
  Peptide Sequence Number=SeqID_65194
atggaggagatggcgtcggcggccagggcaaaggaagggccggggaagctgggagccacgggaaaagcgggtgaggcaaggccgaccaatgataggtcggattgtcctctagatgctaaagagactacagaggacagtcaaaagcgactgttgtcctctagatgctcaagacttattccatcacgtaggaggagggcggccgacgacgggacagtgccaggggctgcctgcggtggagatctgcgcaagggggagggcagccggcggcgggccatgcagggatggagcggccgacggtgggccgtgcagggttatgtagattcatcaggcgataagtccaaacgaagtgtagtagagattaaaggtcgcttctcagtgacatctgagaatgtcgatcttgcaaaggttcaggaaggtccacttagtagtctctcccggaaatcaccagagggttcactgttaagaaaatctgccagcactggtgattattttgttaatcctaagctgatggcagtggctgggagtagggaggcacatatatcaccattttcatggttggggcggaggaaactcggagtaatcaatggggactggggaatgttgaagttgaaggaggctgaaaggcatgatcttaatattaagagaaaaaaagatctcttagaagaccaaatacaagacgtcatgaaggcggcccataaatcacaggccaccaccagcggccccacacacaacccagagatccaccaacaaacacctaagaagcctaaggcctaa

SEQ ID NO: 23416 - DNA, 744 bp, Zea mays
  Peptide Sequence Number=SeqID_65195
atggggtcacgcctaattgaaactggcagaccccgtacctgcaatacctccaccgaggagagctacccctcgacagagccgaagctcggcgactggcgcggcgcgccaggtcgttcgttttgctgggtgaagaaaaggagccctaccaccgcagcccctcaggcatcctccagtgatgcatatccattacggaagaaggcacctaggggcttcacgcacctgctggtcgctatcgacaaattctccaagtggattgaggtggtggtgttcttcaccaacatcatccatcgctttggggtcccgaactccatcatcaccgacaacggcacccagttcactggcagaaagttcctggacttctgcgaggaccaccacatctgggtggactgggccgccgtagctcaccccatgacgaatgggcaggtagagcgtgccaacggcatgattctgcagggactcaagccgaggatctacaacgacctcaacaagttcggcaggcgatggatgaaagaactcccctcggtggtctggagtctgaggacgatgccaagccaagccacgggcttcacgccgttctttctagtctatggggccgaggctatcttgcccacagacttagaatatggctccccgagaacaagggcgtacgacaaccgaagcaaccaggccagccgagaagactcactggaccagctagaagaggcttgggacatggccttactacactcggcaaggtatcagtag

SEQ ID NO: 23417 - DNA, 765 bp, Zea mays
  Peptide Sequence Number=SeqID_65196
gctctcaataactggggtcttgggctacaggagctgagtgcaattgttcctgcccgggataaacagaccatcataaaaacagctatcagtaagttccgtgctgcaattcagctgcaatttgatttccatcgggcaatatacaacctcggaactgtcttgtttaagttccatgacaatgacactcgtgcattttcttttataatgcttcagtatggtttagctgaggataccatgagatctgggaagccagatgtctccccaaatgagctttacagtcagtctgctatctatgttgcagctgctcatgctctgaagccaaattactcggtctatcgtagtgccttgcgactagtccgctcaatgttgcctctgccatatctcaaagtggggtatttgactgctcctccagctaacaattccatcgcaccacacggggattgggaggtatcacagttcattttgaatcatgagggcctccagcaggctgatgcttctgaccagcctccatcgcaatcccctgggcatttggacaggggcagaaagcctgtcagaataaacgttgcagatattgtttcagtgtcagcatgtgccgatttaactttaccaagtggtgctggcctctgtatagaaactattcatggtcctacgttcttggttgcccatagttgggaggctcttgacggctggctagatgccatacgccttgtctacactatttttgcgagagggaagagcgatgtgcttgccggtattattactggttaa

SEQ ID NO: 23418 - DNA, 384 bp, Zea mays
  Peptide Sequence Number=SeqID_65197
atggcgtcccgcagctggtccacgcggtcgacgaacgccaccgcgctttcggcgtcgcccgggttggccggtggcgcggcgtcctcggcgagcgcggacacgcggcggaactccgcgaggagggggatcggccggcgcgacggcgcggtcgatgcgcgcgctcagcgcgcgtgccgccacggcttgggactggaggtggtgggaggacgacggcgaggcgctggacaggagctcatcaaggcggtcaccgatggcgtcgatttcgacctcagcctcagccgcggcggaaagcaccgagacgatggcggctcgcgaagcatgaagcttcgcaagaacaatagtggtgtcggtgccggcatcggcatctttggtcgccggcgttga

SEQ ID NO: 23419 - DNA, 582 bp, Zea mays
  Peptide Sequence Number=SeqID_65198
atggctgaacgccacaaagctcagaagcgcaccatcgaggacgccaaacttctcttcctccagcaccacccctcggccgccacggctatctcccttggtccgctggaggccgcaactccccctccggctgccttggcactggaatccgagatccaggcctggcgaggagccctagagacatggctgtttgcgcagcgcgcctacgcgcgcgcgctggccgcgtgggcgcgacgatgcctcggcatcggcagcgcggcgcggcccagccacccgctgccgccggcgttcctagtgtgcatggaatgtgggcgcgcggctgacacggccaccgaggcacgagtgatagacgggttggacttcttcgtggctggtgtcgggtcggtgtgctcaggcgcggccaccgggatggagggcatggctgggcgggtgctgtgtgctggcatggcggcggtcactgacgccatggcggagttcgcggcggcgtctgcggacagctacgacgcggctgtcacagctgtgatcgccgcggcgcgtgcgccggagcgcgggaaggagaacggcatggggcaactgcaacgctag

SEQ ID NO: 23420 - DNA, 321 bp, Zea mays
  Peptide Sequence Number=SeqID_65199
atgtgcggcggggatggaggcgaggcggcgtcgctctgccgttctgcgtgcggggacctaggccggcaggggttctgcgccacttttgctacgcatgggttgtacttgatagaggttgatcgtatcctgcatcctagaggttattggattttatctggacccctaatcaactggaagaaacacctaatcaactggaagaaacactggaaggggtggcacaggactaaagaggacctggatgcagagcagaaagccattgaggcagttgtcaggagcctcttctggaagaagatcaaggaggagggcgacattgctatctag

SEQ ID NO: 23421 - DNA, 2688 bp, Zea mays
  Peptide Sequence Number=SeqID_65200
atggcggataaggccaaggtggttggtgcccatggagaaagggatgatgtttttttgtggggagagcttcagcacgatgactgcaggtggagtctaatggctactgagagtgctttccgattgattggtgggacgggggctagggactggagtaagggatttggtgcatttggctcttcagcaggtgccttatcaggggaagacttgggatttgtggataatgacactggggtttatgggggctggaacaaatctgttccaaatcgtagtggaagcgcaccgcctagcatggaaggatctcttgctgctcttggccatctcattgatcagcagagtgggagctttgaagctagtttgacaaccttggataacataactgacagttccaaatctgaggagcaactacgtgctgatccagcatattttgagtattatggctccaaggtgaatctgaatccaaggctccctccgccacttatttcaagggagagtcgccgattaatgaaccgtgttggcaaggctaaagagtggaggatggtctcccaagataacagcagcaaaggctcaatatacgttcctcgatctatgttgtcaactcacaaagaagaacctgaggatgataaatctccaagattggattcaagttcagtggaggatgcccagattgtctccagtgcatccaactttcagagccaggattttatgctggagaggtttcaacagagtgttgcttcttcgcctgatagttcatcttctaatccttcaaatagcaacactggtgattctatgcctgtatattctgacataaatttgttaaagagtttgtcatttgatgctttgaagcaatcggatttgaactcttggacaccaaaaggcccactgaaaagtaatgttaacaatgacctttcatcgccacccctttccagttcatcatatcctggtagcaaaactggtacgcaaacttttgagcaagaaaaggctgctgctgacaccaaacatggaaatgttgtgcttggcagtggcgcagctgttactgaagttgataatgtggactccattatgaagaatttgaagttaagtttggatgtccatacatcctcacctgccaagcagaggtggcaggacaatgtcttgcagcagtatggttcctttttaccagcccaaggtgatcctattcaattgactactcaaggaccccatcctcctcatgtaccttttgttgataacttgtctcatgctcagctcaagttgcctgacatccaccaaaatttaccacaacctagtatgacaacacctttctatacaccaaattcttttgggaacccttattatcagaatttgcaccctgctaatgcttttccaacctcaattggaactgggggttatgctgtaagtggttctattttgccaccgtttatggctggctatgctccccaaggtcctcttgctacacctcttgacagttctatgactccaagctttagtggcaggccatctggatttcttccagcagggaatcttacagggggaacagattttatgcagtcatgtaaagtatacggacaatttgagcctgctgaaagctttgattcacaaaacacgatacctcaagctgcatctgcatatccatctgatcagaggcttccactgccaataactggctttcctaattctcctacagccagaagaggagggactgttccaaattatcaaggcatttcatcctacattggagtgccaatgacttatcctactagtccagtgtttcagggacaaacattgcctggagtattgcctcctgttaggagaaacgactctgctggatttctgcccccctcaagaaacatcactggtagccctggaattcaagggcagcgagcaagacagaagtttgatgaatcaaagacctgctctttcttagaagagttgaagtccaacagagcgcgcatggttgagctttctgacatcacaggccgtgtagttgaatacagtgctgaccaacatggtagccgattcatccagcagaagttggaaaactgcaccgccgaagagaagacatctgtgtttgccgagattcttcctcatgcttcagcattaatgactgacgtttttgggaattatgtgatccaaaagttttttgaacatggaactcgtgagcaaaggagggatcttgccaccaagcttgttggtcacgttttgcctttgagtcttcagatgtatggctgccgtgtaatccagaaggccgcactgccgcgcaggcccagcccaatttgcgtgaccccggccacaaagtcacaaacaaacacacagccgccaacccgtcgtgaccagcctcgcaaaccctatcgcctatccctctcgcggtcttgcctcggtctctggcggcggcaccgccgttttacactcctcctccttcgacaacccgtcgcagtagcgtccgtctctggtgtccggctgtccggctctggactcccgacctcgacatcaggatctgcgcctcccgaccggtatgtgggggctctgaagaaggtgcagaaggatctgggcgcgtcggtgttcgagccgctggtgcaggcgtacgccgccgtcgggaagttccctgggatgtggcagcggctgaagatcgagaacgtggaggtcggggaggggacggcccagctgcttgactctatctgcgccgatcaatag

SEQ ID NO: 23422 - DNA, 1302 bp, Zea mays
  Peptide Sequence Number=SeqID_65201
acgaggtacaggagagcagccaaggcgatgatgcggctcaacccggcgtacctcaagtcgtacacgccggaggagatcgacgcaatggagtgggagtcgctggagtcggccatggcgctatggagcccgcatttccacgtggctatcgcctccgtgctcgccgcggagagccggctctgcgagcgcgtgctcgagcccctgccgccggcggtctggcccgagtgctttgcgaagatcgccgcccgcatcgtcgcggcgttcttccgcttcgcggacggcgtggccgccgcggcgcgcgagccgcagaggctgttcaagctgctcgacatgctcgacgcggtggtccgggagcgggagcgcctggacgagctcttctccagcgggtcggccacgctggtcgccatccgcgagcgcacgcgcgaggtggagcgcgcgctggggcgcaccgcggccggcgtgttcttcgagttcggtctccgcatcgagacgctttacgtcaccggcgccggtgccgacgccgggcacgtgcccaaggtcgtgcggtacgccgtgaactacctcaagtgcctagcgtccgacgactaccgcgcgctcatggacaccgcgctgcgcgcggatctagagcgcggcgacgaggaggacgcgggcgaaggcggcgaccgcgccccgctcgccgaggcggcggcgagcgtgctggaggcgctgcaccggcacgtcgaggcggcgcgccgggtatgcccggacacggtggcgtcgcacgtcatggccatgaacgcgtactggtacatctacatgcgcgcccggggcacggagctggcgaagctggtgggcgaggacaccatgcggcgccggtacaaggcggcggccgaggaggcggcgtgggagtaccaggacgcggtgtggaccccgctggtccggctcatcagcggcagcagctccggggcgccgaagacctggccgccggacgatgcgcaggagaaggcggcggcgttcgctggcaagctcgaggagcgggtgaggcggcacggggccgagtacaagataccggacggcgacctccggggacagatcaagatcgcggcggccaaggcggtgcgcggcgcgtacgccgggttcttgaaggcaaacgacaaggccctggctggctgccggaaacaactgctgccgctggacatcatcgagggaatggttgggcgcgtgttcgacgaaatgagcgatggaaccgccggcagcgtcggccgggcgaggagccggcgggagtccaggagcagcggcaatctggagggcttcttcggcgtctaa

SEQ ID NO: 23423 - DNA, 576 bp, Zea mays
  Peptide Sequence Number=SeqID_65202
atgaacggcgccgggggcagccaccaccagcagcagcagaggctccggcagcagcagcagcaggcgctcctgatgcagcaggcgctgcagcagcagcagcagcagcagtaccagtccggcgtcctcgccgccgcggcggcggcggccatgacccagatggaacctgtttccaatggcaaccttccacctgggtttgatccttccacttgtcgcagtgtgtatgttggaaatgtgaaccctaatgtcacggagagccttttgattgaagttttccagagtgctggccttgtggaaagatgcaagctcatacggaaagagaagtcttcctttgggtttgtggactactatgatcgaagatctgctgctctagcaatcatgacccttcatggccgtcacgtatatggacaagcaatcaaggtgaactgggcatatgcaagtacgcagagggaggatacgtcagtgatgctcgagtcatgtgggacaacaaaactggacgctccaggggttatggttttgtctccttccgtaatcaacaggcacgggcaacttggactttcttccttgaattttgcataa

SEQ ID NO: 23424 - DNA, 990 bp, Zea mays
  Peptide Sequence Number=SeqID_65203
atggtcgcgcgcgccgaggccggggacttcgcggaggcccggtccctctgggcgcagctcctgcacagctccgccgcgccgtgcctgcccgccgcggcgccgcgcctactgccggcgtacgcgcgcctgggccgcttcgacgagatcctccacgcagtgcgcgagctctcggcgcgggaccgcggcgcggcacgcgcgctctacccgctcgccgtctcctgcctcggcgccgcgggcgagctggcgcgcatggaggacgccgtcctagaaatgggccgccttggcctccgcgtcgactccgcgaccggggacgccttcgtccgggcctacgcggccgccggaaccatcccgcagatggaggcggcctaccgccggcacaggaagtccgggctgctcatcacccgtggcgccatccgcgccgtcgcgtccgcgtacatctcccggcagaagtactacaggctcggcgcgttcgcggcggacgccggcctccgccggcgcgacgtcggcaacctgctctggaacctctacctcctctccttcgcggccaacttcaagatgaagtccctgcagcgcgcgttcctggagatggtggccgccgggttccggccggacctcaccaccttcaacatccgcaccgcggccttctccaagatgtgcatgttctgggacctccacctcagcgccgaccacatgcgccgcgacggcgtcgcgccggacctcgtcactcacggctgcttcgtcgacgcctacctcgagcgccgcctcgcgcggaacctcacgttcgcgttcgaccgcctcgacggcgacggcgagcccgtcgtggctacggaccccatcgtgttcgaggcgttcggcaagggcggcttccacgccagctccgaggtgctgctggagaccgccggcgggaagcggcgctggacgtactacaagctgctcggcgtctacctcaggaagcagcataggagaaaccaagttttctggaactactga

SEQ ID NO: 23425 - DNA, 294 bp, Zea mays
  Peptide Sequence Number=SeqID_65204
atgggcgtggatgaggcggggcgcgccgccggcaggaatctcacgctggcaagcatcggcttcgcggacgtccgcgtgggcgctgccgtgcccgggggcgccgggtacaaggacggcctgctcgtcgtggggctgcccgtgcccaaggacgacggcctcgacgccgccgcccgggtcgtccgggacctcgccaccaggctgcccgacgtaggcgccgccgctagggtagatatttcttcagaaatagacctggtgctgactgctgaccggttgaaagctatagatgcactgtag

SEQ ID NO: 23426 - DNA, 195 bp, Zea mays
  Peptide Sequence Number=SeqID_65205
atggagagcgctttggatccttcgttgggggctaccaaaatattggagagctttatgcttggtgacgtccatgtttttatgattagaaatcttggagagggccgacaaggacttgggaagagtcatggtgtcaaggaggagaagctaggacgtccacaacaagagggagaccaagtccaactcgactacgattag

SEQ ID NO: 23427 - DNA, 414 bp, Zea mays
  Peptide Sequence Number=SeqID_65206
atggcggctcggggaagaggcagtgcaggcagtagcagcagggcgccgtctgtcgctggtaccgcgctcctgtgtgtagctgtagccgtgctcctgctggcggccaccccggccgcggtggcggggacgacgtacctcgtcggtgacgccgctgggtggacgctcaaggttgactacggccggtgggtggcgggcaagaccttccacgccggcgacatcctcgctgatcctgacgaccgatcaatgcaatcatatggcggctacaggaactgcatcgtgtcgcccaaggggcgcgcaccggtgtaccacacgggctacgacgcggtcacgctgcccaggggcacgcactacttcatctgcgccatgccgggccactgcagcgccggcatgaagctcgccgtcaccgtctactga

SEQ ID NO: 23428 - DNA, 237 bp, Zea mays
  Peptide Sequence Number=SeqID_65207
atgacatggccaataatgctcaaagcagtcagcatagctcacagtcttcgggcatgcagcaaacttcttacagaccaccagccccgagaggcagaggggggagaagcttttgcggaggaaggtcatgatcagcagccagaagggcatcttcggcatcaacaacaacgtgaccttcgggagcaatccgaagctcgcacagttaactgtactgtgcccgagtcaaggcatatctactga

SEQ ID NO: 23429 - DNA, 192 bp, Zea mays
  Peptide Sequence Number=SeqID_65208
atggacagacgacatcgtggcattgaacaacgacgagtgcgacaacagcagtggcgagtacgacacggcaacggcggggcactcagcgatgtgtggtgtgacaacggcccaagttccggcgatgcaatagggagcaggggcttcggcgatgtatcggcggtgctcgaggtgaacttcaacgagctgtgttga

SEQ ID NO: 23430 - DNA, 528 bp, Zea mays
  Peptide Sequence Number=SeqID_65209
atggcgctctccgtctcctccctcgcggcggccctctcccacctctccctcccatcgacctccacccccaagcctcacccggccccgctcctgcgcctgcgctccacctaccgccgcgctgttagcctcgcgctccgcgcctccgcagccgaagccgccgaatcgttcgaggcggacctgcccgccgaggaggtgatggctgtcgaggaggaggcggaggaggatgcgctgtcgggaatcgcgctgcgaaagtatgtgaagcagcggctgccgggcgggttcgcggcgcagcggatcaccgccacgggccgtcgcaagacggccatcgcccgcgtcgtgctccaggagggcaccggcaaggtcttcatcaacttccgcgacgctaaggtgcctatcaatccgagaattgcacgcacttattacaccaacgtcgctccattatgttgtttgggccgcattgcaatcggtagtactatccctgtaactctgcaattggttaataccttagaatttcaggagacgaattaa

SEQ ID NO: 23431 - DNA, 1086 bp, Zea mays
  Peptide Sequence Number=SeqID_65210
gttgcagagctgctgggtttcccagcatgtgtcatgtcatgcttagactacttggaagcggtcccttgggtcggggaagaagaggagaatgtggtctcgtctgtccggaacctgcagagcgagagctatggcgtcagtcctgtgctgaagagggtagcaccatctgatcgaacaaccccaccaaacgatacgttttcacatatcatcgaactggtcttgagaagcagcgaggacagggggcggcgcgagatgaaatctctggtgcagaagcttctgaaggagagtagcactggctgcatgagtgggtcttccgacctgtgttctgcggtcctctacagatcatgccggaactgcctggattccttactaatcctgtttcagcaagcaaccgacagtgatttcgctgagcaggctcttaataccaaagaaccagttttccgacaagttgctctagaagcagataacctgctctggttagctgagatcttggctgacaggaatgccgctgacgagttcgcggtcatatgggctagccaacgtgagctggctgggctgcactctaggttgccagtcaagtcgcgccaccttgtcagctgtgtcacggcgaggctgttcgtgggcatcgggaaaggggagatgcttccttcgaaggacacgaggcggcttctcttggacgtctggttgcagcctctcatggatgactacaactggttgcagcacggctgcaggtcgttcgaccggaaagtggtggaggaaggtgttgggcggaccatcctgacgctccctttggaggatcagcagacgatcctgctctcgtggcttgggagcttcctgaaggttggggacagctgccccaatctccagaaggcctttgaggtttggtggaggagaactttcgtaaggccctatgctgagcagcaagcctgtctcgtcattgttgatgtagacgataaactcttgggtggaggagtaccgaagaagcccatagtcgagtgtgcctcggaggtatgggaggatccacttgacagccgtcaggtgcagcttctagggataatacatgtgaagacatacctactaactgcatag

SEQ ID NO: 23432 - DNA, 240 bp, Zea mays
  Peptide Sequence Number=SeqID_65211
atgttgttcctccttgagcttagcgtgcagctcgcggagctgctcgaggtgggctatgtgactcccccaggggggggtctgagcctcaccctgctctcttggttccccgatgtgtgggggcgcccggagaaatccaagccgggctccagaccgtcctcctcctcggagtcgaggcaccccgaggggaaagggagatcaacatacatgctggtgaaggcgcttatgccgaaactcggttga

SEQ ID NO: 23433 - DNA, 1372 bp, Zea mays
  Peptide Sequence Number=SeqID_65212
atgtggtgcacgaggcacaatgatgatgacttcatcgatggaagcaaaagatattgtttcaatttggatgatgattatatctccgcatcaccgaatagtgtgagcgcaccgcaccctattggttgcgataaggcaagagttcaacgcaaggggaaggggctagcaacaagtaacaacgagtctccagtcatagagaagaggaagaggatgttgaacaagctctacaaggctagccaaatgatggctcaatctaaattgtttgagcaattcaataggttgttggatcacttcatcattgatatgggcgaagatatgaaaagggtctacaagttgtcctttaaaatgcatctgatggctgaccccaatcatctcatatctcatcttaatgcctttggaacagattctcaccctgactcggttcaacttagccttgggattgcggagcaatgtgcaaggcaagagaaactcctcaagtttctggtgtcaggatctgatgtaaaggaacttgatgaatccttgttagctgaattcacggggcaacagactctagcaataaacatgggaactcatccatatatgccggatgataagctatcaattcctgaattcatgttgaatgagccccaacactatctgccagagaaagaacttgtcatcccagatcctcttctgcacttcatccagtcccatggtgctgctcttactattgatcaaagtggtcgggtcctcttagctggcaatggtgatgagatgagagacttgctctcaattttcctggcgttcaacatgtcgagacgagaaacaggtggctgcaaggctgcatttcttgttccatactttgagagtactgattttaattcaaaatctttgtcaaagaagaaacataaagtgaaaaacatcaaagaacgtgactcgtatcagagaaactacatacatgctagcgaggttattttatccatcctgctggacaaggacaggagcagctcgacaatcctctcgctgaaaaaggctggtcctgagatcactgaacttttaacgcaatgctctatcggcattgctggaactggactggctattctcctgtcagttatgtgcaagatgtctaatggcatgaggactccttttgcttctgcccgactgcttagcaccagcgtcggattcggactcttctggctatcctgggcagtcaatggattgcgtgacaccatcgccagcattttcagaagccgaagtggcatgaatatcgaggatgacgaggtcgcagtgaaaatagaaaaaagtgtgaacgagatcctcttcagggcattaactctcctggcaatcactgcactgaagcgcgcgcgtcatcacgattttataggttgtcgatgca

SEQ ID NO: 23434 - DNA, 438 bp, Zea mays
  Peptide Sequence Number=SeqID_65213
atgtcctcctgggacgacgacgacgactctgctgctgcggcggcggccacggacgtcgagctgctcaagcgggcgtggcgcgacgagaaggccgcgccggagatcctccgcttcgacttgcccctcgtttcccgcgtccgagagcagatccagctcctccctgagctggacaccttcgtcttctgcaagaccaagagcgacgtaggcgcgttccagctagatgacattggcggtggcgccgcgagccgtcagggtctgcaggacacagcatgcaagcatgggagatgcgacggcaaaggcttgattcttttcgagtcgtggaaagtaagggatcaatggaagaaaaatactaagcaccgtcgcagaggtaaacctcagttgaaagccgatgtctatgtgccattcgcatatggcttaggctttccatgtatctcataa

SEQ ID NO: 23435 - DNA, 207 bp, Zea mays
  Peptide Sequence Number=SeqID_65214
atggctaacgcggcggcgcagaacagtaccgagcagctgctccacctgaagctcgcgttcctcgctggagagcctccctcctgcgtgctcacgctcgctaggtacgcgccgccgctgccagtcaaattcgcaacgatactgcggatgtgtgtcattgaatattttttccgcctcctcctgattctcctttgctctaaggcgctgtaa

SEQ ID NO: 23436 - DNA, 303 bp, Zea mays
  Peptide Sequence Number=SeqID_65215
atggagctcgcccttgctcggcttctccagcgcgcctggccgccgcgtcgttcctgctcatcaacgccagcaagcttggtccctgcgccctcccatctccctcacgttctctgtccagctgccatgggtgcgctcgccccggcgctatccatcagcgccaccagccgtgcccttgtatcccgcatcctcgactcgtccacaacgctgccccaagccaggggccttgtcgagctccctcagctcgcccccgaccacagccgcacgccaacctcgcccttggtcatggagcagcaacaactatga

SEQ ID NO: 23437 - DNA, 924 bp, Zea mays
  Peptide Sequence Number=SeqID_65216
atggctcgccctggagccaggggaaaagccggaacagtcctctgccatgtcttcttccacctgcgacatggagagggagttagagaggctgagctctcacgccatggtggtctagcttggccagccctgacatcagcaacgacagggttgagcgtgccctctgctccaggtttgggaagcccgtcggcagacttcctcgtcaccttcgtgcaccgccactaccgagacgtcgtcgtcgccactaggggcttcctacacggcaacctagacttccgcatcaggcagtggcaactaatcgccctgggagactgccatggtctcaagtttcatgtcacgctttgtttagaaggcattcctcctcaagcctggaatgagtgcatcgccaagagggttgttgcccatgcctgtgttcttgactacgtcgaagaagggtgcctctccccagcaagcaagatgcccgctgtctctagcgtggactgggaatccatccgacatctccaagatcgtctggcaggctcaccatcatgggtaggggcgatgatcatccacaacaatgcgccgcctccaacgggtctatgcggtctcaccttcaagttgctgatctacattgacctggtggagggcccagccggaccgcgatgggatgtctctacgtgtcgcttcgcctggcgccatgatgtagtcgacggcgaacgcgagccacacgaccgacaagatccagcttcgtcggtctcctcctcgccacctgcaggatcgccgcgctcccatgccgcaggacacgccttgttgcaacccaggtgggcaggtggctttgacggcccggactctgccagccacccttctccccaccctttgctccgcgtaaggccttgtttggttattcccaatacacatggattggatgggattggaaaaaattcttaa

SEQ ID NO: 23438 - DNA, 1110 bp, Zea mays
  Peptide Sequence Number=SeqID_65217
atgccgacaggttgcacatccgacgccggggacgatacaagaaatcggcgccaagaacctgaggtggatgccatggcagccccagcacatcctcctcctcctcttgtaaatagcaaacgcgagtgcgacatcaatgaaaaggaggtctgtgcttacaagaagcgacgctcgtccatcgctgcagctgcagctgccgctggtgcaacgccatcaccgatcgtgcaagaaccgacagaagaaaagttggcggcatctgttttcagtttggattctctgcaccgggactgggaggttagtatcccgaacaatgcatcgtcgtcgtcgtcttgccgacatgatcatgaccaccagcgctacggttgcccttccactatggccgtttgtgcgggtagcaacggatcggctgagccaacgcagaaccaggaacggacaagcagggccaggagcaatcctgtgcaagaagctaataaggcaggtggtcagcatggccaggagactgctaatacggcagcaggtggtcagcatggtcgcgagactgatgttcctatgcgacctttcatgggcttgagctacggccctcgattcttgggcgtgactgatgtgacactagttcttgccaagaacctaaccgcctcagattgctgctcgggccagtcccgcttgcaattttcacccaaggagatcatggactcgccgctgttcagcattctcacagcagctgagcgtgcatctgtggaacaacgggatggtcaggatggattgccgttggaggccatcgatcgacatggtcattcctacaacatgaggttcaagtatatccatagcgccaagcgataccgccttatgcaagcatgggtacctttcttgagacggaatggcgtgcgcaatggggatctggtcgaggtctgggctttccgtgttgatgggaggcccatgctatggttgttgaactacgcaggacaggggtgggttcctgaagagatagaggcagcagaagctactcgtgtgtcaccgactggatcaggttttagggcttgggattggagaatggtgtggccgagttatgtctccgccgtggtggaggggtcggcgccgccgcgaccggcctag

SEQ ID NO: 23439 - DNA, 978 bp, Zea mays
  Peptide Sequence Number=SeqID_65218
atgggctcggtgctgccgaggcagcggtcgtcggaccagcacgccgccggccaccagaacctagcccccgacgacttccgggacgtgtacgcttcggcggcgaggcggttgactaccactccccgacgggccacggccacccagtacacgagctacggcggtgccgaggccttctgtcgccggccttacgccaacgggcgcgcggcggccgtgcccacggagcagggcttcttcgacgacatcttcggcgcccgtcgtcacatgaggtcgaggtcgagttccaagtccaagtcatcgtcggcggtcagctccgacgagttcccatccgccggcttctgccggccggtggccaccgccggcggcggcagccgcgcagacgccacgctctcctccttcacatctaggctcaggccggtgacgatcccttcgcggcgatatgactcgtcgccgccatcgacgtcgacgagaggggagtactaccagagcagctccacgtgctcgacggccccgtacccggcagctcgctactactacggcgacgacgccaaggccgccggcagcaggtcgaaccacagcagagccggcggcgacgggtcggcagcaacgcgacaccaccggaaccaccgagggggcagcagcttctgttgcttcacgtcgaacccggagaccagcagcaatgcgaccagcttccggcaggcagcacgcggggcgcagtcaccggccgccgagaccaccatcaccgactactcaggcgctgactacgggtactactactcgccgccgtcagccacgtcgtcgtcgctcttcaccaacccgctggctagggcaccgcggcgactggaggaggtagtgatggaggtgagggagcgggcgccgctgctgatggacgacggcgacgacatcgacagcgtcggcgctgctgcggtggatgaggcgattgcatgggccaaagagagattatggagccaggcccgttag

SEQ ID NO: 23440 - DNA, 510 bp, Zea mays
  Peptide Sequence Number=SeqID_65219
atggcggcgagggcctcgccagcggcggcggcggtggcggaggtcagggagtccattgggaggggcagccggctggggaattgcccgacagtgggaggggagggaactgcggccggctggggagctgccggcgacaacagacagggaagggaggccggcagcgggcaagggcagggactgccagacggtggctgtgagggagggagggagaagttggaattggaacctagtggaattattactgccccgatgctatatgcgatggaggaattcccacaactgcaagaagttgttgaccggggttttgataatcctgcaaatgttgaaattgcccttgactatctccagaagagccgtgggattgaaaagacaaaagagcttgcacgagaacatgctgatcgtgcagtcaaggctatagaatctctacctgatagcgacgacgaggatgttctgacttcaaggcgtgctcttattgatatcacagaaagagtcatcacacggacaaaatag

SEQ ID NO: 23441 - DNA, 792 bp, Zea mays
  Peptide Sequence Number=SeqID_65220
atgtcctggcggtggactctcgcgcgccgcgtcgccacgctggccgcgatcggtggcggcggtgcccaggcgcagaggctcctgtccacctcgtcagccggcggtggcactggcctcctgggtcggcactacataccccctcgcctcccagattcggagcaaaggtccactgccccgttcccttcccacaataacatgaagttaaataccaaaacaaaagaggtagttggttgcagaggagctgctcttgtgagctccagatggttgcatgaggcccaataccaggttcgccaggacggggcttccagggctcaggaacagcaagatccatttgaattagtcgccgatgagctatcacttcttgcaaataggttacgatccatggtggctgctgaggtccccaaactggcatcagcagctgagtactttttcaaggtgggagcagagggaaaaagattccgacctacggttttgttgctcatggcatcagctctgaaatttcctttgtcagagtcaacagaaggaagagttctcagtatattggcagataaactccgcacaaggcaacagaacattgctgagataactgaaatgattcatgtcgcaagccttctgcatgatgatgttcttgatgatgctgatactaggcgtggtgtcagttcattgaatctcatcatggggaacaagggggcagggacgaccttcaaggatgagctgcacgccggcgctggtggacggtggagagccctggaggctggagcagccgccgccggcagaggacagaaagtttag

SEQ ID NO: 23442 - DNA, 633 bp, Zea mays
  Peptide Sequence Number=SeqID_65221
atggacgatgaattgtttgacatccacccgctgccaaaagatggtgacaactctggccacttgagcaaaggcagtggtagtggtagaggtagtggcggcatatgcaactattataaggatggtgccatgtgccatccaaagatcaacatttcaaactacaatgggaaattggatcctcggccttcgctcatcaagtgcgagagatacttctgtgggatgcacaccctaatggatgaatgggtgtgggttacatccattcaccttgataatgttgctaatgagtgtttttggagtatatcaacacgtgctttggtcctcccttacgcaccaataggaggtgacatcaacgctgaatgtatagatgttagtggtgggactcctggagccgttctggacggtcgtggagttggaatgtcctccaaatttatagcatgccatgaatttggagtgggccttcaagcggtaacttgccacggtgctaggtggtcaggccgcaatagcatcaacaccatggtccacgccactagtggaaacagtaatactagtaaacaaggctcatttacgacttcgatggctaacgccagagaagctagtggccaagcaagcgagtgggaagtgctaccattgcactga

SEQ ID NO: 23443 - DNA, 456 bp, Zea mays
  Peptide Sequence Number=SeqID_65222
atgcaggtggcgtgcaaccgcaccacagggacacaccccttcaacttcgtcgcatccagcatggaggcccaggcccacacgtcatgtaaccggcgcgccggttactacgtgcgagaaactgcaccgccacttgcgccaatgtcgcgccttctcgactgcggaaccagtgccgtgactcgtggcaaccatgcgcatggcccaacagtgccgatcgagcgcatcgatcacggggaccgggcaaggggatatttcgaaagggatccttctccgcgaaggaagcgggccccgagcccttctactgatcaggggttcgaaggccggcccctcggaagggttcgacggtcgccccagagcactcgggcttcaagctcattactgatcaggggttcgaaggctggcccctcgaaagggttcgacagccgccccaaagcactcgggctccgcgcccactactga

SEQ ID NO: 23444 - DNA, 354 bp, Zea mays
  Peptide Sequence Number=SeqID_65223
atgcccagcaattctaccagcaaagaatccgcaaaactgcgcaaccagatccagatgctgcaaaacactaacaggcacttggtcagtgactctgtgggaaacttgtcactcaaagagctgaagcagctggagagccgccttaagaaaggcatctctaagatcaggttgacgttgcttagttcaaatataaactgtatattgtcaaatattaacgaacggagggagtatttgattatttatacaactctgattgctgaattcttgtttcagagtgagctgctggctgccgagatcaattacatggccaaaagggagactgagcttcagaatgaccacatgaacctcaggagcaag

SEQ ID NO: 23445 - DNA, 510 bp, Zea mays
  Peptide Sequence Number=SeqID_65224
atggcgcagggcggaccgacagtagagattcatcaatggcgagagattcacagtgccccatgggccctttcgactaatcgatgtcatggcaatactcccacgcggccaagaaacccccaattgcctcccatcgatggccggatatcagcaggacgcagggagctccgcagcggatccatggcagtcgctcggatagggtgcccggtctccctcattgaaggcggtgaggcgatggtcaaaggggaggtcgcggccacagatttatacccaggcggcgcccagagtccgagctggtgcgagcagcgagatccgcgggtgaagatcccagccgaggattcggcttttgttacggcgactgcggtggagttgttacggtggataagcaggacgatggaggcccacgcgacagtgacatacagcgcgtttccggtagaaggaacgggccgggagcagctggccgtgttttgtttaggagacttgggccccagggaagtggaatcgcccaggtga

SEQ ID NO: 23446 - DNA, 198 bp, Zea mays
  Peptide Sequence Number=SeqID_65225
atggcgccgccgctggatggcgtgtgcgccgccgcgggctggccgtgtgggcgtgccataggccggcttcaggaggaaagagagagcggctatggggagaatagggtgtcgcgaaccgtggaccgtggatacttgatccagcggttgaaatgcaatgatgggcccttggaaaccctatctaatcctggctgtaggtaa

SEQ ID NO: 23447 - DNA, 294 bp, Zea mays
  Peptide Sequence Number=SeqID_65226
atgtccggtgtacaccggactgtccggtgcgactgcggagcaacggctacttcgcgccaacggtcacctgcaggcgcattcaatgcgcgccagaagcgcgcagaagtcaggcacgcccatactggcgcaccggacattgaacagtatatgtccgatcacgccaagaaggagatggagaccggcgaaaagcccactacaagccacgggagcacttcatcggaagaatcccgcaccaagaggaaggagaagaaagactcctccaaagggaaggagaagaagaaggactcctcctaa

SEQ ID NO: 23448 - DNA, 753 bp, Zea mays
  Peptide Sequence Number=SeqID_65227
atgtccaggccgctctcttccttctgcctccaccggatcaggtccggcggcaccgcgtccaccgccgcgcctccatcgatatgcgccaacaaggacgacggcggcggcggcggcggcggagagagcaggtccctaaaggatggcaagcaaaaggacgagtgggaggaggctaacgagaagggcagcgcagaggccgtcgtcgtggggaggaaggtgatggtggcggcggcggacggcggcggcgaggaggcccgcacggcgctgcagtgggcgctgtcgcacgccgtccggccctgcgacacggtggtcctgctcgacgtcgccagcggcaagaaccgacgcgatccgagagggagtccgcacctggaggccttgaggagcatctgccaggccaagagaccagagattaagattggcattgatgttggcgttccaaagctacaactggtgtgcgtggaactttcgctggcggagggcggcaaggaccgggggccggcgatagtggaggcggcgaggaagcagggcgtttcgctcctcgtcgtggggcagaagaagcggtccgtcacgtggcggctgctgtccatgtggatcgccggcgtcaagggcgggggcgggggcggctacaccagcgccgccgactactgcgtgcagcacgcggcgtgcatggcgctggccgtccggcgcaagagccggcgagggggcggctacctcatcaccaccaggcggcagagggatttctggctcctggcttga

SEQ ID NO: 23449 - DNA, 1107 bp, Zea mays
  Peptide Sequence Number=SeqID_65228
atgacgcacacctgcactcacctcatcgcgaatgtctgctcagtgcaccgtctcaaggtagatgacttctgtgtcaccaagtccacgatcaggaacaagaaggattgctgcatcagatccagatgcagcgtcgacggatacgactgggagatccagttccgcttttcaccttacgagggcagtcctgaagactactggttagcgctcgtgcttgtgtacctcggcgcgccgtgcgacggcggtgtggcggtggctctgagctgtcatctggtagatcagagctgcgatcttcgtgttccattattaacaacaacacaaggtctaaacacaacgtttaggcgtcccttggaccgctctcctccgatttacttcggcaaagggaaggttagagacgatgtgcaggcagcagcagcagctggtcgcccgctaatattcaagggtggttcatttactgtggaatgccagatcgacgtgcacagcagcagggactcagattccgtttctctgccgtcctctgacctgcaccaacacctcggggagctcttgcggaaccagtctggtgcagacgttaccttcatcgtttccggtgagtccatcgcagcacacaagagcatactagccgcaaggtccccgatcttcatggcccagttctttggcaacatgctggagaggggctcccagtgcgtggagatccaggacatgcacccggccgtgttcaaggccatgcttcactacatctacactgacacagtgcctgaccttggtactgataccaccacggtcgaggagacggcggtgatggctcagcacctgcttgtagctgccgacatgtatgcgctagacaggctcaaggagatctgcgaggaaaggctcacccgtggcatcggcattggcacggtggcgtcgacgctggctctagcagaccagcacaacttggcccagctcaaggctaagtgcatcgacttcatcactggaggatccagtaaaaatcttctagccgtcttggagacggaagggtacaggcatctggaggccagcaacccctcggtgttgacggagctcgtcatggctgcgcatggaaaaaagaggaaacgattatacgggtag

SEQ ID NO: 23450 - DNA, 756 bp, Zea mays
  Peptide Sequence Number=SeqID_65229
atggtttccgaggccagctggagccagggaatcatggtgacggtcgttgcattgcaccgcagggatggcggtattctgttacgcgggcgcgaggtgggtgtgggtgagggaggttctatggaaacgcccccaccacacagtgactcggagcgtcgagcgtgggcggcttgtgcgtctgtcccatgggcccacacgccagtggccccgatggcatcggcgtggtgtggctgggggaggagtgaaggaactatttcacctttcttaaacttcgggtattacacgactgatgctgaagaggggacaccgaaggtggaagggcaccgtagtgaggtgtggttagcagagccggcggatgcgcgacaaggaaacaccctcagccggacccgaccacatggagatggtcttggtccaaaggttgcagaaggacggacacattcgactgccgcgcccgaggggaccacctccaccacaatcatccttgcggggtcggcgaccgcctctggaggtcggacgaggatcttcgggaggaggggtggggcaagtgggcatgaaggcctccccccttggcgacggaggacgagagggttggctagtgcaagacacgccatagagagcgaggcggactcagcatctagggtgagctccttcgttgtggccgtcttggaaggaggggaaggacatcgagcatttgatgaagccttcaggtggtcgtggcaccgattgagaccacatagaagatttaggacaagcatgtga

SEQ ID NO: 23451 - DNA, 420 bp, Zea mays
  Peptide Sequence Number=SeqID_65230
atgggtactcgtttaaatcagagacaatttgaaagaagagcagctatgatgggtggagggaatttcgttgttcctgcacagtgtgtcaccgattttatcagcaacagactgtcagttacaacactgccaccatcaagctatagattaggagttcgtccatctaatcttcatgagctattccctccttacataactgaagctttacaagagtcactaataatgattgatagagagatgccaggctttgtttctagcaaggccctacttcatggtgtggagaccaggacaagttctcccttacaaatttcacgacatggagaaacatacgaaagtacatcactgcgaggattatatccaactggggaaggtgctggctatgctgggggcatcttaagtgctgctgtggatgagcagctgtga

SEQ ID NO: 23452 - DNA, 858 bp, Zea mays
  Peptide Sequence Number=SeqID_65231
atggcggcgttcggcgccgaccagtttgagctccacgggccgtgccacggcgagaagaagcggaggtggagtttcttcaacctctacttcttcgccgtcgagctcgccaagctggccgccattaccctggtggtgtacgtccaggagaacgtggggtgggagtgggggctcggcgtcccgatcgtcgccatgctcgtcgcggtcaccgcgttcatgtggggcaaccctctgtgctcgacgctgccatctctactgccggacggctgctccacacgaaccaactcagctttttttgaccgggctgcaaccgtgacggatggcgacttgacaagcagcggcgtcccgcgaccatggcggctgtccacggtgcaccgggtggaggagctcaaatcgatcgtccgcatgctgcccatctggggcgccgggatcctcctggtcacctcggcgcgcaccatagacatgcgcatcatagcgcacctcgagataccaccagcctccatgctcatattctcaaacattgccatgctcgtcaccctcgctcgcactctgctggtgccatggctgcgacgcgtcacggtgcagcccacgggcatcacgcacctccagctccagcgcacgggcatcggcctcaccatcagcatgctgagcaacgtagtagtgtcggcggtcgtagagggggagacgaagcggacggcatgggaaaaccatagcatcagatgctgcttagacggcttcaaaatcccaaataaggaaattatcgagtccaactattgtcgaacatgtactcccgaggccccatgcctcgaggacctaccttggctccgacaagggcagggggcatcatcctcgagagcttga

SEQ ID NO: 23453 - DNA, 336 bp, Zea mays
  Peptide Sequence Number=SeqID_65232
atgacggagcccgccacgatagtccagaagcggccggcgaaggagtcggcgacgaggccgccaattataggggtgaggttgggagaagccatggaagttgttgagcgtgttggaggcgtcgacgagcgtcaactgcagctgctgcgtcagatccccttcgccatgccatcgcctgctggcgtcttcctccaacatgcctgcaaggtgtgcagcagcacgggaaccagagatccctccctaggagttggattaggccttgttcgtttacgtcggattgcacccggaatcgttccagctaatcaaagtttatataaattagagaagcaatccggctag

SEQ ID NO: 23454 - DNA, 1203 bp, Zea mays
  Peptide Sequence Number=SeqID_65233
atggccccatccaaaccccacaaatgcagctcctcactatgcgagcagaagagctgtagccaggttaggagatgccccatcaaacacacaactattgtggtgcagccacaaggtccaggctccgagtatgataagagaattgacacccatctggaatcgattgttaacaccgcaagagaaattgtttccactcttccaacaagcaatcttctagctgtggcacaaagaaatggagaccaaccttctgcagttccttctatgctccctgacgaggctttcactgtcatccgcaagtcatttgacgcacgaaaggttttgaaagaacctcaattcacttatattgttgatatggatgttaagaagattcttaatattgagccaagggcatgggattttattgctcggttggagcccaaacttggagttgtggaatacatgaccgaagagaagttagcagttgatctggtcagcatgctaaatgttagtagcaaaggttccaataatgtactaggaattagagacactcatagtggcatgatttatcgtcaacaaaagaagcccagagtggcagttataggaagtggaccatctggcttgtttgcttcccttgtgctaggtgaacttggtgcagaagttaccttattggagcgtggtcagcctgttgaacagagaggtcgtgacattggtgcactagcagttagacgaattctacaaccagagagcaacttttgctttggcgagggtggtgcaggtacgtggagtgatgggaagctgatgaccaggataggaaaaaacactgatggtgttcaggctgttatgaaaacatttgttcactttggagcccctccaaacattttagttgatgggaaaccacacttgggtactgataaacttgttccactgctgcgaaaattcaggcatcacttaagagagttgggtgttaccataagatttaatgctagagtagatgaccttatagtagaagatgggcaggtaaaaggaattgtggtctctgatgtggaactacagccaggtcctgccagccagaaactagcatttgacgcagttgtaatggcagttggtcattcagctcgtgacacatacagtatgctttggcagcataatgtagacatgagcccaaaaaagttttgctatcgtgcaacttccttagaaatgcctgatgtgaattcatttgttggctaa

SEQ ID NO: 23455 - DNA, 1842 bp, Zea mays
  Peptide Sequence Number=SeqID_65234
atgtgggcatactccaaaggcgctgaaagtcactactcactagagatacaccgttatctcggaatcgaggatttttcagtcataaaagatactagtgggtggtacgcggcttgtttcaagggatgcggtcatgctaccaccgtcatcacaatcaccgcgaatgacttctgcgaccggcttgcttcggtggggttcacgacgaacctgatctcgtacctcaccctgcagctgcacctgccgctcgtggaggcctccaacatcatcaccaactacaatggcactgctaacctcactccgctcatcggcggtctcatcgccgactcctttgccggccgcttctggaccatcacattcggctccatcatctaccagctcggcatggtctgccttaccctctccgccgcgctcccctcgctgcacccgccatcctgcgccaagcacgctgcagactgccagcgcgcgtcctcctaccagatttccgtgctgtacctgtctctgctctgcacgtcgatcggcaccgggggcacgcgcccctgcaccatggcgtttggcgccgaccagcttgagctgaacgcgcacaggcaccggggcgccaagcccaagtggagtttctttaacctctacttcttcgccgtcgagctcgcgaagctcgcggccgtcaccgccgtggtgtacatccaggacaacgtcgggtggagttggggaataggcgtgcctaccgtcgccatggtcgccgcggtgatcgccttcgtgtccgggtactcgctctacatcaggatgccacccgggggcagccccctggtccggttggcgcaggtcgctaccgcagcatacaagaagcggaaagccgtcgtgccggacccgagcctcctgtacgaggacaaggagctcgacgctggcatctccaccaccggacgccttcttcacaccgaccagctaaagtgcttagacaaggcggctattgtgacggacggcgacgtgctgccgtcgggtcagccgaagctatggcggctgtcgacggtgcaccgcatcgaggagctcaagtcgatcatacgtatgctgccgatctgtgctgccggcatcatcctggtgacatcggcgtcgcacaatcacagcttcgccatccagcaggctcgtaccatggaccgtgacatcacgccacacttcaagatcccgccggcctccatgctcatcttcaccaacttcggtatgctgctgaccctggccttctacgatcgcgtgctcgtccgcgtgctgcgccgcttcactggccgcccgaacggcatcactcacctccagcgcacgggcgtgggactgacgatcgccatgctgtccaacgtggtggccgcggtcgtcgagcggagacgcaagtccgttgccgctgcgagtgggctgctcgacgctcccaaggccaccctgccgatgagcgtcttctggctggtgccgcagtacgccatccatggcatcgccaacgccttcatggacgtcggccgcatggagttcctgtacgaccaggcacccgagagcatgcggagctcagcgacggcgctctactggctgaccttctcgatcgggagctacctcggcacgctgctggtgaccatcgtgcacgacaagacgaagcgaaccgggcaatggctcccggacaaccttaaccgagggaagctagacaactactactggctagtcgtggctctggaggtggtcaacctcgtctacttcttcatctgcgttaagtactacacctttaagccattggagatggtgagcggtgaggaggttgagctctaccaccatggcaatggcaccgacgacgccaagaagcaaggtgtggaagcttag

SEQ ID NO: 23456 - DNA, 1641 bp, Zea mays
  Peptide Sequence Number=SeqID_65235
atggagactgcagctctggccgacgaggatgcatcgccgaagaagacgaagcagggcggcttcaggactatgccattcatactggcaaacgagatctgcgaccggttcgcgacggccggcttcaacgccaacatgatcacatacctgacgcagcagctgcacctgccgctcgtggaggcctccaacctgctcaccaacttcaacggcaccgcggcattcacgccggtcctgggcgccatcatcgccgactcccgtgccggccgcttctggaccatcgcggggggcggcgtgctgtaccagctcggcatgctgggcctcgtccgcgcgaacggcgggcagctcgccatgctgtacggttccctgctcctcaccgcgctcggcggcggcggcatccggccctgcgtcgtggcgtttggcgccgaccagttcggccagcgcggcaagcgtcctggcggcgagcagcagtggagctacttcaacctctacttcttcagcatggggctcgccgttctgctggcgctcaccgtggtggtgtacatccaggagaacgttgggtggggctgggggttcgggatccccgccatcgccatgttcgtctccgtgctctcgttcgtcgtggggtacccactctacgtgaaggtaaagccccaaggaagccccttcaagaggctcctgcaggtcgtcgtcgcggcgtttaagaaggggaaggactccgtgccggaggacgtcggcttgctgtaccagaacaagcagctcgacgccccagtcgccgccgacgggaggctgctgcacaccgatcagcttaggcaagagctcaaatccatcgtccgcatgctgccgctgtgggcagccagcatcacggcgatcgcggccgcgtcgcacaacttcaccttcgccatccagcaggcgcgcaccatggaccgccacctcaccccgcgcttccagatcccgccggccacaatgatcatcttcaccacgctgaccatgctcgtcagccttgctctctacgaccgcgtcttcgtccccgtcgcgcgccgttacacggggcggcggtcgggtggcatcacctacttccagcgcatgggcgccggcttcgcggtgtccgtcctcggcgtcctggcgggcgcgctcgtggaggccaggcggcgccgcgtggccgcggagcacggcctgctcgacagccccagcgcggtcgtgcccgtcagcgtgttctggctggtgccgcagtacgcgctgcacggcgtgagcgacgcgctctccacggtggggcacatggagttcctgtacgaccagtcgccagagagcatgcgcagctcggcggccgcgctgttctgggtcgccggctccctcgggaactacctgggcacggtgctcgtcacggtggtgcagagcgccaccagaggggtgtggctccaggacaacatcaacaaggggaggctggactactactactggctcgttacattcctcttggtgctcaatcttttctactacatcgcgtgcttccatttttacaccttgaagacgttcgaggtggacgccggccgcactaatggtggagaacggcagccggaggctgcggagccttgccatagtccagaaggtattcagatgaaaataattaacaaaatggttaactaa

SEQ ID NO: 23457 - DNA, 279 bp, Zea mays
  Peptide Sequence Number=SeqID_65236
atggtccagaagcggccggcacgggagtcggcgatgatggcgcccaggaccggcgtgaatgccgcggtgccgttgaagttggtgagcaggttggaggcctccacgagcggcaggtgcagctgctgcgtcaggttgcttgaatcgcgatctggtgagaggaaaatttcggtggaagcaagggcaatcacccagtatgaatggcatagtcctgaagccgccctgcttcgtcttcttcggcgatgcatcctcgtcggccagagctgcagtctccatgcttga

SEQ ID NO: 23458 - DNA, 354 bp, Zea mays
  Peptide Sequence Number=SeqID_65237
atggagtacagaaagagggtggatgcgctagtgtttttctcgttacttctcctcggatactttgctgctcatgcacatgggaaggctgcagccgtccaaacagctacagctcctgtggttatagggcagccgaacaagtcgttggtgcgaggtcggagcggtggcaacctgatgctcaaggagcagggtgctccaagccaagaaacatcccagaaagggaaggaggttgcgccgaacgagggtggatcaagcgacgatcgcaagaggtcacccgattggggagactcctcgcaaatagtaacgataaggtcattaggaccttttgggggcacatggcacgatcatgatatttag

SEQ ID NO: 23459 - DNA, 695 bp, Zea mays
  Peptide Sequence Number=SeqID_65238
aggcaaaagaagccggaagggtcgcgcccgtctgtagatgccagcagatcatgcagcgcccaaatggtgctgagctgcagtactatcagaagctgaatagattgctgctggaattagagcaaaggagtggaggagtttctaaagagagttatcagaccgaagtaattgcagcagctgcagctggtgttgcagctgagggtttgtctcctgaagaagcaaaaattcaagcaaagaatgctgctcatctctcagtagcactagcagagaatgcaatagttattctgatgcttgtggaagatcatctgagatcacaagctcaacatttttgcacatcccttacaggtgatagcatcacatcgtccacatcaatgacttcattggccgccagtcggtcaaattctttgaacacagctgatgaaccacctcccgagttccagttacttactcttaccgggatgggactggacaccaatggagaattcctaatggctatgcaacaacagcttgtccatgaaattcgtgaagtatggacaaattcagttgagaatctactttatatgaaggaagaccttatcatccctcatggatgtgttcattctcttgtaatctatgaagttctgttaaagttagtcgaaccattttctgattctatgttctctctactgtttgacaacaacacatattttatgaattaa

SEQ ID NO: 23460 - DNA, 339 bp, Zea mays
  Peptide Sequence Number=SeqID_65239
atggcggccgagatctctctttccctggtgccgtgtgtgctcgccctcgcctatgccgcgcccctgcgctcgtcgcggtgctccagctcgcccctgcgcgctcctctccccaagatccctccctgcatgccggacgtcgtccgttccctggtggccgagcatagcccttgcgctcgtaccttctctgttcaatttctagaacacctaggtctatccatggtcactcccttcgtcgttggtgttcggctccctgtttcagttgtttcagtttgtcgtgccgcgccatcatcacttctgtcgcgagctcgatcctcgttgtcatcacttcgccatgtttga

SEQ ID NO: 23461 - DNA, 192 bp, Zea mays
  Peptide Sequence Number=SeqID_65240
atggccatgatgggttcaacatcggaaaagatgtacctctaccaggtgaggaagcaacaaatttttgttgcttttgttcaaaggtggtgcctaaagaagaaaaccaggactgaagacccgggaggaagtgtcctccttttaaaacttttactgttgatcaggaggggttttgcctccccagcgattaaataa

SEQ ID NO: 23462 - DNA, 303 bp, Zea mays
  Peptide Sequence Number=SeqID_65241
atgcacccccagctcccttttgagcttctcccgcacgcgcactcgctcccctacctcatttcgcgcaagctcaccctctctcatgctctcctctcgtcgctcggcctcgccgaagttctgcgcccgccgtgctggtcatccaacccgccagaagctgcgccaagcgaccccgagcttcgccccgagatcaccaaataccgcttcgcgcacgcgcacccagagcctggaccccacctgtcggccgctggtgtctctggcacgaggcccaaccagtcagttcgcttccctgcccccagtggttga

SEQ ID NO: 23463 - DNA, 165 bp, Zea mays
  Peptide Sequence Number=SeqID_65242
atggtcccagggcggacgctaccactggaaggctctcgttcgcgccccctcacggagtacgagaaccagatattaaagccaaagagccggaggtatcttcggactcaagtcggcatcacagtaaacaagaataatacgaaggttgatgcagcgccgaaggtgtaa

SEQ ID NO: 23464 - DNA, 1824 bp, Zea mays
  Peptide Sequence Number=SeqID_65243
atgtctcaggaaggagccaacctgccgcaagaagtggtggggagccatgatcaggccaccgccccccacggcagcatccctgcaccggctgattccaaccccagctctgtcagcaacctggccagcgccgtcaacaacggcgggtcgtctgagtgtgccagcccagcggtgctctctgccggcgaggacaacaacgcggcgtcgtccaagaccgccagcccggcggtgctctctgccggcgaggacaacaacgcggcgtcgtccaagaccgccagcccggcggtgctccatgctgccgacgacaacaacgcggcgtccaagatcgcaggcccggcggtgctccttgccggcgaggaaaacaaggccaagctcaagctcgcgagcccggcatcgctccttgccggcgaggagaagggcaacaacgctgatgagttcaagctcgctagcccaaggatgctccatgactgcgacgacaacaatgccgggtcccatgctggcgtgcgcaactgcaacgccgcccagtccaagctcgccaacccggcggttctccatgccggcgatgacaagaagggcggatccaagatcgccggcccggaagtgccccacgccagtgtgaccagcaccaccggatccaagctcaacggcccggcggcgctccatgccggcaatgacaacgacagcggcggatccaggctcccaaaccccgcagtgctccatgccagcaaagacatggacaacaacgccgggcggcccaagttcgccagcccggtgttgctccatgctggcgaggacaacaaagccaggaccaagctcgcaatccaggcgggcggtggcggtaacgccggagccggatcgtccaggctcaccagatcggcggcgctccatgccgggaaggacaacggcgccggatccaagcccgccatccaggtggtgccacgcctccatgccggcggcaaggacaacaacgctgggtcgttcaaggctgccagaccgtcggcggccgactccggcgagagcaacgccaaggagggaaagagcaacgtagctggagaacaacgtgcccgtgaggccggcgtgggctgtggcggcgggaagggcaacgccgccgcggtggaggatgtggaccacgacttgcacatctttacggagagggagcggaggaagaagatgaagaacatgttcagcaccctacacgcgctcctcccgcagctccccgacaaggctgacaaggccaccatagtcggggaggctgtaacctacatcaagactctggaaggcaccgtccagaagctggagaagctgaagctggagcgcaagcgcgcgctggcagcgcagcagcagctgatggctggtgccggcagcaaccgcgcgtcgtccgcgcgccatcccgcaccagcgccgtcgtcaccgtcgtcgtcgtcgagggaggcgaacgtggcggacatggtccacggttggcatgcgcagcaggccgccgcgaacaaggccctggcagcggaggccggggcgggcggctcctcctctgccgccgcctcgctgccccgtggagcggtgcccttccccgcgcccgcggcggggttccagacgtggtccgggcagaacgtcgtggtgagcgtggccagcaacgaggcgtacatcaacctgcactccccgcggcagccggcgggcaccctgaccaaggcgctgttcgtgctggagaggcaccgcatcgacgtcgtcacgacgaccatctccacccaggacggcttccacatgtacggcatccatgcacgcgttcaagctggcggtgtcggagatgctgcagctgatcaacatctgagctag

SEQ ID NO: 23465 - DNA, 2517 bp, Zea mays
  Peptide Sequence Number=SeqID_65244
atgacgagcgccaataaggcgaagctccagctgcaggagagggtcccgctcccccgcacggcgtggaagctggccgacctcgccgtcctttccctgctcctggccctcctcgcccgccgtgcgtcctcgctggtgtcgtcgggcggcacggcggccgcgtgcacgtggtgctgggtcgccgcgctcatttgcgaggcgtggttcacggtggtctggctgctcaacatgaacgccaaatggaaccccgtccgcttcgtcacgcaccctgaacgcctcgccggatattgggcgggcgacgacgagctgctgccggcggtggacatgttcgtgacgacggcggacccgaagctggagccggcggtggtgacggtgaacacggtgctgtcgctgctggcgctggactaccccgcgggcaagctgtcgtgctacgtctccgacgacggctgctcggcggtgacatgctacgcgctgcgcgaggccgccgagttcgccaagctctgggtgccgttcaccaggaagcacggcgccaaggtcagggcccccttcgcgtacttctcctcctcctccggcggcggggcggcggagcgtggcggtggcggtggggccgccgacgccgacgccgagttcctgcgcgcttggacgtccatgaagaacgagtacgaggagctggtccgccggatcgagagcgccgaggagaagtctctagtccggcgcggcgacggcgcgttcgccgagttcgtgggtgctgaccgcgggaaccacccgaccataatcaaggtcctgtgggacaacgacagcagcaagagcgagagcgatgagcaggcggcaggggatggagtcccaagcctcatatacgtctcgagggagaagagccgcacgcagccccaccacttcaaggccggggccatgaacgtcctgacgagggtgtccgcggtgctgaccaacgcgccgatcatgctgaacgtggactgcgacatgttcgccaacaacccgcaggcggccctccacgccatgtgcctcctcctgggcttcgacgacgaggtccacagcggcttcgtccaggcgccgcagcggttctacggcggcctcgcggacgaccctttcgggaaccagatgcaggttatattcgagaaagttggacacggaattgccggactccaaggcatattttactgcgggacgggttgctttcaccgcaggaaagtcatgtacggcgtgccaccgggctccggcaccggcgccaccaaaggtgagtccatgaacttgactggttgtgcaatacaagctctggcagcagcagattcaccgtcctacaaggagctacagaagaagtttggcagttcgaaagaactgatcgagtcggcgaggagcatcatcacgtcgaaagaagcgccagctgcggtggcagatctaacgagccgcgtcgaagtggcgaagcaagtctctgcctgcagctacgagacgggcacgagctggggtcaggaggttggctgggtgtacgggtccatgaccgaggacgtcctgacggggcagcgcatccacgccgccggctggaggtcggcgctcctgagcccggacccaccggcgttcctcggcggcgcgcccaccggcgggcccgccagcctcacccagtacaagagatgggcgacgggcctgctggagatcgtcctcagccgccacaacccgttcctcctctccgcgtccaagcgcctccgtttccggcagtgcctcgcctaccttgtcatcgacgtgtggcccgtcagggcgcccttcgagctctgctacgcgctgctcggaccctactgcctcatcgccaaccgctccttcctgccaaaggcatcggagcccggcttcgtcgttccgctggcgctgttcctggcctacaacgcgtacaacctgggcgagtacgtggactgccggctctcggcgcgcgcctggtggaacaaccagcggatgcagcggatcacgtcgtcctccgcatggctgctcgcgttcctcaccgtggtcctcaagacggtgggcctctcggagacggtgttcgaggtgacacgcaaggagcagcagcagcagcagggctcgcccgacggcgacggcgccgacgccgacccggggcggttcaccttcgactcgtcgccggtgttcgtcccgccggcggcgctcgcgatgctgagcgtcgtcgccgtcgccgtcggagcgtggagggcggtcaccggtggcggcggcggcccgggcgtcggggagttcgtgtgctgcgcctggcttctgctctgcttctggccgttcgtgaggggcctcgtcggcggcaggggaagctacggcatcccctggagcgtcaggatcaaggctgccctgctcgtggccgcgttcgtgcacctgtccacacgcaaaattcttgctcaagattacaagtcgaggccagtggtcggcgatagaaacagcgagtattattttatcctactcccaccagttcctgagcgtcgattctgggccgcgtctgaggctgtgagccaaggataa

SEQ ID NO: 23466 - DNA, 543 bp, Zea mays
  Peptide Sequence Number=SeqID_65245
atggcggcgcggacacctagtggcagagcgccgccggtgccccggccaaacgaccaagtacatgggggcacggttcctaccctgggtcatgggttccacaccacgaccagttcgcacttcttcggttcgttggcgcggcacccactagttttgccgaacacccggatcgcacgccgggaacggaacgacggcaaggtcgagctccgcaatggctggtcccccatctcactcatcacgctgcacaccggtgcatctgcccgcctatggccaaggggaggttgcaggggtatgcttatgtgcaccgaggggttgcgcaacgattggggatgcaagggcgtccgtttcccagtgtccgtgggttccacggggttcagttccgtggccgacagagatcagtttagtccatggagcgcggatggcagaaagccgttgggggaagaagaagacccgaccacagggccccacgggtcggcgcagctgataggtgattgggctgagcggcgtggaccgagtgtggaaaatgggctggaatggggaagttga

SEQ ID NO: 23467 - DNA, 195 bp, Zea mays
  Peptide Sequence Number=SeqID_65246
atggcggcggcgccctcggcatcggaggccaaggaagccgcggcggccgcggttgcgccgcagtgtgcaagcacggtcttcggatgggatgattgggcgttccggatcagcccatttgccaaacctagtaccagattatcgcagaaagcgggtctcgaagtcaacttctggacatattgctcaatcttatactag

SEQ ID NO: 23468 - DNA, 834 bp, Zea mays
  Peptide Sequence Number=SeqID_65247
atgacccaatacgccacttccgcctgccccattccttcggcaacatgggggcatgggtggcctgcgggcaccgatatctcctctccttcctcgatgcttgtccttcgcaacgtcatggtccatgtgcctccctaccgtgtgcatgtttcccttcatgacggccagcttctctggggtacgttcgtagcctttgatctagccatgaaccctgttattcgtgaccgcatcgagctcttctaccctcctgcctccgtccaccatcaggagggtcaccacaaccaggccatttgtgttccgcaatgtcgagattgtctctatgacgatcgaggccttgccgtctccaccacccatgctcgctgtcagcatggaacagatattcagccattcaagggttccttcagccattgtggacgtcgtggggcggcgggggtcagctcggcgatatccaggaacattacaacaaatgagatggcaaataccattaggtacagttacctcaggggaccaagtggcagattcagaaatccatatgaccatgggctgcgtgagaactgttctgacttcttgctgaaggggtacaatgaggatattgagagcactgtacagacattgcaatctgacgaggaaatgggaccaattcagatgagcagcccagtctcacagaatggcgagagcattccaccacatgtgaatggcactgaccatggttccaccatttcacatgccaactcaaaatcccatcgccaaagtccatccaattgtttgggcctagggctgggcactgggcataacaacccctctagccgttatgcgcgatctcttcttcccttatga

SEQ ID NO: 23469 - DNA, 1575 bp, Zea mays
  Peptide Sequence Number=SeqID_65248
atggccgcggcggcgcgccgcgcgatccccctcgtcctgatcttcctcgtctcggcgcccttgtacgcggccgatgcgtcagcggcagcggcgggggccggggcgaactcgtcgtcgttcctgctcgcggcggagcagacgcagcggaaggacccgctcgatgggctgaggtactacaccggcgggtggaacatcagcgacgagcactactgggcccgtgagttctcctttccagatcccatcttgatcgatcgtttttttggttatcccattgttatgaatcctcgatttcgctgttggttccggcgacgcctcgcgcgcgatcgtcgatcctccagtccgtcgggcttcaccgcggcgccggtgttcgcggcggcggctgtctggttcgtcgtgttcggcattgggctgttcatcgccggctgctgcttctgctgctgcccgggcgccggcgacgcgtactcgcgcgcgtgcctgtgcgtctcgctcgtgctcctcctcgtcgccacggccgcggcagctgtcggctgcgccgtgctgtacgacgggcagggcaggttccacggcagcacggtggcgacggtggactacgtggtgcggcagtcgggcgacacggtggccaacctgcagcgcttcacgggcttcctggagaccgccaaggccgccggcgtggggcccgtcgcgctgcccgacgacgtcaaggggaggatcgacgacgtcgtgcgcaaggtgggcgcggcctccgacgagctcgccgcccgcacggccagcaacgccgccaagatccgcgccgccctggagacagtcgtggtggacgacacgtgcgtggcgatgggcgagtgggtgcagcacccgcaggcgcgcacggcgctggacgacatcctgccgtgcgtcgacacggccgcggccaaggaggcgctgaaccggagcaaggaggtgaactaccagctggtggccgtgctcaacgccgcgctcaccaacgtctccaaccgcgacttcccgccgcaggtcccgccgccgctcaactacaaccagtcgggcccgcccgtgccgctgctctgcagcccctacgcggcggacctccgcgaccgcgcgtgcgcgccgggcgaggtgcccctcgacgccaccacgccgcgggcaggcgtggcagcgatacgtgtgccgtggcgtctccgcggacgccgggtcgggggccgaggtgtgcacgtccccggggcgcgtcacgccgtccatgtacgcgcagctcaccggcgcggccgacgtcagctacgggctgtaccactacggcccccgccctggtggcgctggcggactgcaccttcgtcagggagacgttccggtccatcggcgacgaccactgcccgggcctcagccggtacagcggccaggtgttccggggcttgctcgccgcccgccgtcgccgtgctgctggcagtgctgctctgggtcgtgcactcgcgggagcgccggcggcggagcgaggccatggagatcctgtgtctggcctcgtcgccctacaagtatcctctggaggagagggcgtttctcaagagccccgcgaggccgtacatgtaa

SEQ ID NO: 23470 - DNA, 399 bp, Zea mays
  Peptide Sequence Number=SeqID_65249
atggatacgacgtcttcggctggcgacgacgtattcaacctcccgcgccgcaacgagctgcgcgtcagcggccatgccggcgtcggacgccacgtgctgcacggaccagggcgacaggcggcccccggcgccgtacgcggccgccgcgcgctcggggaagttgagcgccgcgacgtctctcgcgccgccgccgcggaggaagtagacgactgtgtcatgcgcgacggcgacggcctcgggcgtggcgtaggagccgagtcacaggcgctcccgcgagccgagcacccggatctccgacacccacttgccccaccgccgccgccgcacgcccttgtacccgctcatccgccgctccgtgtccgcctgctcgccgactggctccgcgcgcctcatcgttaa

SEQ ID NO: 23471 - DNA, 126 bp, Zea mays
  Peptide Sequence Number=SeqID_65250
atgagcagtccgaggttcctgagtgtgttgttggagacctccttgagcaaccacctggtgaaggcaagaggtgatgctgacaacatggatgacttcgaggagttccaggaatacgacgagttttag

SEQ ID NO: 23472 - DNA, 366 bp, Zea mays
  Peptide Sequence Number=SeqID_65251
atggagctcaactccaaacttgccaccttcgggaattcggggaggccgctccactataattcaccggactgtccggtgtgccaagcggagcagcggctccaagcgccaacggttgtctgcaacgctacagtgagcagtgaacagtgcaactgcgcgcgcagaagtcagagcaggcgccagaaggcgcactggacagtgaacatgaactatccggtggccccgttgtcagaagctccaacggtcggaacccaacggcctggtgacgtggctgccgcaccggacagtgttcggtggggcaccggagtgtccggtgcgccatatgacagaagccctcaccaacggccattttggtggttggggttataa

SEQ ID NO: 23473 - DNA, 216 bp, Zea mays
  Peptide Sequence Number=SeqID_65252
atgcaggcgtcagctgaagcagacgcatacttttgctttgtcgaattgttgagtggctttagagacaactattgcaagcatcttgacaatagcagcgtgggtattcgatctacactttcaaaattatcacaactcttgaagcgacatgatgaggaactatggcgtcacatggaggtcaccacaaaggtgaagacaaagatgagacaaatttattaa

SEQ ID NO: 23474 - DNA, 402 bp, Zea mays
  Peptide Sequence Number=SeqID_65253
atggactggcatgttacaaaaaataggaattcaaagaaccgtaagcaatcttcacgtaaatattttgtcacggtggaggaatggttaagagctgcagaaacagtaggaaacgatggagttcctgcttttgtgccctcagacccagtcccagatagaaaggaagagagagaaattgctgttcctgcggatgaggagcaaacagcctgtgcattatgtcaagagccatttgaagatttctacagtgatgagactgatgagtggatgtatagaggtgcggtctacatgaatgcaccagacgttctgctgaaccattttgcagatccatcatatggattttcagaatgtctgattctactggcatactcccacggtccaagaaagaatgcaattctagcagtgtaa

SEQ ID NO: 23475 - DNA, 1431 bp, Zea mays
  Peptide Sequence Number=SeqID_65254
atggcgggggccgcggcgtccccagcggcgggccacgtggtggagcggttccggtcgcgactgcgcgaggaagcgggcggcggcgagccgggcgccgccgcggtcgtgcacgtgtacgcggaggcgctccgtgagctaaccttcaactgcaagccggtcatcaccgagctcaccatcatcgcgggccagcacgccacgctcgccgccgggggaatcgccgacgccatctgcgcccgcgtcgccgaggtgccaccagatcagatattaccatctttgtatctgctagatagtattgtgaagaacataggtggggaatatgtagagcattttgcaactaggttgcgaagtgtatttgttgatgcatactacagagttcatccaaaccagtatacttcaatgaggcgcctctttcgtacctggtggccagtgttcccttcttctgtgcttcgcagcattgaggatgaccttcaattttcttcctcggagaataaccgccccaccacatcaacaaatctgcatcaaacagagtcgttatctcctaggccatctcatggcatacatgtaaatcctaaatacctggaagcacaacataagttcaagcaggccaatgtggtgcaccagccagcagctcgggacactaggcaaatgactgatgtgcaggaggatctgataaatggattagcatcgaatagttcgtgtgaacggccttcaattttccagaaatcttctttacagtatgctgatgatcctgatcaacaagagacgtttcggcctcttgctggaacaagggcagcatcaccacatctcttgagtacacatgcatctgatatgaatctagatgggccattagtcaattcaaggagaaacttgtccatatcaccacctcttgatgtgttctctaggaatgtgtcccccaagagagcactagagaggctgccaccatctcattctgtattgggacctgatcccagaaaattcactgatcgaaatggcaggttaagatggggtttggatgatggtgcacaacggcctacaatcagtatgcttgatgaagagtacaggaagcaaagtgcaagggaacttattgatgcatatgggaattgtcaaggacgagatgctgatgaacgacttcctaaagtgcagcgcctggatccaaatggtatggctagcagatctagtgcacgaaattggttaacttccgaggaagaagagtattcatgggaggatatgagcccaactttgactgatcgagtcagtagcagcatgccatcttttcctcctggaaccatgagaactggatttcctggggcaaatgcagggttactggaatctgatgttgggaggcacaatttcccaagccaagctactagattatcggttgatggttcaccgtttaatcttgaagataggttttcaactgcaagtgtatga

SEQ ID NO: 23476 - DNA, 1194 bp, Zea mays
  Peptide Sequence Number=SeqID_65255
atgcttcttcctcgaaagcttctcccatggcggcgccccgctcaggacgcccaggccctggcaggccgcctcctgcgctcctcttcatcctcctttgaccccgacgacgacgaccctccgttcacgcgggttcctaagctcccacctcgggcgccatcgacgccgccgccgaagcccaaggccctggcgggcaagatcaggcccgatgagcctgcgcactccgaccttccctttgacttccggtactcgtactcggagacagacccgacatggaggcccatcggtttccgcgagcccacccggttctcgcccttcggccccggccgcctcgaccgcccatgggacggcacagccgcggcacgcgtcggcgattatgctagtggcgacgagaggatccgggaggaggttctcggggaacctctgtcggaggaggaggtggcggcgctggtggagaggtaccggcacagtgattgctcacggcagatcaatttggggaaaggtggggtaacacacaatatgcttgatgacatccacaaccattggaaacgtgcagaggctgtgaggatcaaatgtctgggagtgccaacgctcgacatggacaacatttgcttccatctcgaggtcataatacggtactacatgcttgagtgtactaggactcgtgctcttctctcggataaaacaggcggcaaagtcgtatcccgcagcataaacatcattatactgtaccgcggtcggaactatgacccccagaaaaggcctggcgtaccattgatgctgtggaaaccgttagctcctatctatcctaagctcgtgcaaaacgttgctgaagggttgactttcgaggaaacaaaagagttgaggaacagaggattgaattctccaccacttacaaaactgactaggaacggtgtctatgttaatgttgttgataaagtgagagaagcgtttaagactgtggaagttgtccggctagattgcactcatgttgggactactgactgcaagaaaattggtgtgaagttgagggatttggttccatgcattcctatattatttaaagatgaacagattatactatggagagggaaggagttattattgcgctgcgatattgatgatggttcgggcggattgctgtctgtggaccgtggtgggggcgaggggcgaggccgctcaccagtgattcagtga

SEQ ID NO: 23477 - DNA, 681 bp, Zea mays
  Peptide Sequence Number=SeqID_65256
atgtcgctggtcatactgactccatttgctatagctatggaaggtcctcagatgtgggctgctggttggcaaaaggctgttgcagaagttggacccaatgttgtctggtggatcgctgcacagagcgtgttctatcacttatataaccaggtgtcctacatgtctctcgatcagatctctccattgacgtttagcattggcaatacaatgaaacgtatatcagtgattgtttcatctataattatcttccacacgcctgtccgccctgtcaatgcactgggagctgccattgccatccttggcacattcctgtactctcagaacactggtaatcttgtgcttcatggacttcgatgcgcgttaaactctgccaaaattgtcattctgatgcaggcaaaggcattgaaatgcacaggccgtgacatgaaccgtcgtcaagtgtacctgaataacaccgtaacgaaattcaccgatgctgtttctttatggaaagagaacggaagatgcgtggaaggtttgcagccttgggacttgggagtgtatgctcgattctgtgggagttcgtcacatgctgttccattctaccgctatctagctggctgttgctcaagagtcaagacctcaaattgcagagcgggacagtcgctcgtgggcacgcacgcgcttcggctccctgcgtga

SEQ ID NO: 23478 - DNA, 636 bp, Zea mays
  Peptide Sequence Number=SeqID_65257
atgggcacggggcatccttaccgaggggaggccgtgcctgtcacgcgggagggggggagatcgggttcggcggcggcggcggccgccgcgctcggcggatcaaggggaggcgggagcgtcgggagagggcgagacgttcggcgtctggccgtcggcgagggcgaggggaatcgaaagtcgaaactgacgcggatagacgacgggaaagggaagctgaggccggaggggagaagggacaaggacaagccactttttaattcgtacgatcctacatttcagtctcgttccctgatcccacacaacggtgccgctcctagatcgcgccccgaaaccgtcgcccccggcctcccctcccccggttctggctggccacgaactccgcccccctgcccctaccccgattatgccgccgtcgtccgatcccacccgcatacgctgctccccgcctcgaggctcgtcggaacggacgcctggatgtcgcggctgcaacccaccgtcgcgcagggaggctccgcaacccgcaacccagaggatgcacggaggccggagggcatgggggaattcttgttgaggtctatgcatcaacatcttcttcaaggtacaccgccgccatcccaatccctacccccagattga

SEQ ID NO: 23479 - DNA, 501 bp, Zea mays
  Peptide Sequence Number=SeqID_65258
atggcccactttgccccctggatccgcccctgcttggtggagttgttgtggagagagagaaaagtgttctccttgggcgattcgagtttgcagcagcagcacgccacgagcagcgacgccagagaagagggagttccaaatggcgattacaacgaagaccagacgacaaaagacatgagcgagaaatggcacccggacaaatgctcctcctcctccatcagcgtgaagcacatggaggaagccaaggagaagttccaagagatccagggcgcctattcggtactctccgacgccaataaacggctcctctacgatgtgggagtatatgatgacgaggacgacgaggatagcatgcaggggatgggggacttcattggtgagatgacccagatgatgagccaggtgcggccgatgaggcaggaaagctttgaggagctgcagcagctttttgtcgacatgttccagtctgatatgattcaggattctgcatgggactgctag

SEQ ID NO: 23480 - DNA, 219 bp, Zea mays
  Peptide Sequence Number=SeqID_65259
atggtgatcctggaccgcactccggccgcggcgcagggggccgcctgtagcccgctcccgaagtcgcctaggttttcgtgggaggtggcctcgccgccctcggaccccatcctcccgtacctcagcttgcgcggctctacctccgcgattcagggtctggttactcatgcctaccagtacccctgtgggattgaactgggatgcactagtatatgttga

SEQ ID NO: 23481 - DNA, 786 bp, Zea mays
  Peptide Sequence Number=SeqID_65260
atgattgagaaggattttttcctgatgcaattttgcagagcgctgcctcaggggtgtcggatcagtgcctactcatcttggggctccaagcggcttactgttcagcatgttcagcaccggatctccatttatgctgatgacattatcctgtttctaaggcctacaagaggtgatttgatcatcataaaggagctcttagatatctttggtcatgtcatagatctcaggacaaatatgtgcaaatcatcaaacatacagaagaatgaaccttctgtgatagatccatggtctccttctactaggaatactttactggagaaaattaatggtggcttgaggaagttttctggctattataagagtaacaaggtgtactgtggaaaggtgcctttgacttcttcgttgaatgttttaagaaacaagggcatcaagttaggtggtagaaagtatcaaatcaaaggatctactggcactggtgcttttgctaaagtatacaaagccactgttgacagtaatgcggaagaaatggttgctttgaaggatgtcataaattctcacttagtagtcggtcgatacatggatgaagttctatgcatgtattataccatagagatgctgaacatgctggaaacactgcatagtgttggcataatccatggtgatttcaaacctgacaacatccttgtttgctacccgagagtagtaatgggaatccccattttgatattcgtattcagttttcagctgaatgttgatgttctggtctcccgttcttttgagaactaa

SEQ ID NO: 23482 - DNA, 789 bp, Zea mays
  Peptide Sequence Number=SeqID_65261
atgggaggaagcggagtaggcggcggcggccgcaaggcccgcaacttcgcgaccttccgcctctttccgcgcgccggcgctgccgatcccaacgaccgcgtctttgtccgcgtcgacaacaacgactacaccgttcccgggttcgccgatgaggactccttcgacccatccctgtccgacccctccttcggcgatggcaacttcctctctgcctccggccccctcccagaacacgtccgccgcgagatcctcgagcttggcctccccgacgacggttacaactacctctcccacctccgcgagctccgtcccgccgccgtcgccgcctcatccttcgtccccagctccaccgcccgccccgagcctgtcccgctcgatgtcaaggcttatgatgcaagtagggtacgggttggtcccagcgagggtgaactggacgaggggaagacgatgtgtaaggtggctgccaagactgcaccagtgaggcgaattgagaaggctgtcgacgattgctggatgaggatgaggatgagccaaagccaagatggcggctatggactggcggcaaaatcaacaaattcactgtcaagtgggcggaggcagctatggactggcggcaaaatcaacaaattcactgtcaagtgtcaacaaattaattcactgtcagcagaactgggcactggcggcggctatgggcactgggagctgtgggcggaggtaaaagggaggagggaggaggggggccggcgaccggcgacgtacctggcggttctggagtggcggcggctatga

SEQ ID NO: 23483 - DNA, 306 bp, Zea mays
  Peptide Sequence Number=SeqID_65262
atggatatccataagccaccacacttcgatggcactaacttctcatattatagtgctagaatggcttgttgcttagaagtcgttgagataacaagcttgttagaaatgtattctcgttttaatctaatcatcaatgagctcaattctattggaattaataagctaggtgatgcggacattatgaggaagaatatctccctgataccacaacaaaaatatgggagcatcatcaccattcttcacaacatggaaggacttaagccaaatgactccgacgattgtgattggaaaatttgcggcatttga

SEQ ID NO: 23484 - DNA, 180 bp, Zea mays
  Peptide Sequence Number=SeqID_65263
atggatgcatcatccaggtccacgctaaataccctcaatctaccaccagagcagatccatgtagacttatgtcaaaggaagactcatgaacctgggagcataaagaagaacatggtcgcacctgaagaactgaagatccgggccgcaacaacgaatcgaaccgacgaagtccggatctga

SEQ ID NO: 23485 - DNA, 366 bp, Zea mays
  Peptide Sequence Number=SeqID_65264
atggccgacgatcgtgatcgcgcagaggataccctcttcgggatcgatcgtgtgtcgttggatgggatcgggcggtccagaaccctccttatctctttaaaacctctgccgtcgatctgtgatcccacggtcactgtcccgtaccccttcggatctaatctgggccgtcaacacttgatcggacgtccgtccgcgcaccgtaccccttcaccgagccataattgcaaaagagaccctggaaaatgtttgaatcaacccgcggttcacagtaacaacgagcaagccactgtggaatctgaggatcctggtgagcagcagatagaagtagctgagcaggagctcattgaaggcaagttgtgcccttga

SEQ ID NO: 23486 - DNA, 294 bp, Zea mays
  Peptide Sequence Number=SeqID_65265
atggcggcgcccaaggaggagagtcgtctggtcggccaaggagaggaggcggtgatgaccgaggcagggagggtgaagcttccacgattgcagtgctcccagggagtggttactcggaaggcttcggacaaaagaaagaccgaaggtgccggggcaagcacgattggacacccgatcacggtcacctgtcctacgtttgtcgatgatccgggcactaaggccggacagtccgggacaggcgcggacagttcggctatgaaggtcggacggtctgcagacgaccagaagcagtag

SEQ ID NO: 23487 - DNA, 312 bp, Zea mays
  Peptide Sequence Number=SeqID_65266
atggttctctcggtcacgggggaggacgattggtttcatgcggctttagggtggagggttcgtgggcgcgcacgacatttaacgtcccgctcccacggaatcggaatcgcggccaacagctctgggagaagggggaaggagactgcggcgcccgccatgcgcgggaatacagttgaagaaggagctgacaacaccggcccactggtcagtgtaacagggagaaacagcaagtgtgtgcgagacacgaatgagagactgccacgtggggccctgctgtcggcgcgtgctggatggagaagtgggccgcactag

SEQ ID NO: 23488 - DNA, 195 bp, Zea mays
  Peptide Sequence Number=SeqID_65267
atggggatctgctgcggcaaggccaaggcggcggcaggggagcccgacgacgacgagggcctgggcttcccatggatgcacgacgacctgttccacagccacctgtgggccagcgccggcgtctccgtgcacaccaagcagggatggaagggcgccaaccaggacgccatgaccgtctgccaggttgcaacttag

SEQ ID NO: 23489 - DNA, 549 bp, Zea mays
  Peptide Sequence Number=SeqID_65268
atgggtcggcgcgagacgaagcgcgaaggggggaagaagccggagggagacaggcgtaaaaggggaaacccgcggccttcgtgtttgtcccgcgcccaggtcggagttcgtcgtcttccggggctgagcccgagtccgagccctgggtcgggcgaggcggagttcgtcgtcttccagggccgagcccgagtccgagccctgggtcgggcgaggcggagtttcctatggcgcccaaggccggacttggctgctgtcagcctcactctgtcgagtggcacagcagtcggagtggcgcaggcggcgctgtcctcttgtcaggccagtcagtggagcggcgaagccacctttgcattaaatgctcctgcgatacggtcggtcggcgtggcgacttggccaaggttgcttcttggcgaagactgggcctggggcgagccgaagctttgtgctgatgggggttaccagctgagactaggagtcttgggggggacctgcctttctcggttgcgttttgttccggtgggtgcgcgccagcgcacccgccgggtgtag

SEQ ID NO: 23490 - DNA, 228 bp, Zea mays
  Peptide Sequence Number=SeqID_65269
atggccgcggcgtccgcctccgcctgcgcctgcagctcctccagccgcgtctcttctttcacgttcgccagcagtagcgagccggccgagagcagcagcgccggcggccatttctccttcggcctgaggggcagtaccacttcacgtactgaccgtggtatggggacatcacaactgaaagtttgcatgctgcacgccactagaccggcatgtgtgcctgcgcgctaa

SEQ ID NO: 23491 - DNA, 687 bp, Zea mays
  Peptide Sequence Number=SeqID_65270
atgtcgctggcaggtggaggtgatggctgtagtcggcggggtgaatgcggcggcaggctcgagttgccgcggcagcagccgcccatggtggtggatgtcggctgcaactgccgcgcgccgaggctgctcagctccctcatctcctcgctcaagtcccacgctcgcggcgtcggcaggcccaaccccaactcgtctaggcacgcctcatcgtcgtcctggtcgtcctcggccaccacggccttcacgtcatccacctccctcaccaccgccactactaccttctcgtcgctggaccaccacccgtcgtcgtgggtcccatcgacgtgcgccgcagacaccaacgcggccgtctacgtggtcgacgacgacgccgaacccgcaaggccggctcagaggcggcgccggcgtcggcagcggaggaggggcaggtgcgggagggcagcgacgtgggaggaggcggcggtggcggtggaggtggagtccgcggcgccgtacgaggacttccgcgactccatagtggcgatggtgacggagagggaaatgtacgcgtgggaggacctgaacgcactgctgcaccagtttctggcactcaactcgccgcgccaccacccgctcatcctctccgctttcgccgacctttgggctccccgcggcggccccttcggccctccgtcgccgtgcctctga

SEQ ID NO: 23492 - DNA, 2184 bp, Zea mays
  Peptide Sequence Number=SeqID_65271
atgaaggagtccgaccagctcgcgacttctttcatcacgcccttcggcatgtactgctatgtcaccatgccgttcggcttgaggaatgcgggtgcgacgtaccagcggtgcatgaaccatgtgttcggcgaacacattggccggacggtcgaggcctacgtcgacgacatcgtagtcaagacgtggaaagcctccgacctcctttccgaccttgaagtgacattacgatgtctcaaggcgaaagtcgtgaagcttaatcctgagaagtgtgtctttggggttccccgaggcatgctcttggggttcattgtctccgaacggggcatcgaggccaacttggagaagatcgcggccatcaccagcatggggcccatcaaggacttgaaaggcgtacagagagtcatgggatgtcttgcggctctgagccgcttcatctcacgcctcggcgaaagaggcctgcctctgtaccgcctcttaaggaaggccgagtgcttcacttggacccctgaggccgaggaagccctcgggaacctgaaggcgctcctcacgaacgcgcccatcttggtgccccccgctgccggagaagccctcttgatctacgtcgccgcgaccactcaggtggttagcgtcgcgattgtggttgagagacgagaagaggggcatgcattgcccgtccagcgaccagtctacttcatcagcgaggtactgtccgagaccaagatccgctacccacaaattcagaagctgatgtacgcggtgatcctgacgcggcggaagttgcgacactacttcgagtctcatccggccatcaagtcccaggtcttggcggacttcgtggctgaatgggtcgacacccagctcccaacggttccgatccaaccagaactctggaccatgtttttcgacgggtcgctgatgaagacaggagcaggcacatgcctgctcttcatctcgcccctcgagaagcacctacactacgtgctacgcctccacttcccggcgtccaacaatgtggctgagtacgaggctctagtcaacgggttgcgcatcgccatcgagctaagggtccgacgcctcgacgctcgcggtgactcacaactcgtcatcaaccaagtcatgaagaactcccactgccgcgacccgaagatggaagcctactgcgatgaggttcggtgcctggaagacaagttctacgggctcgagctcaaccacatcgcccgtcgctacaacgagactgcggacgagctggctaaaatagcctcggggcgaacaatggttcccccggacgtcttctcccgagacctgcatcaaccctccgtcaagatcgacgacacgcccgagcccgaggcaccctcggcccagcccgagaaggcacccgggggctacacgcacctgttggtcgccatcgacaaattctccaagtggatcgaggtccgacccctaaacagcatcatgtccgaacaggcggtggcgttcttcaccaacatcatccatcgttttggggtcccgaactccatcatcaccgacaacggcacccagttcaccggcagaaagttcctagacttctgcgaggatcaccacatccgggtggactgggcagccgtggctcaccccatgatgaatgggcaagtagagcgtgccaacggcatgattctacaaggactcaagcctcggatctacaacgacctcaacaagttcggcaagcgatggatgaaggaattcccctcggtggtctggagtctgaggacaacgctgagccgagccacaggctttacgccgttctttctagtctatggggtcgaggccatcttgcccacagacttagaatacggttccccgaggacgagggcctacgccgaccaaagcaaccaagctagtcgagaagactcgctggaccagctggaagaggctcgggacatggccttactacactcggcgcagtaccagcagtccctgcgacgctaccacgcccgaggggtccggtcccgagacctccaggtgggcgacctggtgcttcggctgcgacaggacgcccgagggcggcacaagctcacacctccctgggaagggccgttcgtcatcgccaaagttctgaagcccggaacgtacaagctggccaacagtcaaggcgaggtctacaacaacgcttggaacatccaacagctatgtcgcttctacccttaa

SEQ ID NO: 23493 - DNA, 132 bp, Zea mays
  Peptide Sequence Number=SeqID_65272
atggggattgaaagtcgcctagaggagggattagaaacaaataataatgaatacggagtgcggaagagagttcttgctatgagttgctcaatcaatgtagataactttgggagcttactcaaaggattgtga

SEQ ID NO: 23494 - DNA, 231 bp, Zea mays
  Peptide Sequence Number=SeqID_65273
atgcccatcgccagttcaccataccaagcccaaaggagacagcagacagggacaacactacatcaggattcaagacatacacatcacacaaccactaagtcatcacccacaccggtagcacctgttgctaacgaaacctcggagaggaccatcgatgacttggggaagtccaagatgtcaatgaggataagcaagggcgtccacaacaagaaggatactaagtatgactaa

SEQ ID NO: 23495 - DNA, 714 bp, Zea mays
  Peptide Sequence Number=SeqID_65274
atggcgggaaggagggaggtaaccacagcgttcgcgccatctcccgccatctcccacactcacgtgctagcccccgcgtccccgcgctgcacgccgccagcctgcatccggagaaacggccgattcggccgcatcgggagagccaggatcgcggctaggactgcccccgcccgaacagcccgctcgcccaccggtaccgctccacgaatcctgtcacgtgacgtcgtccatgccgtgccacacgcccgcgaatcccgccgcgacccgcacgcccgcgcgccgtccctacgcgtcgtccatgccgcaccgcacgcccgcaacggctgccttcctatgcgcttgggaaacgcccgcacagcccggcacgacccgtgcacccggctacctattacggcgccttcccattttgcgtgccctcaacagcgtcgatgtcccgccctcgaccgtgatctccgcagccatgtcgagatccccgtccgccaccgccttcgtgtactgtgtgtgagcaccgatggcatgcaaacgcataggacgggagccggtgaagtggtggtgatggaggatgacgatggacgccaaatgtggtgccctaccgacgagtgccagtgcctgattgcgttcgtccctaagtcatcggtcgattggaaccagaggagcttcgtcgggtggctatgtgaggattgcatcgccattctctggctcgttagtgaataa

SEQ ID NO: 23496 - DNA, 132 bp, Zea mays
  Peptide Sequence Number=SeqID_65275
atggaggccccctgcgcctgctgtggcagcctcaaggtgaaactggatgaacgtatgaagctagacttgttgcgatttatagacatattacttcacaatgttaaggatttgtacttgttcatgatatcttga

SEQ ID NO: 23497 - DNA, 537 bp, Zea mays
  Peptide Sequence Number=SeqID_65276
atgggcaacaccgtggcgccgcgcatgtgccgcaaggaggccagcgcggccgccgcgacggccagggcccagcggacgcgtcccaagagcctcgtcgccgaggtgtcggcggcggtggctccagacgttgagccgaggcgctcagccgcagccgccgccgccgcctccgtcacgccgcggaagcgtcgggacgacgtcgagctcgacgaaacgacgagggcggggccggggcgctcgcgtgctcgtgcggggggagtccgagtctcgtgggcgggcggcgtcgggtccgacgacgacgacgccgtcagaaaggcaaaggcctcggtcgtcgtcacggtgaaggtcgtgctgaagaggaaggacgcggaggcgctggtggcgaggctgaacgcgcagggcgcgcgggagcgcaaggcccggatggaggagctcaagggcgagctccgtgccgaggactgcgtcggcggcggcgccagcacgtcgccgtgccgggacccgtggaagcccaggctcgctccgataaaggagaactactga

SEQ ID NO: 23498 - DNA, 330 bp, Zea mays
  Peptide Sequence Number=SeqID_65277
atgtattctgaaaggtcccttgtgggttttggtgttttggatgacaacacaattaaagagacaattgatcgaactgaggatgaaggcaagaaggacttcaaggaaccgagtgcatgggagaatgtcaagaagactgaggtacctaaagccaagggtgaagaagatggcttgcaagaagtcaaggttgatcaagctaagaagagtcctactgcattgaagaccatgatatatgaacatgacttacaaccattgaggaaatgcatatggttaaatggtgcaagtcataaggctcaagatccagatcaagcagagacatggtcgcaagaatga

SEQ ID NO: 23499 - DNA, 216 bp, Zea mays
  Peptide Sequence Number=SeqID_65278
atggcgcgtctgcggcggtggctggcaggcggcgacctgcggcggagggaacgtgtgatagctacttggggtagtagaaggaagggagaagcagggaacagagagttacatatactcactccacttaaggctggctccaacaggaaacagctaaattcggcagccatttgccactttggctgccgcatggactttagctgtccagccatctgttga

SEQ ID NO: 23500 - DNA, 729 bp, Zea mays
  Peptide Sequence Number=SeqID_65279
atgccggaccgggcggaatcaagcccggcgtcatcgagggaggcttcatcctcaccgccgctgtcagcaactgagacggctgccaggcgcagcgcatcgggatgcgggaagcgagcccgtgcccgtgacggcgagaagcacccgtcgtaccgcggcgttcggatgcgggcgtgggggaagtgggtgtcggagatccgggagccgcgcaagaagtcgcgcatctggctgggcacgttcccgacccccgagatggcagcgcgcgcgcacgacgccgcggcgctagtggtcaagggccctgccgccgtcctgaacttcccggagatggccgcggcgctccctcgcccggccaccgccgcgccccgtgacgtccaggctgccgcagtccgcgccgctgccatggagccatctatgatgcttggccccactgccccattgcccagatcggcgcttgccccggtgaaggggcaggtgcatgacgacgagctcgaggcgatcgtcgagctcccgccgctcgacgaggacttctccgagctgctcgtcccgctcggcaccgcgtctttctcgttccacgacgctacgcaagcgtcttggcgcgacccggagtggatcgaccacgacgctggctatatggcggcggcgcgcgatgccgacgagctgttcggattcgggccggacggcgatcacggatgggcgcagccgtttggtagtaccttcctatggaacatgtaa

SEQ ID NO: 23501 - DNA, 264 bp, Zea mays
  Peptide Sequence Number=SeqID_65280
atgcatatatcttactcattgcattcactagattacaatcttgctgacggagagtacgtgctcatccccgagcatggagctgtccaagaggaggaccaggagcaagctcccgagataaccatcgaggatctccccacagccccagcaattgaaggcaagccccgctatggtgggtacaagtgcagtcactacacggcggtagccagggtcagtggagcagtgtatgccaaagcggtacgcttcagaatatggttgatggtgtga

SEQ ID NO: 23502 - DNA, 948 bp, Zea mays
  Peptide Sequence Number=SeqID_65281
atgtccatagaagagaggaagataagtatgataagcaagagcactgcactaaatccaaatgcagaggaatttgttccttcgtcccttagatctttcagtgattcctccaagaaatcagatgcaactatgattgtctcagggtcatctaaagaatctagcacagacaagccagaatccattttacgaagtaactctgatgaagaagcacatcagtactggcagcaacagctccctgacgacatcacccctgatttcaaagtcctgggacaagacgaaagtcctggacctgacagtctatcactcacaggcctgtcgattaatgatggcattgacacatcaatattttctccaaaccagacactgggcgtgcagcaccatgcttcaccttttatcagggacaaactgaatacacgcccaaaaattaacttgtctggcccaacttatatggacgaacggtcccaagccgcaattttgagtccaactgcaggttccatgagtccaaatgctgctccatgggtgaagaatctaaggaatgggggacattataacacaagcagaagggatgccactgccagtcactacaatggagattctagcattggtatggtgatggcgcagcttaagcacgactatggatatcatgagtcagctggagatgatattgtttcaccttcagctggacgtgaacatatatccctcgatgttcctagaggaaggtataagacaactagtttgcctgttcctggtcttggttcaagcagaggttctcagggggtcctcggtgtggaccagacacagtatgcatacatcgccagctttgaggcatctgtcggcactggctgtgggcagggtcggcctggactagatctgcaacatcctgagggctggggacagggcaaacgggcggtgtggggttatgacggcaacgagcagtgtggggtcttgtga

SEQ ID NO: 23503 - DNA, 828 bp, Zea mays
  Peptide Sequence Number=SeqID_65282
atggaccaaaggcaaccgcagagcccgcacagccagcgcccgccgtaccacgcgcgcacgccggacgcaaacgccggcgtgcactcctccgtgagcccgcagcaggcgcacacctcccactcctccgcctcggccacggccacgacggccggcgccacctcctgctcggccgccacggacatcggggagaagtccagagagagattccgccgccgcagtacggctgaaggcaagggaataagaacttctcttccacgaattattcgaatccgtcaaggcaagggcggcggcgaggaggtgttactcggcggtggtgagggcatgggggaggggcggtggatggagcggcggctcgtccatggtggaggtctggaggaggtggagagcagggcagcggagctgcgattggtggagctgatcgctctggcctctgggtgtgcggcttttgtattcgaggaaacggggggtcccttgcccgcttcccttctccaacaccaacaacaatccaaggctccaagcgtgaagagtccagtgggccaattacagagaatgaaaagctgcttaagagttaagactgagtattcaaccatcgctggtgagtccctattatgtagccctataaaagaagatggggacaagcgcgccaagtttaacaaggttcgcaccactgtctacgactcctcacccgaaacactggagcgatctagagagaggttgtcagcaatgggaacttcaccattggtcttcactgacaccaatgtcgcttccctaactatcgttgtcgtagcacagagctttaccgacgaacataatggccaccagatctaa

SEQ ID NO: 23504 - DNA, 450 bp, Zea mays
  Peptide Sequence Number=SeqID_65283
atgggggttctcaactggatgcagaccaagctccatggatcacatcgcagcaggaggaggcctgcagaattcagcgcaagcacagctcggcctgctgacgcctccggtggagttcctcagacagaaaacaacctcgacgacggctggaccacggcgatgctgtcgattgggacgttcggcatgggggaagggaacacaacgaagagctgtgggcatctggacgagctcagcaggctgcaggaggagctcaaatcgctcgccacagccaatgaactgggcaggattgtctggggtttgctgctcaagaaggcgcaccctgaaaacccagcgttctctgatactgcagcaagggatgatcaggtggtccggatggctccgaaaggcaaggtacaggccgatgacaaaggcggcaaatggatcagaacagattcacagtgtaagttcatttga

SEQ ID NO: 23505 - DNA, 2819 bp, Zea mays
  Peptide Sequence Number=SeqID_65284
atggccgcgccatgcagggacctcacgggccttcgccgggggcttgccgcggcgaggctggcgccggggcgccggggcgcgaacaagctctgcctcgcgccgttccaccaccgcgcgccgccgccgcagcagcagcaggggaggaggaggcagcggcaggggctcaaggtggtggctgccatcagcgaggacctgccgaggctcgcggcgcccgggaccgggaagggcgcgccggagggcaggcggccggagaaggtgctggtgcgggccgcgctcacggtgcgccgcaagcacaaggaggacctcaaggaggcgctggccggccacctcgacgcgctatgggacatggttggccggagcgtcgcgctcgagctcattagcaccaagatccaccccaggaccaagaagccgttgcacagcggtcaggcatcgatcaaagactggtgccagaagaggggcgtcaagggagagcacgtcgtgtacacggctgagttcatggtggattcagacttcggcgagcctggcgccatcaccgtggccaaccggcaccatcgggagttctttctggaaagcatcgtcgtcgagggtgggctgccgtgtggtccggtgcacttcgcctgcaactcctgggtgcagtccaccagggaactgccgggaaagagggtgttcttcagtaacaagccgtacttaccatctgaaacaccacccgggcttagagaactacgggataaggaattgaaggaccttagaggagatggcacaggagtacggaagctatctgacagaatctatgattatgcaacatacaatgatttggggaatccagatcgggggaaagagttcatcaggccaatccttggaggtgacaacatcccttatccacggcgatgccgaactggtcgcccaccaactgatacaaacatgctagctgagagcagagtagagaaacctcacaggatatatgtacctcgggatgaggcgtttgaggagctgaagcaaggtgccttctcatcagggaggctgcgggcagtacttcatacgcttatcccatcgatgattgcaaccatctcagctgagacccacagcttccaaggctttcaccacgttgataatctatacaaggaaggcctcaggctgaagttgggtctccaggagcacctgttccagaaaataccccttgttcagaagattcaggaatcaagtgaggggatgcttcgctatgatacacctagaattctttccaaggacaagtttgcatggctccgtgacgatgagtttgctcgacagactgtggcaggaataaacccagttagcatcaccaggctcacggttttcccaccagtaagcaagatggatcctgcaatctatggcccgccagaatcatcgatcacagaagcgcacatcactggacagctcaatggactcacggtacaacaggcggtggacgaggcaaagctgttcatattggactaccatgatgtatatatgccattcctggaccggatcaatgcaatagaggggcggaaggcgtatgcaacccggacaatcttgtttcttaccaaagctggcacattgaaaccgattgctattgaacttagccttcctccgagcaaggcaggcgagccccggccaagcaaggtccttactcctcccgctgatgctacctccaattggctatggatgcttgccaaagctcatgtcagctccaacgacgccggtgttcaccagctcgttaatcactggctgaggacacatgctgtaatggagccgttcatattggcagcgcatcggcgtatgagcgcaatgcacccagtcttcaagctcctgcacccccacatgcggtacacgctggagatcaatgcgctagcacggcagagcctgatcagcgcggacggtgtcatcgagtcgtgcttcacccctggtcccgtctccttcgagatcagcgctgcatactaccgcgaccactggcggttcgacctagagggcctcccttctgacctcgtccgcaggcattcatgccgttgccccatccctgtctgtagttgcttgtttttgccactgagcactgacatttcttcatctcttgtcatcaggagagtggccgtggaggatgcgtcgcagcctcatggcatcagactcctcatcgaggactacccttacgcaaacgacgggctcctgctgtggtcggccattcgcagctgggtggagtcgtatgtgcagctctactacccggacgccggcaccgttcagtccgacgacgagctccaagggtggtaccacgaaacggtccacgtcgggcacgccgacatccggcacgcgccctggtggccctcgctctccacgccgggggacctcgcgtccatcctgaccacgctcgtctggctcgcgtcggcgcagcacgcggcgctcaacttcgggcagtacccgctgggcgggtacgtcccgaaccgcccgccgctgatgcgccggctgctaccggacccggagcgcgacgccgccgagtacgcgacgttcatggcggacccgcaccggttcttcctgaacgcgatgcccggggtgctggaggccaccaagttcatggctgtggtggacacgctgtcgacgcactcccccgacgaggagtacctcggcgaggagcgcgacgagccgtggacgggcgacgctgccgccgtggcggcgcacgacatgttcacggccgacgtgcgccgcgccgaggaagccatcgatagtcgaaacgcggaccagcgcaggaagaaccggtgcggcgccggggtgctgccgtacgagctgctggcgcccagctcgccgccgggggtcac

SEQ ID NO: 23506 - DNA, 138 bp, Zea mays
  Peptide Sequence Number=SeqID_65285
atggcgatctggccaaggttgcttctccgcgaagcctgggcttcgggcgtgccgaagatgctggacaacggacagactggcatccgaacagggaggatagacacatctttactagggtctctgatggcaaatacttag

SEQ ID NO: 23507 - DNA, 204 bp, Zea mays
  Peptide Sequence Number=SeqID_65286
atggggtccctcccgggagcgagatccaggccgccgccggcgacttccgccgcctctgcgtacgcgcggaccgtccggcccccagggcgcggaccgtccggccgtcaggcgtcaacaatggtctacacccccttgcccctaaacctgaagacaactccttattctgttggtgggaacaagctgaacaaagaacagagggtctga

SEQ ID NO: 23508 - DNA, 447 bp, Zea mays
  Peptide Sequence Number=SeqID_65287
atggcgttgttgaagaagtccccaaagtggcggcccggtggcgaagaacgcgactcccgcgagctctactctctctctgccctctctgtaatcccgacgagcacacgaccaggcggtcccgcggtcagagcgcggaggacgttctatttatactccaaacgcgagaccgaggacccgaccaaatcccatgacccgccaaagtcgcggacggagttgctgcgcgattatggaggtccgacgttggctctggtttgttacgacgcgcccgagtctttcgcggtatcgagtagaagaagccgcactgtgttgggcccccaccggccagaggctcaatacggtggaggagggtggccggaattcccacccaacggcgcccgattcttctgccgtccagagcgcatcggcgcggcccgttgcgagggaagaggaacaggagcgagtgactga

SEQ ID NO: 23509 - DNA, 306 bp, Zea mays
  Peptide Sequence Number=SeqID_65288
atgggcctggccattacggcggcgccctgttcccccaccgcagagctcgccatccgagcccccgataaacggcacagaaccttcttcgccccaactccctgtctaggtcgtctcctagccatcttctaccgactgcacgagactgcacgccttccagcggcaagcccggcggcgccgcctgagtcttacggcgcagaccatggccggacccgcccactccgcacatcgagccccaataccgaaaaccgaatagcactacccgaagcaggcatccatgcgaacaacagggtggactccataccgtga

SEQ ID NO: 23510 - DNA, 615 bp, Zea mays
  Peptide Sequence Number=SeqID_65289
atggcgccccgcacgctctatgacgacagcgactctcagccccctttacggaagcaagaggacgtcagcaaggactcgacagccccgacagctgtccttccgccaggctccagcactcctccgacgaccacgacaccacacgaaccgggtgccaagacctctccggctgccacgatggcatggatggactcgaaaagggaggtcggtcgagcaggaaactgcgcgatcgtcaagctatgcggacggaactccggctgggggacgcggacggtgagcacgagctccggcgaggctccacggacggcggcgacagctttaacggcgaggagagggagagagagatggtggcgagctcaggtcctcgacgcgggtcgcagggtggagctgggcggcttgggtcgtgcaggcgctagcggggcagggggcgctgctcctggtgggcgagtgcagagggcgggggcgcctggggcgggtgtgcgcagctggctgtggaaagaaaggcagggaaagagagaggaaagaaaagggtgggcgggcgggctgcgcagggaaagggagtggcggctaggtcagggtgctgggcctaatgggtcgtttagggttagggttagttaa

SEQ ID NO: 23511 - DNA, 306 bp, Zea mays
  Peptide Sequence Number=SeqID_65290
atggctgacggccaggaatcaaggaccgcatcgcggaaggtaagaggaggtttggccttctggagcctgctccttccagaatccggcgagggtgatgaggtcagactggagtccttccaccgctcaaaatggaagcggccacaagaaccaaaggggccaggctcagagaacaaaggggaggtggaaaccaacgtcgagagaaaagggggccaccgcaaaaggcaatcaaacaggacctcagacagagtcaacgcatacggtggtctaagacgagacgatgcgggtgatactatctaccatggctag

SEQ ID NO: 23512 - DNA, 417 bp, Zea mays
  Peptide Sequence Number=SeqID_65291
atgggagaccacatctcaggtcgcgtgaggagggcaatctgcgggcaggttcactcagtacattacaatttacaaccctaccaagtatcaaaccatactgggctggttggtcctgcacagctgcacggcctggtcaccagcattcctgcgtggccactggccagcgtgggcagcgtggctacggcctgcggccaggagcgtgggcgcgtcgcgcgtgggctactggcctggcggtcgggcgccgtgcggccaggcgaagccgcggtccgcggaggcaaccaggcgcgcgggcaagacgcaggcagcccgcagccccttgctcgtcgcctcgtcggtcgtcgggctgctcagtgctcgccgtcgtcgcggactgcctctgctcctggtccactcggaggcagcggctggcctccctag

SEQ ID NO: 23513 - DNA, 2673 bp, Zea mays
  Peptide Sequence Number=SeqID_65292
atgggcaatgtcagcctccaaaaaattgggagagatatagttttgcaaactacagaaaaaattgagggaaacatgcagatgcagtcaatcaagaatgttgttcaagacatacttaataagtatagttgcttaatagtgttagatagcttgtggggaaaagatgaagaagtgaatgagctgaagcagatgttgcttacaggtagaaagactgaaagcaaggtcatagtgaccactcacagcagtaaagtagcagagctgatatccactgtgccaccatacaaactgtctttgttgtcagaagatgattgttcagctatattctgtcaaagggcaattgcaggtcagtctatcagtgacccacttttcagggaatatggagaagaaattgttaggagatgtgaaggcatgcccttggtagccaattttcttggatctgtggtgaatgctcaaagacagaggcgtgagatatggaaagctgcaagggataaagacatgtggaagatagaggaagactaccctgaaaacaaaattgtgccaatgtttccatctttcaagatagtatactacagtatgccccatgagctaaggttatgctttgtctactgttcaatctttcctaaaggatatgtcatagataagaaaaaacttattcagcaatggattgcacttgacatgattgaatccaaacatggaaccttgccgcttgatgttactgctgagaaatacattgatgaacttaaagatatttatctccttcaagttttagagaggcatcagattgatgcagaaatatccaatacttctgaagaaaagctctacatgaataatttggcacatgatcttgctaggtcagttgctggtgaagatatccttgtgatcttagatgctgagaatgtacgctgcaatagaaattatgattaccgttatgcacaagtgtcaacttctagcttacaatcaatagatagcaaggcttggccttccaaggcaaggtcactagttttcaagtcaagtgcagaattgcagcatgtcagcgaagttctttcagtgaacaaatatttgcgtgttttggatatcagtgggtgttctgtgaaggagatgcccgctccaatttttcagatgaaacaactgagatatcttgatgcttcaacattgtccattgcagatctgcctccccaaattagtggctttcctaagctacagacactggatctgtctgatactgaagtaactgagctaccagccttcattgccaacttaaagagactgaattatttgaatctccaaggttgcaagaaacttaagcagttgaataacctagatttgctgcatgagttacattacctaaacttgtcacgttgcctggaagttagaagttttcccgcatctctgaaaaatcttaggaaacttcgttttctgaacctttcgcaatgttctaagcttccaacattacctgatgaattattgcaatcattctctagtttttcttccattgtggatttaaacttaagtggatttgagttccaaatgctacctgacttttttggcaacatttgttcacttcagtttttgagtctgtcaaaatgctcaaaacttgagctactcccccaatcatttggtcagcttgcatatttgaaaggtctggacctttcattttgttctgatcttaaactcccagagtcctttaagtacctttcttctcttcagtttctaaatctatcacactgccataatgtagaatatctgccatcttttgacaaacttagtaatttggagtatcttaatttatcacaatgtgctggactcaaagcattacctaagtcactttcaaaccaaaaaaatctccaaattgaggtttttgggtgccaggattgcatagtgcagtcatgttatttaagcccacagtcccatacatgctcacaagaagtcaaggaagttggatcaagtagtgatatctcagataccattctaaaggagtctgcaaacagagatgtggcattaggaataagttttccagaaattgatgaagttggttatccacataataatctgaaacaaaaattgacattatcttatcatatggatggacataaaagtgaagagcctaatttcattaccaagcagaactcaactacagagacggtacaactaacccccaggcaccagttcccatcatctacatgtcgtatttcttcgattgcatcaagttctagtgcactatttgcatctggctcctcttcagatgtctcgataacttacaatccagtgtccaatgacaaagcaggagattgcatatcattattaagaagaatagaaaaaaggtcccaacagggaccagtacagaacaaaaggccgttcaaggctatacataaaaatacccatatcagttataacaaacttctactgctagaccccccactggatctctgtaatgggggcagccgaaggaaactttggctcaacagggttatggatgccttagggtttgaatactcgaaccatgaagatccttcgaccaatactggggctggggaaaaaagaaaaggggctacgaaaaatgaggccgaagtgttgtcttcgggccaggtgaagaagaaggccaaaactcttgttcagaaggatgcagtcgcgaaaaaggcttcggctccaacgaaaaatgcagttgctgaagaatag

SEQ ID NO: 23514 - DNA, 807 bp, Zea mays
  Peptide Sequence Number=SeqID_65293
atgggtgtgcccaaggggtgtcttgacggcttgaattgcttattgaattcttgcgactgttcgacgagtggggtaagaagtggacggtcactcctggcccctataaatagcctgcttgcgccgaccgttctcttcactcgttctctgatcatctgctttcttcttctttgttttccctgcctttccaaccaaccatgggtagaggtaggaggggtagtggccggccgcgccgacggcaagcgcaagcgcgctccgagccctccctcagaggacttcggcgacttcgagtactcggaggagacctcctccgaggctgatcgttcgcctgcttctcccctggtgtcatccaaggactcggatgactccatggggctgtccactgtggcccggcgtacaggcgctccatcgagtgcactgggctcggtggctcggatgagtcgggggtctcctcggacgaggcgaactcctccaaggagtggagcggaagcgatggtgacgacgagggcgacggcagcagcagcgacgacgacgacaggagtgacggcagcaagggcgacggcggcgagggcgacggcagcaacggcgacgaagggcaacgacgatggcagcaacggcgacggcgagggcgacggtgacggcggtagtggcggcagcagcaagggcgatggtgtgggggacagatattccctgggtccactagaaggcgagaagtcctctcacgaggcctcaggccagttaccccgcaaggtcatcccttcgtgggctgggctagagctactagcggaatgggccgacctaagaaggtaa

SEQ ID NO: 23515 - DNA, 1173 bp, Zea mays
  Peptide Sequence Number=SeqID_65294
atggagccaaagcttgtagcttcatcttcatcagctgctgtctctctgctgctgctcctgctgccctctcctcttcgtctccgggagcatctatcaggaaacaatgctgtcagcgccaacaacttccaccccatctttctggtagctgggatgagctgcagcgacctggaggcacgtctcaccgaggagtaccggccgtcggtgccgcattgcggcgccatgaagggcaagcggtggttcggtctgtggaagaacagttcggagctgctgtctcgtgactacatgcagtgcttcgaggagcagatgagcctcgtctacgaccctgacatcaacgagtaccggaacctcgccggcgtcgagacacgagtgcccaacttcggctccacaagagccttcagctacaagaaccctctcaagtcactgacgtccgaggtgtactcccgctacttcaaggagctgatggagctggtcgaggccgcgagcgagaggacccggaagaaggccgtcatcctcggccacagcttcggcggcatggtcgcgctcgagttcgtccggaacactccgccggcgtggcggcgcgagcacatcgagcgcctcgtcctggtcgcgccgacgctccccggcgggttcctggagccggtgcgcaacttcgcgtccgggacggacatcctctacgtgccagcgacgacgccgctggccacgcgagccatgtggaggagcttcgagagcgccatcgtgaacttcccgtcgccggccgtgttcgggcgcctgcaggcgccgctcgtggtcaccagggagcggaactactccgcgtccgcgcaagacatggagcgcttcctcgccgccgtcggctccggcgaggccgcggagcccttcaggagacgggccgtccccaagatgagcagcttcgcggcgccgatggtgcccatgacgtacatcagcggggtcggcaacaggacgccgctgcggctggtgttctggggcgacgacatcgacgcggccccggaggcggtggcgtacggggacggagatggcaagatcaatttgatcagcgtcttggcgttcgagaaggagatgcgtcggcagccggagcagaagaagcagttcaaatccatcaagatcaataaggcccagcattctacgatcgtcacggatgattttgccctgcacagg

SEQ ID NO: 23516 - DNA, 1287 bp, Zea mays
  Peptide Sequence Number=SeqID_65295
atggctagttctctacttcagcagctgctgtctctgctgctgctcctgctgccctctcctcttcgtctccgggagcatctatcaggaaaccatcctgtcagcgccaacaacttccaccccatctttctggtagctgggatgagctgcagcgacctggaggcacgcctcaccgaggagtaccggccgtcggtgccgcactgcggcgccatgaaggggaaggggtggttcggtctgtggaagaacagttcggagctgctgtctcgtgactacatgcagtgcttcgaggagcagatgagcctcgtctacgaccctgacatcaacgagtaccggaacctcgccggcgtcgagacgcgagtgcccaacttcggctccacaagagccttcagctacaagaaccctctcaagtcagactggtgcctcggaaagctgagagccgcactggaagacatgggataccgagacggagacaccatgttcggagcccctacgacttccgctacgcgccgccgtcccccgggcccagacgtccgaggtgtactcccgctacttcaaggagctgttggagctggtcgaggccgcgagcgagaggacccggaagaaggccgtcatcctcggccacagcttcggcggtatggtcgcgctcgagttcatccggaacactccgccggcgtggcggcgcgagcacatcgagcgcctcgtcctggtcgcgccgacgctccccggcgggttcctggagccggtgcgcaacttcgcgtccgggacggacatccactacgtgccagcgacgacgccgctggccacgcgagccatgtggaggagcttcgagagcgccatcgtgaacttcccgtcgccggccgtgttcgggcgcctgcaggcgccgctcgtgatcaccagggagcggaactactccgcgtccgcgcaagacatggagcgcttcctcgccgccgtcggctccggcgaggctgcggagcccttcaggagacgggccgtccccaagatgagcagcttcgcggcgcccgatggacgccgctgcggctggtgttctggggcgacgacttcgacgcgggcccggaggcggtggcgtacggggacggagatggcaagatcaattcgatcagcggcttggcgttcgagaaggagatgcgtcggcagccggagcagaagaagcagttcaaatccatcaagatcaataaggcccagcattctacgatcgtcacggatgattttgccctgcacagggtcattcaagaaatcgttgaggccaataatcagaagattccatcctaa

SEQ ID NO: 23517 - DNA, 234 bp, Zea mays
  Peptide Sequence Number=SeqID_65296
atggaggagctgacggagggagtgaacaatctggcgattacggagccgcaaatgaagaacaaaatccaggtatccaacaccaagaagccactatttttctatgtcaacctcgccaagaggtacatgcagcagcacgaggaggtggagctctcgacccttggcatgagtaaaactcttttgctcttcatgattcttttaccattctacacgtgttataccgttatgttgtgttga

SEQ ID NO: 23518 - DNA, 201 bp, Zea mays
  Peptide Sequence Number=SeqID_65297
atgggctcagaagctggtcgaccattggaggcttcgtcctcatgtggcatcggacagtccggtatcacaccggacagtccggtgccccctttgaccgttgttctgacttcttccacgatcactgttctgcattgttcctgtcagagtcgaccgttgcgcgcaggtaccttcggactcaggataaaagcatacacgatgtga

SEQ ID NO: 23519 - DNA, 651 bp, Zea mays
  Peptide Sequence Number=SeqID_65298
atgggcgacgatcatgaatttgaagctgtaggcaagaggcatgtggatggcggtgaacatcgacaccacaactacatcggcgatcgcaatgctctggaggccatcgccctcggggtacctccagagatgcaaggggtgatcgcgagcaaggcgaccaccaagatcgcttgggacacactcaagaaaacgcaccttggagttgatcaggaggctcaaggcggcggaagacggtacgatctcggtggcagtagtggtgtcggagcattagctggcctgaacctgaccgaggataagttggtagcacgttttatgtcgcgacttaaactcttcgatagtggaagctcgagcggcagttggacgtcgccggacatgagttatgggagtggtggcaggcgtagcagagagccagagacgatggcagctcgaggccaccacagaacatcgacgacaatggaaaggggaggcgaattgctgtcgatgataagtattgtggaaaagctggacattaataaggcttttgatttcgtttcatggccttttttgttagaggttctcaggtatctcaggtttggatcagtttggtgcaatatcatagaaatgatgttacactcttcatcaggcaagggtgctagtaaatggagagccaggtga

SEQ ID NO: 23520 - DNA, 336 bp, Zea mays
  Peptide Sequence Number=SeqID_65299
atggcgcgccggcgctgcgaggaagacgaagaaacggcgtgggctgtgttcttcgctggagcagcgaaaagagccgagaccgagaccgaggggttggtcgtacacccgagcccccaggggaggggatgcccataccgtagttgttataacagggctttggtatgggtaaaaagcctgcttatgggatgcatcagcgtccctgtgctgggtgacgttgggagtccttcgctgcggatatcgaggtgtgccttgtcttctttgcctgagaccggctcgggcgagacggatagggattttgtagaacgaggtgacttcgggcgaagcggaaatgggtga

SEQ ID NO: 23521 - DNA, 765 bp, Zea mays
  Peptide Sequence Number=SeqID_65300
atggccgcggttgatgcgacaaccaaggagatggatgcactgcatgttggacaaaatgatgaaacaaaagagactctgattaaagaagacaaagctgcaaacagcaatcattctgttgttgcagctcagtccttgctaccagaggacgacgatgatgatgaagcacaagctgatggtccatctcaagatggagcagcagcagctgtaaagaagaaaaagaagaaaaacaaatccaaaaagaagaagggcccccttcaacagacagatcctccatcaatacctgttgatgagcttttcccctcaggagaatttccagagggcgaaatccaacaatacaaggatgaaacaactagtgaggaaaagagagacctggaacgactgcataagccaatatacaactctgttcgccaagcagcagaagttcatagacaggtgcggaaatatatgaggagcatcataaaacctggaatgttaatggttgatctatgtgagacattggaaaacatggtccggaaacttatcaaggagaatggactgcaagctggcattgcttttccgactggatgctccttgaattgggttgcagctcactggactccaaatgcgggcgacaaaactgtgctacaatatgatgatgtgatgaagcttgattttggaacacatatagatggttacattgttgattgtgcatttactgttgcattcaatcctatgtttgatccattgcttcaagcaacgagagatgccacaaatactggaatcaag

SEQ ID NO: 23522 - DNA, 699 bp, Zea mays
  Peptide Sequence Number=SeqID_65301
atggaggccatccccgtgtcttctagggacaaggcagaggcaagcgatactacatcgggcgtggcatcgcccatagtctccgacctcttgcgcaccgtccttgatacccctgaagctacgtcgagctcggggacaggggtcaccgaggaggtcgacccctcggagccactcaaggggtcgttcaaggtgtacatcatccagcctcctctcttagggggtagcggtgacctcgttcgtgtcgcgttggaccccttgctatggggagggccgaccctgatgtggatgtccaccgagggcaactcatactttgtccttgatgacgccgaggagcgggatatgtgggcggagctaagggcgttgatccagttggcgctgaggagcgtcaaggtggcggacttgatgtcccgatgcatgggactgaaggaagaggccgcgaccgagcgcacgaaggtgcctctgctcgcggatgaagtccgccgcctgaaaacagaggcggacctgcggcaggaggagatgcggcagctgaagggaaaccttcaagcagtggcgacggagcgggacgagtctcagcgtatggttgccgaagcttccctccatgtcgactccctctccaagcatctggaggccgcgcggtctgagggccaagccttaagggccccgatgggagctctcgagaaggatatggagaccactgcctag

SEQ ID NO: 23523 - DNA, 303 bp, Zea mays
  Peptide Sequence Number=SeqID_65302
atggcggcgcgctcagaacgcacggcggcgcactcgccggtgcacggtgaatggcccaaccgaacccccactacccctacagcaggttcttacgcacggcagagacgatactgggcaagaggggagcggcgcaaccaggtgagtaatcgggccccgagaagtaacgccggagaggagtaccgcggcggtggtcaaccccaaatcccgatccccctgctcacggcgagcttcgcggtaatggtggcgctctacgtctctctctcactggcaagacccttggctggcgatggcgtccaacgatag

SEQ ID NO: 23524 - DNA, 592 bp, Zea mays
  Peptide Sequence Number=SeqID_65303
gatgtaccttggccctcatagtcgcctccttgcgggctctccttggcgcgtctcctgctgctgcgtcggcggcgggttcacgatatgggtggggaacagggtcaggatggcggcggcagaaggcgccgcgacctggctcgatggttctcttggttgtggctctatggcaaccgacaaggaaaaaccactgagctggcaagcattgggcggagctgaggtggcgaacgggggagccgcgaagcggccaatgtcgaagggcgataggcggtcgacggatgcgcctcggagggcgtcggacgacgggtggtgcggcgcgtgccatcctcagcttctggctaaccaaggcacagcgctgctgcacgagactggcatttctagaataagacgcgggtatggccccacctgcgggttcgccgcctcacccaaagtgggtctgggggcctctatcgataccctaaatatggggatcctacaaatggaactcggacctcctcgtgggcccatcgaatccctggagaaaggggtctggagggacctcatgacccttgagaagaagacattctctggctacagcaccaagccttcagagtag

SEQ ID NO: 23525 - DNA, 403 bp, Zea mays
  Peptide Sequence Number=SeqID_65304
tcgaatggacggcgcggatatcccctcccactccgccgccgatggcgaccggcctccggagaacgcggacgacggcggcgtggaggacgagcgtgccgccgcgccccctccggagcggtgcggggcgttggcttccgcaatcgcaggggtgctggccggcgcgctgcgggagcacgaggagcgggcggccgccaccgcccggagccaggacgaggtcgccgctgccatcgaccgcctcaacggagcaaggatttccagcatccgcaagaggatttcagcaatgaacatgctgctcaagtccatacaacgacgcatagatagcatggatagaattatttctactgaccattcatctcctgtacagaaagccggtaatgaagttggaacaaggtgcaccacttag

SEQ ID NO: 23526 - DNA, 1425 bp, Zea mays
  Peptide Sequence Number=SeqID_65305
atggcggccgcggccggcgcgggcgagcccggtccgcgctcggaggcgtccggcttcggctctggctgcaaccacctgcggccgcggcgggggcctccacccccgtccccgtcccccgcggtcgggaagccgctcccgtccggcgcggtgccgcgccatgcgttcgtgttcgacggcgagggcggcttctccgaggcaccctggggccttgcggtgtccggttcgtcgcggaccggggagttcacgtggcaccacgtggagctcccgcgctccgcgggcgccgcggcggccaagccgctccaccacgcgcaggcgctcatcgagctcctctgcccgccgctcacgctgcaggagatcctcgcgttcgtcgccacgggcccgcactgcgcctcctcgggcgacggcgcgctcctgctccgcgtcagcgcgccgggccccgtcggcagcgcgtacgcgctccgcctcgccgcgcgcgtcaccgagagctccgtcgtcaccgtgtccgtcggcggggtcccgcgcctcgcgttcgggaccaggcaggcgtcgctcctctcggaggttccgctcggcgtcgccgcctcgctctccgacgagggccatggcgggggccgcgccgtcgacggcggcgtgatcatcgatgagcgcctgctcgagtcgctgctggccatgaaccacgcggacggcgcgcacacggacaacccggtgccgcggacggtgtccaacctcctcgtgcacgtcctcggcacgcacgtagaccacgtccacgacattgtcacgcgcctcgagatggacctggacgccgtcgagctgcagctcgacaaaggtggtcactttttgaggaagcttttgctggatggcaggagattcccaaaaatgcatctggatctacagcggttgcttcaggttgtttctcactgtgaacaagtattcccccgcgtgaaggaaaaatgtgcgagcaagagttggttcgcaacaggagatatagcagcccttgaagatctgataggtcgtctcagaaggctcaaagaaaacctagggttcattacaaatagaatcaccacacttcaggctagtctggacagttggcaatcggagcagataaacaaaagcttgtactacctttcatttctctccataatattcctgcctctttccattgtcactggagttttcgggatgaacgtcggtggtgtgccgtggacagggcagaacaagaaccctaaaaaccgggatggcttcatgaatgtcatgctaatatgtgttgcaatcttgttacttctgttgctgtgtttcttgtttccttcattatattctcatgtgacgtcatggagaacccgccgtgagctgacccggagcaactctcagaacagaagacatctgaaactcttcaaaggtcacaaggaaggttacatgcgcctatga

SEQ ID NO: 23527 - DNA, 234 bp, Zea mays
  Peptide Sequence Number=SeqID_65306
atggggcacctgtcgtgcgggcaatgccggacaaccctggcatacccgccgggagcgacgacagtcgggtgcccgacatgccgcaacgtcaatccagttccaaccagggatgctcggccgcagcagacgatggttctggtggagaatcctaagacgctggatgaaaagggcaaactgaaggcaaaagaaagaacgaaaggaaaacagaaacaggcacctttcagcgatgcctga

SEQ ID NO: 23528 - DNA, 1146 bp, Zea mays
  Peptide Sequence Number=SeqID_65307
atgccggacgtgaagtccgctgctgccacggtcgccaaggcagtggctggtgactctccttcccctgctgctactcctcctgcgccggccgtcgccagcagcaatgggacaccgcagaagccgcctcctattccagctgccaccttcgacatgcccaagccaaaccttcgtggtcttaacaagcccaagtgcatccagtgtggtaacgttgcccgctccaggtgcccattccaatgttgcaagagctgctgctacaaggctcagaatccttgtcacatccatgtcctgaagcagagcaacacattgccagataagccatcacctgctactgcttcttcaacagaacagccatctaccaatttacccgcaaccagttcagcatcaaggctagctgccttgcaaaagcttcctcagcattttctgaagtctctccaaacaaagaagtcgcttacgaaaaaggatgccgtggctataaacaagtggaggtttatgaagctaagggaacatatgcaaggcgatatcgatgatgaaaacgaagcatatgagaggtatacacagaatgttaggttactggaggaaacattctatcccatggaatacgctgatgtcgagcctgaagccgaagcaccttcttcagacgaagaaaggatggacttgctggtttcggaggcaaaggtgaggctgaagtcggataacgaaatcgctgatcgcttcaaggagagggtcgccgccatcttggaccagaagctgaaaaaactgctcgagagccaaagcgccgacgaggacgacaaactgtccgatccagaccaggacgatcatctaaacccggcgaagttcagcgcgaagcagaaggcagagagaagcgcgagcttaaacgagctgctcggtaagctgacacgggcacggagcgaggacgacctgaagccgtgccgcgatctcatcgagcagctgtttgggaaggagaagggctcctctactgacaggcaagctggagtggagatggagcagagagatcaagagtcagccgcagcagcagtagcacagccttactccgtcccagagttgtgcgctaggatggaggttgatgaggactttgccgcaaagattagtgatgagttctcgttgagtcaggtggcgcagctatga

SEQ ID NO: 23529 - DNA, 429 bp, Zea mays
  Peptide Sequence Number=SeqID_65308
atggaggcccaggcccacacgtcaggcaaccggcgcgccggttgctacgtgcgagcaactgcaccgccactcgcaccactaccgcgcctcctcgactgtggaaccagtaccgcgactcgaggcaaccctgcgacaggcggcgcctcaggcaggagaagcaagcgacgcttcgccttcgccataatgaccgcgtcgaaaaagggaccgggaaagggggataccccgaaaaggatccttctccgtgaaggaaacaggccccgagcctccctactgatcagaggttcaaaggctggcccctcggaggggttcaacggccgcctcagagcgcttgggttctgcgcccactactggtcagaggttcgatggccgacccctcggaagggttcaacggtcgcctcaggccactcgggctcccgcgcccactactga

SEQ ID NO: 23530 - DNA, 636 bp, Zea mays
  Peptide Sequence Number=SeqID_65309
atggcgcctcctgtcgacgtggtcggtccgtgccctaggttggacgaggtggaggctcctctgaggtcgaggtcgagtctgtcttccaaggtcgaggtcgagtccgagcccccgggtcggacaaggcagagatcgtcggctgaggccagggctgagtccgagccctggggtcgggcgaagtggagttcgtcgtccttcggggctgagcccgagtccaagccctggggttgggcgaagcggagttcgtcgtcttccggggctgagcccgagtccgagccctggggtcgggcggagcggagttcgtcgtcttccggggccgagcccgagtccgagccctggggttgggcggagcagagtttgtcgtcttccggggccaagcccgagtccgagccctggggtggggcggagcggagttcgtcgtcttccggggccgagcccgagtccgagccctggggtcgggcggagcggagttcgtcgtcttccggggctgagcccgagtccgagccccggggtcgggcggagcggagtttcccatggcgcctagggctggacttggctgctgtcagcctcactctgtcgagtggctcagcagtcggagcggcgcaggtggcgctgtcctcttgtcagaccggttag

SEQ ID NO: 23531 - DNA, 435 bp, Zea mays
  Peptide Sequence Number=SeqID_65310
atgggcaagaacaacaaacgcaagcgtgagccgactcctccatcagaggactttggcgactcggaatactcagaggaggagttctcctctgagtccgaggggtctctagctcccgtctctccccccccagcgtcgtccgatgactcagacgactctcaggggattgtcgcggagatctggacttacattcgggccatcgggcgctccgggctcgagggctcggatgagtcggagtactcctcggacgaggaggactcgcccgagaaggacggcgaaggtgacgacgacgacgacgacgacggaggcgacgacggcgacgacagtaacggcggcggcagcaggggcggcaacggtggcagcaggggcggcgacggcagcagcaggggcagaggcggcggcggcagcagcaagggcagcaacaaggccagtggctag

SEQ ID NO: 23532 - DNA, 408 bp, Zea mays
  Peptide Sequence Number=SeqID_65311
atgaatcacgattcgcccaagaccccgctcgatggtcgctcaaaactccgtctcgtccaagcctgtcttctggcgaaggcagcactcgagaaaatcctcgtcttgcccgaggtaccctcttcacggagtggcagtttccgcctcgcccgagcctgtctgtctcggacaggaggacaaacccaagcacagcctcagtcaaaggtcacaggagccgtggagacgtgtgcatttaatgcgacgattcggatacctaccccacgtgatgccacagtcaaagagggagcgatgggtcccatccactttcaccaactacgatcacgcacgcccggaaataacgaccattgctcccccactctggtcactgttcccgaacaactccagatgggacatgcacgcgcctgggcatag

SEQ ID NO: 23533 - DNA, 1353 bp, Zea mays
  Peptide Sequence Number=SeqID_65312
atggcgctcgtgagttccttctccttcctgtcttttttgtttatcgctctttcagaagttctgtgttgctcatcgtttgtctgtcggactgtctgtgaggaagttttggtattgcatagtggggctggaaacaagaatgccttcaaagcacttattgctgcagaatacagtgggatcaaggttgagttgaccaaggattttgagatgggtgtctccaacaagacccctgagtttcttaagatgaacccccttgggaaggttcctgttctggagactcctgatggccctgtttttgagagtaatgctatcgcacgctatgttgctcgcttgaaggatgacaaccctctttttgggtcttcccgtattgaacaagcccacgttgagcaatggatggattttgccgcaacagaagttgatcctggtgttgcatggtacttgtatccaaggcttgggtacctcccttatgttagcacaactgaggaaacagctatttcttcattgaagaggtcgcttggtgctctgaacacacaccttgcttcaaacacataccttgttgggcatgctgttactctagctgacattgtaatgacatgcaacctctaccatggaattgcacggatcttgaccaagaccttcacgtctgatttccctcatgtcgagaggtatttctggaccatggttaaccagcctaacttcaagaaggtcattggtgaggtcaagcaggcagagtctgcacctcctattccgaaaaaggctgctccttctaaggagccaaaggcaaaggatgtcaagaaggaggctccaaaggaggcccccaagccaaaggtggttgaggcaccagcagaagaggaagcaccaaagccaaagccaaagaatcctcttgacttgctgccaccaagcaagatggtccttgatgactggaagaggctatactcaaacacaaagactaacttccgggaggttgccatcaaaggtttctgggacatgtacgacccagagggctactctttgtggttctgtgactacaagtacaatgatgagaacaccgtctcctttgtgaccctgaacaaggttggtggattcctgcagcggatggacctgtgccgcaagtacgcctttgggaagatgctcgtgataggctctgagccacccttcaagctgaagggcctttggctcttccgtggccaggatgttcccaagtttgtaatggacgaggtctatgacatggagctctacgagtggaccaaggtggacatctctgatgaggcccagaaggagcgtgtcaatgcgatgattgaggaccaggagccctttgagggcgaggccttgcttgacgcgaaatgcttcaagtga

SEQ ID NO: 23534 - DNA, 651 bp, Zea mays
  Peptide Sequence Number=SeqID_65313
atgggaggtggaacctgcggccttcgtgttagccccacgctcaggtcgggtgcacttgcagtagggggttacaagcgtccacgcaggagggagcgagcgggccttgcgcgagcaccgtcccgtccttccccgcgcggccaaccttctgttgggcgaggtggaggctcctccgaggtcgaggtcgagtctgtcttccaaggtcgaggtcgagtccgagccccgggtcggacaaggcggagatcgtcggctgaggccagggctgagtccgagccctggggtcgggtgaagtggagttcgtcgtccttcggggctgagcctgagtccgagccctggggttgggcgaagcggagttcgtcgtcttccagggctgagcctgagtccgagccctggggtcgggcggagcggagttcgtcgtctttctgggccgagcccgagtcggagccctggggtcgggcggagcagagttcgtcgtcttccggggccaagcccgagtccgagccctggggtcgggcggagcggagttcgtcgtcttccgggaccgagcccgagtccgagccctgggtcgggcagagcggagttcgtcgtcttccggggctgagcccgagtccgagccccggggtcgggcggagcggagtttcccatggcgcctag

SEQ ID NO: 23535 - DNA, 450 bp, Zea mays
  Peptide Sequence Number=SeqID_65314
atgaaagaaattaagttggggactcaacaaagattggagcaaagactagcattggtgctgccaggggtgcaccaccggatactggccggtgccccaggccgagcaccccatcaactagccgctctcgggttttccctggagtcgttccgttataattcaccggactgtccggtggagtcccaactttcaacgtctacggacttggcaaacgagcaatttccgcaacgttttgagatccctaccgatgcgaggcaagtcttcttcgattgtctttgggttgtggctcctaccatttcttctctccaagaatccaaactccaagacataatctccttcaaagcaaaacatttgctatcttttggcctctcaaattcttttaggttcaacaatacaactgattctaggggtattatcactgcttgggatgccttggtcctctccattgaatga

SEQ ID NO: 23536 - DNA, 519 bp, Zea mays
  Peptide Sequence Number=SeqID_65315
atgagcacggaccacatcgtgttggccacagcgaggggatctggcggcgccgccgacgcaacacggtggagcacggacccagctgtccctgcgtcagtttcttctcccaaggactgctacgacgacgacaacttctccgataccggcgatgaggcgtgctacagtgacacaagactcatgcggagggtggggcaagatctcgacgaggaagagggcgaaagagaggcagtcggccccgccggaggcaccataggaagctccgcttcgcccgacccagggctcggactcgggctcagccccggaagacggcgaactccgctccgcccgacccagggctcggactcgggctcagccccggaagacgacgaactccgctccgcccgacccagggctcggactcgggctaagtcccggaagacggcgaactccgctccgcccgacccagggctcggactcgggctaagtcccggaagacggcgaactctgctccgcccgacccagggctcgggctcgggctaa

SEQ ID NO: 23537 - DNA, 168 bp, Zea mays
  Peptide Sequence Number=SeqID_65316
atgtcgcccgaccgccccatccgcagcgcctccacccccatccaccgccagatccagatcccacccccatcaaagggatcgcttcgcgagcgttgggagacgacgatggtgacgaacgactacggcgggtctcatggctcgaagtgggtcctggtggtggcgccctag

SEQ ID NO: 23538 - DNA, 2016 bp, Zea mays
  Peptide Sequence Number=SeqID_65317
atggcgtcggacagcgaggcggcagcgcattctaccttaacgagcacgacagtggaggacggtggtgcgcacgagagcaagcaggaacacctcaatggcgcggtgggcacccccacggttgggcaggaggaagagataatcgggccgggcccagcgccggcgaagcagcggcggaagcgccctctccagttcgagcaggcgttcctcgacgccctcccctccgccgccatgtacgagaagagctatatgcatcgggatgtcgtcacgcacgtcgctgtatctcctgctgacttcttcatcactgggagcgcagatgggcatctgaagttttggaagaagaaacctgttggggttgaatttgctaaacattttcggtctcatctcagtcccatcgaaggtctagctgtgagtgttgatggattgctttgctgcacgatatcaaacgatcggtctgtgaagatatatgatgttgtaaactatgacatgatgttcatgatacgtctctcatttgttcctggggctattgagtgggttcatcgagaaggagatgttaaaccaaaacttgccgttagtgaccgaaatacacctttcgttcacatatttgatacccattctggttcaaatgacccaatcatgtccaaagagattcatggtggccctgtcaaagttatgaaatataaccacattcatgatgttgttatatctgctgatgccaaaggactgttggaatattggtctccatctaccctcatgtttccagaaaatgaggtgaggtttcgcctgaaatcagatacaaatctatttgaaattgcgaaatgcaagactactgtgtctgctattgaggtaagcaatgatggcactcaatttgctgtcacatcccctgatcgcaggatacgtgtattttggttcaaaactggaaaattaagacgtgtatatgacgagtccctagatgtggcgcaagatcttcaaagaagtgatgttccattgtatcaccttgatgctattgattttggacgacgaatggctgtggagaaggaaatagagaaaacagaaaatgttccacaacctaatgctgtctttgatgagagttgcaattttcttatttatgctacccttttgggtgtaaagagattcttcaatgctctaagaccttgctcaaactttatggttttactggaagattctggcattgagggcatagtaattgtgaatttgcacacaaataaggtttcccgtatcctggggaaggtagagaacaatgagaggtttctgagaattgcactataccaaggagacaaaggcaacaagaaggttagaaaaattccttcagtagctgccaatgtcaatgatagcaaggaaccattatcagacccaacgctgctgtgttgtgctttcaagaagcatcggatatatctctttagtcgtagggaaccagaagagcctgaagatgcaactaagggtagagatgttttcaatgaaaaaccaccgccagaagagcttttgtctgcatcagacctaggaaaaactgctacaacatcattgcctgataatttggtgctacatacttctatgggtgacattcacttgagactatatccagaagagtgtccaaaaactgttgaaaacttcactacccattgtcggaatggttattatgacaatcttatatttcatcgtgtgattaaaggattcatgattcagactggagatcctttgggggatggtactggtggacaatcaatctggggcacagaatttgaagatgaatttcacaagagcttgaggcatgataggccttttacactttccatggccaatgcgggacctaacaccaatggttctcaattcttcttcaccactgtagcaactccatggctagataacaaacacacagtgtttggtagagttgtgaaagggatggatgttgtccagcaaattgagaaggtcaagactgacaagaatgacaaaccatatcaagatgtaaaaatcttgaatgttacagttcccaagacataa

SEQ ID NO: 23539 - DNA, 378 bp, Zea mays
  Peptide Sequence Number=SeqID_65318
atggctatcatcttcaacatcccgatcacctccaatgttggggaaatcttctacttcggatccctctcctacattgcagatcaagaaggcgtcctgcaccacattacagatccgtctgataagagaacttctctgatggcaccaaatgtggaggtgggtttgtctcacctgactccagcgagaactgcgccaaagaactctaaggtgtggacccagatcactcggcaaaaagaagcgagtaacctcggcaccggcatagccgtgggaacaagaacaccgattgttctggctgctccgctcacatgggagacggctgagcacgagacgccgctccaagctctttcttcctggatgtcctctttatctagggaagagtag

SEQ ID NO: 23540 - DNA, 198 bp, Zea mays
  Peptide Sequence Number=SeqID_65319
atggcgattgtgggcggcgattgtgggaccgtagtgatgcaccagcaggtttatgggcgtctaccaaagctaacgggggcctccatgggcgaagaaaaccaccagtgccccactaatctctcatcgtcgctcatccaccgccgcaaatccgcagttcaccatgggcgtgaggccctgtgcctccacctcaggtattaa

SEQ ID NO: 23541 - DNA, 198 bp, Zea mays
  Peptide Sequence Number=SeqID_65320
atggcgctggtttggctcgggcgcggcgcggggcacgcggggacgcgcgcgagcgtgctctggcgcgggcagaaggcgtcgaacacgtggagggggtgccttaagtggtataccacatttttggtacagaacccaagtggttttggcgccatcttcaaagtgaacacggctggtctttggattagggctaaaatgtga

SEQ ID NO: 23542 - DNA, 477 bp, Zea mays
  Peptide Sequence Number=SeqID_65321
atggtgacgatcctcatgacttcatgcctcgtagctatggtggacggcatcgccatggcgggtgcttgcgccggtgggcgacgcgtgctcctcctccagcggcggtggctccggcctgcactgcagcccctgtggcgccggcggggcagcatctgcacgtgcgccagccccgtggacccggccacccacggcacgggcctccccttcaacaactacccgtggctcaccacccacaactcctacgctctcgccggcgccgcctccgccaccggctccgcgctcatcaccgagaccaaccaggaggacaccgtcactgcgcagctcaaggtaacccaaccagttcccgtttcatccattcatttgccgcctggcctctccactgctgaggccagctcaggtcgtctaaccgcttccgccttccgctccgacgccggcgacgctgggaatggaaacggcatcgagttttcctttggttga

SEQ ID NO: 23543 - DNA, 1812 bp, Zea mays
  Peptide Sequence Number=SeqID_65322
atgggggacacgctgatccggccgtccgggcgcaaaccgcacgcgcaggtcgagatcaaaaacggcatctttgacctgacgctgtccaacccggacgggatcgtcaccggcgtgcgctacaacggcgtggacaatctcatggagattctcaacaaggaagacaaccgagggtactgggaccttgtttggaacccaccaggacagaaaactggcatctttgatgtgatcaaaggcaccgaattccgcatcgtttaccaagatgagaaccaggctgaggtatccttcaccagaaattgggatccttcccttgaaggaaaagctgtccccttgaacatcgataagaggttcatcgttctccgtggctcatccgggttctacacctatggtatctatgagcataaggaaggatggcctgatttcggcttgggagagacgagggtggctttcaagctgcggaaagacatgtttcattacatggcattggctgacgacaggcagagaattatgccaatgcccgatgaccggttgcctcctcgaggacagccattagcataccctgaggctgtgctccttgtggacccaatcaaccctgaacttagaggggaggttgacgacaagtaccagtactcttgcgaagaccagtacaacaatgtccatggttggatgtcattcgatcctccaattggcttctggcagatcactccaagtgatgagttcaggacaggaggacctctgaagcaaaacttgacttctcatgttggccctactatgctggctatgtttcttagtgcacattatgcaggagatgacctctcaccaaagttcacgaatggagagtactggaaaaaggtccatggaccggtattcatgtatcttaattccagttgggatgcaagtgacccaactatgctatgggaagatgcaaaagttcagatgatgattgagaaaggaaactggccgtactgttttgcactttcagaggattttcagaagacagagcaaaggggttgtgtctctggtagattactagtccgagacaggtatatagatgatcaagacctttatgcctcaggagcctatgtaggcttggccctaccaggagaagctggatcctggcaaagagagtgcaagggataccagttctggtgtagagcagatgtagacgggagcttctacataaggaacattgtaactgggaactacaacctgtatgcttgggttccagggtttctaggggactacaagctagatgccacagtgaccatagcttcaggggatgatatttatctgggtgacctcgtgtatgagccgccaagagacgggccgacgatgtgggagattggagtacctgatcgatctgctgctgagttttatgttccggatcctaaccccaactacgtcaatagattgtacgtcaaccaccctgcagatagatttagacagtatgggctctgggaacgatacgcggaactataccctgacagtgacctgttcgaccttgacagtgtcagcccaagcagcacctacaagttcagggtggctctggcgtcttctgcgctcgctgagttgcagatttccttcaacgaccaggacagggctgttcctcacttcgccaccgggctgatcggcagggacaacgccatagcaaggcacgggatccatgggctctactggctgtttaacatcgatgtggccagtgcttggcttgtgcaaggggtgaacaccatctacctgaagcagcccaggagccagagcccgtttcaggggttgatgtacgactacttgcgtttggagggaccgtgcggctgctaa

SEQ ID NO: 23544 - DNA, 330 bp, Zea mays
  Peptide Sequence Number=SeqID_65323
atgaagctgtggaaggagacttccaggagttccaagactacgacgagttctaggtgtgggttagcggcaacccccagtcggctgcctgtgaaggccgcgtttatctacgtttcttttccgcactttgatttattatggctcgacttagacacactgcacgaaagtccgtcatccccttcttaccctcccgccttgctgagcgtccgcttcgccgtcccgtggccggacagtccagccacttggagagactacaccaccgcctgcgtgaggagcaggaacgtcgacgacaggagcagcagggctcttctttctcgctccaccaggagatag

SEQ ID NO: 23545 - DNA, 504 bp, Zea mays
  Peptide Sequence Number=SeqID_65324
atggcgacgagatttggagattctccttccgagggaggaccagatccgacgcagtcatccatgcgtgggatccgggggcgggggctctgctcgcgggtggctggatgtgggttcacacgtgggcgcggatggagacgcgcgcagatggcgtgggcgcggacagcagcgaggagagcgggggcgagagagatggccagacgtgcgcagatggcgtcggggatggcggctggtgttgagcggagcggagggtgtcacgggtggcccgcctggccctgtgcgaacgggacgtaccgcctcgaagccttcggactcggtagtctggatcgttctgctccagcagcaggcggcggcggcgaggcattctgtgcactgcacgcgcctttattcgcgcaggcacgacgccctgctctggccctgagaatgggggaccgcctcgacgccgcaggcagggaagcgaggggcacgcgggagccggacggacgctgggccttcatcggccggtga

SEQ ID NO: 23546 - DNA, 342 bp, Zea mays
  Peptide Sequence Number=SeqID_65325
atgggcaaaagagcactggtgcacggaataatcgctcgccggtggtgctctgtcgcggcacggcgtgctgtcaagctggtgggcgccgtagggaagctgacggccgccgctgttggcccacgttctcgtctcggtgccgacctagggagctgcgggcgggcgaggatggatgtcagcgcccagggaactcgtaccatggaggttgggcctctagtgatcgcgcatgggtggcaatttcccgtcgtcgctgttgggtcgccatccgtcgtggccagggggctccatgcgatgatttatggtgaggcttcctctcccaggatcgattccttctcctctacatag

SEQ ID NO: 23547 - DNA, 1236 bp, Zea mays
  Peptide Sequence Number=SeqID_65326
atgcgtcccgccgtcgtcacggtgctcctcctagtagcagcggccgcctcgccggccgccgcactctactccgccggttcccccgtcctccagctcaatcccaacaacttcaaatcgaaggtctcgcccgactcccactgccccttcagcaaccagatcggcgcctccattttagtgcaggtgctgaactcgaacggcgtggtgctggttgaattcttcgcgccgtggtgtgggcactgcaagcagctggcgccggcttgggagaaggctgccggcgtgctcaagggcgttgccacggtcgcagcgcttgatgccgatgcgcaccaggcgctcgcgcaggaatatggaatcaagggatttcccactattaaggtgttttcccctggtaaacctccagttgattatcaaggagcaagagatgtaaagccgattgtagagtttgctctgtcacaggtcaagtcccttcttagagataggttgagtgggtgtgggcactgcaagaaattggcacctgaatggaaaaaggctgcaaagaacttgaagggccaagtgaagctagggcatgttgattgcgatgctgaaaagtccttgatgagcaagtacaaggtggaaggttttccaactattttggtatttggtgctgataaggagagcccattcccctaccagggggctagagttgcatctgccattgaatcctttgcattggagcagttggaagccaattctggcccggctgaagtttctgagttgactggcccggatgtcatggaagagaagtgcgcttctgctgccatttgttttgtatcattccttccagacatccttgattcaaaggcagaaggaagaaacaagtaccttgagctcctgctctctgtagctgagaagtttaaaaagagtccatacaggcaagtttttgtctggacagctgctggcaagcaagctaatctcgagaaccaggttggtgtgggcggctacggctatcccgccatggtagctctcaacgtgaagaaaggtgcatacgctccactccgtagtgccttccagcgcgacgaaatcatcgagttcgtgaaggaggcagggcgtggtggaaagggaaaccttcctctgaacgatgcacctacagtagtcgcgtccgagccgtgggacggcaaagatggagaggtcattgaggaggatgaattctccctcgacgagctcatgggcgacagctcctcagcaaacgatgagttgtga

SEQ ID NO: 23548 - DNA, 354 bp, Zea mays
  Peptide Sequence Number=SeqID_65327
atgggcaaaagagcactggtgcacggaataatcgctcgccggtggtgctctgtcgcggcacggcgtgctgtcaagctggtgggcgccgtagggaagctgacggccgccgctgttggcccacgttctcgtctcggtgccgacctagggagctgcgggcgggcgaggatggatgtcagcgcccagggaactcgtaccatggaggttgggcctctagtgatcgcgcatgggtggcaatttcccgtcgtcgctgttgggtcgccatccgccgtggccagggggctccatgcgatgatttatgagcagtacggcaatggcgccgccatggtcaccgtgggcgtgtacgcgccgccgtga

SEQ ID NO: 23549 - DNA, 2064 bp, Zea mays
  Peptide Sequence Number=SeqID_65328
atgggcaagccgtcgctgaagaagaagagggcctccggcggcggcaagtccggcgaccacgggggcaagccggcgtcactggagcggtctggttccaaggtcctcgacggcgatgagaccctcttcacggacatggcgcaggagcacaaggaagagggcaataagctcttccagcgccgggactacgaccgcgcgctgctcaactacgacaaggccataaagcttctgccccgggcgcaccccgacgtcgcctacctccacagcaacatcgccgcctgctacatgcagatgagcccgcccgactactaccgagccatcaacgagtgcaacatcgcgctcgaagcgtcgcccaagtacaccaaggcgctgctcaagcgggcgcgctgcttcgaggctctgggcaggctcgacctcgcgtgcagggacgtcaacaaggtgctcgctctggagcccaacaaccttactgcgctggatgtatccgacaggatcaagaagactatggaggagaagggaatcgttctggacgacaaggagatcatgcccacgccggaggaggtggtggccgctgcacccaagcagaaaccgcgcaagaagaggggaggacggaagttcgctgccaaggctgcggctgctgctgtggaggaggtcgatgaacagaagattgcggaagctatcaaggaggaggtggaggagcagccaaggcaggtgaaactcgtgtttggggaggacataaggtgggctcaggtgccggcgagctgcagcatggcacagctgcgcgaggccgtccggagcaagtttcctggactgaaggctgttcttgtcaagtacaaggacaaggagggtgatcttgtgacaatcaccaaccaggatgagctgaaatgggctgaggagttggctgaggctgggagctcacttcggctgtatgttaccgaggctgatccggaacatgaaccttatgttgacgacaccaatatggagagaaatgtaaacagcaattcggataatggaagtattagaagcaataggcaggatgaggacaggagcactgtgacctgtattgatgattggattgtgcaattcgcccggcttttcaagaaccatgttgggattagctctgatgagtacctggacctccatgaggtcagtatgaagctctacactgaggcaatcgaggacactattactactgaggaagcccaggaggtgtttcatcttgctgagggaaactttcaggagatggcagcacttgcatttttccactggggtaatgttcacatgtcccgggccaggaagagattgttgctatcaggagattccccaagtgaattggtgcttgagcaggtgaaggaagcatatgaatgggcaagggacgaatacaataaggctggaacaagatatgaagatgccgtgaaggccaagccggacttttttgaaggtttccttgcactggcgcaccagcagtttgaacaagcaaaactgtcatggtactatgcaattggtagtaatgcagatttggacagctgttcttctgaaattctggagctcttcaataaagctgaggataatattgagaaaggtatagagatgtgggaggaaatggaagaacagcgtctgaagaatcgatctaaacctagccaggagaatattgtgctagagaagatgggcttggaggagtatatcaaggatgtatccactgatgatgcggctgaacaggcttccaatttaaggtctcagataaacattttatggggtatgctcctttatgaacgttcagttgtggaatttaaattaggtctcccaatgtgggaggattgtttgatggctgctattgaaaagttcaaacttgggggagcttctgccacagatattgctgtgctggtgaaaaaccactgtgccaatgaaactgctcaagatggtttgggcttcaagattgatgaaattgttcaagcctggaatgaaatgtatgacattaaacggtggctgcgtggtgttccatcatttcgccttgagccattatttaggcgaagagttccacaattgcatactgcacttgaacatatatag

SEQ ID NO: 23550 - DNA, 243 bp, Zea mays
  Peptide Sequence Number=SeqID_65329
atggctgctgctatcgcagcccctccgtgggcctccttaggccctgacacaatcatacaatcttatgacttcatagagagaacgcgtgccttaaatcagtgcactgaatatattcagggaagcaatctaaagggcaaggaattcaacttgacaatgcactggcacattatgccaaagactggcaaaatgtttgcagataagatagtaatgacaggctatcgtctccctgagctatacagatag

SEQ ID NO: 23551 - DNA, 453 bp, Zea mays
  Peptide Sequence Number=SeqID_65330
atgaggccaggcattcccatgatctcggaagaagcgggttgcgacgcacaccgccgcccgttacctcctctttgggggccaagccgaagggcgtcaagaccttcgatgatgccgagagaatcgtcgtggggcgtggggcgaaccgggcctctagggctcacccatcgctcccttgctgtcgatgacaaagttgagactcccaaaatggaaggtcattttgggggcccaaaccgcgccagcatcattgttggccatcgagagcttgaacaacttcatcgggaatacgcaagccccctacctggcgcgccaactgttggtgttttgaacctcactctgacaagtaaatttattgtgcgtgttgcgggcttcaaacggccaaggacggggtcggccaatgatggctttctcaagaaggagccatcgggcaatggtaaaaccaagtgttctatctag

SEQ ID NO: 23552 - DNA, 1458 bp, Zea mays
  Peptide Sequence Number=SeqID_65331
atgcatgcagatcctgacgcggaggtgatcgcgctgtctccgcggacgctgctggcgacgaaccgcttcgtgtgcgaggtgtgcaacaaggggttccagcgggagcagaacctgcagctgcaccggcgcggccacaacctgccgtggaagctgaagcagaagaaccccagggaggcccgccgccgggtgtacctgtgcccggagccgacgtgcgtgcaccacgacccgtcccgggcgctgggcgacctcacggggatcaagaagcactactgccgcaagcacggcgagaagaagtggaagtgcgacaagtgcagcaagcgctacgccgtgcagtccgactggaaggcgcactccaagacctgcggcacccgcgagtaccgatgcgactgcggcaccctcttctccagttcaggagtgctgctggaggaggaggagctgctctcccactgcacgagggacagcttcatcacccaccgcgccttctgcgacgcgctggctcgtgagagcgcgcagatgccgcccctgggcgccggcctctacgtcggtcccggcagcatgagcctggggctctcccagatccatggctttgcagatcaagcccagtcctcttcagcagcagcagccccgcagtttgaccacatcatgccatcgtcttcgggctccagctccatgttccgttctcaggcgtcggcctcctcgccatcttacttcctcggcggcagcgcccctcctgccgccgcccaggatttctccgaggacggctcccaaggcagccagggccctctgctccacggcaaggcgcacttccacggcctgatgatgcagctccccgagcagcagcaccagccgggcagcagcaacgccgccgtcggcgccaacgcggtggcacgtccgggcagcctgcaggacgcgcgcattgccatccaagaccagttcaacctcagcggcagcggcagtggaagcgcagagcacggcaacaacgtgatggtggcgtccatcggaagccacctcggcagaggcttcccttccctgtacagctcgtctccgtcggccgggatggcccagaactcggcgacggcgctcctgatgaaggcggcccagatgggctcgacgacgtcgagcaccacccacaacaaccacaacggccctactacgactagcacgctgctccgtgctacgggcttcagcggcgccaccggcagcgggcagctggggactactggcggcagggccgccgcgggagaagaaggggcggcgtcccacgaggcacacttccatgagctcatcatgaactctctggccggcggcggcttctccggcaccgcagggttcggcggcggcgtggacgacggcaagctgagcaccagagacttcctcggcgtcggcaggggcgccgcgacgatggcgccgcccgggctccacatgggcgccctggacccggcccagcagatgaaatga

SEQ ID NO: 23553 - DNA, 363 bp, Zea mays
  Peptide Sequence Number=SeqID_65332
atggacatgttctactcgacctcctcttcctcgttggcgtcgtacggtggaggttggggctacgattcgctgaagaacttccgccaaatccgtcgtgttgtccagacccacctcaagctcagaaagaggtacgagatgttgatggcggctaccctcctggaagacccctcatcattcttgccatggaatatgacccaagggaggaaaagcagggtagcccgaatctctgttggcgtcgcgtgtttcattgtgttcatgatgatcctttcagtaatagacctttttaggcttacacagacctgttttgacaagagccgaacagcgatgcttccatttcgggaccacgacctagctaaaggctaa

SEQ ID NO: 23554 - DNA, 189 bp, Zea mays
  Peptide Sequence Number=SeqID_65333
atgactccgtccccggctttccgcgatgaggcacaggccctcgcgctggtgctccccactggcagcaattcgtcttcaccttcctggcaggcgagcggggcgcagacgaaggttactgggattatccttcctagcgtgattttcggtacgaccagcatccgcgctgagtttgttactgagagcacctag

SEQ ID NO: 23555 - DNA, 330 bp, Zea mays
  Peptide Sequence Number=SeqID_65334
atgcccacggtcctcccacccctacctttgtatccatcccacgtctgcttccatgcctttgccccggtgccccctcctccccggtcccgcacccgatgccccggcgtgatagctgccgccccaacaacggcctcgccctccttcctccaccgtccagctcgcacgaatctcgtttgcagcgactctatcgcaggcctgcggtgcaaggagaccgccacgctcgccgtcggggcctccgtgctctcctcttggcacgacggcggccacggatcgggtgggttggttttctggcagactggtgaggctagtggcctgcgccttctacgatga

SEQ ID NO: 23556 - DNA, 1467 bp, Zea mays
  Peptide Sequence Number=SeqID_65335
atggggctccgcgtccgcgactcctccgcgctgctggctctggccgtcgcgctcgcctgctgctccgttgcaggttcggttaccatatttcattcatctgaaaatgtaaacagtgtcgatcggtcgatgggcgacgctcacattctctcctctcctgtcgccatggctggcggctgctgcacacacactggcacttgcgcagtggtggcctacgaccccctggacccgaacggcaacatcaccatcaagtgggacgtgatctcgtggacgcccgacgggtacgtggcgatggtgacgatgagcaactaccagatgtaccggcacatcatggcgcccgggtggacgttggggtggtcgtgggccaagaaggaggtgatctggtccatcgtgggggcgcaggccacggagcagggggactgctccaagttcaagggcggcatcccgcactgctgcaagcgcaccccggccgtggtggacctcctcccgggggtgccctacaaccagcagatcgccaactgctgcaaggccggcgtggtgtcggcgtacgggcaggacccggcggggtccgtctccgcgttccaggtctccgtcggcctggccggtaccaccaacaagacggtgaagctgcccaggaacttcacgctcatggggcccgggctgggctacacctgcgggcccgccgccgtggtgccgtccaccgtgtactggacgcccgaccaccggcgccggacgcaggcgctcatgacgtggacggtgacctgcacctactcgcagcagctggcgtcccggtacccgtcctgctgcgtctccttctcctccttctacaacagcaccatcgtgccgtgcgcccggtgcgcgtgcggctgcggcggccacggcggccacgcgggtccgggcggctgcatcgagggggactccaagcgcgcgctgtcggccggggtgaacacgccgcgcaaggacggccaggcgctgctgcagtgcacgccgcacatgtgccccatccgggtgcactggcacgtcaagctcaactacaaggactactggcgcgccaagatcgccatcaccaactacaactacaggatgaactacacgcagtggacgctggtggcgcagcaccccaacctggacaacgtcaccgaggtcttcagcttccagtacaagccgctgcaaccatacgggagcatcaatgacactggcatgttctacgggctcaagttctacaacgactttctcatggaggccggcccgttcggcaacgtgcagtcggaggtgctcatgcgcaaggacgcaaggaccttcaccttcagcatgggctgggcgttcccgcgcaagatctacttcaacggcgacgagtgcaagatgccgccgccggactcctacccctacctgcccaacgccgcgcccgtcgtcgcctcgcagctggtcctgtccgccgccgcctcggcgttcctactgttgctgctcctg

SEQ ID NO: 23557 - DNA, 333 bp, Zea mays
  Peptide Sequence Number=SeqID_65336
atgaagctcatgatcacagtactgacacaagggcagcaccctgaatttaaatacctgacacatatgcacctaggatcctttcaaaaaagaagatcatgcccaatgctcgagggtgccactgaagacatggacctcttgggtcggctcctcgatgagctcgacctgctacagtgccactccccggatgtagaccttgacatggtggacatggaccttcttaaacatattgtagttcacaagaactatgatgatttccatgtcaccgaggaggatgagaagatcttggactgggagagaagtgcaccgaagcaatggctgtctctctacgcgtga

SEQ ID NO: 23558 - DNA, 348 bp, Zea mays
  Peptide Sequence Number=SeqID_65337
atggcgtcgggctggaggggaagctgcagagtggctgctgcccctgctgtttctgcgccaacacatggggaggagaagcaagggggagaaaatcgtgcagggcgccgaccactagggagcaagggggctgcgagctgccccatccggggaaggtgtcgagtgggggagaacagggagaaggagcgccagccatggatggctcctgctgtccctgggcctagaacagaggagaggaagaggcctcatggcttgtggaagaaggagaggctgctgctgcgttttggaacagagaggaggagaagtgtcgtgtgggggaagggaaggagaggggtgggttgccatttatag

SEQ ID NO: 23559 - DNA, 180 bp, Zea mays
  Peptide Sequence Number=SeqID_65338
atgggccagagtgaccggtccacggtggtcgcactcaggtggattctagcgggcagcgaagctctcggtttccgggcaaacttcgatgatcgagtgcggggtgttctaaaggtattttggcgccattttgtcaattgggtcaagtggttttgggttaaggaatatggtgaacgtgtttga

SEQ ID NO: 23560 - DNA, 213 bp, Zea mays
  Peptide Sequence Number=SeqID_65339
atggatcacgtcatcggggttcttgctgccctcatcggctgggcgcagccgcagcttacggccgccactgcgggctctgcccacgtcgttactgggacacccaccggcggcgatacgcaggatcgcgctcgcccttataggttgcttcttcggctctggttggtcgcggccctagggcaggcgcggtgtcattgccagccgagccggaggtag

SEQ ID NO: 23561 - DNA, 279 bp, Zea mays
  Peptide Sequence Number=SeqID_65340
atggatgtttgttgcgcgtgctggcgtgctgctgcggacttgacgatgtacatagcacgggagacttccaaggtgtggaggaaggtggccacggaggtatcggtggagctgcagctcctgcgcgagaagtgggggctcctactagccggtctgatctttcagaaaattgtatggttaaaatttgtgattaagcattttattcaagcttttgccaggctcgaagagcatttctatgggttctattgggtttttagctctagcgtatcccaacttgcttag

SEQ ID NO: 23562 - DNA, 156 bp, Zea mays
  Peptide Sequence Number=SeqID_65341
atgcggtttgaatcggtggatcctgtttcccaccaagtcaaggtttgtgaattcgggagtgctagaatcttgatcttccacaagagaatgcctccagaagcaatggatacgcttctagaaaaagataaagtgccaaatccatgctatagagtatag

SEQ ID NO: 23563 - DNA, 756 bp, Zea mays
  Peptide Sequence Number=SeqID_65342
atgaagcacgcaccccaagatttggtgttcgacatcccaagcggacaggcactaaacgaagtgcagagggaagcgaaacaacgatggttgcgcagcgattggagaggcaagggcgtccgtttcccagggcgtccacagtgccgtgcaccatggtttctgccgcgaccgtcctccccacccaccccaccatcaacgctcgacaccgcgccgccaccaatcaacgcccggcggatccccaccctcctccccaccgccgctgcaatcaacgcggtcctcccccacgcggatccgtgggccctcctctccaccgccgcgcaacagacctgtgggcgttcctcccaccgccgccgcaatggaaggtcatctgcgctgtggatccgcaacctcaaatcctcccaaatccgtgccccgcacgccgccgcctgcacctgtcgtgtgcccgtctccacctcattgattgcggcgctctcgccagaaccatgcatgcagatctccccgtccgaccacagacctccacccaatcctcgcctcccctgccccgtccgagaggaagggagacttgatgggacgtcatcgccactagatccggaagagagcaaccatggggaggatgacccaaagtggcgacattgtatccgtggagacgaggacgacactgcctccaagtctcttccaccggcttccatcgacggtgcaaggtatggattcgaggacatgcgtcccttgatcccaacagcggcagcctccttggggtag

SEQ ID NO: 23564 - DNA, 120 bp, Zea mays
  Peptide Sequence Number=SeqID_65343
atggcaatgcatgagagtttgctgatcttggttgaatggagagtattcaacggagccacaagaagcaacgactatcaatggaagcaagttgtgtcaagacttgataagctgctgggataa

SEQ ID NO: 23565 - DNA, 735 bp, Zea mays
  Peptide Sequence Number=SeqID_65344
atgggcggcggggtgaggaatggagacggtttggtgacggctgagaaggttcttgggttcgagttcgacaaggtcaggatcagcattgcgtccagcgacgacgaggcggacggagacgcgccgccaaggagctccttctccggggcgagccacccgccggagctggtggacgagatagacaccgtctttgtcgctgtcgacggccgggataagccggtcccgaagccaatcatctcgtgggacgcgtccccgccgccgagcggcgcggcaagcccgcacagcagcatcgacagctccggcgccgccaccaacgtgacaatcacaagcctcgcgtcgagctgcaccgtcaccagccggagcgccaagaccagcgtcagcagcagcgcagccagcgacggcagcggctggagcaacgacaacggcaccggcgccggcggcagcgcagggaagccgcacaagggcggcgacccgacgggccagtcggtcctgcgcgcgcaacgggccagtcggtcagtcgcaggggttcgcgcgagccaagaatcgatcgacttctgccagacacgacctccagcgcgcttctcagtcctcgttgtatttcggcttttaaacgaagcgcttcgtccagaatcccagcgagaatctaagcgtttggatgacaaaagctgcttttggtcaccagaatcggcaaaaagccgaaccaaacgcggcagtctcatcgtttggagcggcttctag

SEQ ID NO: 23566 - DNA, 219 bp, Zea mays
  Peptide Sequence Number=SeqID_65345
atgaatgatatccatgaagaatgcgaccgcctgctcggatttaatattggcgaggggccagacctcgatccacttgaagaatttatcgatggccaccatcaggtgctgcctcaccggcctgaagtgggctcggatgtccaaggagtgttcggcgacttccctcgcccggacctggtccagctcgaccggattgcaccgtctgacatgagcttcctctag

SEQ ID NO: 23567 - DNA, 339 bp, Zea mays
  Peptide Sequence Number=SeqID_65346
atggaattgggtgtgagatatggattcacccaatccatacccggattaaattcatggtgggattatatcccatgtaaccgaacaaggcctaatcgggtaattcaggatttctgcccaggcctagttgccggcggcggtaggattggtgtcgcgtacgccggcagaagcgatagagccggcggaggtgacgcgggcggtggttgggaaggaaacgccacacgcgccatgaaggcctcaatggtcgccacagagtgcgtgagggtggcggagttggcgttgatggaggtgagactagacaccgtggcctcaatgatcgcaaggaacgagggcagtgactag

SEQ ID NO: 23568 - DNA, 189 bp, Zea mays
  Peptide Sequence Number=SeqID_65347
atggtgacgtctccaacgccgactgcatcctccgtccccaactacatcgaggagtacgccgatcgcttcaatgtcgtgctctgccatgcccgtggtctctcgggaccccaaaagcctgagttgttcgtgggcgggcttccggaccacatctgcatcgacgtcgagctttgcgagccgcgggacctctag

SEQ ID NO: 23569 - DNA, 633 bp, Zea mays
  Peptide Sequence Number=SeqID_65348
atgacggagaccgggggtttcggctgcagcctgggttcttctggcgaggcgaggccgccgtccgggcgcgggcgggggaaaaggaggcgatgcgacgagacgcggcggcgattggttggacgaagcggggtgcggaacggacctgaagccgggggtcgcagactggtcgcgctcgcgcccaccacgcgtcggagcggggccgaaccgacccagacgaggcggggagctgagctcctggccccgctgcgctacccggaggctggggctgccgcccttcccccgttcggccttggggtcgggtcagcctctgccacgcgggcgcatgtgcgcgtccccttagacgcttcttctactggaaaagggccaaaacgtgcagcgaaaaaggagccgagacgaagccgcccgacggcagaaggattcggacgtgacaacgcaccgtgcggctattcccagcctcgcgcgtcgctcgcgatacccagaattatggctgaaaacgataggagacgtataaaacataatgatatgtttgttcagttggttaggtcctgtgagaagaaacacattcggaagatcaaaacagaagcggtgccgaagctacaatctagggtgcttcggcatgacaacgcgccttga

SEQ ID NO: 23570 - DNA, 507 bp, Zea mays
  Peptide Sequence Number=SeqID_65349
atgcggaatgacaactacaagacggtcaacgtggaggagagcctccacaagaagtgcttcaacgagcactttcaggatgaggaggtggccgccgccttctgtgccattgtcaacgcgaagcagttatctgtatactggactacaaagagaaagcaggagataaatgtgtggtccgagttccaaaatcccatgagtgacgtcgtctcccgtgcgacgttcaggagcagcttcaatgaagggagaaggatcatccagttgcaaaacagagcagacacaaaacactgtaaatacgacaaacatgatgcatatcctagcctacagagaggcttaggacagctaggcctcatggcaccacgtacaaatacactaatcccacgtgtgccattgttggctctttcgtaccaaggagaatgctcccatggccttagagacctctggactctgatggccgtagagacctctggactttttagaactggtggcctcatgaaagagaagatgacatga

SEQ ID NO: 23571 - DNA, 444 bp, Zea mays
  Peptide Sequence Number=SeqID_65350
atgcaggcggcgtgcgaccgcacccagggggcgcaccctttcgactttgacgcgtccagcatggaggcccaggcccacacgtcatggatcgggaaaggggatactccgaaagggatccttctccgcgaaggaagcgggccccgagcccccctactaatcagaggttcgaaggctggcccctcggaagggttcaacaactgcctcagagcacccgggctccgcgcccactactggtcagaggttcgaaggccggcccctcgaaagggttcaacggtcgcctcaggccactcgggctccgcgcccactactgatcaggggttcgtaggctggcccccgaagcggtcgacagccgcctcagacgtagagcgagggatgaccctgggctcgggggctgctctcgcaaacccggctccggccaaaccgttgacagcgtcaacatactag

SEQ ID NO: 23572 - DNA, 366 bp, Zea mays
  Peptide Sequence Number=SeqID_65351
atgggatttggaattggaatacacacatgggccccagatcggtctcgatgctacaacaacgcctacttcgcgcgggtgggcggcatcagcctggtggagatgaactacctcgaggtggacttcttgttcggcatcgccttcgacctcaacgtcacgcccgccgccttcgcctcctactgcgccgtgctccagagcgagatggcctacctggacgacgcgcccgcgcccgtcgtcgaggcgcccccaaggctgcactactgctacggcgccgccggcacgtctgaccgccacgacgaccccgccgcggtcgcagcagccgccgcagcctgccaccgtcacagcagccagccgcagctcactgtctga

SEQ ID NO: 23573 - DNA, 381 bp, Zea mays
  Peptide Sequence Number=SeqID_65352
atggcacaaaaaattgaacaactgggagctgatttggagactagggataagaaccactttgggatcaatggtgtcgcaaccaggttcgccctcgactcgattggagaaccaaggttaaacacatgcactggtacagggttggagataaagtttcaacctcaaggtagctgcttgggcagacaagttttggatcttggcatgggcacctttgggaattgggatggactggaaccagtaggtcgtgggactgggactaggagattttgcttgatgtttctttgggaccttagagtttttttagtatcttggcaaaatggtgactttttactcagtctctccattttagtgcttgataaagcatgtagtcaaagaaagaactga

SEQ ID NO: 23574 - DNA, 618 bp, Zea mays
  Peptide Sequence Number=SeqID_65353
atgcgcgagatctacgacccgcatcgcccggagctagaagaatcggtccacccgatgggaaggaagagggccgcggatccggtgatatttatcccggagctcggagcatatcctcgcggatcaacaacagccgggccagctaccgttcggggtccggccatggcggtcaaagtggctgttatcagagcggatttcggcggccgtagtagtggggaacagttcgacctggtgcggttcgtgaagttttttgggtttacctggccatcaatatacccattgtctatggagttgcagaagcgtgccgatgtggttgcactacatgccaggaatggttttcaggacaaacaacaagccattcaaggccgtggtgggtgtgatccttgccctcaagtttggaaaaggctaggaactgagcaagggcgtgagcacagtgctggtggtggccatctgcctcttcgtggtggcctacaaatgatgtcgcgctgtgccacctccgtggccgtctttgtgctcttcacctcgttcattatcgccatgtccatcttcatcatcctcttgctgacggagaccaaacatgtgcccatcgaggatatctggatgctctttgacaggcactga

SEQ ID NO: 23575 - DNA, 546 bp, Zea mays
  Peptide Sequence Number=SeqID_65354
atggaggtgtacttactagctgcggctcgacacagggcacttcccacgtgcaccataggtctgcggcacggggatgtcttccggcatggggaagaccgaccgagcggatctcagcaacccgccgatttctccccgtcaggtgcgcgcgagttcggtcaggagcgcgccatgcgcgggatctacgacccgcatcgcccggagctagaagaatcggtccacccgatgggaaggaagagggccgcggatccggtgatatttatcccggagctcggagcatatccccgcggatcaacaacagccgggccagctaccgttcggggtccggccatggcggtcaaagcggctgttatcagagcagatttcggtggccggtgcgcgattccgtttcgagccgccggattgaggacgaaactgtcttcggggcccatccgtcaccgacccgcgcaatgcacagagaatcggccactgccagacggggcccaggggtcggcggcgatttccccacaggcgcgcggggacagccagagtagcgaccccatatgttag

SEQ ID NO: 23576 - DNA, 1533 bp, Zea mays
  Peptide Sequence Number=SeqID_65355
atgtccgccttgggcgacaacgcctgctccggcttccagccgctgaacccggacgacgtccgctcctacctccacaaggccgtcgacttcatctccgactactacaagtccgtcgagtcactgcccgtgctgcccgacgtcaagccggggtacctacggaacgagctgcagtccgcgccacccacgtcctccgccccgttcgacgtcaccatgaaggagctcaccgcctccgtcgtccccggcatgacccactgggccagccccaacttcttcgccttcttcccgtccaccaacagcgctgcgaccatcgccggcgacctcatcgcctctgccatgaacaccgtcggcttcacgtggcaagccgcgcccgccgccaccgagatggaggtcctcgcgctcgactggctcgcgcagcttctgcgcctgccgcccagcttcatgaaccgcaccggcggggctgcgcgtggctccggcggcggcgtcatcctcgccaccaccagcgaagccatgctcgtcacgctcgtcgcggcgcgtgacgccgcgctgcgtcggagcggctcacacggcgtgtcccagctgccgcgcttggccgtgtacgccgcggaccagacgcactccaccttcttcaaggcgtgccgcctcgccggcttcgaccccgccaacatccgctgcatccccaccggcccggagacggactacggcctcgacccggcgaggctgctcgaggtcatgcaggccgacgtcgacgccggcctcgtgccgacctacgtctgcgccacggtcggcaccacgtcgtccaacgccgtcgaccctgtgcgagccattgccgatgccgccgccgtgttcaacgcgtgggtccacatcgacgccgcgtacgctggcagcgcgtgcatctgccctgagttccggcaccacctcgacggcgtggagcgcgtggactccatcagcatgagcccgcacaagtggctcatgacgtgcctggactgcacgtgcctgtgggtgcgcgacacgcaccggctcaccggctcgctggagaccaacccggagtacctcaagaacgacgccagcgagtccggcaacgtcaccgacctcaaggacatgcaggtcggcgtcggccgccgcttccgggggctcaagctctggatggtcatgcgcacctacggcgcctccaagctgcaggagcacatccggagtgacgtcgccatggccaagatgttcgaggacgccgtacgcgctgacgaccggttcgaggtcgtggttccgaggaacttcgctctcgtgtgcttcaggatcaagccccgtggtggcatgacggaggaggacgccgacgaggtcaaccgtgagctcatggagcgcctcaacaggaccgggaaggcgtacctggcgcacacggtggtaggcggcaggttcgtgctgcggttcgccgtcggttcgtcgctgcaggaggagaggcacgtccggagcgcgtgggagctcatcaacaagacaaccaatgagatcatgctggaaccggaacagatcgttgtggagtag

SEQ ID NO: 23577 - DNA, 930 bp, Zea mays
  Peptide Sequence Number=SeqID_65356
atgacgaagcttgtgagaagaagccgaaggcccccaacatgcgtcatgcttcggcgccacttccacagggcccggccgcccgcggagggtggcaaggccagcgacgacgacaagaaggaagatcaccaggcaggagagttccccgaggtctgcgactgcttcatgatctatggtgggcaagcggcgaacgcctcagctcggcaccgcaagcaacagtgccgggaggtctgttcggtgaaggtggtggcgccagtctacctagactggtccgacaagcccatcaccttcgaccaagccgaccacctcgaccatgtgcctagcctggggaaatacccgctcgtcgtcgaccccatcatcggcgacgtcaggctcaccaaggtcctcatggacggaggcagcagcctcaacatcatctacgccgagaccctcgggctcctgcatgtcgatctgtcctccatccgggcaggcgctgcgcccttccatgggatcattcccgggaagcgcgtccagcccctcggacagctcgacctttccgtctgcttcggaacacactccaatttccgaagggagaccctgacgttcgaggtggtcgggttccgaggaacctaccacgcggtactggggaggccatgctacgcgaagttcatggccatccccaactacacctacctaaagctcaagatgccgggccccaacggggtcatcaccgtcggccccacgtacaaacacgcgttcgaatgcgacgtggagtgcgtggagtacgccgaggccctcatcgccgacctggagagcctctcgaaggaggtgccagacgtgaagcgtcatgccggcaaaattgagccagcggagacggttaagtccgtccccctcgaccccagcagtgacgcctccaagcaagtccggatcggctccgagctcggccccaaatag

SEQ ID NO: 23578 - DNA, 597 bp, Zea mays
  Peptide Sequence Number=SeqID_65357
atgtatgtccaaggacatgctgctcagcaacccgaccgtgggtggatgccaactgaacgtgcgacactgaaggctatgacatccacacgctctccactgccgctcggtagcttcatgctccgcaccagcctctttggctatgccataggcaccgccaagggcggcatgctgcggacgtacgtcgttgcctacaaggtctgctggtcagcggagtccaacatccacgacagcgttgacatcatcttcgtctcctttggccaggatgcgcccctcgtcgacgatgccgagtccctcttccccgagcccatccacgacgtctccatcgcatgctctgtcgacaacttcgacttctacgacgacaccgtcatctacgccgcgtcatgggataccaccgtcgttgccaccaacatcgatagtaacttccctaatgtcctcaccctcggcaacagtgtgagcctgaggaggatgagcctcgagtccaccatgctgcactccagtgcgctcagccagatggtcaacgtcgcgcgctgcccacgctacctccaaccctgtatgatgccattagctacgggctcggcgggcaccatcgacccctga

SEQ ID NO: 23579 - DNA, 1332 bp, Zea mays
  Peptide Sequence Number=SeqID_65358
atgtatttcgatgggtcgctgatgaaaacacgagccggcgcgggcttgctcttcatctcaccccacgtgatacatctccgctacgtgctacgcctccatttcccggcgtcaaacaacgtggccgagtacgaggctctggttaatgggttgcacatcgccatcgagctaggggtttggcacctcgacgctcatggcgactcgcagcttgtcattgaccaagtcatgaagaactcccactgtcgcgaccggaagatggaggcctactgcgacgaagttcggcgcctggaagacaagttctacggtctcgagctcaaccacatcactcgacggtacaacgagactacggatgagctggctaaaatagccttggggcagacaacggttcccccggacgtcttctccagagacatacatcaaccctccgtcaagacggacgacacgcccgagcccgaggaggcctcggcccagcccgaggtggtctcgttccaccccgaggaggcctcggcccagcccgagaaggcactcgggggcttctcgcacctgctggtcgccatcgacaaattctccaagtggatcaaggtccgacccctaacaagcatcaggtccgagcaggcggtggcgttcttcaccaacatcatccatcgttttggggtcccgaactccatcatcaccgacaatggcacccagttcactgggaagaagttcctggacttctgtgaggaccaccacatccgtgtggactgggccgccgtggctcaccccatgacaaatgggcaggtggagcgtgccaacggtatgcttctgcggggacttaaaccgaggatctacaacgacctcaacaagttcggcaagcgatggatgaaagagctaccctcggtggtctggagtctgaggacgacgccaagccgagccacgggtttctcgccgttctttctagtctatggggccgaggctatctcgcccatagacttagaatacggttccccgaggacaaaggcgtatgacgaccaaagcaaccagaccagccgagaagactcactggaccagctggaagaggctcgggacatggccttactacactcggcgcggtatcagcagtctctgcgatgctatcacacccaaggggttcggccccgagacttccaggtgggagacttggtacttaggctgtggcaggaagcccgagggcgccacaagcttactcctccctgggaagggcccttcatcatcgccaagattttgaagcccggaacatacaagctagccaacgatcaaggcgaggtctacggcaacacttggaacatccaacagctacgtcacttttacccttaa

SEQ ID NO: 23580 - DNA, 1833 bp, Zea mays
  Peptide Sequence Number=SeqID_65359
atgcccggcataccgagggatgtcgccgagcactcgctggatatccgagctggagcccgacccgtgaagcagtctctgcgccgattcgacgaagaaaagcgcagagccataggcgaggagatccacaagctaatggcggcagggttcatcaaagaggcgaaaggcgtaaaactcaatcctgagaagtgtgtcttcggggtcccccaaggcatgctcttggggaaggccgagtgcttcacttggacccctgaggccgaggaggccctcgggaacctgaaggcgctcctcacgaacgcgcccatcttggtgccccccgccgccggagaagtcctcttgatctatgtcgccgctaccactcaggtggttagcgccgcgatcgtggttgagagacgagaagaggggcatgcattgcccatccagaggccagtctacttcatcagtgaggtactgtccgagaccaagatccgctacccacaaattcagaagctgctgtacgcggtgatcctgacgcggcggaagttgcgacactacttccagtctcattcggtaactgtggtgtcatccttccccctgggggagatcatccagtgccgagaggcctcgggtagaattgcaaagtgggtggtggaaatcatgggcgagacgatctcgttcgcccctcggaaggccatcaagtcccaggtcttggcggactttgtggctgaatgggtcgacacccagctcccaacagctctgatccaaccggaactctggaccatgtttttcgacgggtcgctgatgaagacaggagcaggcgcgggcctgctcttcatctcgcccctcgggaagcacctacgctacgtgttacgcctccacttcccggcgtccaacaatgtggccgagtacgaggctctggtcaacgggttgcgcatcgccatcgagctaggggtccgacgcctcgacgctcgcggtgactcgcagctcgtcatcgaccaagtcatgaagaactcccactgccgcgacccgaagatggaagcctactgcgatgaggttcggcgcctggaggacaagttctacgggctcgagctcaaccacatcgcccgacgctacaacgagactccagacgagctggctaagcgatgcatatcgatcgccgaaggccaggagctcttacaagaaatacactcgggggcttgcggtcatcacgtggcgccccgagcccttgttggaaacgccttccgacaaggtttctactggccgaccgcggtggccgacgccactagagttgtccgcacctgccagggatcaggcacctggggctacacgcacctgctggtcgccatcgacaaattctccaagtggatcgaggtccgacccctaaacagcatcaggtccgaacaggcggtggcgttcttcaccaacatcatccatcgctttggggtcccgaactccatcatcaccgacaatggcacccagttcaccggcagaaagttcctggacttctgcgaggatcaccacatccgggtggactgggccgccgtggctcaccccatgatgaatgggcaagtagagcgtgccaacgacatgattctgcaaggactcaagccacggatctacaacgacctcaacaagttcggcaagcgatggatgagggagctcccctcggtggtgggcgacctggtgcttcggctgagacaaaacgcccgagggcggcacaagctcacgcctccttgggaagggccgttcgtcatcgccaaggttgtgaagcccaggatgtacaagttgggcaacagtcagggcgaggtctacagcaacgcttggaacatccgacagctacgtcgcttctacccttaa

SEQ ID NO: 23581 - DNA, 402 bp, Zea mays
  Peptide Sequence Number=SeqID_65360
atggcaagctgcgccaccattgagaactatgtcacctatatagacgtagaaaacatgatagacgaagatctgatggggaaaagacatttatgtatttgtgaaccctacagccaggacactcggatgtatgatactctgtttggggaaaataaatttgtacctgacggacgcggcgtggagcagcgacaactcgcggttggtaacgccggagcctggagcgatggagtcgggatcttgaaggacgcaacagtgcagtgcgaagacgcacggtcgcggagacagcgagactcgaaggtcgcagcggtggagcggggagccggaaccaggatggacgcgcggccacggagacggccacagccagatgggaggcagcgacgtggtttgcagtcgcgagccggctga

SEQ ID NO: 23582 - DNA, 678 bp, Zea mays
  Peptide Sequence Number=SeqID_65361
atgtccagtccatcgtcttcgtcgtcgccgttccagcagatctcacgatcccaaaactactgcatctcaccccctttctttcgagaactctataaagcagcacctgaacacgggaaatcccctcgctcgtgtctcagctactgtggccactcatttgccagcaagtggcattatatatattcgttcctccggccgacggccagtacgtacgtaggcgccgacgagctaggtctcgccgccgccgcctcgctcgcgagagaggccgggccggccgcgcgggggcgggcaagcaagatagaggccgggagcgtgcgcaggaagctgatgaggctgctgtcgttcgtgccctgcggctgccgtgctggacccatcgacgacgcgccgcccacggaccaccacgccaccgcgaggaaccgcaggatcgtcgggaggagggcaaccgccgccaggtcctccgcctctgcggcgcactggcgcccctcgctcggggacatctacgaggactacagcgccgacgcggccagtaataaggccggcgacggcgggccggcgaggggcaggaaagcggcgtcctgggacgtcgcccgggtgctgccccgcgcgcacagcgatgaataccggcaccttgagcgcgcgtcgtccatgccagcgttcgcgccgatggccttccttttctga

SEQ ID NO: 23583 - DNA, 129 bp, Zea mays
  Peptide Sequence Number=SeqID_65362
atgacgcccaccaccatcgtcatcgagcgactctgcaccgctatagtagagcgcctgcgcgctggtggtagacgtgagctcgacaattctttatcttttacttgcttgccagtggcccatgttatatga

SEQ ID NO: 23584 - DNA, 190 bp, Zea mays
  Peptide Sequence Number=SeqID_65363
atgaggaagaagctcggcacccggttccccgcgcatttattccttgagattataacccctggtgtagcgctcaagcagggctgtttgcggatcacagtatttgttttatgccttcaggctcgaatcaaaaagataatgcaagcagatgaggatgttggaaagattgcactagcagttcctgttttagttt

SEQ ID NO: 23585 - DNA, 180 bp, Zea mays
  Peptide Sequence Number=SeqID_65364
atggcgccaccgtcgcgcagagaagcccctatgtttttaagaaaccaacccgcggtccatatctcagtgttctgtgtctcgtggggtcacgaggatttgaagaatcaccctggtaactggaatctcaagtgccaggcaagttgtgcccttgatcactttttacccaataatgttctttaa

SEQ ID NO: 23586 - DNA, 468 bp, Zea mays
  Peptide Sequence Number=SeqID_65365
atgactggaaaacagcgtcgcttgccccgctccgactgttgtgccacccgccagagtaaggttggcaacaaccaagttcagcctcaggcgcaacaggaagctccgcctcgcccgaccttaggcctcagcctcggaaggagatctccgcctcgcccgaccctagggctcggcctcaccctcgacctcggaaggaggactccgcctcgcccgaccccaaggctcgacctcggcctcggagggcgttctccgcctcgcccgaccccagggctcggcctcaacctcaaccttgacctcgggaggaatcgcgtcctcgcccgaccccgacctcggcctcaggaggagtctccgcctcgcccgaccttgggcttggaccgaccacgccacgggggatacatcattaccctacccctagctagctcaggctacgggggaacaggaccgatgtcccatccaggctcgccccggtaa

SEQ ID NO: 23587 - DNA, 519 bp, Zea mays
  Peptide Sequence Number=SeqID_65366
atggatattctcgtggtcgactctaccatgaatatcatgtatccaactgtcatcaaccttttttcgagaagaggaacgccctgcccgcccccacctcccatactggatcgtcatcgcatcgtcggagatcctcctactggtgatcctcgtctgtcgccacagatacacatgaacaaaaccatcgggcagcacagaacttatctctgctccctgtccgcagtaggcctcggtctcctcgccccatccggtctaccatgtgcccgtctcggagaccacagcaaggtctgcgatggcgataagtttggtggcggtgtggatgggtactcccatagcagtggggtagcgggcggtagcacggaggaagctatggtcccaccgcacgagagtgtcacgtctcgcggccacaccatctcgctgctagtgggtgccgagaggactcttaagggctgcaatctctgtaacgttcgtaacgtcgccaggacaagctcgtttggagttgcagtgtgttgccattcatag

SEQ ID NO: 23588 - DNA, 354 bp, Zea mays
  Peptide Sequence Number=SeqID_65367
atggataggcttctagaaaaagataaagtgccaaatccatgctatagagtatggactgaggagggcatgccaatggctgtgaaagctgaccataggagacctcatgccttgtcttgggagcatatcttgttggctcctattgaaggccagcaggaaaaaaagaacttatgtgcttcagctctccgccttagtctaaatggtcaccagagcaagggcaacgcagaatcagataatgttggagtgattgtgaatcccaagggtgatatgaaaggtttctctatcactggacctatcggcaaggagtgtgctgatctttggcctaggattgctagcgcagcaaacgccatcgtttga

SEQ ID NO: 23589 - DNA, 156 bp, Zea mays
  Peptide Sequence Number=SeqID_65368
atggcggcccgcgtgtgggtgaagcttgacgcggtcacgaaggacaaggcttatggcacgatcgaaggtcacgaaggtgctccgaacaagatggtcgtcgtggaggaggacacgtttaaccgctgtcgagcatcatcagccataaccggagcttag

SEQ ID NO: 23590 - DNA, 1092 bp, Zea mays
  Peptide Sequence Number=SeqID_65369
atggcctgctcgatctccgcctccctctctcgcgccgccacagcggcaggcggcagcgtcgtcgtcgtcggcgcccatgaggtgccgttgttgggcgtcgctgccgcagctgatgccgtcactcctcgtggtcgcctgcgtctgctactgatgccgttttcagtctcggcgcagaataaacacgcgaacaggaacagctgccgaaggaggagccctttgccttccccaagaaggcacaagagccgttctccgtctcctaggaggcgcaagagtccgtctccatcacaaaagcgttacagaagaaagagaagtccgagtgtcactagctctccagtcgctgcatctcagagttcccaccttgggttggcagagaataagaatgttattgatacacaaaggctagaagaagaaaagaaaagttgtcagagctgtcttactgagtcatcaggtcatgggttcgaagcaacttctccacatttatgtgggaaggctcgcctcggcttatcccttcacagacgctactcatgtgggagcctccagcattttcctgcatacttgagaaaaaagaagcttgtttctgatcctttttttagtcatgccatgtggcgccaaaaggaagttgaactgagactattagagaaggagacggcaaaaagagttgaacaagctattaggaggaaggttgaggagagtctaaattgtgatgaaatcaaacatgaaatacatcgtcgaattgaggaaggacgaaagaggatacatgaggaggtagcaatccagattgagaaggaaaaggatgcagctttaaatgaagccaagctgaaagtggaacaagaaaaaaagaagcgggaggagctagagaaaaaacttgaagaagaacgaaagaaagctgaagaggcgttgatgaaagaagcgttggaacagcagcagaaagagctagagcggtaccaggagttggagaggcttcagaaagaaagagaggaggccatgaaacggaaaaaaatggaggaagagcagcagaggcaaaaccagatgaagctgctgggcaagaacaagtcgcggcctaagctgtcgtttgcttttgggatgaagtag

SEQ ID NO: 23591 - DNA, 417 bp, Zea mays
  Peptide Sequence Number=SeqID_65370
atgccgggcgacgcctacgacctcctgtgcgccgaggacgacgccgccggcagcgccctgctgtgcaccaccgacgacgacgacgggtgctgctccgctgtcgaggacgactcggcggcggcggcggcggcatccatcgccgagctcatcggcggcgaggcccagtactcgcccaggccggactaccccgacaggctccgctccaggtccatcgacccggccgcccgcgccgagtcggtcgcatggattctcaaggtgcaagaatactatgggtttcttccattgacagcctacctcgccgtcaactacatggaccggttcctctctctccaccgtttgccgtgggaagttgatagtgctgctgttgttggcgcggggaaaagaaagtgtttggaggagcgtgtccgcgtggattaa

SEQ ID NO: 23592 - DNA, 939 bp, Zea mays
  Peptide Sequence Number=SeqID_65371
atgaactccaatagatcatcaaaaatcaagcccttatgggaggggagctgtgacgatgttgacatgtgtgagtttgcagacaaggatgaatatgcaccagtaggatctagctataatcctatgtcagaaccatttgataactgggaaaacaagtttgacacaagcccagagcaaagttctcatgaaccaatggaatttggtgaattggccaaacatgctgaaagcagcataactgagaatgattttacgtgtcctgttgagggaagttgtgaagatgatgtacttacagagtcaaaaataaaggcatttcttgaggagaaggctcttgacctgaaaaagctacaaacacctttgtatgaggagttctacaacactgtgcacggagggagttgccaaacttccaagggaaaattcccaatcagtccaaaattgccccctcgaggaaagtcacctccaagtaagacgaggggaggtgcatgtgacactttgaataacacagctcccgaaagctgcagcaagcaatttcctagaagcagtgtggtggagagcagccgaattttgagagaaattgcttctcctcaacttaatgagtttgctgataaactccatcttgatgcccaagatagcccaaggcctgtgcatgatctaattggaagtattcctgttaacagcatcagcttcaccgaaaggcagaggaagtggaaagaagagttggaccaggaacttgagagggagagagtttttaggaagagcaatgcaggaatcctccgtctgaccgctatcgcagcaaaatcaacccgagaacctccctacacgcatactcacctactgcccttgcccctttcgggtgtggactgcgcgcacttagaacagatagcccaggggctgctacgtaaaaagctcatgactcagagcgccttgctcaggactgcgggttga

SEQ ID NO: 23593 - DNA, 300 bp, Zea mays
  Peptide Sequence Number=SeqID_65372
atggtggtggcttgggtcgaccgtggtagcgctgtggctgcacggaggagggcaggggcggaccgtccggccaaaggcgcggaccgtcaaaaacttggcaatggctataaggggcggaccgtccggccaaaggcgcggaccgtcaaaaacttggcaatggctataaggtggttgatggctataaattcaacccaaccacctccattcaacacatccaagcattccattcatcctcattcaatacaacaacaagcacttcatcccaagacacattcaaatctcccaagctcctccaagtga

SEQ ID NO: 23594 - DNA, 116 bp, Zea mays
  Peptide Sequence Number=SeqID_65373
atgtacgagctaccgtcgtcagcacttggaggatgcgccactactatttatcgagtagctgagctccatactgaccagtcggatatcactagacctctggcgactaccgaggcagc

SEQ ID NO: 23595 - DNA, 1036 bp, Zea mays
  Peptide Sequence Number=SeqID_65374
gaggctcttgctacccttggttgtcaacaagctcagaggatcattgaagattgctgccatcaaagcccctggttttggagagcgcaagactcagtacttggatgatattgccatcctttactggagagatgaagttgggctgtcacttgacaaggctgacaaatcagtccttggaacagcagcaaaggttgtccttactaaagagtcgacaacaattgttggtgatggcagcacccaggacgaagttactaagagggttgcacagattaaaaatctcattgaggcagcagaacaagaatatgaaaaggaaaagctcaatgagaggatagcaaagcttgctggtggtgttgctgtcattcaggtgggagcacaaacagaaactgaactaaaagagaagaagttaagagttgaggatgccctaaatgcaaccaaggctgctgttgaggaaggtattgttgttggtggaggatgcacccttttgcggcttgcagctaaagtcgatgccatcaaggatacactggagaacgatgagcagaaggtcctttctaacgataacttcaagtatggttacaatgctgctactggacagtacgaggacttgatggctgctggtatcattgatcctactaaggtggtgagatgctgtttggagcatgccgcgtcggtggccaagaccttcctgacatctgatgttgtggtcgtcgatattaaggagccagagtctgcgccccttgctaacccgatggacaactctgagagcttcgaaacggctcccaacaagccttctgctcaagcgctccatctagtcgctgcaatggaagacgttgaaaaaaggcttaccgagaagtttcaacaggctatggaggcgtcagtgtcatccatgcacgaactcctgaagaagatggacggtattagcgcagtggccagcaaggttgaagaaattgaaacccgacaagctgatcatggcaaggccacgctcgtgcaaatatcggcctcatctaggcccgcgggatacgatggaaaactgcgttcctag

SEQ ID NO: 23596 - DNA, 408 bp, Zea mays
  Peptide Sequence Number=SeqID_65375
atgggtggtaaggcttcgacatttggtgccacttatactgtcggcataatggttgctccaacagggaagaatgtgcgccttcagaggagggtgaacttcagagtaagagcagctaaggagctgtacttcaacaaggatggctcagctatcaagaagctccagactggagtcaataagcttgcagacctagtcggagttacactcggaccaaagggaaggaatgttgttttggagagcaagtatggttctcctaaaattgttaacgatggtgttacagttgccagagagaaggtcagggccggccctgagggtgtgcagggtatgcgaccgctcagggcccccaagaaaatttgctctaatgtatttagatttgggtttactgtgcattttaaggtttacgcagtttga

SEQ ID NO: 23597 - DNA, 792 bp, Zea mays
  Peptide Sequence Number=SeqID_65376
atgacattttttaatgtggaatccattgatgaggaaggatggaatgatgaaatggtaagtcttgggaaaagagcttcagtggaggttcctggtaaggagggttgtttctttggaaaaggagggaaaaatctagctttgaaagagtgtgaaaactatggttgggcgacatcagagaatcatgatgctattatcactcattctcatgcatccatgggtcaaggaggaaaaaatctgttgaatttggaaatggaaaagagtgggtcaaagatgatgaagctaatagtgaggagaaggtggatttggaggccaatgatgatgacctcctcagttctcaagagttggaagcttttgctaaaggcactgatgagtatatctctcaaggtgggcaaagataagaagagtaaagctaaaggaaaagaaatggtagaaggctttaggaggaggagcaggctagaagcctatgaagatgttaaagttgcggatatggctatatcgcgtgctgaagctaaagatgccttcattcacaaagatgatgatgtgctgattgatctagctaagaatcttgatgtgggtctaggttccaatagctctgaagtccttgaaagtttagctcttattaaatctttagaagcagctagagctaatctaatttttcataatagtaagattttgtctagccataccagtattgataatcagttgcttattcctaagggtgagatctgtcttgaagatcatcattttttagatgacaatagtttggacctaggtgctttcgaccccttggattag

SEQ ID NO: 23598 - DNA, 231 bp, Zea mays
  Peptide Sequence Number=SeqID_65377
atggggctcggtgtatacggctcgctctaccgagggtggattgccccttcgggaggagtgcgagatactttgatcagagatggttggtttacaggtggtgatgaggatgatgtttttgattatattatggtaatagttgcttttggtgcaatctatgctcaggtaaagaaggagaacggtgtcgaggcggatctgtgggagttccaggacttcgacgagtttgaggattag

SEQ ID NO: 23599 - DNA, 231 bp, Zea mays
  Peptide Sequence Number=SeqID_65378
atggggaaggaacagggccagtggtggttctgggtcttaggtgcgagcgtcgcgggggcagttaccgatctcccttgcatcgtggccaatacaaccgtggaagaggttacagggaagaaaatcaagatggcggacgctcatgacaaactgatacaattcttgaggatctttggacctatgggttgggacccacacacgcttctgctgcgccactttgatcttgttggttga

SEQ ID NO: 23600 - DNA, 591 bp, Zea mays
  Peptide Sequence Number=SeqID_65379
atggccttctcccttcattcacttctaccttgcctcgtctacccatcgtcgttgtctcccccagtccgccggccacctcgtcgaatggcgaagggaataaaaatgctgcagtgcatcttcgtcctctccgattccaatgctggcacctcctcgacttccccgcgctcaagctccgaccgttctacccccggcgtgctcgtcttcgccaacgccgtggagccattctacctgctctccgacctattctgcttcctgccttgttccttgttgagctcacgcgcctccgcgcgactgctacctcggaagatgtcatcttcgccagagacgaccaagggggagcaccgggtgcagctcggcttctcgtcctccatcgtggaccagttccttctgcgaccattcctcgttgggatattcttcgacccagcgctcaacaagtcgtcccacctcttcgagcttgtgttcaagtgcctcatcctaggtgagaacatcatgtcggaggacggcatcgacgccatcgtggcgcagctcgcctgcccatgggtgttggggtgggggtttgaagagtggggacaggagcgaagaaggtggtga

SEQ ID NO: 23601 - DNA, 698 bp, Zea mays
  Peptide Sequence Number=SeqID_65380
ggacttggggctttgattggttggagcaagcgactgccgcagctggggacgcaggcaacgacacacaatgtgagcgggtggccaatgacgaagttggggctgcacatgaccagcagagacatggaacgatgcggccacgacggttcggccagcgaacgacatggagtggagccgtgacgcgcagcaagtatcaggcgtggctgggcgcgctgcatagagtaaacaccatggctgaaatgagagaacgagaagcagggcatggccttaccttaggcggcgcaggatgtcacgaccatggatctcgacgcagctcaatggcgtcggaagggttgcttgccggtaggggaggcggtgctggccgagcatggggaagggggcgtcgaccaccaggaactggagaggagaggagtggcggccaccaggaaagatacgacgtcctcgcctccttgctgctggcatggggagatgagggagaggccgtgagcagcgtcggcatggggaaggaacagggccagtggtggttctgggtcttaggcgcgagagtcacgggggcagttaccgatctcccttgcgtcgtggccaatacaaccgtggaagaggttatagggaagaaaatcaagatggcgggtgggccccacggcgctgcgcttgcgcaggcacgggtgcacggccatatggtcggccatgctggatgctag

SEQ ID NO: 23602 - DNA, 270 bp, Zea mays
  Peptide Sequence Number=SeqID_65381
atgaagatcctgagaaggaacgatgtagggtttacagagtcttactctgacaacagagaccttttgctcggcgtcataggtcgtgacgccgagctacctgatgcgctgccacctacatggtcgtatctcggcaccaacgccgagctccttgagaaattactttccagttgcatgtgcttcgttggtgacggttgcagcatagaaatcagcagcatagaaatcaacaatggacgagacagggccatgtgcttgcgtcatagcaatcgatga

SEQ ID NO: 23603 - DNA, 213 bp, Zea mays
  Peptide Sequence Number=SeqID_65382
atggaggaggctctgtggatgttctgcgttctgccacaggtttgctgggaagaagagataatgctttcaggcacagctttacgcattgtagctagcatggatatggtagccttctcttgttgtgtcttcgatgatggtgacaatgagaaaaaggaattggatgcggacagggaaacggttggatatggaaatttactaggccaggacgtgtaa

SEQ ID NO: 23604 - DNA, 147 bp, Zea mays
  Peptide Sequence Number=SeqID_65383
atggaggcggagagtcacgatagtggttcgaggcgcttgttgatggggaagtgtagaaactgtgatgttgacgctaagtccaaggagcggagcccaggccgggctgcctttacaagagagctactggatcgcagcgggtttgagtaa

SEQ ID NO: 23605 - DNA, 267 bp, Zea mays
  Peptide Sequence Number=SeqID_65384
atggccaaggagaaggtggagatgggcagccgagccggctcaaccgagcctcggccatggcaaaaggtcgccacgcgcgaggataacgaggggagaggaagaggggaaagagagaggaagaggggaaggagagaggaaaggggaggggagtgggatggaggttccttccctgggtttggcgtgggcggttggggaaggacgtgggcgagccatggggaagacgcgcgatgcgcgcgacgtgcgcgtgcaggcggcggcggtggctag

SEQ ID NO: 23606 - DNA, 375 bp, Zea mays
  Peptide Sequence Number=SeqID_65385
atggcgaagacgctacccttcgctccagccttcgtcaatctcgctgcaccaacggagtctgtaaccctcctttatgggaatattccgaggatagtccaggagctggctgctgctgagctgccttctttgggtaatgatttgcccaatggccttgttccccacagtggaaacacgcacgacttcctccttgcgctggttggttgttctggttggttgctggggcaggaagacgggctgcctggttgctttgacgctggtattcatttcctccttgctggttgttctgacggtactgctgctgctgctgaggaaactacctctggtactgctgctgctggttctgacgctgatgctggtgctggtgaccttgcttga

SEQ ID NO: 23607 - DNA, 426 bp, Zea mays
  Peptide Sequence Number=SeqID_65386
atggtcgcgttttgggcggcggcgacagccagggtaggcgcgctcgagcgggaaattgtgaggtcgaagcccagcgggccctatacgtcgcgcgggcgagggggcggggtcgcgactgtccatgtcgggactgggcggcgtctagcgacatggaggatacatccgagcgagggcatgagtctgggtgtagacctggaggcgcgcacagggagccggatgcagacagacacggagggaggggcgcagattcgatggagagggggcgaccggcgtagcagcaggaggccggtgggagggagagtcgccggcggctggagatgggtggagccgacggcagctggaaaacagcgtgggcgcggctcaaggacagcggacctcgctagcggcgctggacatgacggaggtcgggcgcgggtgatgaggtga

SEQ ID NO: 23608 - DNA, 252 bp, Zea mays
  Peptide Sequence Number=SeqID_65387
atggctagggttcattcaactgctagattagccactaagggtgaaacacttgataccgttgagacgacccctattgctgaggtgatgagggcatcagaagatcatagcatacttcgtccaaacaagctgagccacattgagtttggtgagtccaccatgaagcctgaagatcttgatgtcctaacaaggcttggatatattggtgagaaggaggatgatatgatcaggtttcccggtagtgaaattatttag

SEQ ID NO: 23609 - DNA, 322 bp, Zea mays
  Peptide Sequence Number=SeqID_65388
atgccgcgaccgtcacctggctagcctcggtcgtgcctggccacgccagctgggccgccggccacctcgaccaagggagcagaggcgggggggcagagcatgctgggcgagctcgctggtgcggctgggtcacacccatggccaaggagaaggtggagatgggcagccgagccggctcaaccgagcctcggccatggcaaaaggtcgccacgcgcgaggataacgaggggagaggaagaggggaaggagagaggaagaggggaaggagagaggaaagtggaggcgacatctatgtagtagtggtcgtttgcgcgtcagcgtg
